United States Patent Application Publication US 2014/0259212 A1 - sequence listing, part 35

SEQ ID NO: 122417 - protein, 470 aa, Nicotiana tabacum
MASVASFISSSSASTSSAVTKNLPFSIISNRQLFKNRVYLLHRIPNASIRSFASTTASSKIRVENPIVEMDGDEMTRVIWTMIKEKLIYPYLELDTKYYDLGILNRDATDDQVTVESAEATLKYNVAVKCATITPDETRVKEFGLKSMWRSPNATIRNILNGTVFREPILCKNVPRIVPGWKKPICIGRHAFGDQYRATDAVINGPGKLKMVFEPENGEAPTELDVYDFKGPGVALAMYNVDQSIRAFAESSMSMAFSKKWPLYLSTKNTILKKYDGRFKDIFEEVYEEKWKQQFEEHSIWYEHRLIDDMVAYALKSGGGYVWACKNYDGDVQSDLLAQGFGSLGLMTSVLLSSDGKTLEAEAAHGTVTRHFRLHQKGQETSTNSVASIFAWARGLGHRAQLDGNQKLSEFVHALEAACVGTIESGKMTKDLAILVHGPKVSREHYLNTEEFIDPVAQKLQEKLGACAVV

SEQ ID NO: 122418 - DNA, 1407 bp, Oryza sativa subsp
  CDS (1)..(1407)
atggctcctctctacggctcctcctcctccgccgccgcgaccaaagccctcctcttaaaccccgccgccgcgcacgccttcgtcccttcttcccccggaccccgcgcgctccgccgcggcggcgcctccctccgctgctatgccgccgccgccgcggcggtggccgagcagcaccgcatcaaggtccacaaccccatcgtcgagatggacggtgacgagatgacgcgggtcatttggaagatgataaaggataagctcatcttcccttacctggagctggatgtcaagtatttcgaccttgggctgctcaaccgggatgccaccgatgataaggtcactgttgagagtgccgaggctacgttggagtataatgttgctgttaagtgtgctaccattacacctgatgaaacaagagttaaagagttcaaactcaagtcaatgtggaggagcccaaatggcaccatcaggaatattctaaatggaactgttttccgggagcccatcttgtgtaaaaatgtaccacggatactttctggctggaagaagcccatttgcattggaaggcatgcatttggagaccagtatcgagctactgatacaataattaatggtccaggaaagcttaaaatggtttttgtcccagatggtgctgaacctgtggagttaaatgtttataattttaaagggcctggtgtggctttatcaatgtataatgtggatgagtctattagagcttttgctgagtcatcaatggcaatggcactttccaaaaaatggcctctttatctcagcaccaagaacacaatattgaagaaatatgatggcaggttcaaggacatcttccaggaggtatatgaagagaaatggaaggagaagttcgaggaaaactcgatatggtatgagcaccggttgattgatgacatggtggcatatgctgtgaaaagtgaaggtggatatgtttgggcttgcaaaaactatgatggagatgttcagagtgacttccttgcccaaggttttggttccttgggtttgatgtcatctgttttgttatcttctgatgggaaaacgttagaagctgaggcagctcatgggactgtcactagacatttcaggctacatcagaagggacaggagacaagtacaaatagcattgcttctatatttgcttggactcgtggactagaacatagagcaaagctggataaaaatgataggctgctggatttcacaaagaaacttgaatctgcatgtattgaaacagttgaatcggggaagatgacaaaggatcttgcactccttatccatggccccaaggtaacaagggagttctaccttaacaccgaagaattcattgacgctgtggctcagcaactgcgagaaaagattcaaataccagctgtggtttaa

SEQ ID NO: 122419 - protein, 468 aa, Oryza sativa subsp
MAPLYGSSSSAAATKALLLNPAAAHAFVPSSPGPRALRRGGASLRCYAAAAAAVAEQHRIKVHNPIVEMDGDEMTRVIWKMIKDKLIFPYLELDVKYFDLGLLNRDATDDKVTVESAEATLEYNVAVKCATITPDETRVKEFKLKSMWRSPNGTIRNILNGTVFREPILCKNVPRILSGWKKPICIGRHAFGDQYRATDTIINGPGKLKMVFVPDGAEPVELNVYNFKGPGVALSMYNVDESIRAFAESSMAMALSKKWPLYLSTKNTILKKYDGRFKDIFQEVYEEKWKEKFEENSIWYEHRLIDDMVAYAVKSEGGYVWACKNYDGDVQSDFLAQGFGSLGLMSSVLLSSDGKTLEAEAAHGTVTRHFRLHQKGQETSTNSIASIFAWTRGLEHRAKLDKNDRLLDFTKKLESACIETVESGKMTKDLALLIHGPKVTREFYLNTEEFIDAVAQQLREKIQIPAVV

SEQ ID NO: 122420 - DNA, 1458 bp, Lupinus albus
  CDS (1)..(1458)
atgataagagcagcttttcgatcaagtgctatctccggcggcgcaaccaccaccactacgatgttttattcttgttcaaactttgtcattaaaaacccttatttcctctttacttcttcaacaactccgtcatccttgaaacacaaccttctttctttctccactgctccctttcatcgggtttcacttcgctgctatgcaacccaccctaacttccataggcttcaagtccttaatccaattgttgaaatggacggtgatgaaatgaccaggattatatggaagatgataaaggataaacttatatttccgtacctggatttaaacataaagtattttgatttgggggttgagaaccgcgatgctaccgatgacagagttactgtcgaaagtgctgaagccactctcaagtacaatgttgctgtgaaatgtgcaacaataactcctgatgagacccgagtcaaagaatttggattgaagtctatgtggagaagccccaatgggacaatcaggaatattttaaatggtactgttttccgtgaacccataatatgccgcaacatacccagaattgttcctgggtggaaaaaacccatatgtattggcagacatgcttttggtgatcagtatcgtgccactgatgcaataattaaaggaccagggaagctgaagttggtatttgtcccagaagatggtgaggctccaacggagcttgatgtttatgatttcaaaggcccaggtgtagcgcttgctatgtataatattgacgagtcaattcgagcttttgcggaatcatcaatgtcattggcatttgcaaagaaatggccactttacttgagcaccaaaaacacaattctcaagaaatatgacggcagatttaaagacatattccaggaggtatatgaagaaaggtggaggcaaaattttgaagaacactcaatatggtatgagcataggctaattgatgacatggtggcatatgcggtcaagagtgaaggtggatatgtttgggcttgcaagaattatgatggtgatgtccaaagtgatttactagctcaaggatttggctcattgggtctcatgacttctgtactgttatcttctgatggtaagacattagaagctgaagcagctcatggaaccgtaactcgacattttcggcttcatcaaaaggggcaggaaactagtacaaacagtattgcttccatatttgcatggacgcgaggactggaacatagggccaagctggataataatgaaaaactaagggatttcacatataagttggaggctgcatgtgttgagacagtggagtctggaaagatgaccaaagatcttgcacttctcattcacggacctaaggtatcaagggaatattacttgaacactgaggaatttattgatgctgtggctcataatcttaagagaaagctccaagagactcctgcattggtctga

SEQ ID NO: 122421 - protein, 485 aa, Lupinus albus
MIRAAFRSSAISGGATTTTTMFYSCSNFVIKNPYFLFTSSTTPSSLKHNLLSFSTAPFHRVSLRCYATHPNFHRLQVLNPIVEMDGDEMTRIIWKMIKDKLIFPYLDLNIKYFDLGVENRDATDDRVTVESAEATLKYNVAVKCATITPDETRVKEFGLKSMWRSPNGTIRNILNGTVFREPIICRNIPRIVPGWKKPICIGRHAFGDQYRATDAIIKGPGKLKLVFVPEDGEAPTELDVYDFKGPGVALAMYNIDESIRAFAESSMSLAFAKKWPLYLSTKNTILKKYDGRFKDIFQEVYEERWRQNFEEHSIWYEHRLIDDMVAYAVKSEGGYVWACKNYDGDVQSDLLAQGFGSLGLMTSVLLSSDGKTLEAEAAHGTVTRHFRLHQKGQETSTNSIASIFAWTRGLEHRAKLDNNEKLRDFTYKLEAACVETVESGKMTKDLALLIHGPKVSREYYLNTEEFIDAVAHNLKRKLQETPALV

SEQ ID NO: 122422 - DNA, 1239 bp, Lupinus albus
  CDS (1)..(1239)
atggcattccagaagatcaacgtcgccaaccccatcgtcgaaatggacggagatgaaatgactcgagttatctggaaatcaatcaaggacaagctcattttgcccttcttggagttggacatcaagtattatgaccttggccttccttaccgtgatgagacagatgacaaagtcacagttgaaagtgctgaagcaactctgaagtacaatgtagcaatcaagtgtgcaactattactccagatgaagcccgtgtgaaggagtttggcctgaagcaaatgtggaagagtccaaatgggacaatcaggaatattttgaacggaactgttttcagagaaccaattctttgcaaaaacatcccccgccttgttcctggttggaacaagccaatatgtattggaagacatgcttttggtgatcaatataaggctactgatgcagtgattaaaggagctggaaaactgaaactggtgtttgtcccagaaggccaaagtgaggcgactgaattagaggtttataatttcactggtgaaggaggtgttgcacaggcgatgtataacactgatgagtctatccgtgcttttgccgatgcttctatgacaactgcttatgagaaaaaatggccactttatcttagcaccaagaatacaattcttaagaaatatgatggaagattcaaggacatctttcaagaagtttatgaagcaagctggaaatcaaactttgaggctgctggtatatggtatgagcatcggctcattgatgatatggtggcatacgcagtcaagagtgatggaggttatgtatgggcatgcaaaaactatgatggagatgttcagagtgatttcttagctcaaggttttggatcactgggcttgatgacatctgtattggtttgccctgatggaaagaccatagaagcagaagcagcccatggcacagttacccgtcattttagggttcatcagaagggaggggaaaccagcacaaacagcatagcatccatctttgcttggagtagggggctagcccacagggcaaaacttgatgacaatgctaaactcttggacttcactaaaaaactagaggaagcttgcattggagcagtagagtctggaaagatgaccaaggatttggcactcattattcatggatccaaactttcaagggagcattatctgaacacagaggagttcattgatgccgtggcaaacgagctcaaagcaaagatttctgcttga

SEQ ID NO: 122423 - protein, 412 aa, Lupinus albus
MAFQKINVANPIVEMDGDEMTRVIWKSIKDKLILPFLELDIKYYDLGLPYRDETDDKVTVESAEATLKYNVAIKCATITPDEARVKEFGLKQMWKSPNGTIRNILNGTVFREPILCKNIPRLVPGWNKPICIGRHAFGDQYKATDAVIKGAGKLKLVFVPEGQSEATELEVYNFTGEGGVAQAMYNTDESIRAFADASMTTAYEKKWPLYLSTKNTILKKYDGRFKDIFQEVYEASWKSNFEAAGIWYEHRLIDDMVAYAVKSDGGYVWACKNYDGDVQSDFLAQGFGSLGLMTSVLVCPDGKTIEAEAAHGTVTRHFRVHQKGGETSTNSIASIFAWSRGLAHRAKLDDNAKLLDFTKKLEEACIGAVESGKMTKDLALIIHGSKLSREHYLNTEEFIDAVANELKAKISA

SEQ ID NO: 122424 - DNA, 1239 bp, Lupinus albus
  CDS (1)..(1239)
atggcattccagaagatcaacgtcgccaatcccatcgttgagatggacggagatgaaatgactcgagttatctggaaatcaatcaaggataagctcatttttcccttcttggagttggacatcaagtattatgaccttggccttccttaccgtgacgagacagatgataaagtcactgttgaaagtgctgaagcaactctgaagtataatgtagcaatcaagtgtgcaactattactccagatgagggccgtgtgaaggaatttggcctgaagcaaatgtggaggagtccaaatgggacaattaggaacattttgaatggaactgttttcagagaaccaattctttgcaaaaacatcccccgccttcttcctggctggaacaagccaatatgtattggaagacatgcttttggtgatcaatatcgggcgactgactcagtgattaaaggagctggaaaactaaaactggtgtttgtcccagaaggccaaagtgaggcgactgaattagaagtttataatttcactggtgaaggaggtgttgcattggctatgtataacaccgacgagtctatccgtgcttttgctgaggcttctatgacaactgcttatgagaaaaaatggccactttatcttagcaccaaaaatacaattctgaagaaatatgatggaagattcaaggacatctttcaagaagtttatgaagcaagctggaaatcgaagtttgaggctgctggtatatggtatgaacatcggctcatcgatgatatggtggcatacgcagtcaaaagtgatggaggttatgtatgggcatgcaaaaactatgatggagatgtccagagtgatttcttagcacaaggttttggttcactgggcttgatgacatctgtattggtttgccctgatgggaaaactatagaatcagaagcagcccatggcacagttacccgtcattttagggttcatcagaagggaggggaaaccagcacaaacagcatagcatccatctttgcttggagtaggggtctagcccacagggcaaaacttgatgacaatgctaaactcttggatttcactcaaaaactagaggcagcttgcattggagcagtagagtctgggaagatgaccaaggatctggcactcattcttcatggatccaagctttcaagggagcactatctgaacacagaggagttcattgatgctgtggcaaacgagctcaaagcaaggctttctgcttag

SEQ ID NO: 122425 - protein, 412 aa, Lupinus albus
MAFQKINVANPIVEMDGDEMTRVIWKSIKDKLIFPFLELDIKYYDLGLPYRDETDDKVTVESAEATLKYNVAIKCATITPDEGRVKEFGLKQMWRSPNGTIRNILNGTVFREPILCKNIPRLLPGWNKPICIGRHAFGDQYRATDSVIKGAGKLKLVFVPEGQSEATELEVYNFTGEGGVALAMYNTDESIRAFAEASMTTAYEKKWPLYLSTKNTILKKYDGRFKDIFQEVYEASWKSKFEAAGIWYEHRLIDDMVAYAVKSDGGYVWACKNYDGDVQSDFLAQGFGSLGLMTSVLVCPDGKTIESEAAHGTVTRHFRVHQKGGETSTNSIASIFAWSRGLAHRAKLDDNAKLLDFTQKLEAACIGAVESGKMTKDLALILHGSKLSREHYLNTEEFIDAVANELKARLSA

SEQ ID NO: 122426 - DNA, 1233 bp, Arabidopsis thaliana
  CDS (1)..(1233)
atggcgtttgagaagatcaaggtggcaaatcccatcgtcgagatggatggtgatgaaatgaccagggttatttggaagtctatcaaggataagcttattactccttttgtggagttggatatcaagtacttcgaccttggtcttcctcaccgtgatgctacggatgacaaagttactattgaaagtgctgaagctactaagaagtacaatgtggcgatcaagtgtgccaccatcactccagatgaaggccgtgtcacggaatttggcttgaagcagatgtggagaagtccaaatgggaccatcaggaatatcctgaatggaactgtatttagagagccaattatctgcaaaaatgttcccaagcttgtcccaggctggacaaagcccatctgcattggaaggcatgcttttggtgatcagtaccgtgccactgatgctgtaatcaagggaccaggaaaactgactatgacctttgagggaaaagatgggaaaactgaaaccgaagtctttacatttactggtgaaggtggtgttgctatggcaatgtacaacactgatgagtccatccgtgcttttgctgatgcatcgatgaacactgcttatgagaaaaagtggccactttaccttagcacaaagaataccattcttaagaaatacgatggcagattcaaagacatcttccaagaagtctatgaagccagctggaagtcgaagtatgatgctgctggaatctggtatgaacaccgtctcattgatgatatggtggcctacgctcttaagagtaagggaggctatgtttgggcatgcaaaaactatgatggtgatgtccaaagtgatttcttggcacaaggatttgggtcacttggattgatgacatctgttctggtctgcccagatggaaagacgattgaagctgaagcggcccatggaactgtcacccgtcacttcagggttcatcagaaagctggtgagaccagcacaaacagcatagcctctattttcgcttggactcgtggacttgcacacagggctaagttagatgacaacgcaaaactcttggatttcactgagaagctggaagccgcttgtgttgggacagtggagtcagggaaaatgaccaaagatcttgcactcatcattcacggctcaaagctttcgagggacacgtacctgaacaccgaggagttcatcgatgcagtcgctgctgagctcaaagaaagactcaatgcttaa

SEQ ID NO: 122427 - protein, 410 aa, Arabidopsis thaliana
MAFEKIKVANPIVEMDGDEMTRVIWKSIKDKLITPFVELDIKYFDLGLPHRDATDDKVTIESAEATKKYNVAIKCATITPDEGRVTEFGLKQMWRSPNGTIRNILNGTVFREPIICKNVPKLVPGWTKPICIGRHAFGDQYRATDAVIKGPGKLTMTFEGKDGKTETEVFTFTGEGGVAMAMYNTDESIRAFADASMNTAYEKKWPLYLSTKNTILKKYDGRFKDIFQEVYEASWKSKYDAAGIWYEHRLIDDMVAYALKSKGGYVWACKNYDGDVQSDFLAQGFGSLGLMTSVLVCPDGKTIEAEAAHGTVTRHFRVHQKAGETSTNSIASIFAWTRGLAHRAKLDDNAKLLDFTEKLEAACVGTVESGKMTKDLALIIHGSKLSRDTYLNTEEFIDAVAAELKERLNA

SEQ ID NO: 122428 - DNA, 1233 bp, Cucumis sativus
  CDS (1)..(1233)
atggctttccagaagatcaaggtcgccaatcccatcgttgagatggacggagatgaaatgactcgagttatctgggagtcaattaagaataagcttattttcccatttttggaattggacatcaagtattttgaccttggccttccacaccgtgatgccacagatgataaagttacaattgaaagtgcagaagctactttaaagtacaatgtagcaatcaaatgtgcaacaattactccagatgaggcacgtgttaaggaatttggcttgaagcagatgtggagaagtccaaatggaacaatcaggaatattctgaatggaactgtcttcagagaaccgattctttgcaaaaatgttcctcgccttgtaccaggttggacgaagcctatctgtattggaagacatgcttttggtgatcaatacagagctactgatacagtcatcagaggacctgggaaattgaaattagtttttgaggggcaggagacgcaagagatagaggttttcaatttcactggtgctggaggagttgcgttagccatgtataacactgatgagtccatccgatcttttgctgaggcatcaatggccactgcttatgagaagaaatggcccctttaccttagcacaaaaaatactattctaaagaaatacgatggaagattcaaggatatattccaagaagtctacgaatctcagtggaaatcaaagtttgaggctgctggcatatggtatgaacaccgtctcatcgatgatatggtggcttatgcccttaagagtgaaggaggttatgtctgggcatgcaagaactatgatggagatgttcagagtgatttcttagctcaaggatttggatctcttggcttgatgacttctgtattggtttgtcctgatggaaaaacaattgaagcagaagcagctcatggcactgttacacgacattttagggttcatcaaaaaggtggtgaaaccagcacaaacagcatagcatccatctttgcttggtctcgtggccttgctcacagggctaaactagatgacaatgctagtctcttagagttcaccgagaaactagaattggcttatatcgatactgtggaatctggaaagatgaccaaggatcttgctcttatccttcatggatccaagctttctcgtgaccaatatctgaatactgaggagttcattgatgctgttgctgaggaactaaaatccagactcctcaaggcatag

SEQ ID NO: 122429 - protein, 410 aa, Cucumis sativus
MAFQKIKVANPIVEMDGDEMTRVIWESIKNKLIFPFLELDIKYFDLGLPHRDATDDKVTIESAEATLKYNVAIKCATITPDEARVKEFGLKQMWRSPNGTIRNILNGTVFREPILCKNVPRLVPGWTKPICIGRHAFGDQYRATDTVIRGPGKLKLVFEGQETQEIEVFNFTGAGGVALAMYNTDESIRSFAEASMATAYEKKWPLYLSTKNTILKKYDGRFKDIFQEVYESQWKSKFEAAGIWYEHRLIDDMVAYALKSEGGYVWACKNYDGDVQSDFLAQGFGSLGLMTSVLVCPDGKTIEAEAAHGTVTRHFRVHQKGGETSTNSIASIFAWSRGLAHRAKLDDNASLLEFTEKLELAYIDTVESGKMTKDLALILHGSKLSRDQYLNTEEFIDAVAEELKSRLLKA

SEQ ID NO: 122430 - DNA, 1233 bp, Arabidopsis thaliana
  CDS (1)..(1233)
atggcgtttgagaagatcaaggtggcaaatcccatcgtcgagatggatggtgatgaaatgaccagggttatttggaagtctatcaaggataagcttattactccttttgtggagttggatatcaagtacttcgaccttggtcttcctcaccgtgatgctacggatgacaaagttactattgaaagtgctgaagctactaagaagtacaatgtggcgatcaagtgtgccaccatcactccagatgaaggccgtgtcacggaatttggcttgaagcagatgtggagaagtccaaatgggaccatcaggaatatcctgaatggaactgtatttagagagccaattatctgcaaaaatgttcccaagcttgtcccaggctggacaaagcccatctgcattggaaggcatgcttttggtgatcagtaccgtgccactgatgctgtaatcaagggaccaggaaaactgactatgacctttgagggaaaagatgggaaaactgaaaccgaagtctttacatttactggtgaaggtggtgttgctatggcaatgtacaacactgatgagtccatccgtgcttttgctgatgcatcgatgaacactgcttatgagaaaaagtggccactttaccttagcacaaagaataccattcttaagaaatacgatggcagattcaaagacatcttccaagaagtctatgaagccagctggaagtcgaagtatgatgctgctggaatctggtatgaacaccgtctcattgatgatatggtggcctacgctcttaagagtgagggaggctatgtttgggcatgcaaaaactatgatggtgatgtccaaagtgatttcttggcacaaggattcgggtcacttggattgatgacatctgttctggtctgcccagatggaaagacgattgaagctgaagcggcccatggaactgtcacccgtcacttcagggttcatcagaaaggtggtgagaccagcacaaacagcatagcctctatttttgcttggactcgtggacttgcacacagggctaagttagatgacaacgcaaaactcttggatttcactgagaagctggaagccgcttgtgttgggacagtggagtcagggaaaatgaccaaagatcttgcactcatcattcacggctcaaagctttcgagggacacgtacctgaacacagaggatttcatcgatgcagtcgctgctgagctcaaagaaagactcaatgcttaa

SEQ ID NO: 122431 - protein, 410 aa, Arabidopsis thaliana
MAFEKIKVANPIVEMDGDEMTRVIWKSIKDKLITPFVELDIKYFDLGLPHRDATDDKVTIESAEATKKYNVAIKCATITPDEGRVTEFGLKQMWRSPNGTIRNILNGTVFREPIICKNVPKLVPGWTKPICIGRHAFGDQYRATDAVIKGPGKLTMTFEGKDGKTETEVFTFTGEGGVAMAMYNTDESIRAFADASMNTAYEKKWPLYLSTKNTILKKYDGRFKDIFQEVYEASWKSKYDAAGIWYEHRLIDDMVAYALKSEGGYVWACKNYDGDVQSDFLAQGFGSLGLMTSVLVCPDGKTIEAEAAHGTVTRHFRVHQKGGETSTNSIASIFAWTRGLAHRAKLDDNAKLLDFTEKLEAACVGTVESGKMTKDLALIIHGSKLSRDTYLNTEDFIDAVAAELKERLNA

SEQ ID NO: 122432 - DNA, 1233 bp, Arabidopsis thaliana
  CDS (1)..(1233)
atggcgtttgagaagatcaaggtggcaaatcccatcgtcgagatggatggtgatgaaatgaccagggttatttggaagtctatcaaggataagcttattactccttttgtggagttggatatcaagtacttcgaccttggtcttcctcaccgtgatgctacggatgacaaagttactattgaaagtgctgaagctactaagaagtacaatgtggcgatcaagtgtgccaccatcactccagatgaaggccgtgtcacggaatttggcttgaagcagatgtggagaagtccaaatgggaccatcaggaatatcctgaatggaactgtatttagagagccaattatctgcaaaaatgttcccaagcttgtcccaggctggacaaagcccatctgcattggaaggcatgcttttggtgatcagtaccgtgccactgatgctgtaatcaagggaccaggaaaactgactatgacctttgagggaaaagatgggaaaactgaaaccgaagtctttacatttactggtgaaggtggtgttgctatggtaatgtacaacactgatgagtccatccgtgcttttgctgatgcatcgatgaacactgcttatgagaaaaagtggccactttaccttagcacaaagaataccattcttaagaaatacgatggcagattcaaagacatcttccaagaagtctatgaagccagctggaagtcgaagtatgatgctgctggaatctggtatgaacaccgtctcattgatgatatggtggcctacgctcttaagagtgagggaggctatgtttgggcatgcaaaaactatgatggtgatgtccaaagtgatttgttggcacaaggattcgggtcacttggattgatgacatctgttctggtctgcccagatggaaagtcgattgaagctgaagcggcccatggaactgtcacccgtcacttcagggttcatcagaaaggtggtgagaccagcacaaacagcatagcctctatttttgcttggactcgtggacttgcacacagggctaagttagatgacaacgcaaaactcttggatttcactgagaagctggaagccgcttgtgttgggacagtggagtcagggaaaatgaccaaagatcttgcactcatcattcacggctcaaagctttcgagggacacgtacctgaacacagaggagttcatcgatgcagtcgctgctgagctcaaagaaagactcaatgcttaa

SEQ ID NO: 122433 - protein, 410 aa, Arabidopsis thaliana
MAFEKIKVANPIVEMDGDEMTRVIWKSIKDKLITPFVELDIKYFDLGLPHRDATDDKVTIESAEATKKYNVAIKCATITPDEGRVTEFGLKQMWRSPNGTIRNILNGTVFREPIICKNVPKLVPGWTKPICIGRHAFGDQYRATDAVIKGPGKLTMTFEGKDGKTETEVFTFTGEGGVAMVMYNTDESIRAFADASMNTAYEKKWPLYLSTKNTILKKYDGRFKDIFQEVYEASWKSKYDAAGIWYEHRLIDDMVAYALKSEGGYVWACKNYDGDVQSDLLAQGFGSLGLMTSVLVCPDGKSIEAEAAHGTVTRHFRVHQKGGETSTNSIASIFAWTRGLAHRAKLDDNAKLLDFTEKLEAACVGTVESGKMTKDLALIIHGSKLSRDTYLNTEEFIDAVAAELKERLNA

SEQ ID NO: 122434 - DNA, 1245 bp, Prunus persica
  CDS (1)..(1245)
atggctttccagaagatcaaggtggccaaccccatcgtggagatggacggagatgaaatgacgcgagttttctggaaatccataaaggataagcttattttaccctttttggaattggacatcaagtactttgaccttggtcttcctcatcgtgatgccactgatgataaagttactgttgaaagtgcagaggctactcttaagtacaatgtagcaatcaaatgtgcaactatcactccagatgaaggtcgtgttaaggagtttaacttgaagagtatgtggaggagtcccaatggcactattaggaatattttgaatggtactgttttcagagaaccaattctttgcaaaaacatccctcgccttatcccaggctggacaaagccaatatgcattggaagacatgctttcggtgatcagtatcgagcaactgatgctgtcattaaaggacctgggaaactgaaattggtgtttgtgccagacggaaaggatgagaaaacagaactagaggtgtacaacttcacaggtgaggggggagtagcattggccatgtacaacactgatgagtccatccgtgcttttgcagaggcttccatgaccactgcttatgagaaaaagtggcctctttatcttagcacaaagaacactattcttaagaagtatgatggaagattcaaggacatatttcaagaagtttatgaagccaagtggaagtcacagtatgaggctgctggcatatggtacgagcaccgtctcattgatgatatggtggcttatgcacttaaaagtgatggtgggtatgtttgggcatgcaagaattatgatggagatgtgcagagtgatttcttagctcaagggtttggctctcttggattgatgacatcagtactggtgtgcccagatggaaagactatagaagcagaagctgcccacggtacagttactcggcattacagggttcaccagaaaggaggtgaaaccagtacaaacagcatagcttctatctttgcttggacaagagggcttgcacacagggcaaagttggatgacaatgcaaagcttttggatttcactcagaaactggaagaagcttgcattggaactgtggaatctgggaaaatgaccaaggatcttgcactcattattcatggacctaagcttgctaggaaccactacttgaatacggaagagttcattgaagctgtggcagaggaactcagagcaaggctttctttgaaagaatag

SEQ ID NO: 122435 - protein, 414 aa, Prunus persica
MAFQKIKVANPIVEMDGDEMTRVFWKSIKDKLILPFLELDIKYFDLGLPHRDATDDKVTVESAEATLKYNVAIKCATITPDEGRVKEFNLKSMWRSPNGTIRNILNGTVFREPILCKNIPRLIPGWTKPICIGRHAFGDQYRATDAVIKGPGKLKLVFVPDGKDEKTELEVYNFTGEGGVALAMYNTDESIRAFAEASMTTAYEKKWPLYLSTKNTILKKYDGRFKDIFQEVYEAKWKSQYEAAGIWYEHRLIDDMVAYALKSDGGYVWACKNYDGDVQSDFLAQGFGSLGLMTSVLVCPDGKTIEAEAAHGTVTRHYRVHQKGGETSTNSIASIFAWTRGLAHRAKLDDNAKLLDFTQKLEEACIGTVESGKMTKDLALIIHGPKLARNHYLNTEEFIEAVAEELRARLSLKE

SEQ ID NO: 122436 - DNA, 1242 bp, Emericella nidulans
  CDS (1)..(1242)
atggcgactgaagtacagaagatcaaggtcaagaaccccgtcgtggagttggacggtgatgagatgacccgcattatctggaaggagatcagggaaaagttgatcttgcctttcctcgatattgacctcaagtactacgacctgggtcttgagtaccgtgaccagaccgatgacaaggtcaccaccgagtccgctgaggccatcaagaagtatggtgtcggtgtcaagtgcgccaccatcactcctgatgaggcccgtgttgaggagttcaagctgaagaagatgtggctgtctcctaacggtactatccgtaacatccttggcggtactgtcttccgtgagcccattgtcattcctcgcattcctcgcctcgtccccggatggactaagcccatcatcatcggtcgtcatgctttcggtgaccagtaccgtgctaccgaccgtgtgatccctgggcctggcaagcttgagctcgtctacacccccgagggcggccagcctgaggctatcaaggtctttgatttccctggcggtggtgttacccagactcagtacaacaccgatgagtcgattcgcggcttcgcccacgccagtttcaagcttgccttgactaagggccttcctctctacatgagcaccaagaacactattctgaagaagtacgatggccgcttcaaggacatcttccaagagatcttcgagtccgactacaagaaggaatttgatgccaagggcatctggtacgagcaccgtctcattgatgacatggtcgctcaaatgatcaagagcgagggtggtttcatcatggctttgaagaactacgatggtgacgttcagtccgacattgttgcccagggcttcggctccctgggtctgatgacctccacactcatcacccctgacggccaggcctttgagtctgaagctgcccacggcaccgtcacccgtcactaccgcgagcaccagaagggccgcgagacctccaccaaccccattgcctccatcttcgcctggacccgtggtcttatccagcgtggtaagctcgacgaaacccccgacgttgtcaagttcgccgaggagctcgagcgcgcttgtatcgatgttgtcaacgaggagggtatcatgaccaaggaccttgctctgtcctgcggccgcaaggagcgcgacgcgtgggttaccacccgcgagtacatggctgccgtcgagcgccgactcagggcaaacttgaaggcccgtctatag

SEQ ID NO: 122437 - protein, 413 aa, Emericella nidulans
MATEVQKIKVKNPVVELDGDEMTRIIWKEIREKLILPFLDIDLKYYDLGLEYRDQTDDKVTTESAEAIKKYGVGVKCATITPDEARVEEFKLKKMWLSPNGTIRNILGGTVFREPIVIPRIPRLVPGWTKPIIIGRHAFGDQYRATDRVIPGPGKLELVYTPEGGQPEAIKVFDFPGGGVTQTQYNTDESIRGFAHASFKLALTKGLPLYMSTKNTILKKYDGRFKDIFQEIFESDYKKEFDAKGIWYEHRLIDDMVAQMIKSEGGFIMALKNYDGDVQSDIVAQGFGSLGLMTSTLITPDGQAFESEAAHGTVTRHYREHQKGRETSTNPIASIFAWTRGLIQRGKLDETPDVVKFAEELERACIDVVNEEGIMTKDLALSCGRKERDAWVTTREYMAAVERRLRANLKARL

SEQ ID NO: 122438 - DNA, 1482 bp, Emericella nidulans
  CDS (1)..(1482)
atgtcgtcggttcggttcacttccgcattggctcgccgctccctcaactcccctcttctgccctgcggtgcccctcccatttcctccgctcttcgctctttctcttctgcttcttattctgctttctcttcttcttcttcttcttttccctcaccatccagcgctcgcgctctcgcatccactgctcgcatctcccgtcccgcagctactcgttctctataccgcgttcaaacccgcaccatggcgactgaagtacagaagatcaaggtcaagaaccccgtcgtggagttggacggtgatgagatgacccgcattatctggaaggagatcagggaaaagttgatcttgcctttcctcgatattgacctcaagtactacgacctgggtcttgagtaccgtgaccagaccgatgacaaggtcaccaccgagtccgctgaggccatcaagaagtatggtgtcggtgtcaagtgcgccaccatcactcctgatgaggcccgtgttgaggagttcaagctgaagaagatgtggctgtctcctaacggtactatccgtaacatccttggcggtactgtcttccgtgagcccattgtcattcctcgcattcctcgcctcgtccccggatggactaagcccatcatcatcggtcgtcatgctttcggtgaccagtaccgtgctaccgaccgtgtgatccctgggcctggcaagcttgagctcgtctacacccccgagggcggccagcctgaggctatcaaggtctttgatttccctggcggtggtgttacccagactcagtacaacaccgatgagtcgattcgcggcttcgcccacgccagtttcaagcttgccttgactaagggccttcctctctacatgagcaccaagaacactattctgaagaagtacgatggccgcttcaaggacatcttccaagagatcttcgagtccgactacaagaaggaatttgatgccaagggcatctggtacgagcaccgtctcattgatgacatggtcgctcaaatgatcaagagcgagggtggtttcatcatggctttgaagaactacgatggtgacgttcagtccgacattgttgcccagggcttcggctccctgggtctgatgacctccacactcatcacccctgacggccaggcctttgagtctgaagctgcccacggcaccgtcacccgtcactaccgcgagcaccagaagggccgcgagacctccaccaaccccattgcctccatcttcgcctggacccgtggtcttatccagcgtggtaagctcgacgaaacccccgacgttgtcaagttcgccgaggagctcgagcgcgcttgtatcgatgttgtcaacgaggagggtatcatgaccaaggaccttgctctgtcctgcggccgcaaggagcgcgacgcgtgggttaccacccgcgagtacatggctgccgtcgagcgccgactcagggcaaacttgaaggcccgtctatag

SEQ ID NO: 122439 - protein, 493 aa, Emericella nidulans
MSSVRFTSALARRSLNSPLLPCGAPPISSALRSFSSASYSAFSSSSSSFPSPSSARALASTARISRPAATRSLYRVQTRTMATEVQKIKVKNPVVELDGDEMTRIIWKEIREKLILPFLDIDLKYYDLGLEYRDQTDDKVTTESAEAIKKYGVGVKCATITPDEARVEEFKLKKMWLSPNGTIRNILGGTVFREPIVIPRIPRLVPGWTKPIIIGRHAFGDQYRATDRVIPGPGKLELVYTPEGGQPEAIKVFDFPGGGVTQTQYNTDESIRGFAHASFKLALTKGLPLYMSTKNTILKKYDGRFKDIFQEIFESDYKKEFDAKGIWYEHRLIDDMVAQMIKSEGGFIMALKNYDGDVQSDIVAQGFGSLGLMTSTLITPDGQAFESEAAHGTVTRHYREHQKGRETSTNPIASIFAWTRGLIQRGKLDETPDVVKFAEELERACIDVVNEEGIMTKDLALSCGRKERDAWVTTREYMAAVERRLRANLKARL

SEQ ID NO: 122440 - DNA, 1398 bp, Arabidopsis thaliana
  CDS (1)..(1398)
atgttatcttcttcaacctctgctggtttatcgtcttcgttcgtttcttcgagatttcttagttccggtatattctctagtggcgcttcgaggaatcgcgtgacttttcccgttcagtttcatcgcgcatcagctgttcgatgttttgcttcttcaggcggttctgatagaattcaggttcagaatcctatcgttgaaatggatggcgatgaaatgacgagggtgatatggagtatgataaaggagaaacttattcttccttatctggatttggacattaagtacttcgacttggggattctgaatcgcgatgctactgatgacaaggttacagttgaaagtgcagaagcagctcttaagtacaatgttgctatcaaatgtgccactataactcctgatgagggtagagtgaaggagtttggactgaaatcaatgtggaggagtcctaatgggacgatcagaaacattctagatggaaccgtattccgtgaacctattatgtgcagcaatatcccccggcttgttcctggttgggaaaagcctatatgcattggtagacatgcctttggtgaccagtatcgtgccactgatacagtaattaaagggccaggaaagttgaaaatggtttttgaagatggaaacgcacctgtggagctagatgtatatgatttcaagggcccaggtgtcgcacttgctatgtacaacgtagatgagtcaattagagcttttgctgagtcatctatggcgatggcattaactaagaaatggccattatacttgagcaccaagaacacaattctcaagaaatatgatggcagatttaaggacatatttcaagaagtttatgaggcgaattggaagcaaaagtttgaagagcactcaatctggtacgagcaccggttgattgatgacatggtggcttacgcagtcaaaagtgaaggtggctatgtctgggcttgcaaaaactacgacggtgatgttcaaagcgatcttcttgcccaagggtttggctcattaggcctcatgacctccgttttgctgtccgctgatgggaaaacactcgagtcggaagcggctcatggaacagtaactcggcatttccgactgcaccaaaagggacaagaaaccagtactaacagcatagcctcaatatttgcatggacacgcggcttagaacacagggcgaaactggataagaacgagaaattaatggatttcgtgaagaagctcgagtcgtcatgtgtaaacactgttgagacagggaaaatgaccaaggatcttgcccttttaatccatggtcccaaggtgagtagggatttgtttttgaacacggaagagttcattgatgcagtagcctccaagctcaaaacacagttcaaagagcttcctcttgtctga

SEQ ID NO: 122441 - protein, 465 aa, Arabidopsis thaliana
MLSSSTSAGLSSSFVSSRFLSSGIFSSGASRNRVTFPVQFHRASAVRCFASSGGSDRIQVQNPIVEMDGDEMTRVIWSMIKEKLILPYLDLDIKYFDLGILNRDATDDKVTVESAEAALKYNVAIKCATITPDEGRVKEFGLKSMWRSPNGTIRNILDGTVFREPIMCSNIPRLVPGWEKPICIGRHAFGDQYRATDTVIKGPGKLKMVFEDGNAPVELDVYDFKGPGVALAMYNVDESIRAFAESSMAMALTKKWPLYLSTKNTILKKYDGRFKDIFQEVYEANWKQKFEEHSIWYEHRLIDDMVAYAVKSEGGYVWACKNYDGDVQSDLLAQGFGSLGLMTSVLLSADGKTLESEAAHGTVTRHFRLHQKGQETSTNSIASIFAWTRGLEHRAKLDKNEKLMDFVKKLESSCVNTVETGKMTKDLALLIHGPKVSRDLFLNTEEFIDAVASKLKTQFKELPLV

SEQ ID NO: 122442 - DNA, 1413 bp, Solanum tuberosum
  CDS (1)..(1413)
atggccggcgttgcttcttttgtctcatcttcatcggcttctgcatcatctatagctagtaaaaaactctattttcaagtcaattccaatcggcagctcttcaatagcagagtatctctcactacgcgaatccctaatgcctcaattcggtgcttcgcttcttcctctggtccgactagcaaaattcgcgttcaaaatcccatcgtcgaaatggacggtgatgaaatgacgagggttatatggaaaatgatcaaagacaagctaatatatccttatctagagttggatacaaagtattatgatttaggtatattgaaccgtgatgccactgatgaccaagttactgttgaaagtgctgaggcaaccctgaagtacaatgttgctgtgaaatgcgctactataacacctgatgagaccagagtcaaggaatttgggctgaagtctatgtggaaaagtcccaatggcacaatcagaaacattttaaacggtactgttttccgggagcctatactatgcacgaacattcccaggattgttcctggttggaagaaacccatttgtattggtaggcatgcttttggtgatcagtatcgtgccacagatcgaattattaatgggcccggaaagctcaaaatggtttttgtgccagaaaatggggaatcccctatggagctggatgtttatgattttaaaggtccgggtattgcacttgccatgtacaatgttgaccagtcaattcgagcgtttgctgaatcatcaatgtcaatggcattttcaaagaaatggcctctttacttgagtacaaaaaacacaattttaaagaaatacgatggaaggtttaaggacatttttcaagaggtatacgaagagaagtggaagcaacagtttgaggaacactctatatggtatgagcatagactgatagatgacatggtagcttatgcattaaaaagtgagggtggatatgtttgggcatgcaagaactatgatggagatgtccagagtgatttgctcgctcaaggatttggttctctgggcctcatgacttctatattgttatcttctgatggcaagacattagaagctgaagcagctcacggcactgtaacaatacattttcggctgcatcaaaagggtcaagaaactagtacaaacagtgttgcttccatttttgcatggacaaagggacttggacatagggctcagcttgatgggaatcaaaagttgttggaatttgttcacacccttgaagcttcttgcattgggacaatagaatccgggaagatgactaacttagctatattagctcatggatccaaggtgtcaagagaattctacttgaacactgaagagtttattgatgctgtagcacagaaacttcaagagaagcttcatgcctcggtgcctatttaa

SEQ ID NO: 122443 - protein, 470 aa, Solanum tuberosum
MAGVASFVSSSSASASSIASKKLYFQVNSNRQLFNSRVSLTTRIPNASIRCFASSSGPTSKIRVQNPIVEMDGDEMTRVIWKMIKDKLIYPYLELDTKYYDLGILNRDATDDQVTVESAEATLKYNVAVKCATITPDETRVKEFGLKSMWKSPNGTIRNILNGTVFREPILCTNIPRIVPGWKKPICIGRHAFGDQYRATDRIINGPGKLKMVFVPENGESPMELDVYDFKGPGIALAMYNVDQSIRAFAESSMSMAFSKKWPLYLSTKNTILKKYDGRFKDIFQEVYEEKWKQQFEEHSIWYEHRLIDDMVAYALKSEGGYVWACKNYDGDVQSDLLAQGFGSLGLMTSILLSSDGKTLEAEAAHGTVTIHFRLHQKGQETSTNSVASIFAWTKGLGHRAQLDGNQKLLEFVHTLEASCIGTIESGKMTNLAILAHGSKVSREFYLNTEEFIDAVAQKLQEKLHASVPI

SEQ ID NO: 122444 - DNA, 1245 bp, Citrus limon
  CDS (1)..(1245)
atggcttttcagaagatcaaggtcgccaatcccatcgttgaaatggacggagatgaaatgactcgagttttctggaaatcgattaaggataagcttattttcccttttctggagttggacataaagtacttcgaccttggccttccgaatcgtgatgcaactgatgacaaagttaccgttgaaagtgcagaagccactctcaagtacaatgtagcgatcaagtgtgctactattactccagatgaagctcgtgttaaggaatttgtcttgaaacagatgtggaagagtccaaatgggacaatcaggaatattttgaatggcactgttttcagagaaccaatcatttgcaaaaatgtccctcggcttattccaggctggacaaagcccatatgcattggcaggcatgcttttggtgatcaatatcgagcaactgatacagttattcaaggacctggcaaacttaaattggtgtttgtaccagagggaaaagatgagaagacagagttagaggtttacaactttacgggtgagggtggagttgcattgtccatgtataacactgatgagtccatccgaagttttgctgaggcttctatgaacactgcctatcaaaaaaagtggccactctatcttagtacaaaaaacactatccttaaaaattatgatggaaaattcaaagacatatttcaagaggtttatgaggcaaactggaagtcaaagtttgaagctgctggcatatggtatgaacatcgtctcattgatgatatggtagcttatgctctcaaaagtgaaggaggttacgtgtgggcttgcaaagattatgatggaaatgtccaaagtgatttcctagctcaagggtttggatctcttggattgatgacatctgtactggtatgccctgatgggaaaacaattgaagccgaagcagcccatggaacagtcacccgacactacagagttcatcagaaaggtggtgaaactagcacaaacagcatagcctccatctttgcttggtcacgagggcttgcacatagggcgaagttggacaacaatgctaggctgttggattttactgagaaactagaagctgcatgtgttggcactgttgaatctgggaagatgaccaaggatcttgcacttattatccatggatctaagatgactagggaacactatctgaatactgaagagttcattgatgctgtggccgacgatttaagagcaagactctctggcaaagcatga

SEQ ID NO: 122445 - protein, 414 aa, Citrus limon
MAFQKIKVANPIVEMDGDEMTRVFWKSIKDKLIFPFLELDIKYFDLGLPNRDATDDKVTVESAEATLKYNVAIKCATITPDEARVKEFVLKQMWKSPNGTIRNILNGTVFREPIICKNVPRLIPGWTKPICIGRHAFGDQYRATDTVIQGPGKLKLVFVPEGKDEKTELEVYNFTGEGGVALSMYNTDESIRSFAEASMNTAYQKKWPLYLSTKNTILKNYDGKFKDIFQEVYEANWKSKFEAAGIWYEHRLIDDMVAYALKSEGGYVWACKDYDGNVQSDFLAQGFGSLGLMTSVLVCPDGKTIEAEAAHGTVTRHYRVHQKGGETSTNSIASIFAWSRGLAHRAKLDNNARLLDFTEKLEAACVGTVESGKMTKDLALIIHGSKMTREHYLNTEEFIDAVADDLRARLSGKA

SEQ ID NO: 122446 - DNA, 1251 bp, Daucus carota
  CDS (1)..(1251)
atggctatgcagaagatcaaagtgttgaatccaatcgttgaaatggatggtgatgaaatgacaagggttttttggaaatctattaaggagaaacttatatttccatttctggatttagacataaagtattttgatcttggcctccctaatcgtgatgccaccgatgatagagttacaattgaaagtgcagaagccactcttaagtacaatgtagcaattaagtgtgcaactatcacaccagatgaaactcgtctcaaggagttcaacttaaagcagatgtggaagagtccgaacgggactattcgtaacatattaaatggaactgttttccgcgaaccaatcatttgcaaaaatataccgcgacttgtccaaggctggaataagccaatatgcattggcaggcatgcttttggagatcaatatcgagctactgatctagttgttcaaggacctggaaaactcaaaatggtgtttgtaccagatgggcaaagtgagaaaacagagttagaggttttcaactttactggcgctggaggagtagctctttcaatgtacaacactgacgagtccattcatgcttttgctgaggcttctatgaacacagcttaccaaaaaagatggccactatatcttagcactaagaatactatccttaagaaatacgatggaagatttaaggatattttccaagaagtttatgaaaaagagtggaagtcaaagtttgaatctgtaggaatatggtatgagcatcgcttaattgatgatatggttgcttatgctcttaagagcgatggaggttatgtatgggcatgcaaaaactatgatggagatgtccaaagtgactttttagcccaaggattcggatctcttggtttgatgacatctgtactggtatgcccggatggaaagaccattgaagctgaagcagcccatggcacagttactcgtcattatcgtgtccatcaaaaaggaggtgaaactagcactaacagcatagcttcaatctttgcttggtctcgagggctagctcatagagcaaaattagatgacaatgccctcctcctggatttcactgagaaattggaagcagcttgcattggaactgttgaacgcggaaagatgaccaaggaccttgcaattcttctctatgggtctagggtaactaaggctcattatttgaacaccgagggatttatcgatgctgttgctgcagaactgagatcaagactatataagaaatcaaagttataa

SEQ ID NO: 122447 - protein, 416 aa, Daucus carota
MAMQKIKVLNPIVEMDGDEMTRVFWKSIKEKLIFPFLDLDIKYFDLGLPNRDATDDRVTIESAEATLKYNVAIKCATITPDETRLKEFNLKQMWKSPNGTIRNILNGTVFREPIICKNIPRLVQGWNKPICIGRHAFGDQYRATDLVVQGPGKLKMVFVPDGQSEKTELEVFNFTGAGGVALSMYNTDESIHAFAEASMNTAYQKRWPLYLSTKNTILKKYDGRFKDIFQEVYEKEWKSKFESVGIWYEHRLIDDMVAYALKSDGGYVWACKNYDGDVQSDFLAQGFGSLGLMTSVLVCPDGKTIEAEAAHGTVTRHYRVHQKGGETSTNSIASIFAWSRGLAHRAKLDDNALLLDFTEKLEAACIGTVERGKMTKDLAILLYGSRVTKAHYLNTEGFIDAVAAELRSRLYKKSKL

SEQ ID NO: 122448 - DNA, 1239 bp, Daucus carota
  CDS (1)..(1239)
atggcgtttcagaagatcaaggtcgcgaatcccatcgtcgaaatggacggagatgaaatgactcgtgtattctggaaatctatcaaggacaagcttatatttcccttcgttgagctggatataaaatactttgaccttggccttcctcaccgtgatgcaactgatgataaagttactgttgaaagtgcagaggctaccctcaagtataatgtagctatcaaatgtgcaacaattaccccagatgaagctcgtgtgaaggagtttggcttgaaacagatgtggaagagtccaaatgggacaattagaaatattttaaacggcacggtatttagggaaccaattatatgcaaaaatatcccaaagctcatccctgggtggacaaagccaatatgcattggaagacatgcttttggcgatcagtaccgcgcaacagatgcagttatccaaggaccaggaaagcttaagttggtttttgtaccagaaggtaaagaagagaagacagagttagaagtttacaacttcactggtgctggaggtgttgctttgtcgatgtacaacactgatgagtctattcgttcttttgctgaagcttcaatggccacagcttatgaaaagaagtggccactttatcttagcacaaaaaatactattctgaagaaatatgatggaagatttaaggacatattccaagaagtttatgaagccagctggaaatcgaagtatgatgctgcagggatatggtacgagcaccgtcttattgatgatatggttgcatatgctcttaaaagtgatggaggttatgtctgggcatgcaaaaattatgatggggatgtccaaagtgatttccttgctcaaggttttggatctctggggttgatgacatcagtcctggtatgccctgatggaaagaccatagaagctgaagcagcccatggcactgttacccggcattacagggttcatcagaagggtggagagaccagcacaaacagcatagcatcaatctttgcatggtctcgaggccttgctcacagggcaaagctggatgataatgctgccctcttgagttttgctgaaaagcttgaggctgcttgtgttggtactgtggagtctgggaagatgactaaggatcttgctctcatactacatggatccaaactcagcagggaacactatcttaacactgaagagttcattgatgcagtagcaagtgatttgaaagcaagactcgccaactaa

SEQ ID NO: 122449 - protein, 412 aa, Daucus carota
MAFQKIKVANPIVEMDGDEMTRVFWKSIKDKLIFPFVELDIKYFDLGLPHRDATDDKVTVESAEATLKYNVAIKCATITPDEARVKEFGLKQMWKSPNGTIRNILNGTVFREPIICKNIPKLIPGWTKPICIGRHAFGDQYRATDAVIQGPGKLKLVFVPEGKEEKTELEVYNFTGAGGVALSMYNTDESIRSFAEASMATAYEKKWPLYLSTKNTILKKYDGRFKDIFQEVYEASWKSKYDAAGIWYEHRLIDDMVAYALKSDGGYVWACKNYDGDVQSDFLAQGFGSLGLMTSVLVCPDGKTIEAEAAHGTVTRHYRVHQKGGETSTNSIASIFAWSRGLAHRAKLDDNAALLSFAEKLEAACVGTVESGKMTKDLALILHGSKLSREHYLNTEEFIDAVASDLKARLAN

SEQ ID NO: 122450 - DNA, 1293 bp, Candida tropicalis
  CDS (1)..(1293): transl_table=12
atgatcagagctagtgctatccaacgtaccgcaatgttgctgagacaattgcgcgggttttcgaccagtgctaccttggccgataagatcaaggtcaagaacccaattgttgaattggatggtgacgaaatgacccgtatcatttggcaaaagattaaagaccagttgatcttgccttaccttgacgtcgacttgaagtactatgacttgggtatcgaatctcgtgatgccacagacgatcaaatcaccattgacgccgctaacgctatcaaagaatacggtgttggtgtcaagtgtgcaaccatcaccccagacgaagcaagagtcaaggaattccacttgaagaagatgtggctttctccaaacggtaccattagaaacattctcggtggtactgtcttcagagaatctatcatcatcccatgtatcccaagattgattcccggttgggaaaagccaattgtcatcggtagacacgctttcggcgatcaatacaaggctactgatttggttatcaacgagccaggtagattggaattgagattcactccagccagcggcggcgaagcccagacccaaaaggtttacgactacactggtccaggtgtcggtttggccatgtacaacaccgacgagtccattactggattcgctcatgcttccttcaagatggctttggctaaaggcttgccattgtacatgtccaccaagaacaccatcttgaagaaatacgacggtagattcaaggacatttttcaacagatttacgaacaagattatgctgctgaattcgaaaaacagggcttgtggtacgaacacagattgattgacgacatggttgcccagatgatcaagtccaaaggtggatttgtcatggctttgaagaactacgatggtgacgtgcaatccgatatcgtcgctcaaggttttggttctttgggtttgatgacttctgccttgatgactccagatggtaaggcttatgaagccgaagctgctcacggtaccgtcaccagacactacagacaacaccaacaaggtaaagagacttccaccaactcaattgcttctatctttgcctggaccagaggtttagctcaaagaggtaagttggacgaaactccagacgtggttgactttgccagcaagctcgaacaagctaccattgacactgttgaagttgaccgtataatgaccaaggacttggctttggctatgggcaaaactgatagatctgcatacgtcaccaccactgaatttttggacgctgttgctgacagattgaagaagtaa

SEQ ID NO: 122451 - protein, 430 aa, Candida tropicalis
MIRASAIQRTAMLLRQLRGFSTSATLADKIKVKNPIVELDGDEMTRIIWQKIKDQLILPYLDVDLKYYDLGIESRDATDDQITIDAANAIKEYGVGVKCATITPDEARVKEFHLKKMWLSPNGTIRNILGGTVFRESIIIPCIPRLIPGWEKPIVIGRHAFGDQYKATDLVINEPGRLELRFTPASGGEAQTQKVYDYTGPGVGLAMYNTDESITGFAHASFKMALAKGLPLYMSTKNTILKKYDGRFKDIFQQIYEQDYAAEFEKQGLWYEHRLIDDMVAQMIKSKGGFVMALKNYDGDVQSDIVAQGFGSLGLMTSALMTPDGKAYEAEAAHGTVTRHYRQHQQGKETSTNSIASIFAWTRGLAQRGKLDETPDVVDFASKLEQATIDTVEVDRIMTKDLALAMGKTDRSAYVTTTEFLDAVADRLKK

SEQ ID NO: 122452 - DNA, 1236 bp, Candida tropicalis
  CDS (1)..(1236): transl_table=12
atgggcgaaattcagaaaataacagtcaagaacccaatcgtcgaaatggacggtgacgaaatgacccgtatcatctggcaattcatcaaagacaagttgatcttgccttacttgaatgtcgacttgaaatactacgacttgggcattgagtacagagacaagaccgacgacaaggtcaccaccgatgctgctgaagccatcttgcaatatggtgtcggtgtcaagtgtgccaccatcaccccagatgaagccagagttaaagaattcaacttgaagaagatgtggctctctccaaacggtacattgagaaacgtcattggcggtactgtctttagagaaccaattgtcattgacaacatcccaagaattgtgcctagctgggaaaaaccaatcatcattggtagacacgctttcggcgaccaatacaaggccaccgatgtggttatcccagctgccggtgacttgaaattggtgttcaagccaaaagacggcggcgaagtacaagaattcccagtctaccagttcgacggtccaggtgtcgccttgagcatgtacaacaccgacgcttcaattactgatttcgctgaaagctccttccaattagccattgagcgtaaattgaacttgttttcttccaccaaaaacaccatcttgaagaaatacgacgggaaattcaaagacatattcgaaggcttgtacgccagcaaatacaagaccaagatggacgaattgggcatctggtacgagcacagattgattgacgatatggttgcgcagatgttgaagtctaaaggtggttacatcatcgccatgaaaaactacgatggtgatgtccaatccgacattgtcgcacaaggtttcggttccttgggcttgatgacctctgttttagttaccccagacggcaaggcttttgagtccgaagctgcccacggtactgtcactagacattatagacaacaccaacaaggcaaagagacctccaccaactccattgcctccatctacgcctggaccagagggttgatccaaagaggtaagttggatgacactccggaagttgtcaagtttgctgaagagttggaaaaggctgtcatcgagactgtctccaaggacaacatcatgactaaagacttggccttgactcagggtaagaccgacagatcttcgtatgtcacgactgaagaattcattgatggtgttgctaatagattgaacaaaaacttgggctactag

SEQ ID NO: 122453 - protein, 411 aa, Candida tropicalis
MGEIQKITVKNPIVEMDGDEMTRIIWQFIKDKLILPYLNVDLKYYDLGIEYRDKTDDKVTTDAAEAILQYGVGVKCATITPDEARVKEFNLKKMWLSPNGTLRNVIGGTVFREPIVIDNIPRIVPSWEKPIIIGRHAFGDQYKATDVVIPAAGDLKLVFKPKDGGEVQEFPVYQFDGPGVALSMYNTDASITDFAESSFQLAIERKLNLFSSTKNTILKKYDGKFKDIFEGLYASKYKTKMDELGIWYEHRLIDDMVAQMLKSKGGYIIAMKNYDGDVQSDIVAQGFGSLGLMTSVLVTPDGKAFESEAAHGTVTRHYRQHQQGKETSTNSIASIYAWTRGLIQRGKLDDTPEVVKFAEELEKAVIETVSKDNIMTKDLALTQGKTDRSSYVTTEEFIDGVANRLNKNLGY

SEQ ID NO: 122454 - DNA, 1319 bp, Solanum tuberosum
  CDS (69)..(1319)
ttttcttccaccaacttttcttcattcggctgagatttctctgcttaatttttctctcaatctgcaaaatggcgtttcagaaaatcactgtgcaaaaccccatcgttgagatggacggagatgaaatgacacgagttatttggaaatctatcaaggataagctcatccttccctttctggaattggacataaaatactttagccttggccttccccaccgtgatgccacagatgataaggttacagttgaaagtgcggaagccactcagaagtacaacgtagctatcaagtgtgcaaccatcaccccagatgaggcccgtgtaaaggagtttaacttgaaatccatgtggaggagcccaaatgggacaatcagaaacatcttaaatggaactgtctttagagaaccaattatgtgcaaaaatatccccagacttgtcccaggttggactaaaccaatttgcattggtagacatgcttttggagatcaataccgagctactgatacagttattaaaggagcgggaaaactcaaattggtgtttgtgccagaaggatcagacgagaagactgagtttgaagtttacaactttactggtgctggtggagtagctttatccatgtacaacacagacgagtctgttcgttcatttgctgaggcttcaatgaacatggcattccaaaagaaatggccactctatcttagtacaaagaataccattcttaagaaatatgatgggaggttcaaggatatcttccaagaagtttatgaagcaaattggaagtccaagtacgaggaagccggaatctggtacgaacaccgtcttatcgacgatatggttgcttatgctttaaagagtgaaggtggttacgtatgggcttgcaagaactacgatggggatgttcagagtgatttcttagcacaaggttttggatcccttgggttgatgacttctgtcctggtgtgtcctgatggcaagaccattgaggctgaagcagcccatggaactgttacccgccactacagggttcaccagaaaggaggtgaaaccagcacaaacagcattgcctctatctttgcctggactcgtggacttgcacacagggcaacattggacaacaacgaaaggctcttggattttactgagaaactagaggcagcatgcattggtgcagtggaatctggaaagatgacgaaagatcttgcactcatcatcatccatggatccaagctttcacgagagcattatctgaacacggaagagttcattgacgctgttgccgatgagctcaaagcaagacttctgaaagcaaaggcctaa

SEQ ID NO: 122455 - protein, 416 aa, Solanum tuberosum
MAFQKITVQNPIVEMDGDEMTRVIWKSIKDKLILPFLELDIKYFSLGLPHRDATDDKVTVESAEATQKYNVAIKCATITPDEARVKEFNLKSMWRSPNGTIRNILNGTVFREPIMCKNIPRLVPGWTKPICIGRHAFGDQYRATDTVIKGAGKLKLVFVPEGSDEKTEFEVYNFTGAGGVALSMYNTDESVRSFAEASMNMAFQKKWPLYLSTKNTILKKYDGRFKDIFQEVYEANWKSKYEEAGIWYEHRLIDDMVAYALKSEGGYVWACKNYDGDVQSDFLAQGFGSLGLMTSVLVCPDGKTIEAEAAHGTVTRHYRVHQKGGETSTNSIASIFAWTRGLAHRATLDNNERLLDFTEKLEAACIGAVESGKMTKDLALIIIHGSKLSREHYLNTEEFIDAVADELKARLLKAKA

SEQ ID NO: 122456 - DNA, 1248 bp, Nicotiana tabacum
  CDS (1)..(1248)
atgactttcgacaaaatcaaggttgaaaaccctatcgttgagatggacggagatgaaatgactcgtgttatttggaaatcgatcaaggataagctcatctgtccttttctggagttggatataaaatactttgaccttggccttccgcaccgtgatgccacagacgataaggttacagttgaaagtgcggaagccactcagaaatacaatgtagctattaagtgtgcaaccattactccagatgaggcccgtgtaaaagagtttaacttgaaatccatgtggaggagcccaaatgggacaattagaaacatcctaaatggaacggtcttcagagaaccaattatgtgcaaaaatattccccgacttgtcccaggttggactaaaccaatatgcattggtagacatgcttttggagatcaataccgggctactgatacagttattcaaggagctggaaaactcaaattggtgtttgtgccagagggaacagacgagaagactgaattcgaagtttacaactttactggtgctggtggagtagctttatccatgtacaacacagatgagtccgtccgctcatttgctgaggcttcaatgaacatggcataccaaaagaaatggccactctatcttagtacaaagaatactattcttaagaaatatgatgggaggtttaaggacatcttccaagaagtttatgaagcaaattggaagtccaagtatgaggaagcaggaatttggtatgaacaccgtcttatcgacgatatggctgcttatgctttaaagagtgaaggtggttatgtatgggcctgcaagaactatgatggggatgtacagagtgatttcttagcacaaggttttggatccttgggcttgatgacatctgtcctggtgtgtcctgatggcaagaccattgaggctgaagcagcccatggaactgtcacccgccactacagggttcaccagaaaggaggtgaaaccagcacaaacagtattgcgtcaatctttgcctggactcgtggacttgcacacagggcaacgttagacaacaacgaaaggctcttggattttactgagaaactagaggcagcatgcattggtgcagttgaatctggaaagatgaccaaagatcttgcacttatcatccatggatccaagctctcgagagatcattatctcaacactgaagagttcattgacgccgtggccgatgagctcaaagcaagacttctgaaagcaaaggcctaa

SEQ ID NO: 122457 - protein, 415 aa, Nicotiana tabacum
MTFDKIKVENPIVEMDGDEMTRVIWKSIKDKLICPFLELDIKYFDLGLPHRDATDDKVTVESAEATQKYNVAIKCATITPDEARVKEFNLKSMWRSPNGTIRNILNGTVFREPIMCKNIPRLVPGWTKPICIGRHAFGDQYRATDTVIQGAGKLKLVFVPEGTDEKTEFEVYNFTGAGGVALSMYNTDESVRSFAEASMNMAYQKKWPLYLSTKNTILKKYDGRFKDIFQEVYEANWKSKYEEAGIWYEHRLIDDMAAYALKSEGGYVWACKNYDGDVQSDFLAQGFGSLGLMTSVLVCPDGKTIEAEAAHGTVTRHYRVHQKGGETSTNSIASIFAWTRGLAHRATLDNNERLLDFTEKLEAACIGAVESGKMTKDLALIIHGSKLSRDHYLNTEEFIDAVADELKARLLKAKA

SEQ ID NO: 122458 - DNA, 1263 bp, Saccharomyces cerevisiae
  CDS (1)..(1263)
atgagtaaaattaaagttgttcatcccatcgtggaaatggacggtgatgagcagacaagagttatttggaaacttatcaaagaaaaattgatattgccatatttagatgtggatttaaaatactatgacctttcaatccaagagcgtgataggactaatgatcaagtaacaaaggattcttcttatgctaccctaaaatatggggttgctgtcaaatgtgccactataacacccgatgaggcaagaatgaaagaatttaaccttaaagaaatgtggaaatctccaaatggaacaatcagaaacatcctaggtggaactgtatttagagaacccatcattattccaaaaatacctcgtctagtccctcactgggagaaacctataattataggccgtcatgcttttggtgaccaatatagggctactgacatcaagattaaaaaagcaggcaaactaaggttacagtttagctcagatgacggtaaagaaaacatcgatttaaaggtttatgaatttcctaaaagtggtgggatcgcaatggcaatgtttaatacaaatgattccattaaagggttcgcaaaggcatccttcgaattagctctcaaaagaaaactaccgttattctttacaaccaaaaacactattctgaaaaattatgataatcagttcaaacaaattttcgataatttgttcgataaagaatataaggaaaagtttcaggctttaaaaataacgtacgagcatcgtttgattgatgatatggtagcacagatgctaaaatcaaagggcgggtttataatcgccatgaagaattatgatggcgatgtccagtctgacattgtggcacaaggatttgggtctcttggtttaatgacgtccatattgattacacctgatggtaaaacgtttgaaagcgaggctgcccatggtacggtgaccagacattttagaaaacatcaaagaggcgaagaaacatcaacaaattcaatagcctcaatatttgcctggacaagggcaattatacaaagaggaaaattagacaatacagatgatgttataaaatttggaaacttactagaaaaggctactttggacacagttcaagtgggcggaaaaatgaccaaggatttagcattgatgcttggaaagactaatagatcatcatatgtaaccacagaagagtttattgatgaagttgccaagaggcttcaaaacatgatgctcagctccaatgaagacaagaaaggtatgtgcaaactataa

SEQ ID NO: 122459 - protein, 420 aa, Saccharomyces cerevisiae
MSKIKVVHPIVEMDGDEQTRVIWKLIKEKLILPYLDVDLKYYDLSIQERDRTNDQVTKDSSYATLKYGVAVKCATITPDEARMKEFNLKEMWKSPNGTIRNILGGTVFREPIIIPKIPRLVPHWEKPIIIGRHAFGDQYRATDIKIKKAGKLRLQFSSDDGKENIDLKVYEFPKSGGIAMAMFNTNDSIKGFAKASFELALKRKLPLFFTTKNTILKNYDNQFKQIFDNLFDKEYKEKFQALKITYEHRLIDDMVAQMLKSKGGFIIAMKNYDGDVQSDIVAQGFGSLGLMTSILITPDGKTFESEAAHGTVTRHFRKHQRGEETSTNSIASIFAWTRAIIQRGKLDNTDDVIKFGNLLEKATLDTVQVGGKMTKDLALMLGKTNRSSYVTTEEFIDEVAKRLQNMMLSSNEDKKGMCKL

SEQ ID NO: 122460 - DNA, 1497 bp, Aspergillus niger
  CDS (1)..(1497)
atgtcgtctgtccggttcagttccgcattggcgcgccgctccttcgccgtcgcttcccctcctctctctgcccctctctcttcctccgctcgtcgctttctctcttcttcctcttctactatttcttcttcttcctcctctgtctctactcgctctcccagatctcttacttctgcctcatcccttctctcctctcgtactgcttctgcccgctggaccggtctatcctcgttgaaccttactcaatcccgcaccatggctaccgaaatccccaagatcaaggtcaagaaccccgtcgttgagctcgacggtgatgagatgacccgtatcatctggcaggagatcagagaaaagttgattctgccttaccttgacgtcgacctcaagtactatgacctgggtctcgaataccgtgaccagaccgatgaccaggtcaccgttgaggctgccgaggctatcaagaagtatggtgtcggtgtcaagtgcgccaccatcactcccgatgaggctcgtgttgaggagttcaagctgaagaagatgtggctgtcccccaacggcaccatccgtaacatcctcggcggtaccgtcttccgtgaacccatcatcatccccgccattccccgtctcgtccccggctggaacaagcccatcatcatcggtcgtcacgctttcggtgaccagtaccgtgccaccgaccgtgtcatccctggccccggcaagctcgagcttgtctacacccctgtcaatggcgagcccgagaccgtcaaggtctacgacttccagggtggtggtattgcccagactcagtacaacaccgatgagtcgatccgtggcttcgcccacgccagtttccagatggccctgctcaagggtctccctctgtacatgagcaccaagaacaccatcctgaagcgctacgatggtcgcttcaaggatatcttccaggagatctacgagtccacctaccagaaggactttgaggccaagaacctctggtacgagcaccgtctcattgacgacatggttgcccagatgatcaagagtgagggtggattcgtcatggccctgaagaactacgacggtgatgtccagtccgacattgtcgcccagggtttcggctcccttggtctgatgacctcgaccctggtcacccctactggcgaggctttcgagtctgaggctgcccacggtaccgtgacccgtcactaccgcgagcaccagaagggccgcgagacctccaccaaccccattgcctccatcttcgcctggacccgcggtctgatccagcgtggcaagctcgacgagactcctgatgtcgttacctttgctgaggagcttgagcgcgcttgcattgaggttgtcaacgatgagggcatcatgaccaaggatctggctctggcctgcggccgcaaggagcgtgaggcctgggttactacccgcgagtacatggctgccgtcgagcgcagactcaaggccaacctcaagtcccgcctttaa

SEQ ID NO: 122461 - protein, 498 aa, Aspergillus niger
MSSVRFSSALARRSFAVASPPLSAPLSSSARRFLSSSSSTISSSSSSVSTRSPRSLTSASSLLSSRTASARWTGLSSLNLTQSRTMATEIPKIKVKNPVVELDGDEMTRIIWQEIREKLILPYLDVDLKYYDLGLEYRDQTDDQVTVEAAEAIKKYGVGVKCATITPDEARVEEFKLKKMWLSPNGTIRNILGGTVFREPIIIPAIPRLVPGWNKPIIIGRHAFGDQYRATDRVIPGPGKLELVYTPVNGEPETVKVYDFQGGGIAQTQYNTDESIRGFAHASFQMALLKGLPLYMSTKNTILKRYDGRFKDIFQEIYESTYQKDFEAKNLWYEHRLIDDMVAQMIKSEGGFVMALKNYDGDVQSDIVAQGFGSLGLMTSTLVTPTGEAFESEAAHGTVTRHYREHQKGRETSTNPIASIFAWTRGLIQRGKLDETPDVVTFAEELERACIEVVNDEGIMTKDLALACGRKEREAWVTTREYMAAVERRLKANLKSRL

SEQ ID NO: 122462 - DNA, 1257 bp, Schizosaccharomyces pombe
  CDS (1)..(1257)
atgaatatgcgtatggcttcaagcaaatcttttcaaaagatcactgttaaaaacccagtcgttgaaatggatggtgatgagatgacgagagtgatttggaagatcattcgtgaaaagttggttctcccatatatggacattaaattggattattatgaccttggaatcgaagctcgcgataagacaaacgaccaaattactgtggatgcagccaaagctatcctcaaaaatgatgtcggtatcaaatgtgccaccattactcctgatgaggctcgtgtgaaagagtataacctcaagaagatgtggaagtctcccaatggtaccattcgtaacattttgaatggtacagtatttcgggagcccattttaatcaaaaacattcccaagtatattcctggatggacgaaccctatttgtatcgggcgtcatgcctttggagatcaatacaagtcaacggacttggtagcttcaggccccggtaagttggaactttcattcacccctaaaggtaatccttctgctaaagaaacatacaatgtttacgagttcaacggtagtggtgtagctatgtctatgtacaacactgacgactctattcgtggatttgctcacagttctttccaaatggctttgcaaaagaaaatgccactttatctttccactaagaatacaattttgaaaaaatatgatggtagatttaaggatacattccaagaagtatatgaatctgattacaagcaaaagtttgaggaactaggtttatggtatcaacatcgtctaattgatgacatggtagcccaagctattaagtccaatggtggttttgtttgggcatgcaaaaattacgatggtgatgttatgtcggatgtggttgcccaagcttatggatccttaggcctaatgacttctgtcctcattcatcccaacggtcgcacttttgagagtgaggctgctcatggtactgtacagcgtcactacatgcaatacttgaaaggtaagaagacttcaaccaacagtattgcctctatctttgcctggactcgtggtcttgcccatcgtggtcgtttagatggcaacgaacgtttagttaagtttgccaacgccctcgagcatgcttgtgttcgatgcgttgagaagggtattatgacaaaggatctttaccttctcagcaagtctcccaatggttatgttgatacattcgagtttttggatgccgtcaagtccgagctcgattcggaattggtcaacattgcctaa

SEQ ID NO: 122463 - protein, 418 aa, Schizosaccharomyces pombe
MNMRMASSKSFQKITVKNPVVEMDGDEMTRVIWKIIREKLVLPYMDIKLDYYDLGIEARDKTNDQITVDAAKAILKNDVGIKCATITPDEARVKEYNLKKMWKSPNGTIRNILNGTVFREPILIKNIPKYIPGWTNPICIGRHAFGDQYKSTDLVASGPGKLELSFTPKGNPSAKETYNVYEFNGSGVAMSMYNTDDSIRGFAHSSFQMALQKKMPLYLSTKNTILKKYDGRFKDTFQEVYESDYKQKFEELGLWYQHRLIDDMVAQAIKSNGGFVWACKNYDGDVMSDVVAQAYGSLGLMTSVLIHPNGRTFESEAAHGTVQRHYMQYLKGKKTSTNSIASIFAWTRGLAHRGRLDGNERLVKFANALEHACVRCVEKGIMTKDLYLLSKSPNGYVDTFEFLDAVKSELDSELVNIA

SEQ ID NO: 122464 - DNA, 1230 bp, Mycobacterium bovis
  CDS (1)..(1230): transl_table=11
atgtccaacgcacccaagataaaagtcagcggtccggtcgtagagctcgacggtgacgagatgacccgtgtcatctggaagctcatcaaggacatgcttatccttccctatctcgacatccgcttggactattacgacttgggcatcgagcaccgcgacgccaccgacgaccaggtgacgatcgacgcggcgtatgcgatcaagaaacacggtgtgggcgtaaagtgcgcgacgatcacccccgacgaggcccgtgtcgaggaattcaacctgaagaagatgtggctgtcgcccaatgggacaatccggaacatcttgggcggcacaatctttcgcgaacctatcgtgatttctaatgtgccgcgactggttccggggtggaccaagccgatcgtcatcggccggcacgcttttggtgaccaatatcgggcgacgaacttcaaggtcgaccaaccgggcaccgtcacactgactttcacgcccgccgacggcagcgcgccgatcgtgcacgaaatggtgtccatccccgaggacggcggcgtcgtgctggggatgtacaacttcaaggaatccatccgggatttcgcgcgcgcgtcgttctcctacggcctcaacgcgaaatggccggtatatctgtccaccaagaacaccatcctcaaggcctacgacgggatgttcaaagacgagttcgagcgcgtctacgaagaggaattcaaggcgcagttcgaagcggcggggctgacctacgagcatcggttgatcgacgacatggtcgccgcctgcctgaaatgggaaggcggttacgtctgggcgtgcaagaactacgacggcgacgtgcagtcggacaccgtcgcacagggctacggctcgctgggcctgatgacgtcggtgctgatgacggccgacggcaagacagtcgaggccgaagccgcccacggcaccgtcacccggcattaccggcagtatcaggccggtaaaccgacctcaacaaacccgatcgcgtcgatctttgcctggacccgcggattacagcatcgcggcaagctggatggcactcccgaagtcatcgacttcgcccacaagctggagtccgtcgtcatcgccacggtggagagcgggaagatgaccaaggacctcgcgatcctcatcggtccggagcaggactggctgaatagcgaggaattcctcgatgcgatcgccgacaacctggaaaaggagctggccaattag

SEQ ID NO: 122465 - protein, 409 aa, Mycobacterium bovis
MSNAPKIKVSGPVVELDGDEMTRVIWKLIKDMLILPYLDIRLDYYDLGIEHRDATDDQVTIDAAYAIKKHGVGVKCATITPDEARVEEFNLKKMWLSPNGTIRNILGGTIFREPIVISNVPRLVPGWTKPIVIGRHAFGDQYRATNFKVDQPGTVTLTFTPADGSAPIVHEMVSIPEDGGVVLGMYNFKESIRDFARASFSYGLNAKWPVYLSTKNTILKAYDGMFKDEFERVYEEEFKAQFEAAGLTYEHRLIDDMVAACLKWEGGYVWACKNYDGDVQSDTVAQGYGSLGLMTSVLMTADGKTVEAEAAHGTVTRHYRQYQAGKPTSTNPIASIFAWTRGLQHRGKLDGTPEVIDFAHKLESVVIATVESGKMTKDLAILIGPEQDWLNSEEFLDAIADNLEKELAN

SEQ ID NO: 122466 - DNA, 1221 bp, Sphingomonas yanoikuyae
  CDS (1)..(1221): transl_table=11
atggcgaagatcaaggtgaaaaaccccgtcgtggaaatcgacggcgacgaaatgacccgcatcatctgggaatggatccgtgagcgcctcattctcccctatctcgacgtcgacctgaaatattatgacctgtcggtcgagaagcgcgacgagaccagcgaccagatcacgatcgacgcggccaacgcgatcaaggaatatggcgtcggcgtgaagtgcgccaccatcaccccggacgaagcgcgcgtcgaggaattcggcctcaagaagatgtggaagtcgcccaacggcaccatccgcaacatcctgggcggcgtcgtgttccgcgaaccgatcgtcatcaagaatgtcccccgcctggttccgggctggaccgacccgatcgtcgtcggccgtcacgcctttggcgaccagtataaggccaccgatttcaaggtgcccggcgccggcacgctgaccatgaagtgggtcggcaccaatggcgaggaactcgaatatgaagtgttcgaattccccagcgccggcgttgccatgggcatgtacaatctcgacgaatcgatccgcgatttcgccaaggccagcttcaactatggcctgaaccgcggctggcccgtctatctgtcgaccaagaacaccatcctcaaggcctatgacggccgcttcaaggatctgttccaggaagtgttcgacgccgaattcgccgacaagttcaaggcggccggcatcgtctacgaacaccgcctgatcgacgacatggtcgcttcggcgctgaagtggagcggcaagttcgtctgggcctgcaagaattatgacggcgacgtccagtcggacaccgtggcccagggcttcggctcgctcggcctgatgacctccgtcctgctgtcgcccgacggcaagaccgtggaagccgaagccgcgcacggcaccgtcacccgtcactatcgccagcaccagcagggcaaggcgacctcgaccaacccgatcgcctcgatcttcgcctggacccagggcctgtcgttccgcggcaagttcgacgacacgccggacgtcgtgaagttcgccgagacgctggagcaggtctgcatcaagaccgtcgaaggcggcgcgatgaccaaggatctggccctgctgatcggcccggatcaggcctggatgaccacggagcagttcttcgaggcgatccgcgtcaatctggaagccgaaatggccaagtgggcctga

SEQ ID NO: 122467 - protein, 406 aa, Sphingomonas yanoikuyae
MAKIKVKNPVVEIDGDEMTRIIWEWIRERLILPYLDVDLKYYDLSVEKRDETSDQITIDAANAIKEYGVGVKCATITPDEARVEEFGLKKMWKSPNGTIRNILGGVVFREPIVIKNVPRLVPGWTDPIVVGRHAFGDQYKATDFKVPGAGTLTMKWVGTNGEELEYEVFEFPSAGVAMGMYNLDESIRDFAKASFNYGLNRGWPVYLSTKNTILKAYDGRFKDLFQEVFDAEFADKFKAAGIVYEHRLIDDMVASALKWSGKFVWACKNYDGDVQSDTVAQGFGSLGLMTSVLLSPDGKTVEAEAAHGTVTRHYRQHQQGKATSTNPIASIFAWTQGLSFRGKFDDTPDVVKFAETLEQVCIKTVEGGAMTKDLALLIGPDQAWMTTEQFFEAIRVNLEAEMAKWA

SEQ ID NO: 122468 - DNA, 1245 bp, Oryza sativa
  CDS (1)..(1245)
atggcgttcgagaagatcgtcgtggccaaccccgtcgtcgagatggacggtgatgagatgactcgagttatttggaaatggatcaaagataagcttatattccctttcttggacttggacataaaatactatgacttaggtctacctaatcgtgacgctactggggacaaagttacaatagagagtgcagaagcgaccctaaagtataatgtagccatcaaatgtgcaactataactccagatgaaggacgcgtgaaagagtttaatttaagtgcaatgtggaagagtccaaatgggacaataaggaacattttgaatggaactgttttccgagaaccaatcatctgcaagaatattcctcggcttgtacctgggtggataaagcccatatgcattggacgacatgcatttggtgatcaataccgagcaacagatacagttattaaaggtcctgggaagttgaagttagtatttgatggcagagaggaacaaatagagttggatgtgttcaactttactggtgctggtggagtagccttgtctatgtataatactgacgagtctatttgggcattcgctgaagcttccatgaacatggcttaccagaaaagatggccactttatcttagcaccaaaaacacgatcctcaaaaaatacgatggaaggtttaaagatatatttcaggagaactatgaaacaaaatggagagccaagtttgatgatgcaggaatatggtacgaacatcggctgattgatgatatggtggcctatgcccttaagagtgaaggtggctatgtttgggcttgcaagaactatgatggagatgtgcagagcgatctaattgctcaaggttttggatcgctaggtctaatgacatcagttctggtgtgccctgatggtagaaccattgaagctgaagctgctcatggtacagtcacacgccattacagagttcaccaaaaaggaggcgaaactagtacaaatagcattgcttcaatatttgcttggacaaccggactaggacatagggcaaagctcgatgacaataaaagactgttagattttgtacaaaaacttgaagctgcttgtgtgggaacagtggaatctggaaagatgacaaaggatctagctcttcttgtacatgggccaaatgttagccgagataagtatcttaacactgttgagttcatcgatgctgttgctgaggatttaagaacaagattgtcagtaacatccaagttatga

SEQ ID NO: 122469 - protein, 414 aa, Oryza sativa
MAFEKIVVANPVVEMDGDEMTRVIWKWIKDKLIFPFLDLDIKYYDLGLPNRDATGDKVTIESAEATLKYNVAIKCATITPDEGRVKEFNLSAMWKSPNGTIRNILNGTVFREPIICKNIPRLVPGWIKPICIGRHAFGDQYRATDTVIKGPGKLKLVFDGREEQIELDVFNFTGAGGVALSMYNTDESIWAFAEASMNMAYQKRWPLYLSTKNTILKKYDGRFKDIFQENYETKWRAKFDDAGIWYEHRLIDDMVAYALKSEGGYVWACKNYDGDVQSDLIAQGFGSLGLMTSVLVCPDGRTIEAEAAHGTVTRHYRVHQKGGETSTNSIASIFAWTTGLGHRAKLDDNKRLLDFVQKLEAACVGTVESGKMTKDLALLVHGPNVSRDKYLNTVEFIDAVAEDLRTRLSVTSKL

SEQ ID NO: 122470 - DNA, 1239 bp, Oryza sativa
  CDS (1)..(1239)
atggcgttcgagaagatcaaggtcgccaaccccatcgtcgagatggacggtgatgagatgaccaggatattctggcagtctatcaaggacaagcttatctttccatttttggatctggacattaagtactatgacttgggagttctccaccgtgatgcaactgatgacaaggtcaccgtggaggctgcagaggctactctcaagtacaatgtggctattaagtgtgcgacgattactccagatgaggctcgggttaaggagttcaacctaaagcaaatgtggaagagccccaatggcacaattaggaatattatcaatggcactgtattcagagagccaattatatgcaaaaatgtcccaaggcttgttccaggatggactaagcccatttgcattggaaggcatgcttttggtgatcagtaccgagcaactgatgcagttctgaaggggcctggcaagctcaagctggtttttgagggaaaggatgagcagattgatctggaggtgttcaacttcactggtgctggaggagttgctttgtctatgtacaacactgatgagtcaatccgagcttttgctgaagcttctatgacaactgcttatgagaagaaatggccgctttatcttagcaccaaaaacacaatcctgaagaaatatgatggaaggttcaaggatattttccaggaggtctatgaagctgggtggaaatccaagtttgaggctgccggaatatggtatgagcatcgtctcatcgatgacatggttgcttatgcacttaagagtgaagggggctatgtgtgggcttgcaagaattacgatggagatgtgcagagtgatttcttagctcaaggctttggttcattgggtttgatgacatcagtattggtgtgccctgatggaaaaacaattgaagctgaagctgcccatggcacggttacccgtcatttccgtgttcaccagaagggaggtgaaaccagcacaaacagcattgcttcaatctttgcttggaccagaggacttgcacacagggcaaagcttgacgacaatgctagacttcttgactttgcactaaaacttgaagctgcttgcgttggaaccgtggaatctgggaagatgaccaaagaccttgctcttcttattcacgggtcttcaaacgtcacaagaagccattacctgaacactgaagagttcattgatgcggttgctgcggagctccggtcaagactggcagccaactga

SEQ ID NO: 122471 - protein, 412 aa, Oryza sativa
MAFEKIKVANPIVEMDGDEMTRIFWQSIKDKLIFPFLDLDIKYYDLGVLHRDATDDKVTVEAAEATLKYNVAIKCATITPDEARVKEFNLKQMWKSPNGTIRNIINGTVFREPIICKNVPRLVPGWTKPICIGRHAFGDQYRATDAVLKGPGKLKLVFEGKDEQIDLEVFNFTGAGGVALSMYNTDESIRAFAEASMTTAYEKKWPLYLSTKNTILKKYDGRFKDIFQEVYEAGWKSKFEAAGIWYEHRLIDDMVAYALKSEGGYVWACKNYDGDVQSDFLAQGFGSLGLMTSVLVCPDGKTIEAEAAHGTVTRHFRVHQKGGETSTNSIASIFAWTRGLAHRAKLDDNARLLDFALKLEAACVGTVESGKMTKDLALLIHGSSNVTRSHYLNTEEFIDAVAAELRSRLAAN

SEQ ID NO: 122472 - DNA, 1437 bp, Oryza sativa
  CDS (1)..(1437)
atgcgccacctgctgctcctgcgctgcggcatggctcctctctacggctcctcctcctccgccgccgcgaccaaagccctcctcttaaaccccgccgccgcgcacgccttcgtcccttcttcccccggaccccgcgcgctccgccgcggcggcgcctccctccgctgctatgccgccgccgccgcggcggtggccgagcagcaccgcatcaaggtccacaaccccatcgtcgagatggacggtgacgagatgacgcgggtcatttggaagatgataaaggataagctcatcttcccttacctggagctggatgtcaagtatttcgaccttgggctgctcaaccgggatgccaccgatgataaggtcactgttgagagtgccgaggctacgttggagtataatgttgctgttaagtgtgctaccattacacctgatgaaacaagagttaaagagttcaaactcaagtcaatgtggaggagcccaaatggcaccatcaggaatattctaaatggaactgttttccgggagcccatcttgtgtaaaaatgtaccacggatactttctggctggaagaagcccatttgcattggaaggcatgcatttggagaccagtatcgagctactgatacaataattaatggtccaggaaagcttaaaatggtttttgtcccagatggtgctgaacctgtggagttaaatgtttataattttaaagggcctggtgtggctttatcaatgtataatgtggatgagtctattagagcttttgctgagtcatcaatggcaatggcactttccaaaaaatggcctctttatctcagcaccaagaacacaatattgaagaaatatgatggcaggttcaaggacatcttccaggaggtatatgaagagaaatggaaggagaagttcgaggaaaactcgatatggtatgagcaccggttgattgatgacatggtggcatatgctgtgaaaagtgaaggtggatatgtttgggcttgcaaaaactatgatggagatgttcagagtgacttccttgcccaaggttttggttccttgggtttgatgtcatctgttttgttatcttctgatgggaaaacgttagaagctgaggcagctcatgggactgtcactagacatttcaggctacatcagaagggacaggagacaagtacaaatagcattgcttctatatttgcttggactcgtggactagaacatagagcaaagctggataaaaatgataggctgctggatttcacaaagaaacttgaatctgcatgtattgaaacagttgaatcggggaagatgacaaaggatcttgcactccttatccatggccccaaggtaacaagggagttctaccttaacaccgaagaattcattgacgctgtggctcagcaactgcgagaaaagattcaaataccagctgtggtttaa

SEQ ID NO: 122473 - protein, 478 aa, Oryza sativa
MRHLLLLRCGMAPLYGSSSSAAATKALLLNPAAAHAFVPSSPGPRALRRGGASLRCYAAAAAAVAEQHRIKVHNPIVEMDGDEMTRVIWKMIKDKLIFPYLELDVKYFDLGLLNRDATDDKVTVESAEATLEYNVAVKCATITPDETRVKEFKLKSMWRSPNGTIRNILNGTVFREPILCKNVPRILSGWKKPICIGRHAFGDQYRATDTIINGPGKLKMVFVPDGAEPVELNVYNFKGPGVALSMYNVDESIRAFAESSMAMALSKKWPLYLSTKNTILKKYDGRFKDIFQEVYEEKWKEKFEENSIWYEHRLIDDMVAYAVKSEGGYVWACKNYDGDVQSDFLAQGFGSLGLMSSVLLSSDGKTLEAEAAHGTVTRHFRLHQKGQETSTNSIASIFAWTRGLEHRAKLDKNDRLLDFTKKLESACIETVESGKMTKDLALLIHGPKVTREFYLNTEEFIDAVAQQLREKIQIPAVV

SEQ ID NO: 122474 - DNA, 1239 bp, Oryza sativa
  CDS (1)..(1239)
atggcatccaccaagatcaaggtcgccaaccccattgtcgagatggacggtgatgagatgactcgagtattctggaaatctatcaaggacaagcttatcttcccgttcttggagttggacattaagtactttgatctcggacttccataccgtgatcaaaccgacgataaagtcacagtggaggcagcagaggctaccctcaagtacaatgtggccatcaagtgtgcaaccattacaccagatgaagcaagggttaaagagttcagcctaaaatccatgtggaagagcccaaacggcacaattagaaatatcctaaatggcactgtgttcagagaaccaataatctgcaaaaacatccctcggcttgttccaggatggactaagcccatttgcattggaaggcacgcatttggtgatcagtaccgtgcaacggatgcagttatcaagggacctggcaagcttaaattggtttatgagggaaaagatgaggagattgagctggaggtgttcaacttcactggtgctggaggagtggcacagtctatgtacaacactgacgagtccatccgttcctttgctgaggcctctatggccactgcttatgagaagaaatggccattgtacctcagcaccaaaaacacaattttgaagaaatatgatggcaggttcaaggacatcttccaggaggtatatgaagctcagtggaaatcaaaatttgaggctgctggaatatggtatgagcatcgtctcattgatgacatggttgcctatgcactcaagagtgaaggaggctatgtttgggcttgcaagaactatgatggagatgtgcagagtgatttcttagcacaaggttttggatcattgggtttgatgacatcagttttggtatgtcctgatgggaaaaccattgaagctgaagctgcccatgggactgtcacccgtcattaccgtgttcatcagaaaggtggtgaaactagcacaaacagcattgcctcaatctttgcctggacaagaggacttgcacacagggcaaagctagatgacaatgctaggctactggacttcactcagaagcttgaagctgcctgcattggcgctgtcgagtctgggaagatgaccaaggaccttgctctgcttgttcacggatcttcaaatgtcacgaggagtcattacctgaacactgaagagttcatcgatgctgttgctgacgagctcagatcaaggctggcagccaactaa

SEQ ID NO: 122475 - protein, 412 aa, Oryza sativa
MASTKIKVANPIVEMDGDEMTRVFWKSIKDKLIFPFLELDIKYFDLGLPYRDQTDDKVTVEAAEATLKYNVAIKCATITPDEARVKEFSLKSMWKSPNGTIRNILNGTVFREPIICKNIPRLVPGWTKPICIGRHAFGDQYRATDAVIKGPGKLKLVYEGKDEEIELEVFNFTGAGGVAQSMYNTDESIRSFAEASMATAYEKKWPLYLSTKNTILKKYDGRFKDIFQEVYEAQWKSKFEAAGIWYEHRLIDDMVAYALKSEGGYVWACKNYDGDVQSDFLAQGFGSLGLMTSVLVCPDGKTIEAEAAHGTVTRHYRVHQKGGETSTNSIASIFAWTRGLAHRAKLDDNARLLDFTQKLEAACIGAVESGKMTKDLALLVHGSSNVTRSHYLNTEEFIDAVADELRSRLAAN

SEQ ID NO: 122476 - DNA, 1251 bp, Brassica napus
  CDS (1)..(1251)
atggaattcgagaagatcaaggtggccaatccgattgttgaaatggatggagacgagatgactcgagttatctggaaattcattaaagacaagcttattttaccttacctggagttggatatcaaatactttgatctcggactgcctaaccgcgattctactgatgataaggttactacagagagtgctgaagctactctaaagtataacgtggcaatcaagtgtgcgacgattactcctgatgaaactcgtgttagggagtttggtttgaaaaaaatgtggaggagtcctaacggaactataaggaacattttaaacggcacggtcttcagggaacctataatttgcagaaatatccctcgcattgtaccaggatggactaaaccaatctgtattggaaggcatgcttttggagatcagtatagagctactgatatcgttgttaatgaaccaggaaaactgaaactgattttcgagccaagtggatcttcacgtaagaccgaatttgaagtcttcaatttcactggtgctggaggtgttgctttggccatgtataacaccgatgagtctatccgttcatttgccgagtcatcgatgtacacagcttaccagaaaaaatggccgctgtacctctccacaaaaaacaccatcctcaaaacatatgacggaagattcaaggatatattccaagaagtttatgaaactaactggagatctaagtttgaagctgctgggatatggtatgagcatcgtctgatagatgatatggttgcttatgccatgaaaagtgaggggggttacgtttgggcatgcaagaactacgatggagatgtgcagagcgatttcttagcccaaggatatggatctctgggactgatgacgtcggtgttggtttgtcctgatggaaagaccattgaagcagaggcagctcatggcacagtaacacgccactacagagttcaccaaaaaggtggcgaaacaagcaccaacagcatagcctctatttttgcttggtccagaggccttgcccacagggcaaagctggacagcaatgcgtcgttgttgaactttactgagaaactagaagcggcttgtatggggacggtggagtctggaaaaatgaccaaggatctcgcgctgttgatccatggatccaaggttaagagggatgattatgtgaatactgaagagttcattgatgctgtggcgtgggagttaagaaaaagactgttaggcagctccaggttgtga

SEQ ID NO: 122477 - protein, 416 aa, Brassica napus
MEFEKIKVANPIVEMDGDEMTRVIWKFIKDKLILPYLELDIKYFDLGLPNRDSTDDKVTTESAEATLKYNVAIKCATITPDETRVREFGLKKMWRSPNGTIRNILNGTVFREPIICRNIPRIVPGWTKPICIGRHAFGDQYRATDIVVNEPGKLKLIFEPSGSSRKTEFEVFNFTGAGGVALAMYNTDESIRSFAESSMYTAYQKKWPLYLSTKNTILKTYDGRFKDIFQEVYETNWRSKFEAAGIWYEHRLIDDMVAYAMKSEGGYVWACKNYDGDVQSDFLAQGYGSLGLMTSVLVCPDGKTIEAEAAHGTVTRHYRVHQKGGETSTNSIASIFAWSRGLAHRAKLDSNASLLNFTEKLEAACMGTVESGKMTKDLALLIHGSKVKRDDYVNTEEFIDAVAWELRKRLLGSSRL

SEQ ID NO: 122478 - DNA, 1251 bp, Brassica napus
  CDS (1)..(1251)
atggaattcgagaagatcaaggtggccaatccgattgttgaaatggatggagacgagatgactcgcgttatctggaaattcattaaagacaagcttattttaccttacctggagttggatatcaaatactttgatctcggactccctaaccgcgattctactgatgataaggttactacagagagtgctgaagctactctaaagtataacgtggcaatcaagtgtgcgacgattactcctgatgaaactcgtgttagggagtttggtttgaaaaaaatgtggaggagtcctaacggaactataaggaacattttaaacggcacggtcttcagggaacctataatttgcagaaatatccctcgcattgtaccaggatggactaaaccaatctgtattggaaggcatgcttttggagatcagtatagagctactgatatcattgttaatgaaccaggaaaactgaaactgattttcgagccaagtggatcttcacgtaagaccgaatttgaagtcttcaatttcactggtgctggaggtgttgctttggccatgtataacaccgatgagtctatccgttcatttgctgagtcatcgatgtacacagcttaccagaaaaaatggccgctgtacctctccacaaaaaacaccatcctcaaaacatatgacggaagattcaaggatatattccaagaagtttatgaaactaactggagatctaagtttgaagctgctgggatatggtatgagcatcgtctgatagatgatatggttgcttatgccatgaaaagtgaggggggttacgtttgggcatgcaagaactacgatggagatgtgcagagcgatttcttagcccaaggatatggatctctgggactgatgacgtcggtgttggtttgtcctgatggaaagaccattgaagcagaggcagctcatggcacagtaacacgccactacagagttcaccaaaaaggtggtgaaacaagcaccaacagcatagcctctatttttgcttggtccagaggccttgcccacagggcaaagctggacagcaatgcgtcgttgttgaactttactgagaaactagaagcggcttgtatggggacggtggagtctggaaaaatgaccaaggatctcgcgctgttgatccacggatccaaggttaagagggatgattatgtgaatactgaagagttcattgatgctgtggcgtgggagttaagaaaaagactgttaggcagctccaggttgtga

SEQ ID NO: 122479 - protein, 416 aa, Brassica napus
MEFEKIKVANPIVEMDGDEMTRVIWKFIKDKLILPYLELDIKYFDLGLPNRDSTDDKVTTESAEATLKYNVAIKCATITPDETRVREFGLKKMWRSPNGTIRNILNGTVFREPIICRNIPRIVPGWTKPICIGRHAFGDQYRATDIIVNEPGKLKLIFEPSGSSRKTEFEVFNFTGAGGVALAMYNTDESIRSFAESSMYTAYQKKWPLYLSTKNTILKTYDGRFKDIFQEVYETNWRSKFEAAGIWYEHRLIDDMVAYAMKSEGGYVWACKNYDGDVQSDFLAQGYGSLGLMTSVLVCPDGKTIEAEAAHGTVTRHYRVHQKGGETSTNSIASIFAWSRGLAHRAKLDSNASLLNFTEKLEAACMGTVESGKMTKDLALLIHGSKVKRDDYVNTEEFIDAVAWELRKRLLGSSRL

SEQ ID NO: 122480 - DNA, 1452 bp, Brassica napus
  CDS (1)..(1452)
atgctcaacaacctcacacgcggcggtttcatgtaccgtgccagcgtcacgatgttatcttcgtctacttcttcctcctcctctgctgctttatcgtcttcatggaagtctccgcgatttctcagctccggtgtgttatcgggtggtggttcgaggaatcgcgtggcctttcccgttcgttttcatcgcgctttatctgttcgatgttttgcctcttctggtggctctgataggattcaggttcagaacccaatcgttgaaatggacggtgatgaaatgacgagggtgatatggagtatgataaaggataaacttattttgccttatctggatctggatattaagtacttcgacttggggattctgaatcgcgatgctactgatgacagagttacagttgaaagtgctgaagctgctcttaagtacaacgttgctatcaaatgtgccactataactcctgatgagggcagagtgaaggagtttggactgaaatcaatgtggaggagtcctaatggaacaatcagaaacattttagatggaactgttttccgtgaacctatcatgtgtggcaatatccctcggcttgttcctggttggagaaaaccaatatgcattggtaggcatgcctttggtgaccagtatcgtgccacggatcaagtagttaaaggaccaggaaagttgaaaatggtttttgtcccagaagatgggagcgcacctgaggaactagacgtatatgatttcaaaggcccaggtgtagctctggctatgtacaacgtagatgagtcaattcgtgcttttgctgagtcatctatggcgatggcacttgcaaagaaatggccactatacttgagcaccaagaacacaattcttaaaaaatatgatggcaggttcaaggacatatttcaagaagtttatgaggcgaattggaagcaaaagtttgaagagcactcaatatggtatgaacatcgcttaatcgatgacatggtggcttatgcagtaaagagcgaaggtggatatgtctgggcttgcaaaaattacgacggtgatgttcaaagcgatcttcttgcccaagggtttggctcactaggcctcatgacctcagttttgttatcctctgatgggaaaacactcgagtcagaggcggctcatggaaccgtaactcgacatttccgactgcaccaaaagggacaagagaccagtactaatagcatcgcctccatatttgcatggacacgcggcttagaacacagggcaaaactggataagaacgaaaaattgatggattttgtcaagaagctcgagtcgtcgtgtgttaacactgttgagacagggaaaatgaccaaggatcttgcccttctggtccatggtcccaaggtgagtagggatgtgtacttgaacacagaagagttcattgatgcagttgcctccaatctccagtcaaagctcaattga

SEQ ID NO: 122481 - protein, 483 aa, Brassica napus
MLNNLTRGGFMYRASVTMLSSSTSSSSSAALSSSWKSPRFLSSGVLSGGGSRNRVAFPVRFHRALSVRCFASSGGSDRIQVQNPIVEMDGDEMTRVIWSMIKDKLILPYLDLDIKYFDLGILNRDATDDRVTVESAEAALKYNVAIKCATITPDEGRVKEFGLKSMWRSPNGTIRNILDGTVFREPIMCGNIPRLVPGWRKPICIGRHAFGDQYRATDQVVKGPGKLKMVFVPEDGSAPEELDVYDFKGPGVALAMYNVDESIRAFAESSMAMALAKKWPLYLSTKNTILKKYDGRFKDIFQEVYEANWKQKFEEHSIWYEHRLIDDMVAYAVKSEGGYVWACKNYDGDVQSDLLAQGFGSLGLMTSVLLSSDGKTLESEAAHGTVTRHFRLHQKGQETSTNSIASIFAWTRGLEHRAKLDKNEKLMDFVKKLESSCVNTVETGKMTKDLALLVHGPKVSRDVYLNTEEFIDAVASNLQSKLN

SEQ ID NO: 122482 - DNA, 1452 bp, Brassica napus
  CDS (1)..(1452)
atgctcaacaacctcacccgcggcggtttcgtctaccgtgccggcgtcacgatgttatcttcgtctacttcgtcttcctcctctgctgctttatcgtcttcgtggaagtctccgcgatttctccgctccggtgtgttctccggtggtgcgtcgaggaatcgcgtggcctttgccgttcggtttcatcacgcttcagctgttcggtgttttgcctcttctggtggctctgataggattcaggttcagaaccctatcgtcgaaatggacggtgatgaaatgacgagggtgatatggagtatgataaaggataaacttattttgccttatctggatcttgacattaagtactttgacttggggattctgaatcgtgatgctactgatgacagagttacggttgaaagtgctgaagctgctcttaagtacaacgttgctatcaaatgtgccactataactcctgatgagggcagagtgaaggagtttggactgaaatcaatgtggaggagtcctaatgggacaatcagaaacattttagatggaactgttttccgtgaacctatcatgtgtggcaatatccctcggcttgttcctggttggagaaaaccaatatgcattggtagacatgcctttggtgaccagtatcgtgccaccgatacagtaattaaagggccaggaaagttgaaaatggtttttgtcccagaagatgggagcgcacctgaggaactagacgtatatgatttcaaaggcccaggtgtagctctggctatgtacaacgtagatgagtcaattcgtgcttttgctgagtcatctatggcgatggcacttgcaaagaagtggccactatacttgagcaccaagaacacaattcttaaaaaatatgatggcaggttcaaggacatatttcaagaagtctacgaggcgaattggaagcaaaagtttgaagagcactcaatatggtatgaacatcgtttaatcgatgacatggtggcttatgcagtaaaaagcgaaggtggatatgtgtgggcttgcaaaaattacgatggtgatgttcagagcgatcttcttgcacaagggtttggctcattaggcctcatgacctccgttttgttatcctctgatgggaaaacactcgagtcagaggcggctcatggaaccgtaactcggcatttccgactgcaccaaaagggacaagagaccagtactaacagcatcgcctccatatttgcatggacacgcggcttagaacacagggcaaaactcgataagaacgaaaaattgatggattttgtcaagaagctcgagtcgtcgtgtgttaacactgttgagacagggaaaatgaccaaggatcttgcccttctggtccatggtcccaaggtgagtagagatgtgtacttgaacacagaagagttcattgatgcagtagcctccaatctccagtcacagctcaattga

SEQ ID NO: 122483 - protein, 483 aa, Brassica napus
MLNNLTRGGFVYRAGVTMLSSSTSSSSSAALSSSWKSPRFLRSGVFSGGASRNRVAFAVRFHHASAVRCFASSGGSDRIQVQNPIVEMDGDEMTRVIWSMIKDKLILPYLDLDIKYFDLGILNRDATDDRVTVESAEAALKYNVAIKCATITPDEGRVKEFGLKSMWRSPNGTIRNILDGTVFREPIMCGNIPRLVPGWRKPICIGRHAFGDQYRATDTVIKGPGKLKMVFVPEDGSAPEELDVYDFKGPGVALAMYNVDESIRAFAESSMAMALAKKWPLYLSTKNTILKKYDGRFKDIFQEVYEANWKQKFEEHSIWYEHRLIDDMVAYAVKSEGGYVWACKNYDGDVQSDLLAQGFGSLGLMTSVLLSSDGKTLESEAAHGTVTRHFRLHQKGQETSTNSIASIFAWTRGLEHRAKLDKNEKLMDFVKKLESSCVNTVETGKMTKDLALLVHGPKVSRDVYLNTEEFIDAVASNLQSQLN

SEQ ID NO: 122484 - DNA, 1242 bp, Glycine max
  CDS (1)..(1242)
atggcagcgttccagaagatcaaggtcgtcaaccccatcgtcgagatggacggagatgaaatgactagggttatctggaagtcaatcaaggacaagctcattttgcccttcttggagttggacatcaagtattatgacttaggccttccttaccgtgatgagaccgatgataaagttacaattgaaagtgcagaagcaactctcaagtacaatgtagcaatcaagtgtgcaactatcactccagatgaagctcgtgtgaaggagtttggcctgaagtcaatgtggaagagtccaaatgggactattaggaacattttgaatggaactgtcttcagagaaccaattctttgcaaaaacattccccgccttgttcctggttggacaaaggcaatatgtattggaaggcatgcgtttggtgatcaatatcgggctactgacactgtaattaaaggagctggaaagctgaagctggtgtttgttccagaaggccaaggtgaggaaactgaattcgaggtttttaacttcactggtgaagggggtgtttcattggctatgtacaatactgatgagtctattcgttcttttgccgaggcttctatggcaactgctttagagaaaaagtggccactttatcttagcaccaaaaatacaattctcaagaaatatgatggaagattcaaggacatatttcaagaagtttatgaggcaagctggaaatcaaagtttgaggctgctggtatatggtatgagcatcggctcattgatgatatggtggcgtatgcacttaagagtgaaggaggttatgtatgggcttgcaaaaactatgatggagatgtccagagtgatttcttagctcaaggttttggatcactaggtttgatgacatctgtattggtttgccctgatggaaagactattgaagcagaagcagctcacggcacagttacccgtcattttagggttcatcagaagggaggtgaaaccagcacaaatagcatagcatccatctttgcctggacaagagggctagcccacagggcaaaactggacgacaatgccaaactcttggatttcactgaaaaactagaggcagcttgcattggagtagtagaggctgggaagatgaccaaggatttggcacttattcttcatggatccaagctttcaagggagcattatttgaacacagaggaattcattgatgccgtggcagccgagcttagtgctaagctttctacatag

SEQ ID NO: 122485 - protein, 413 aa, Glycine max
MAAFQKIKVVNPIVEMDGDEMTRVIWKSIKDKLILPFLELDIKYYDLGLPYRDETDDKVTIESAEATLKYNVAIKCATITPDEARVKEFGLKSMWKSPNGTIRNILNGTVFREPILCKNIPRLVPGWTKAICIGRHAFGDQYRATDTVIKGAGKLKLVFVPEGQGEETEFEVFNFTGEGGVSLAMYNTDESIRSFAEASMATALEKKWPLYLSTKNTILKKYDGRFKDIFQEVYEASWKSKFEAAGIWYEHRLIDDMVAYALKSEGGYVWACKNYDGDVQSDFLAQGFGSLGLMTSVLVCPDGKTIEAEAAHGTVTRHFRVHQKGGETSTNSIASIFAWTRGLAHRAKLDDNAKLLDFTEKLEAACIGVVEAGKMTKDLALILHGSKLSREHYLNTEEFIDAVAAELSAKLST

SEQ ID NO: 122486 - DNA, 1230 bp, Triticum aestivum
  CDS (1)..(1230)
atggcgttcgagaagatcaaggtcaccaaccccatcgtcgagatggacggcgatgagatgaccagagtattctggcagtctaccaaggacaagcttatcttcccatttttggacttggacattaagtactttgacttgggagttctacaccgcgatgcaactgatgacaaggttacagtggaggctgcagaggctactctcaagtacaatgtggctattaaatgtgcaactattactccagatgaagatcgggttaaggagttcaacctaaaacaaatgtggaggagcccaaatggcacaattaggaacattataaacggcaccgtgttcagagagccaattatatgcaagaatgtccccaagcttgttccaggatggactaagcccatctgcattggaaggcatgctttcggtgatcagtacagagcaactgatgccgttctcaagggacctggcaaactcagactagttttcgagggaaaagacgagacggttgaccttgaggtttttaacttcactggtgctggaggagtcgccatggctatgtacaacacagatgagtcaattcgaggttttgctgaagcttctatggcaatcgcttatgagaagaaatggccattgtaccttagcacaaaaaacacaatccttaagaaatatgatggcaggttcaaggacattttccaggagatctatgaagctggctggaaatccaaatatgaggctgctggaatatggtatgaacatcgtctcattgatgacatggttgcctatgcacttaagagcgaaggaggctatgtttgggcttgcaagaactatgacggagatgtgcagagtgatttcttagctcaaggttttggttctttgggcttgatgacgtcagtattgatgtgccctgatggtaaaaccatcgaagctgaagctgcccatggcacagttacccgccatttccgtgttcaccagaaaggtggtgaaaccagcacaaacagcattgcttcaatctttgcttggacaagaggacttgcacacagggcaaagctagacgagaatgctagacttcttgaatttgcacagaaacttgaggaagcgtgcgtcggaactgtggagtctgggaagatgaccaaggaccttgcactccttgttcatggatcctcaaaagttacaagaggcgattacctgaacactgaagagttcattgacgcagttgctgctgagctcaaatcaagactgtga

SEQ ID NO: 122487 - protein, 409 aa, Triticum aestivum
MAFEKIKVTNPIVEMDGDEMTRVFWQSTKDKLIFPFLDLDIKYFDLGVLHRDATDDKVTVEAAEATLKYNVAIKCATITPDEDRVKEFNLKQMWRSPNGTIRNIINGTVFREPIICKNVPKLVPGWTKPICIGRHAFGDQYRATDAVLKGPGKLRLVFEGKDETVDLEVFNFTGAGGVAMAMYNTDESIRGFAEASMAIAYEKKWPLYLSTKNTILKKYDGRFKDIFQEIYEAGWKSKYEAAGIWYEHRLIDDMVAYALKSEGGYVWACKNYDGDVQSDFLAQGFGSLGLMTSVLMCPDGKTIEAEAAHGTVTRHFRVHQKGGETSTNSIASIFAWTRGLAHRAKLDENARLLEFAQKLEEACVGTVESGKMTKDLALLVHGSSKVTRGDYLNTEEFIDAVAAELKSRL

SEQ ID NO: 122488 - DNA, 1239 bp, Zea mays
  CDS (1)..(1239)
atggcgttcgagaagatcaaggtctccaacccaatcgtcgagatggacggtgatgagatgaccagagtattctggcagtctatcaaggacaagcttatctttccatttctggacctggacatcaagtactatgacttggggatactgcaccgtgacgcaactgatgacaaggtcacagtggaggctgcagaggctactctcaagtacaatgtggccattaagtgtgcgaccattactccagatgaaactagggttaaggagttcaatttgaagcacatgtggaagagcccaaatggcacaattaggaacattataaatggtactgtgttcagagaaccaattatatgcaaaaacgttccaaggcttgttccaggatggacgaagcccatctgcattggaaggcatgccttcggtgatcagtaccgagctactgatgcagttctgaaggggcctgggaagctgaagctagtttttgagggaaaagaagaacagattgatctggaggtgttcaacttcactggtgctggaggagttgccttgtctatgtacaacactgatgagtcaattcgagcttttgccgcagcttctatgacaactgcatatgagaagaaatggccgctctaccttagcaccaaaaacacaatcctgaagaaatatgatggcaggtttaaggacattttccaggaggtctatgaagctgactggaaatccaaatttgaggctgctggaatatggtatgagcatcgtcttattgatgacatggttgcatatgcacttaagagtgaaggaggctacgtgtgggcttgcaagaattacgatggagatgtgcagagtgatttcttagcacaaggttttggctctttgggtttgatgacatcagtgttggtgtgccctgatgggaaaaccattgaagctgaagcagcccatggcacggttacccgccatttccgtgttcaccagaaaggaggtgaaaccagtacgaacagcattgcttcaatctttgcatggacaagggggcttgcacatagggcaaagctcgacgacaatgcgaggctcctcgacttcgctctcaaactcgaggccgcttgcgttggagctgtggagtctgggaagatgactaaagatctcgcacttcttgttcatggatcttccaaagtcacgagaagccattacctgaacacagaagagttcatcgatgcagtcgctactgagcttcgatcaagattgggagccaattga

SEQ ID NO: 122489 - protein, 412 aa, Zea mays
MAFEKIKVSNPIVEMDGDEMTRVFWQSIKDKLIFPFLDLDIKYYDLGILHRDATDDKVTVEAAEATLKYNVAIKCATITPDETRVKEFNLKHMWKSPNGTIRNIINGTVFREPIICKNVPRLVPGWTKPICIGRHAFGDQYRATDAVLKGPGKLKLVFEGKEEQIDLEVFNFTGAGGVALSMYNTDESIRAFAAASMTTAYEKKWPLYLSTKNTILKKYDGRFKDIFQEVYEADWKSKFEAAGIWYEHRLIDDMVAYALKSEGGYVWACKNYDGDVQSDFLAQGFGSLGLMTSVLVCPDGKTIEAEAAHGTVTRHFRVHQKGGETSTNSIASIFAWTRGLAHRAKLDDNARLLDFALKLEAACVGAVESGKMTKDLALLVHGSSKVTRSHYLNTEEFIDAVATELRSRLGAN

SEQ ID NO: 122490 - DNA, 1236 bp, Linum usitatissimum
  CDS (1)..(1236)
atggctttcgagaagatcaaggtcactaaccccatcgtcgagatggacggagatgaaatgacccgagttatatggcaatcaattaaggataagcttatcctcccatttgtggagttggacatcaagtactttgaccttggccttcctcatcgtgatgctaccgatgataaagttacagttgaaagtgcagaagctactctgaagtataatgtagcaatcaagtgtgctacaattactccagatgaagctcgagtcaaggagttcaacttgaaacaaatgtggattagtccaaatgggacaatcaggaatattttgaatggtactgtgtttagagaaccaattctttgtaaaaatgtcccccgtcttgttccaggttggacaaagccaatttgcattggcagacatgcttttggcgatcaatataaggcaaaagacactgtcattaaagggaagggcaaactcaaattgctgtttgttccagaagatggcgaggcacaagaaattgaggtttacaactttacaggtgctggtggggtagcacaggccatgtacaacactgatgagtccatccgctcatttgctgatgcttctatgaacgttgcttttgagaaaaagtggccactttatcttagcacaaaaaataccatcctcaagaagtacgacggaagattcaaggatatctttcaagaagtttatgaagctagctggaagtccaagtttgacgaggctggaatatggtatgagcaccgactcattgatgatatggtggcctatgctctcaagagtgaaggaggatacgtatgggcttgcaagaattatgatggagatgtccagagtgatttcttagctcaaggttttggatctcttggattgatgacatctgtactggtatgccctgatggaaagaccatcgaagctgaggcagcccacggaactgtcactcgccattacagagttcatcagaaaggtggtgaaaccagcaccaacagtatcgcttcaatctttgcttggactagaggacttgcacacagggcaaagctggacgacaatgctagactcctggaattcaccgagaaactcgaagctgcctgcatcggaactgtggagtctggaaagatgaccaaagatcttgcgctgatcagtcatggatccaacttgaccagggagcattacctcaacactgaggagttcattgatgctgttgctgctgagctgaagacagcactctctgcttga

SEQ ID NO: 122491 - protein, 411 aa, Linum usitatissimum
MAFEKIKVTNPIVEMDGDEMTRVIWQSIKDKLILPFVELDIKYFDLGLPHRDATDDKVTVESAEATLKYNVAIKCATITPDEARVKEFNLKQMWISPNGTIRNILNGTVFREPILCKNVPRLVPGWTKPICIGRHAFGDQYKAKDTVIKGKGKLKLLFVPEDGEAQEIEVYNFTGAGGVAQAMYNTDESIRSFADASMNVAFEKKWPLYLSTKNTILKKYDGRFKDIFQEVYEASWKSKFDEAGIWYEHRLIDDMVAYALKSEGGYVWACKNYDGDVQSDFLAQGFGSLGLMTSVLVCPDGKTIEAEAAHGTVTRHYRVHQKGGETSTNSIASIFAWTRGLAHRAKLDDNARLLEFTEKLEAACIGTVESGKMTKDLALISHGSNLTREHYLNTEEFIDAVAAELKTALSA

SEQ ID NO: 122492 - DNA, 1251 bp, Linum usitatissimum
  CDS (1)..(1251)
atgtctttccagaagatcagagtcaccaatcccatcgtcgagatggacggggatgaaatgactagagtgttctggaaatcgatcaaggataagcttatattccccttcttggatctggatatcaagtattttgaccttggcttaccaaaccgggatgccacaaacgatcaagtgaccatagatagtgctgaagctactcttaagtataacgttgctatcaagtgtgcaactataactccagatgaagaccgtgtaaaagagttcaacttgaaaaaaatgtggaggagccctaacgggacaattcggaacattctaaatggtactgttttcagagaaccaatcatctgcaggaacgttccacgtcttgtcccaggttggacaaggccaatatgcattggaaggcatgcatttggtgatcaataccgagcaactgatttggtcgtgggcgagcctggcaagctcaagatggtgtttgtgcctgatggacacagcaaaacaacagaacttgaggtttttaagtttactggagctggaggtgtaggtttggccatgtataacactgacgagtccattcgtgcttttgcggaggcttcgatgaacactgcataccataaaaggtggccgctttatcttagcacgaaaaataccatcctcaagaagtacgatggaagatttaaagacatatttcaggaagtttatgaaagcagatggaaatccaagtatgaagctgcaaaaatatggtatgaacatcgccttatcgatgatatggtcgcttactctctaaaaagcgacggagggtatgtctgggcgtgcaagaattacgatggagatgtccagagtgatttcctagctcaaggatttggttctcttggcttgatgacatcagtattggtatgcccagatggtaaaacaatcgaagctgaagcagctcatggcacagtgactcgccattaccgtgtccaccagaagggaggagaaacgagcacgaacagcattgcgtccattttcgcttggtcacgaggcttagctcacagggcaaagctggatggtaatgctcgactttcggacttcaccaagaagctcgaagcagcctgcgttggaactgtcgaatcaggaaagatgaccaaggatcttgctcttctcatccatggacccaaggttactagggctcagtacttgaatactgaagagttcattgatgcagtagcagaccagctgaaacaaagactaatggtcaaatcaaagctgtaa

SEQ ID NO: 122493 - protein, 416 aa, Linum usitatissimum
MSFQKIRVTNPIVEMDGDEMTRVFWKSIKDKLIFPFLDLDIKYFDLGLPNRDATNDQVTIDSAEATLKYNVAIKCATITPDEDRVKEFNLKKMWRSPNGTIRNILNGTVFREPIICRNVPRLVPGWTRPICIGRHAFGDQYRATDLVVGEPGKLKMVFVPDGHSKTTELEVFKFTGAGGVGLAMYNTDESIRAFAEASMNTAYHKRWPLYLSTKNTILKKYDGRFKDIFQEVYESRWKSKYEAAKIWYEHRLIDDMVAYSLKSDGGYVWACKNYDGDVQSDFLAQGFGSLGLMTSVLVCPDGKTIEAEAAHGTVTRHYRVHQKGGETSTNSIASIFAWSRGLAHRAKLDGNARLSDFTKKLEAACVGTVESGKMTKDLALLIHGPKVTRAQYLNTEEFIDAVADQLKQRLMVKSKL

SEQ ID NO: 122494 - DNA, 1245 bp, Hordeum vulgare
  CDS (1)..(1245)
atggcgttcgagaagatccaggttgccaaccccatcgtcgagatggacggtgatgagatgacacgaattatatggaaatggatcaaagataagcttatatttcctttcctggacctggacataaaatactttgacttaggtctacctaaccgtgacgctactggggataaagtaacgatagaaagtgcagaagctaccctaaagtataacgtggccatcaaatgtgcaactgtcaccccagatgaaggacgcgtaaaagagtttaatttaaaagctatgtggaggagtccaaatgggacaataaggaacatcttaaatggaactgttttccgagaaccaatcatctgcaagaatgttcctcggcttgtgcctggatggacaaaacccatatgcattggcagacatgcttttggtgatcaataccgagcaacagatataatcattagagggacagggaagctcaagttgatatttgatggcatagaggaacaaatagagttggatgtgttcaactttagtggtgctggtggagtagcattatctatgtataacactgatgagtctattcgagcatttgctgaagcttcgatgaacatggcttaccagaagagatggccactttatcttagtacgaagaacacaatcctgaaaaaatatgacggaaggtttaaagacatattccaacaaaactatgaaacaaattggagatgcaggtttgaggatgcaggaatatggtatgaacatagactgattgatgatatggtggcctatgccctaaagagtgaaggtggctatgtttgggcttgcaagaattatgatggagatgtgcagagcgatctaattgctcaaggttttggatcgttaggtctcatgacatcggttttggtgtgccctgatggtagaacagttgaagctgaagctgcacacggtacagtcacacgacattacagagtccaccaaaaaggaggcgaaactagcacaaacagcattgcgtcaatctttgcatggtctactggattagcacatagggcaaagctggatgacaacaaaagactgttggatttcacacaaaaacttgaagctgcttgtgtggggacagtggaatctggaaagatgacaaaggacctagctcttctcatccatgggccaactgttagtcgtgataagtatctgaacaccatggagttcattgatgcggttgctgaggagttgaggacaagattgtccgcaaaatcaaagttatga

SEQ ID NO: 122495 - protein, 414 aa, Hordeum vulgare
MAFEKIQVANPIVEMDGDEMTRIIWKWIKDKLIFPFLDLDIKYFDLGLPNRDATGDKVTIESAEATLKYNVAIKCATVTPDEGRVKEFNLKAMWRSPNGTIRNILNGTVFREPIICKNVPRLVPGWTKPICIGRHAFGDQYRATDIIIRGTGKLKLIFDGIEEQIELDVFNFSGAGGVALSMYNTDESIRAFAEASMNMAYQKRWPLYLSTKNTILKKYDGRFKDIFQQNYETNWRCRFEDAGIWYEHRLIDDMVAYALKSEGGYVWACKNYDGDVQSDLIAQGFGSLGLMTSVLVCPDGRTVEAEAAHGTVTRHYRVHQKGGETSTNSIASIFAWSTGLAHRAKLDDNKRLLDFTQKLEAACVGTVESGKMTKDLALLIHGPTVSRDKYLNTMEFIDAVAEELRTRLSAKSKL

SEQ ID NO: 122496 - DNA, 1251 bp, Helianthus annuus
  CDS (1)..(1251)
atgtctttcgccaaaatcaaagtcgaaaaccccatcgttgagatggacggagatgaaatgactcgtgtcttttggcaatcaatcaaggataagctcattttccccttcgtagatctcgacattaagtattacgacctgggtcttcctaaccgtgatgctactgacgataaagttaccatcgaaagtgccgaagctactcttaagtacaatgttgcgattaagtgcgccaccattacccctgatgaggctcgtatgaaggagttcactttgaaaagcatgtggaagagtccaaacgggacgatcagaaatatattgaacggcacagtttttagagaaccaattctttgcaaaaatattcccaaactagttccaggatggacaaagcctatttgcatcggaagacatgcatttggtgatcaatacaaagctactgatgcagtgattaagggacccggaaagcttaagcttgtttttgttcccgaaggagaaggtgaaaacatagacttggaagtttacaacttcactggtgccggaggggtagctttgtcaatgtacaacactgaagagtccattgccgcttttgctgaggcctcgatgaacacagcttatcagaagaagtggccactttatcttagcacgaagaacactattctgaagaaatatgacggaagattcaaggacatatttcaagatgtttatgaaagcaactggaagtcgaagttcgaggctgctggaatatggtatgaacaccgtctcatcgatgatatggttgcttatgctcttaagagtgatggaggttatgtatgggcatgcaaaaactacgatggtgatgttcaaagtgatatgttggctcaagggttcggatcacttggattgatgacatcagtcttggtttgccctgatgggaagaccattgaatccgaagcagctcacggcactgtaactcgtcattacagagtgcatcaaaagggaggtgaaactagcactaatagtatagcctcaatctttgcttggacccgaggactggcccacagggcaaagttggacaacaacgctaagcttttggatttcactgagaagctggaagccgcatgtatcggaactgttgaatccggaaagatgacaaaggatcttgcactcattattcatggatccaagctcagtagggagcactatttgaacaccgaagaatttatcgatgctgtagccgatgagctgaaagcaagacttgtgggcaaatcatcactgtaa

SEQ ID NO: 122497 - protein, 416 aa, Helianthus annuus
MSFAKIKVENPIVEMDGDEMTRVFWQSIKDKLIFPFVDLDIKYYDLGLPNRDATDDKVTIESAEATLKYNVAIKCATITPDEARMKEFTLKSMWKSPNGTIRNILNGTVFREPILCKNIPKLVPGWTKPICIGRHAFGDQYKATDAVIKGPGKLKLVFVPEGEGENIDLEVYNFTGAGGVALSMYNTEESIAAFAEASMNTAYQKKWPLYLSTKNTILKKYDGRFKDIFQDVYESNWKSKFEAAGIWYEHRLIDDMVAYALKSDGGYVWACKNYDGDVQSDMLAQGFGSLGLMTSVLVCPDGKTIESEAAHGTVTRHYRVHQKGGETSTNSIASIFAWTRGLAHRAKLDNNAKLLDFTEKLEAACIGTVESGKMTKDLALIIHGSKLSREHYLNTEEFIDAVADELKARLVGKSSL

SEQ ID NO: 122498 - DNA, 1239 bp, Brassica napus
  CDS (1)..(1239)
atggcctttgagaagatcaaggttgctaatcccatcgtcgagatggatggtgatgaaatgacccgagttatctggaagtccatcaaggataagcttattacccctttcgtggagttggatatcaagtacttcgaccttggccttcctcaccgtgatgccactgatgacaaagttactatcgaaagcgctgaagccactaagaagtataatgttgcaatcaagtgtgccaccatcactccagatgaaggccgtgtcactgaatttggcttgaagcagatgtggagaagtccaaatgggaccatcaggaatattctgaatgggactgtatttagagaaccaattatctgcaaaaatgttcccaagcttgtcccaggatggacgaagcccatctgcattggaaggcatgcttttggtgatcagtaccgtgccactgatgctgttatcaagggtccaggaaaactgactatgacttttgagggaaaagatgggaaaactgaaactgaagtgttcacatttaccggtgaaggtggtgttgctatggccatgtacaacactgatgagtccatccgtgctttcgctgaggcatcgatgaacactgcttatgagaaaaagtggccactttatctcagcacaaagaacaccattcttaagaaatacgatggcagattcaaagacatcttccaggaggtgtatgaagccagctggaaatcaaagtatgaagctgctggaatatggtatgagcaccgtctcattgatgatatggtggcttacgctctcaagagcgagggaggctatgtgtgggcttgcaaaaactatgatggtgatgtccaaagcgatttcctcgcacaagggttcgggtcacttggactgatgacatctgttctggtctgcccggatgggaagacgattgaagctgaagcagcacatggaacggttacccgtcactacagggttcaccagaaaggtggggagaccagcacaaacagcatagcctccatctttgcttggactcgtggacttgcacacagggctaagttagatgacaactcaaaactcttggagtttactgagaagcttgaagctgcttgtgtcggtacggtggagtctggaaaaatgaccaaagatcttgctctcatcattcacggctcaaagctctcgagggacacttacctgaacacggaggagttcatcgatgcagttgcggatgagctcaaaacaagactcggcgtcaaagcttaa

SEQ ID NO: 122499 - protein, 412 aa, Brassica napus
MAFEKIKVANPIVEMDGDEMTRVIWKSIKDKLITPFVELDIKYFDLGLPHRDATDDKVTIESAEATKKYNVAIKCATITPDEGRVTEFGLKQMWRSPNGTIRNILNGTVFREPIICKNVPKLVPGWTKPICIGRHAFGDQYRATDAVIKGPGKLTMTFEGKDGKTETEVFTFTGEGGVAMAMYNTDESIRAFAEASMNTAYEKKWPLYLSTKNTILKKYDGRFKDIFQEVYEASWKSKYEAAGIWYEHRLIDDMVAYALKSEGGYVWACKNYDGDVQSDFLAQGFGSLGLMTSVLVCPDGKTIEAEAAHGTVTRHYRVHQKGGETSTNSIASIFAWTRGLAHRAKLDDNSKLLEFTEKLEAACVGTVESGKMTKDLALIIHGSKLSRDTYLNTEEFIDAVADELKTRLGVKA

SEQ ID NO: 122500 - DNA, 1248 bp, Zea mays
  CDS (1)..(1248)
atggccttcaacaagatcaaggtctccaaccccgtcgtcgagatggacggcgatgagatgaccagggtgttctggaaatctatcaaggacaagcttatattccctttcgtagacctcgacatcaaatattttgacctcgggcttccacaccgtgatgctaccgacgacaaagtcacagtggaggctgcggaggccacactcaagtacaatgtggctatcaagtgtgccaccattacaccagatgaagcaagggtaaatgagtttggcttgaaggctatgtggaagagcccaaatggcacaattaggaatattctgaatggcactgtgttcagagaaccaatcatctgcaaaaacatcccacggcttgttccagggtggacaaagcccatttgcattgggaggcatgcattcggcgatcagtaccgggcaactgatgcagttatcaaggggccggggaagcttaaattagtttttgagggaaaagaagagcaagttgagctggaggtgttcaacttcactggtgccggaggagttgccttatcaatgtacaacactgacgagtccatccatgcctttgctgacgcttctatggccactgcttatgaaaagaaatggccattgtatcttagcaccaaaaacactattttgaagaaatatgatggcaggttcaaggacattttccaggaggtgtatgaagctggttggaaaaccaaatttgaagctgccggcatatggtatgagcaccgccttatcgatgacatggtagcatacgcacttaagagtgaaggagggtatgtctgggcttgcaagaattatgatggagatgtgcagagcgatttcttagctcaaggttttggctcattgggtttgatgacttcggtactggtgtgccctgatggaaagacgatcgaagctgaagctgcccatggtactgttacccgtcattaccgtgttcaccagaaaggaggtgaaaccagtacgaacagtattgcctcaatctttgcgtggacaagaggacttgcacacagggcaaagcttgatgacaatgctagactacttgacttcacccagaagcttgaggctgcctgcgttggagccgtcgagtctgggaagatgaccaaggaccttgcccttctcgttcacggatcttcaaatatcacgaggagccattacctgaacacggaggagttcattgacgctgttgctgatgagctcagatcaaggctggcagccaactcgaacctttga

SEQ ID NO: 122501 - protein, 415 aa, Zea mays
MAFNKIKVSNPVVEMDGDEMTRVFWKSIKDKLIFPFVDLDIKYFDLGLPHRDATDDKVTVEAAEATLKYNVAIKCATITPDEARVNEFGLKAMWKSPNGTIRNILNGTVFREPIICKNIPRLVPGWTKPICIGRHAFGDQYRATDAVIKGPGKLKLVFEGKEEQVELEVFNFTGAGGVALSMYNTDESIHAFADASMATAYEKKWPLYLSTKNTILKKYDGRFKDIFQEVYEAGWKTKFEAAGIWYEHRLIDDMVAYALKSEGGYVWACKNYDGDVQSDFLAQGFGSLGLMTSVLVCPDGKTIEAEAAHGTVTRHYRVHQKGGETSTNSIASIFAWTRGLAHRAKLDDNARLLDFTQKLEAACVGAVESGKMTKDLALLVHGSSNITRSHYLNTEEFIDAVADELRSRLAANSNL

SEQ ID NO: 122502 - DNA, 1347 bp, Glycine max
  CDS (1)..(1347)
atgcatagcccgagcagcgactcacactggtcttcgcttctcattcatcatttctcacctaaccttctcttcctctcagtctcagatcagaaacctcagccagccatggcagcgttccagaagatcaaggtcgtcaaccccatcgtcgagatggacggagatgaaatgactagggttatctggaagtcaatcaaggacaagctcattttgcccttcttggagttggacatcaagtattatgacttaggccttccttaccgtgatgagaccgatgataaagttacaattgaaagtgcagaagcaactctcaagtacaatgtagcaatcaagtgtgcaactatcactccagatgaagctcgtgtgaaggagtttggcctgaagtcaatgtggaagagtccaaatgggactattaggaacattttgaatggaactgtcttcagagaaccaattctttgcaaaaacattccccgccttgttcctggttggacaaaggcaatatgtattggaaggcatgcgtttggtgatcaatatcgggctactgacactgtaattaaaggagctggaaagctgaagctggtgtttgttccagaaggccaaggtgaggaaactgaattcgaggtttttaacttcactggtgaagggggtgtttcattggctatgtacaatactgatgagtctattcgttcttttgccgaggcttctatggcaactgctttagagaaaaagtggccactttatcttagcaccaaaaatacaattctcaagaaatatgatggaagattcaaggacatatttcaagaagtttatgaggcaagctggaaatcaaagtttgaggctgctggtatatggtatgagcatcggctcattgatgatatggtggcgtatgcacttaagagtgaaggaggttatgtatgggcttgcaaaaactatgatggagatgtccagagtgatttcttagctcaaggttttggatcactaggtttgatgacatctgtattggtttgccctgatggaaagactattgaagcagaagcagctcacggcacagttacccgtcattttagggttcatcagaagggaggtgaaaccagcacaaatagcatagcatccatctttgcctggacaagagggctagcccacagggcaaaactggacgacaatgccaaactcttggatttcactgaaaaactagaggcagcttgcattggagtagtagaggctgggaagatgaccaaggatttggcacttattcttcatggatccaagctttcaagggagcattatttgaacacagaggaattcattgatgccgtggcagccgagcttagtgctaagctttctacatag

SEQ ID NO: 122503 - protein, 448 aa, Glycine max
MHSPSSDSHWSSLLIHHFSPNLLFLSVSDQKPQPAMAAFQKIKVVNPIVEMDGDEMTRVIWKSIKDKLILPFLELDIKYYDLGLPYRDETDDKVTIESAEATLKYNVAIKCATITPDEARVKEFGLKSMWKSPNGTIRNILNGTVFREPILCKNIPRLVPGWTKAICIGRHAFGDQYRATDTVIKGAGKLKLVFVPEGQGEETEFEVFNFTGEGGVSLAMYNTDESIRSFAEASMATALEKKWPLYLSTKNTILKKYDGRFKDIFQEVYEASWKSKFEAAGIWYEHRLIDDMVAYALKSEGGYVWACKNYDGDVQSDFLAQGFGSLGLMTSVLVCPDGKTIEAEAAHGTVTRHFRVHQKGGETSTNSIASIFAWTRGLAHRAKLDDNAKLLDFTEKLEAACIGVVEAGKMTKDLALILHGSKLSREHYLNTEEFIDAVAAELSAKLST

SEQ ID NO: 122504 - DNA, 1683 bp, Zea mays
  CDS (1)..(1683)
atgcacacactggtggtgcctgcatctagctattcagatcaaagcctgacaggtaccatagggcaaagtgaagaagaaacagaagagttgagcaagatcacgctagagaataaggatattcagcttgatatcaatataagagtgtttgatggagcccgagcaccggcgcgcctcatacgcgccgcgtgctccttcacgcgctccgcacgtgggatgcgcaacctgctcctgccccgttgcctcctctccgcccccaccaccatggctcgtgcttccgtctccggttccgctgcggtggccaaagcactgatccccttaaaccccgccagcggcggccgccttccttccctgcttcctgcgcgcctccatgtccccgggagcagccgcgtgctccgcggcgcctcgctccgctgctatgccgccgccgccgccgctgtggccgagcagagccgcatcaaggtgcagaaccccatcgtcgagatggacggggatgagatgacgcgggtcatctggaagatgataaaggataagctcatcttcccatacctggagttggatgtgaagtactacgatcttggaattctcaatcgcgatgccaccaatgatgaggtcaccgtcgagagtgccgaggctacattgaagtataatgttgctgttaagtgtgcaacaattacgcctgacgagactcgagtaaaagagtttaaactcaagtctatgtggcggagtccaaatggcacaataaggaatattctaaatgggactgtttttcgtgagcccatcttgtgtaaaaacatcccaagaatcctttctggttggaagaaacctatttgcataggaaggcacgcctttggtgaccagtatcgagctactgatatgattattaatggtccaggaaagctcaagatggtatttgtgcctgatggagctgaccctatggagctggatgtttatgattttaagggacctggtgtggcattatcaatgtacaatgtcgacgagtctattagggctttcgctgagtcctccatggatatggctctttcaaaaaagtggcctctttatctcagcaccaagaatacaatcctcaagaagtatgacggcaggttcaaagacatcttccaggaggtatatgaagagcaatggaaggagaagtttgaagaaaactcaatatggtatgagcacaggttgattgatgacatggtggcctatgctgtgaaaagtgatggtgggtatgtttgggcttgcaaaaactatgacggagatgtacagagcgattttcttgcccaaggttttggttctctgggtttgatgacttctgtgctgttgtcttctgacgggaaaacattagaggctgaggctgctcatgggactgtcactagacatttcaggctacatcagaaaggacaggagacaagtaccaacagtattgcctccatattcgcttggacccgtggacttgaacacagggcaaagctggataaaaatgatagtctgctggatttcacacacaaacttgaatctgcatgtgttgaaacggtggaatctgggaaaatgactaaggaccttgcgcttcttatccatggccccaaggtaacaagggagttctacctgagcaccgaggagttcatcgatgcagtcgcgcagcaactgcgaggaaagattcaactaccaactactgtgtaa

SEQ ID NO: 122505 - protein, 560 aa, Zea mays
MHTLVVPASSYSDQSLTGTIGQSEEETEELSKITLENKDIQLDINIRVFDGARAPARLIRAACSFTRSARGMRNLLLPRCLLSAPTTMARASVSGSAAVAKALIPLNPASGGRLPSLLPARLHVPGSSRVLRGASLRCYAAAAAAVAEQSRIKVQNPIVEMDGDEMTRVIWKMIKDKLIFPYLELDVKYYDLGILNRDATNDEVTVESAEATLKYNVAVKCATITPDETRVKEFKLKSMWRSPNGTIRNILNGTVFREPILCKNIPRILSGWKKPICIGRHAFGDQYRATDMIINGPGKLKMVFVPDGADPMELDVYDFKGPGVALSMYNVDESIRAFAESSMDMALSKKWPLYLSTKNTILKKYDGRFKDIFQEVYEEQWKEKFEENSIWYEHRLIDDMVAYAVKSDGGYVWACKNYDGDVQSDFLAQGFGSLGLMTSVLLSSDGKTLEAEAAHGTVTRHFRLHQKGQETSTNSIASIFAWTRGLEHRAKLDKNDSLLDFTHKLESACVETVESGKMTKDLALLIHGPKVTREFYLSTEEFIDAVAQQLRGKIQLPTTV

SEQ ID NO: 122506 - DNA, 1470 bp, Zea mays
  CDS (1)..(1470)
atgcgcaacctgctcctgccccgttgcctcctctccgcccccaccaccatggctcgtgcttccgtctccggttccgctgcggtggccaaagcactgatccccttaaaccccgccagcggcggccgccttccttccctgcttcctgcgcgcctccatgtccccgggagcagccgcgtgctccgcggcgcctcgctccgctgctatgccgccgccgccgccgctgtggccgagcagagccgcatcaaggtgcagaaccccatcgtcgagatggacggggatgagatgacgcgggtcatctggaagatgataaaggataagctcatcttcccatacctggagttggatgtgaagtactacgatcttggaattctcaatcgcgatgccaccaatgatgaggtcaccgtcgagagtgccgaggctacattgaagtataatgttgctgttaagtgtgcaacaattacgcctgacgagactcgagtaaaagagtttaaactcaagtctatgtggcggagtccaaatggcacaataaggaatattctaaatgggactgtttttcgtgagcccatcttgtgtaaaaacatcccaagaatcctttctggttggaagaaacctatttgcataggaaggcacgcctttggtgaccagtatcgagctactgatatgattattaatggtccaggaaagctcaagatggtatttgtgcctgatggagctgaccctatggagctggatgtttatgattttaagggacctggtgtggcattatcaatgtacaatgtcgacgagtctattagggctttcgctgagtcctccatggctatggctctttcaaaaaagtggcctctttatctcagcaccaagaatacaatcctcaagaagtatgacggcaggttcaaagacatcttccaggaggtatatgaagagcaatggaaggagaagtttgaagaaaactcaatatggtatgagcacaggttgattgatgacatggtggcctatgctgtgaaaagtgatggtgggtatgtttgggcttgcaaaaactatgacggagatgtacagagcgattttcttgcccaaggttttggttctctgggtttgatgacttctgtgctgttgtcttctgacgggaaaacattagaggctgaggctgctcatgggactgtcactagacatttcaggctacatcagaaaggacaggagacaagtaccaacagtattgcctccatattcgcttggacccgtggacttgaacacagggcaaagctggataaaaatgatagtctgctggatttcacacacaaacttgaatctgcatgtgttgaaacggtggaatctgggaaaatgactaaggaccttgcgcttcttatccatggccccaaggtaacaagggagttctacctgagcaccgaggagttcatcgatgcagtcgcgcagcaactgcgaggaaagattcaactaccaactactgtgtaa

SEQ ID NO: 122507 - protein, 489 aa, Zea mays
MRNLLLPRCLLSAPTTMARASVSGSAAVAKALIPLNPASGGRLPSLLPARLHVPGSSRVLRGASLRCYAAAAAAVAEQSRIKVQNPIVEMDGDEMTRVIWKMIKDKLIFPYLELDVKYYDLGILNRDATNDEVTVESAEATLKYNVAVKCATITPDETRVKEFKLKSMWRSPNGTIRNILNGTVFREPILCKNIPRILSGWKKPICIGRHAFGDQYRATDMIINGPGKLKMVFVPDGADPMELDVYDFKGPGVALSMYNVDESIRAFAESSMAMALSKKWPLYLSTKNTILKKYDGRFKDIFQEVYEEQWKEKFEENSIWYEHRLIDDMVAYAVKSDGGYVWACKNYDGDVQSDFLAQGFGSLGLMTSVLLSSDGKTLEAEAAHGTVTRHFRLHQKGQETSTNSIASIFAWTRGLEHRAKLDKNDSLLDFTHKLESACVETVESGKMTKDLALLIHGPKVTREFYLSTEEFIDAVAQQLRGKIQLPTTV

SEQ ID NO: 122508 - DNA, 28 bp, Artificial sequence
  primer
atgagtatgttatctagaagattatttt

SEQ ID NO: 122509 - DNA, 26 bp, Artificial sequence
  primer
ttactcgatcgacttgatttcttttt

SEQ ID NO: 122510 - protein, 412 aa, Artificial sequence
  consensus sequence
  Variant (3)..(3): Xaa in position 3 is any amino acid
  Variant (5)..(5): Xaa in position 5 is any amino acid
  Variant (6)..(6): Xaa in position 6 is any or no amino acid
  Variant (8)..(8): Xaa in position 8 is any amino acid
  Variant (11)..(11): Xaa in position 11 is any amino acid
  Variant (19)..(19): Xaa in position 19 is any amino acid
  Variant (22)..(23): Xaa in position 22 to 23 is any amino acid
  Variant (26)..(27): Xaa in position 26 to 27 is any amino acid
  Variant (30)..(30): Xaa in position 30 is any amino acid
  Variant (32)..(32): Xaa in position 32 is any amino acid
  Variant (33)..(34): Xaa in position 33 to 34 is any or no amino acid
  Variant (36)..(40): Xaa in position 36 to 40 is any amino acid
  Variant (42)..(42): Xaa in position 42 is any amino acid
  Variant (46)..(48): Xaa in position 46 to 48 is any amino acid
  Variant (51)..(51): Xaa in position 51 is any amino acid
  Variant (53)..(53): Xaa in position 53 is any amino acid
  Variant (55)..(55): Xaa in position 55 is any amino acid
  Variant (58)..(60): Xaa in position 58 to 60 is any amino acid
  Variant (62)..(62): Xaa in position 62 is any amino acid
  Variant (64)..(65): Xaa in position 64 to 65 is any amino acid
  Variant (68)..(68): Xaa in position 68 is any amino acid
  Variant (70)..(71): Xaa in position 70 to 71 is any amino acid
  Variant (81)..(81): Xaa in position 81 is any amino acid
  Variant (84)..(84): Xaa in position 84 is any amino acid
  Variant (87)..(87): Xaa in position 87 is any amino acid
  Variant (90)..(90): Xaa in position 90 is any amino acid
  Variant (93)..(93): Xaa in position 93 is any amino acid
  Variant (104)..(104): Xaa in position 104 is any amino acid
  Variant (113)..(117): Xaa in position 113 to 117 is any amino acid
  Variant (125)..(125): Xaa in position 125 is any amino acid
  Variant (129)..(129): Xaa in position 129 is any amino acid
  Variant (140)..(140): Xaa in position 140 is any amino acid
  Variant (144)..(147): Xaa in position 144 to 147 is any amino acid
  Variant (149)..(149): Xaa in position 149 is any amino acid
  Variant (151)..(151): Xaa in position 151 is any amino acid
  Variant (153)..(165): Xaa in position 153 to 165 is any amino acid
  Variant (166)..(170): Xaa in position 166 to 170 is any or no amino acid
  Variant (172)..(177): Xaa in position 172 to 177 is any amino acid
  Variant (178)..(180): Xaa in position 178 to 180 is any or no amino acid
  Variant (183)..(185): Xaa in position 183 to 185 is any amino acid
  Variant (189)..(189): Xaa in position 189 is any amino acid
  Variant (191)..(191): Xaa in position 191 is any amino acid
  Variant (194)..(195): Xaa in position 194 to 195 is any amino acid
  Variant (198)..(199): Xaa in position 198 to 199 is any amino acid
  Variant (201)..(209): Xaa in position 201 to 209 is any amino acid
  Variant (211)..(211): Xaa in position 211 is any amino acid
  Variant (213)..(213): Xaa in position 213 is any amino acid
  Variant (222)..(222): Xaa in position 222 is any amino acid
  Variant (232)..(234): Xaa in position 232 to 234 is any amino acid
  Variant (236)..(238): Xaa in position 236 to 238 is any amino acid
  Variant (239)..(240): Xaa in position 239 to 240 is any or no amino acid
  Variant (242)..(250): Xaa in position 242 to 250 is any amino acid
  Variant (262)..(264): Xaa in position 262 to 264 is any amino acid
  Variant (266)..(267): Xaa in position 266 to 267 is any amino acid
  Variant (270)..(270): Xaa in position 270 is any amino acid
  Variant (285)..(286): Xaa in position 285 to 286 is any amino acid
  Variant (301)..(302): Xaa in position 301 to 302 is any amino acid
  Variant (307)..(307): Xaa in position 307 is any amino acid
  Variant (308)..(308): Xaa in position 308 is any or no amino acid
  Variant (310)..(310): Xaa in position 310 is any amino acid
  Variant (321)..(321): Xaa in position 321 is any amino acid
  Variant (323)..(323): Xaa in position 323 is any amino acid
  Variant (326)..(326): Xaa in position 326 is any amino acid
  Variant (328)..(328): Xaa in position 328 is any amino acid
  Variant (334)..(334): Xaa in position 334 is any amino acid
  Variant (346)..(347): Xaa in position 346 to 347 is any amino acid
  Variant (349)..(349): Xaa in position 349 is any amino acid
  Variant (353)..(359): Xaa in position 353 to 359 is any amino acid
  Variant (361)..(363): Xaa in position 361 to 363 is any amino acid
  Variant (366)..(370): Xaa in position 366 to 370 is any amino acid
  Variant (374)..(374): Xaa in position 374 is any amino acid
  Variant (375)..(375): Xaa in position 375 is any or no amino acid
  Variant (377)..(377): Xaa in position 377 is any amino acid
  Variant (384)..(394): Xaa in position 384 to 394 is any amino acid
  Variant (395)..(400): Xaa in position 395 to 400 is any or no amino acid
  Variant (402)..(403): Xaa in position 402 to 403 is any amino acid
  Variant (405)..(411): Xaa in position 405 to 411 is any amino acid
KIXVXXPXVEXDGDEMTRXIWXXIKXXLIXPXXXLXXXXXYXDLGXXXRDXTXDXVTXXXAXAXXKYXVXXKCATITPDEXRVXEFXLKXMWXSPNGTIRNILXGTVFREPIXXXXXPRLVPGWXKPIXIGRHAFGDQYXATDXXXXGXGXLXXXXXXXXXXXXXXXXXXVXXXXXXXXXGVXXXMYNXDXSIXXFAXXSXXXXXXXXXPXYXSTKNTILKXYDGRFKDIFXXXYXXXXXKXXXXXXXXXYEHRLIDDMVAXXXKXXGGXVWACKNYDGDVQSDXXAQGFGSLGLMTSVLXXPDGKXXEXEAAHGTVTRHXRXHQXGXETSTNXIASIFAWTRGLXXRXKLDXXXXXXXFXXXLEXXXXXTVEXXGXMTKDLAXXXXXXXXXXXXXXXXXTXXFXXXXXXXL

SEQ ID NO: 122511 - protein, 56 aa, Artificial sequence
  protein pattern
  Variant (12)..(13): Xaa in position 12 to 13 is any amino acid
  Variant (14)..(14): Xaa in position 14 is Ile, Leu, Met or Val
  Variant (16)..(16): Xaa in position 16 is any or no amino acid
  Variant (18)..(18): Xaa in position 18 is any or no amino acid
  Variant (20)..(20): Xaa in position 20 is any amino acid
  Variant (21)..(21): Xaa in position 21 is Phe or Tyr
  Variant (22)..(22): Xaa in position 22 is Ile, Leu or Val
  Variant (23)..(23): Xaa in position 23 is any amino acid
  Variant (25)..(25): Xaa in position 25 is any amino acid
  Variant (33)..(33): Xaa in position 33 is any amino acid
  Variant (36)..(37): Xaa in position 36 to 37 is any amino acid
  Variant (41)..(41): Xaa in position 41 is Phe or Tyr
  Variant (46)..(46): Xaa in position 46 is Leu or Met
  Variant (48)..(48): Xaa in position 48 is Ser or Thr
  Variant (50)..(50): Xaa in position 50 is any amino acid
  Variant (52)..(52): Xaa in position 52 is any amino acid
  Variant (53)..(53): Xaa in position 53 is Cys, Ser or Thr
  Variant (54)..(54): Xaa in position 54 is Ala, Pro or Ser
  Variant (55)..(55): Xaa in position 55 is Asp, Ser or Thr
YEHRLIDDMVAXXXKXSXGXXXXAXKNYDGDVXSDXXAQGXGSLGXMXSXLXXXXG

SEQ ID NO: 122512 - protein, 38 aa, Artificial sequence
  protein pattern
  Variant (2)..(2): Xaa in position 2 is any or no amino acid
  Variant (6)..(6): Xaa in position 6 is Ala or Pro
  Variant (8)..(8): Xaa in position 8 is Ile, Leu, Met or Val
  Variant (9)..(11): Xaa in position 9 to 11 is any amino acid
  Variant (12)..(12): Xaa in position 12 is Ile or Val
  Variant (14)..(14): Xaa in position 14 is Lys or Arg
  Variant (15)..(16): Xaa in position 15 to 16 is Ile, Leu or Val
  Variant (17)..(18): Xaa in position 17 to 18 is any amino acid
  Variant (20)..(21): Xaa in position 20 to 21 is any amino acid
  Variant (22)..(22): Xaa in position 22 is Ala or Pro
  Variant (24)..(24): Xaa in position 24 is any amino acid
  Variant (25)..(25): Xaa in position 25 is Ile or Val
  Variant (30)..(30): Xaa in position 30 is Phe, His or Tyr
  Variant (31)..(31): Xaa in position 31 is Ala or Gly
  Variant (35)..(35): Xaa in position 35 is any amino acid
  Variant (37)..(37): Xaa in position 37 is any amino acid
VXFREXIXXXXXPXXXXXWXXXIXXGRHAXXDQYXAXD

SEQ ID NO: 122513 - protein, 20 aa, Artificial sequence
  protein pattern
  Variant (7)..(7): Xaa in position 7 is any amino acid
  Variant (13)..(13): Xaa in position 13 is any amino acid
  Variant (14)..(14): Xaa in position 14 is Asp, Glu or Asn
  Variant (15)..(15): Xaa in position 15 is any amino acid
  Variant (17)..(19): Xaa in position 17 to 19 is any amino acid
  Variant (20)..(20): Xaa in position 20 is Phe, Trp or Tyr
KNTILKXYDGRFXXXFXXXX

SEQ ID NO: 122514 - protein, 27 aa, Artificial sequence
  protein pattern
  Variant (2)..(2): Xaa in position 2 is Ile or Val
  Variant (4)..(4): Xaa in position 4 is Asp or Glu
  Variant (5)..(5): Xaa in position 5 is Ile, Leu, Met or Val
  Variant (6)..(6): Xaa in position 6 is any amino acid
  Variant (13)..(17): Xaa in position 13 to 17 is any or no amino acid
  Variant (19)..(19): Xaa in position 19 is Lys or Arg
  Variant (20)..(21): Xaa in position 20 to 21 is any amino acid
  Variant (22)..(22): Xaa in position 22 is Phe or Leu
  Variant (24)..(24): Xaa in position 24 is any amino acid
  Variant (26)..(26): Xaa in position 26 is Phe or Tyr
  Variant (27)..(27): Xaa in position 27 is Leu, Pro or Val
PXVXXXGDEMTRXXXXXIXXXXIXPXX

SEQ ID NO: 122515 - protein, 30 aa, Artificial sequence
  protein pattern
  Variant (2)..(2): Xaa in position 2 is Phe or Tyr
  Variant (5)..(5): Xaa in position 5 is Gly or Ser
  Variant (6)..(6): Xaa in position 6 is Ile, Leu, Met or Val
  Variant (7)..(8): Xaa in position 7 to 8 is any amino acid
  Variant (11)..(11): Xaa in position 11 is any amino acid
  Variant (13)..(13): Xaa in position 13 is Asp, Glu, Asn or Ser
  Variant (15)..(15): Xaa in position 15 is any amino acid
  Variant (16)..(16): Xaa in position 16 is Ile or Val
  Variant (18)..(18): Xaa in position 18 is any amino acid
  Variant (19)..(19): Xaa in position 19 is Asp, Glu or Gln
  Variant (20)..(20): Xaa in position 20 is Ala, Ser or Thr
  Variant (22)..(22): Xaa in position 22 is any amino acid
  Variant (24)..(24): Xaa in position 24 is any amino acid
  Variant (25)..(25): Xaa in position 25 is any or no amino acid
  Variant (27)..(28): Xaa in position 27 to 28 is any amino acid
  Variant (29)..(29): Xaa in position 29 is any or no amino acid
YXDLXXXXRDXTXDXXTXXXAXAXXKXXXV

SEQ ID NO: 122516 - protein, 21 aa, Artificial sequence
  protein pattern
  Variant (2)..(2): Xaa in position 2 is Ile or Val
  Variant (3)..(4): Xaa in position 3 to 4 is any amino acid
  Variant (5)..(5): Xaa in position 5 is Ala, Gly, Ser or Thr
  Variant (6)..(6): Xaa in position 6 is any amino acid
  Variant (7)..(7): Xaa in position 7 is Phe, His or Tyr
  Variant (9)..(9): Xaa in position 9 is any amino acid
  Variant (11)..(11): Xaa in position 11 is any amino acid
  Variant (14)..(14): Xaa in position 14 is any amino acid
  Variant (15)..(15): Xaa in position 15 is Ala, Asp, Glu, Gly or Ser
  Variant (18)..(18): Xaa in position 18 is any amino acid
  Variant (19)..(19): Xaa in position 19 is Ala or Ser
  Variant (20)..(20): Xaa in position 20 is Cys or Ser
  Variant (21)..(21): Xaa in position 21 is Phe, Leu or Met
GXXXXXXNXDXSIXXFAXXXX

SEQ ID NO: 122517 - protein, 9 aa, Artificial sequence
  protein pattern
  Variant (2)..(2): Xaa in position 2 is any amino acid
  Variant (9)..(9): Xaa in position 9 is Ile or Leu
GXMTKDLAX

SEQ ID NO: 122518 - DNA, 1542 bp, Saccharomyces cerevisiae
  CDS (1)..(1542)
atgagtttgtccacgaaaagagagcactctggtgatgtaactgactcttcattcaaaagacagcaacgaagtaataagcccagctcagaatacacttgtctgggccatctggtgaacttaatacccggaaaggagcaaaaagtggaaataacaaatagaaacgttactacaatcggtagaagtaggtcgtgcgacgttatattgagtgagcctgacatctcgactttccatgctgagtttcatctactgcaaatggatgtggataatttccaaagaaatttgattaatgttatcgataagagcagaaacggaacttttattaatggtaatcgtttggtgaagaaagactacatccttaagaatggtgacagaattgtctttggcaaaagttgctcctttttgttcaagtacgcatcttcatcttctactgacatcgaaaatgacgatgaaaaggtaagttcagaaagtcgttcatataagaacgacgacgaagttttcaagaaaccgcaaataagtgctacaagtagccaaaatgctacaacgagtgccgcaattagaaaactgaataagacaaggcctgtgtcgttctttgataaatatttattaggtaaagaattaggtgcagggcactacgccctggtgaaagaagccaaaaacaaaaaaactggtcagcaagtagctgtgaaaatattccacgctcagcaaaatgacgaccaaaaaaagaataaacaatttagggaggaaactaacatcctaatgagagtgcaacatccaaacattgtcaacttactagatagttttgtagagccaatcagcaaatctcagattcaaaaatatttggtactggaaaagatcgacgatggcgaactatttgaaagaatcgtcagaaaaacatgtttgagacaggatgaatccaaagctctattcaaacagttacttaccggattgaagtatctgcatgagcaaaacatcattcacagagacatcaagccagaaaatatcttattaaatataacaaggcgcgaaaatccaagtcaagtccaacttggcccatgggatgaagatgaaattgatattcaagttaaaatagcggattttggcctagcaaaatttacaggagaaatgcaattcacaaacacactttgtggtacgccttcttatgtagcgcccgaagtcctcacaaagaaaggatacacatcaaaagtagatctttggagtgctggtgtcatattatatgtctgtttatgtggttttcctccattcagtgatcaattggggccaccttcattgaaggaacagatcttacaagctaagtatgcgttttactctccgtactgggataaaatcgatgactcagtactacatttaatatccaatcttttggtcctaaatcctgatgaaaggtacaatatagatgaagctttgaaccacccttggttcaatgacatacagcaacaaagctcggtctcattagaattgcagcgtttacaaattactgacaataaaatacccaaaacatactcagaattatcttgcctctaa

SEQ ID NO: 122519 - protein, 513 aa, Saccharomyces cerevisiae
MSLSTKREHSGDVTDSSFKRQQRSNKPSSEYTCLGHLVNLIPGKEQKVEITNRNVTTIGRSRSCDVILSEPDISTFHAEFHLLQMDVDNFQRNLINVIDKSRNGTFINGNRLVKKDYILKNGDRIVFGKSCSFLFKYASSSSTDIENDDEKVSSESRSYKNDDEVFKKPQISATSSQNATTSAAIRKLNKTRPVSFFDKYLLGKELGAGHYALVKEAKNKKTGQQVAVKIFHAQQNDDQKKNKQFREETNILMRVQHPNIVNLLDSFVEPISKSQIQKYLVLEKIDDGELFERIVRKTCLRQDESKALFKQLLTGLKYLHEQNIIHRDIKPENILLNITRRENPSQVQLGPWDEDEIDIQVKIADFGLAKFTGEMQFTNTLCGTPSYVAPEVLTKKGYTSKVDLWSAGVILYVCLCGFPPFSDQLGPPSLKEQILQAKYAFYSPYWDKIDDSVLHLISNLLVLNPDERYNIDEALNHPWFNDIQQQSSVSLELQRLQITDNKIPKTYSELSCL

SEQ ID NO: 122520 - DNA, 1380 bp, Drosophila melanogaster
  CDS (1)..(1380)
atggcacgcgacacacaaggaacgcagggaacccagagtcaggcctccaatatctggacgcaggtggagagccagccgatggagaagatagtctggggtcgattgtacggcaagaacattaagatcaaatcgctggatctcaacaacgacgagttcaccgcaggacgaggggaggccaacgacttgatcctcacgctcaacgatttgcccgagaaaatcctgacgcgcatttccaaagtgcattttatcataaagcgggcaaactgcgaacttaccaatccagtttatattcaggatctctcacgcaacgggacgtttgtgaataacgagaaaattggcacaaacaggatgcgaatcctaaagaatgacgacgtaatttccctgtcccacccaacgtacaaagcctttgtattcaaggatctcagcccgaatgagtcgatcgggcttcccgaggagattaacaagacgtattatgtaaatcgcaagctgggatctggagcgtacggactggtgcgtttggtctatgacacccgcacctgccagcagtttgcgatgaaaatcgttaagaagaatatgctctctggggcgcgacccagtaccaatttcagtgatcccgaccgggtgctgaacgaagccaagattatgaagaatctttcacatccgtgcgtggttcgcatgcacgacatcgtggacaagccggattctgtgtatatggtgctggagtttatgcgcggcggcgacctgcttaaccggatcatcagcaacaaactacttagcgaggacatctcgaagctttacttttaccaaatgtgccatgccgtcaagtacctacacgatcggggcatcacccatcgtgaccttaagcctgacaatgttttgctggagaccaatgacgaggagaccctactgaaggtctccgatttcgggctgagtaagtttgtgcagaaggactcggttatgcgcacgctctgtggcacacctctctacgtggcccctgaggtgctgattaccggcggccgagaagcctacaccaagaaagtggacatttggagcttgggagtggtgctatttacttgcctgagtggcactctgcccttttcggacgagtacggcaccccggcggcccagcaaataaagaagggcagattcgcgtatggacacccttcttggaagagtgtctcgcagcgcgccaagctgctgatcaaccaaatgctcattgtggatcccgagaggcgaccctcaatcgacgacgttttgcagagcagctggctgcgcgatgcgcccatgctgcagaaggcgaagaggctgatgaagctcgatggcatggaaatcgaggaggagaacttccttgagccacccaccaagcgatcgcgacgctag

SEQ ID NO: 122521 - protein, 459 aa, Drosophila melanogaster
MARDTQGTQGTQSQASNIWTQVESQPMEKIVWGRLYGKNIKIKSLDLNNDEFTAGRGEANDLILTLNDLPEKILTRISKVHFIIKRANCELTNPVYIQDLSRNGTFVNNEKIGTNRMRILKNDDVISLSHPTYKAFVFKDLSPNESIGLPEEINKTYYVNRKLGSGAYGLVRLVYDTRTCQQFAMKIVKKNMLSGARPSTNFSDPDRVLNEAKIMKNLSHPCVVRMHDIVDKPDSVYMVLEFMRGGDLLNRIISNKLLSEDISKLYFYQMCHAVKYLHDRGITHRDLKPDNVLLETNDEETLLKVSDFGLSKFVQKDSVMRTLCGTPLYVAPEVLITGGREAYTKKVDIWSLGVVLFTCLSGTLPFSDEYGTPAAQQIKKGRFAYGHPSWKSVSQRAKLLINQMLIVDPERRPSIDDVLQSSWLRDAPMLQKAKRLMKLDGMEIEEENFLEPPTKRSRR

SEQ ID NO: 122522 - DNA, 1443 bp, Strongylocentrotus purpuratus
  CDS (1)..(1443)
atgtacgagagcgatatgagtactgccagtgcaggtggcagtgcaagctcgagttccattgaacccaatagtacctcgagtgccagtgcaagcttatcatccgctggaacgttatcaagtatggagactattccaactcaggaggttgctgaaggagattttgattttgcagaggagagagttgttgtatggggtcgtctgtatcctgtgggaaaatgtttctcaagtattgacttcttagacacaaaggatgaatatatatttggcagagatccatcttgtgatgtttgctacaatggcccggaaataagcaagaatccttgctatcagactctcagtaaaacacacttcaggatattcaaggaatcaaatgacaattgtaatttctacttcatcgaagacaaaagctcaaatggcacctttgtgaatggagaaaagatagcgtatgtgttcatggacactaaagactcagatcaaagtaatctaccagaagccctccgagagaagttcatcatgtccaaggtattaggcaggggtgcctgtgggcaggtgaagctagcgtttgagaagggaacgtgtcggaaggtcgccgtcaagatcatcgaaaagaagacgttctcaataggtgggactatggtcaggaatatggagaagactgtgatggaagaagtcaggatactcaagagacttcaccatccatgtattataggtatagaagatgtgtgtgacacgccagaggtcctgtatattgtattagaattagtcgagagtggagaactgtttgatagagtggtgagtctaggcaagtttgatgaagcaacggcaaagttttacttctatcagatgatcacagcatgcaagtatcttcatgacaatggaataacacacagggatctcaagccagagaacctcctactgatgtccgacgacaaggagaccatcctgaaggtgaccgattttggtctctccaagtttgtgggtgagcagtccctgatgaagacgctgtgcggcacaccaacctacctagctccggagatcttgaccagtatgggcatgggtggctacaccaaggccgtggattgctggagtataggggtcatcctctacatctgtctggcggggtatcctccgttctctgatgagatcaaagcgatgaaccttgatgagcagatcaagaggggctactacagcttcccaacaaagtactggggctcagtttcagcgccaggttttgacgtggttcccgggataaagaagcgtcctagagagtctgcaatgagcacagacgatgagcactgtgatgactctggcataggctgtatgagctccagaaagatgtctaggagtgatgacagtggagatggtgcctttgacaagacggaagacgtgtcaaaggttgtggcaaaggtcgctgctaaggttgctgcaggcggagatgcgtaa

SEQ ID NO: 122523 - protein, 480 aa, Strongylocentrotus purpuratus
MYESDMSTASAGGSASSSSIEPNSTSSASASLSSAGTLSSMETIPTQEVAEGDFDFAEERVVVWGRLYPVGKCFSSIDFLDTKDEYIFGRDPSCDVCYNGPEISKNPCYQTLSKTHFRIFKESNDNCNFYFIEDKSSNGTFVNGEKIAYVFMDTKDSDQSNLPEALREKFIMSKVLGRGACGQVKLAFEKGTCRKVAVKIIEKKTFSIGGTMVRNMEKTVMEEVRILKRLHHPCIIGIEDVCDTPEVLYIVLELVESGELFDRVVSLGKFDEATAKFYFYQMITACKYLHDNGITHRDLKPENLLLMSDDKETILKVTDFGLSKFVGEQSLMKTLCGTPTYLAPEILTSMGMGGYTKAVDCWSIGVILYICLAGYPPFSDEIKAMNLDEQIKRGYYSFPTKYWGSVSAPGFDVVPGIKKRPRESAMSTDDEHCDDSGIGCMSSRKMSRSDDSGDGAFDKTEDVSKVVAKVAAKVAAGGDA

SEQ ID NO: 122524 - DNA, 1476 bp, Nasonia vitripennis
  CDS (1)..(1476)
atggagacggaggagcacaacacgccccagagtctgcccgacacccagaacgcggactcgcaagccttcacgcagtcccaggacactttgactcccggcaactcgcagccggtaccgaggatctggggtcggctctgtcctcacgacagcagcttccagtttcagaccgtagttttgatgaaggacgagtacacgttcggccgccttcccacaccgcactgtgatatctctgtaaaggacaagctcccaccaaagaaagaacaagttataagcaaaatacacttcaggataatccgggagactactgtcacatctaacggctttgaagatgatgttgtgtacttgagagacgagagtgcaaatggcacgtttgttaatggcaaactcattggaaaaggaaacaccgtggtcttggttaacaacgacatgattgcaattgccaagaataactacaatgtattcgtttacatgagtacgagcggatatgacgattcattcctccctgaagaattgagactcaggtatgcagtatctagaacactgggtgccggtgcttgtggtgaagtcaaactttgtttctccaagactggagaggctggcaaaaaatttgccatgaaaatcatatctaaaatgaaagttggtaccagtggacacaagaatccagtcaacgatgagaaaagtataatgaatgaagttgacatatgcaagaggctcaagcatccatgcattataaaaatagaggagttttttaactcaccatccatggtatacataatattagaattgatggaaggaggagaactatttgaaagaataaaaaaaaataatggcctgtctgaaagtaatgctaaatttatattttaccaagtcgtattagcagtaaattatttacaccaaaatggcattacacacagggacttgaagccagaaaacattttgttgactggtcatgaagatgagaccattgtgaaagtttcagactttggtttatcgaaatttgtagattcacaaactatgatgaaaactttttgtggaacgcccatgtatgttgcgcctgaaattctaaaaactggtggtaagggtgcatacactagtcaggttgatgtgtggagtttgggtgttattttgtactgttgcttgagtggacttgttccattcaaaatccatgacaagaccatgtcattatatgatcaaattctaagtggaaagtaccacttcaattgttccaagtttttcaatgtttcaccaagcgcgaaagatttgattagaagaatgatgactgtggatccactcaagcgcatcacaatccaaagggtccttatgcatccttggttgagagataatgaaatgcttaccaaagtgaacaaattgttgggccttacaggcaatgagaatgttgtacctactcgaccattacataataatattcctaacagtgttgatatgccacaattcaaacgagctcgtttggagtaa

SEQ ID NO: 122525 - protein, 491 aa, Nasonia vitripennis
METEEHNTPQSLPDTQNADSQAFTQSQDTLTPGNSQPVPRIWGRLCPHDSSFQFQTVVLMKDEYTFGRLPTPHCDISVKDKLPPKKEQVISKIHFRIIRETTVTSNGFEDDVVYLRDESANGTFVNGKLIGKGNTVVLVNNDMIAIAKNNYNVFVYMSTSGYDDSFLPEELRLRYAVSRTLGAGACGEVKLCFSKTGEAGKKFAMKIISKMKVGTSGHKNPVNDEKSIMNEVDICKRLKHPCIIKIEEFFNSPSMVYIILELMEGGELFERIKKNNGLSESNAKFIFYQVVLAVNYLHQNGITHRDLKPENILLTGHEDETIVKVSDFGLSKFVDSQTMMKTFCGTPMYVAPEILKTGGKGAYTSQVDVWSLGVILYCCLSGLVPFKIHDKTMSLYDQILSGKYHFNCSKFFNVSPSAKDLIRRMMTVDPLKRITIQRVLMHPWLRDNEMLTKVNKLLGLTGNENVVPTRPLHNNIPNSVDMPQFKRARLE

SEQ ID NO: 122526 - DNA, 2034 bp, Magnaporthe grisea 70-15
  CDS (1)..(2034)
atgccccggcgacgtttgaatccattccaaattctaacagccttctttcagccctctactgccgattcggacggagaatctttcaagaaacctcgcaggacggaacgtgcagctcacaaggcggaggaatccaccgcgcagccaaaaaccccggtggacaccaagcagcaactgccgtcccccatcacgcataaccctaccgagggcagcttcgatgcctacaaggaagggactgtaacaccgcctgagggccgcccgagccaagtcgcacatcgctcgccagtccagggcttctcgtcaccaccacaggatacacaagcaacacaagctattccctcgcagatcgttgatccgaaggccgcgctatccgacgaggtcgaagacgaggtgaaggagggcgtatggggctatcttttccctctcgataccagatacggcggcaaatgtgtcgttttgcggaagcgtggttcctgtcctatgcctgacacgaacggcaaaagcgacgacaagccatgtgacaaagcttctaaggatattgtggttgacgaccccatcgtctcaaatcgacactgcctcatatttgccgagcacaagggcaacgacactgtagtcattcttgaggatctatccagtaacggcacttttgtcaacgaggccatagtcggtcgcaaccagcggagggagcttttggagcaagacgagatcgctgtcaaggatacagctcgttttatattccggtatcctaaatatcgtcaaaccagcgcattctcgcagcagtacacactgctgggcaagcttggcaaagggcacttcgctgaagtctttgcatgcgttgagaaatccacagggcagcgctatgcggtcaaaatattctccatggtccctggtttggaagaacggtccaggacagaaggtctccagctggagattgctgtattgatgggcgtcagtcatcccaatgtgctgtgcttaaaggatacctttcacgagggcaatgcagtgtatctggtgcttgagctggccccggaaggtgaacttttcaacttcattgttatgaagcaaaagctttcagaggctgagagtcggaaactgttcacccaacttttccacggtgtcaaatacttgcatgaccgaaacattgtccaccgcgatatcaaaccggagaacatcttgctggttgacaaggatctgcacgtcaaaattgccgattttgggcttgccaaaattatcggcgaggagtccttcacgacgtctctgtgtggcacgcctagctacgtcgcacccgaaattctcgttgatggccggcatcgcaagtacacgaaagctgttgacgtatggtcgttgggcgttgtgctttacatctgcctgtgcggatttccgccgttctccgacgagttgacgagcgaatcattcccttataccctcactcagcaaataaaaaacggtatctttcactacccgtcgccatactgggactcggtcggtgatccagctttgagcttgattgactgtatgcttgtcgttgacccagaaaagcggtataccatcgatcaatgcctggctcacccatggatgacgcaagcgcaaccctccgttcacgacagcacggatggcctcgttggcggcttcgctggccttgaggtgaacagacgtggtattgtccgggaaaggacactcctctcttcgatcaactctgttcaagtcacacgtgtacctgcaggcccgaaccaagaaccagtcaaggtattcatcaagaaccccaaggatggcaaagcaaaccgtgcaccagaaccgggcccgtctcagaatcgacggccagatgagttcatcgagatgggcggtaaaggggatcaacctttgtttggccatgacggcgggagtaactatccttcagccgatatcgcctctcaaaagactgccataagtcagcctgctctcaatggcgcagaaacttctaaggacgacgaagttaaagaaatcaatgcgaatggaaagaccaagcccacggcggcaggcaagggcaaggaacactga

SEQ ID NO: 122527 - protein, 677 aa, Magnaporthe grisea 70-15
MPRRRLNPFQILTAFFQPSTADSDGESFKKPRRTERAAHKAEESTAQPKTPVDTKQQLPSPITHNPTEGSFDAYKEGTVTPPEGRPSQVAHRSPVQGFSSPPQDTQATQAIPSQIVDPKAALSDEVEDEVKEGVWGYLFPLDTRYGGKCVVLRKRGSCPMPDTNGKSDDKPCDKASKDIVVDDPIVSNRHCLIFAEHKGNDTVVILEDLSSNGTFVNEAIVGRNQRRELLEQDEIAVKDTARFIFRYPKYRQTSAFSQQYTLLGKLGKGHFAEVFACVEKSTGQRYAVKIFSMVPGLEERSRTEGLQLEIAVLMGVSHPNVLCLKDTFHEGNAVYLVLELAPEGELFNFIVMKQKLSEAESRKLFTQLFHGVKYLHDRNIVHRDIKPENILLVDKDLHVKIADFGLAKIIGEESFTTSLCGTPSYVAPEILVDGRHRKYTKAVDVWSLGVVLYICLCGFPPFSDELTSESFPYTLTQQIKNGIFHYPSPYWDSVGDPALSLIDCMLVVDPEKRYTIDQCLAHPWMTQAQPSVHDSTDGLVGGFAGLEVNRRGIVRERTLLSSINSVQVTRVPAGPNQEPVKVFIKNPKDGKANRAPEPGPSQNRRPDEFIEMGGKGDQPLFGHDGGSNYPSADIASQKTAISQPALNGAETSKDDEVKEINANGKTKPTAAGKGKEH

SEQ ID NO: 122528 - DNA, 2019 bp, Gibberella zeae PH-1
  CDS (1)..(2019)
atggctccgcagccagagaagagccaattgaagcgtcagcgcggctcgctgccagaagacgagacagagaccaagaagcctcgcagaaccgagcgccttgcggttgacgcagacaagacacctgttgttaacaaacaacatcttccatcccctctcacacaccttaccgatgactctagcgagctcaacaaggactctaccgtgactcctccggaaaagaaggaaaccgagagtacccccaagaaatctgaagacaactcacagagccaagcgctgtcctctcctcctcaagacacgcagccgttaagccagttcgtcgatcgccactccgccatttcagatgatatcgaagatgagattcgcgagggtgtttggggataccttgttcctttggatccgaagtatggcgataagcccatcgtgttaaagaagcgaagcgcatgtcccctgccagacacagtttccgatgcggcgaagaaggagaacaagaacaacaccaatgacaagaacggcaaatcggcggcgatgaaagatgaagagacttttgagaagaagaagaaggagaagggcgctccttccggcggttatctgatcgggcggcaccctgagtgtgatattgtcgttaacgatggcattgtatccaatagacattgccttcttttcactgaaaataagggcaatgacacagtggcaatcgtcgaagacttgtcaagcaacggcacatacgtgaatgaggccattgtgggacgaaaccaacgtcgtgagctggaggaacaggatgagattgcggtccatggcaaggcgcgcttcgtcttccggtacccccagactcgccaaaccagcgctttcctacaacagtatactcttctcgagaaacttggcaagggtcattttgcggaggtctacctttgcgtcgagaagacaactgggcaacgttttgctgtcaaaatcttcacaaagcaccctggagttgaggaccgctccaaaacggagggcctgcaacaggagatcggtgttctgatgggtgtcagccatcctaatgtcctttgtctaaaggacacgtttaacgaaagagatcgcgtctatctggtgctcgaattggcgccagaaggagagcttttcaacttcatcgtgatgaagcagaagctcagcgaagacgagtccaggaagttgttcgtgcagcttttccagggcataaagtacttgcacgaacgcaatattgtgcaccgcgacatcaaaccggagaacatcttgctagtagataagaatctccacgtgaagcttgcggatttcgggttggccaagatcatcggagaggaatcattcacaaccacactatgtggcactcccagttacgtcgcaccagaaatcctcgccgactctaaacaacgcaagtacacgaaggctgtcgatgtctggtcattgggagtcgttctttacatctgcttgtgtggtttcccgccattttctgatgaactctactcgcgcgacttcccattcacgctttcgcaacagatcaagagcggccggttcgactacccatcaccttattgggattccgttggagatccagcccttgacttgattgactcaatgttgattgtcgatcctgagaagaggtacacgatcgaccagtgcttgcagcatccctggcttacacagagctctccctccgtcaatgatagcactggtggcttggtgggcggtattgccagcctccaagtccaacgaagagccgctgctcgtgaacgaacattgttgtcatcacttaacacagttgaagttaccgcacaactcgacgctggcaaggacaagcggcccgtcaaagtcttcgcaaagaacaagggccgcgtcacaaacttctcaaaagagtctgatcctgcttctcgacgagcaccagacgaattcatcgagatgggaggtaagggcgaccaagaactattcccggatgatgactcgagcatttaccccacaggtgacaatggcgagaagatcaaggcaacaaaggcccagcgataa

SEQ ID NO: 122529 - protein, 672 aa, Gibberella zeae PH-1
MAPQPEKSQLKRQRGSLPEDETETKKPRRTERLAVDADKTPVVNKQHLPSPLTHLTDDSSELNKDSTVTPPEKKETESTPKKSEDNSQSQALSSPPQDTQPLSQFVDRHSAISDDIEDEIREGVWGYLVPLDPKYGDKPIVLKKRSACPLPDTVSDAAKKENKNNTNDKNGKSAAMKDEETFEKKKKEKGAPSGGYLIGRHPECDIVVNDGIVSNRHCLLFTENKGNDTVAIVEDLSSNGTYVNEAIVGRNQRRELEEQDEIAVHGKARFVFRYPQTRQTSAFLQQYTLLEKLGKGHFAEVYLCVEKTTGQRFAVKIFTKHPGVEDRSKTEGLQQEIGVLMGVSHPNVLCLKDTFNERDRVYLVLELAPEGELFNFIVMKQKLSEDESRKLFVQLFQGIKYLHERNIVHRDIKPENILLVDKNLHVKLADFGLAKIIGEESFTTTLCGTPSYVAPEILADSKQRKYTKAVDVWSLGVVLYICLCGFPPFSDELYSRDFPFTLSQQIKSGRFDYPSPYWDSVGDPALDLIDSMLIVDPEKRYTIDQCLQHPWLTQSSPSVNDSTGGLVGGIASLQVQRRAAARERTLLSSLNTVEVTAQLDAGKDKRPVKVFAKNKGRVTNFSKESDPASRRAPDEFIEMGGKGDQELFPDDDSSIYPTGDNGEKIKATKAQR

SEQ ID NO: 122530 - DNA, 1464 bp, Candida glabrata CBS 138
  CDS (1)..(1464)
atggattcgtatctagaagtcattggtgattttaagcccggggaagtgctgttgagtggccagtggggacacagagtggtcggtcataacttagcaggtacacctagaccgagagtatacattgagctacataatcccattaaaataggcagaagtccgaaggaaaattgcatgtgtatatccaacccggctatttccgcgattcattgtatggtatggatgattcttttcgatgagacaagtatacccatgtactacttgagagactgttcattgaatggcacttacataaacggaacgaaactattaaaggaaaatgtagcaatattaaacgacggtgacttgatagaactatgtgaaaatggtggcaagtttctaaaattttcttgtcagccgtcaactccttctttgcccaaaaaaataactatcaattatacagaaaatgtggacaattggaatatatcaaacattgttgttggaaatggaacatttggatatgtcttgattgcgtatatgggcattggcgcacattcgggaaaaagctcccagaagataactcccaaatgttatgcagttaaaattgttaagatgaagctctcaaaactagataaagaggctaagattcttatgcaattgaaccatccaaatattattaaagtgttcaagacacatactgataagagcaataacctttacatttttcaggaacttataccagggggtgaccttttctcgtatttagctaaaggtgattgtctaatgcctatttcacaaactgaggccctagtgtttgtttatcagatattgcacgcccttaaatatttacacaccaaaggaatagtacacagagacctaaagttagataatattttactatgcacacctgagccatttacaaaaattgttttagctgattttggaatcgcaagaacagttaccacaatgaaatctagaatgtttactgtagtggggacgcccgaatattgtgcaccagaagttggcttcaaagcaaacagaaaggcttaccattcatttttccgggccgcgacgcttgagcaacaaggttatgacagcaaatgcgatctatggtctttaggtgtaataacacatataatgcttactggaatatcaccattttacggcgatgggactgagcaaagcattgtagaaaacgcaaaagcgggtatattgaactttaatgtaagccaatggagtacaatagatatcatggcacaaaattttgttagcaaacttcttgaagtaaatgtggataagcgtttagattgcgaacagtgctttaaccatctatggatatctaaacaccaaaaaagtctaaaagaaatctacgaaaagaaagtgctattgcgattctcggagaaaaatcaaatgggtcagccaaaaacagaacttgaaactaagtatctgatagaagaaaaaataaaccataaaggaattgtggcatag

SEQ ID NO: 122531 - protein, 487 aa, Candida glabrata CBS 138
MDSYLEVIGDFKPGEVLLSGQWGHRVVGHNLAGTPRPRVYIELHNPIKIGRSPKENCMCISNPAISAIHCMVWMILFDETSIPMYYLRDCSLNGTYINGTKLLKENVAILNDGDLIELCENGGKFLKFSCQPSTPSLPKKITINYTENVDNWNISNIVVGNGTFGYVLIAYMGIGAHSGKSSQKITPKCYAVKIVKMKLSKLDKEAKILMQLNHPNIIKVFKTHTDKSNNLYIFQELIPGGDLFSYLAKGDCLMPISQTEALVFVYQILHALKYLHTKGIVHRDLKLDNILLCTPEPFTKIVLADFGIARTVTTMKSRMFTVVGTPEYCAPEVGFKANRKAYHSFFRAATLEQQGYDSKCDLWSLGVITHIMLTGISPFYGDGTEQSIVENAKAGILNFNVSQWSTIDIMAQNFVSKLLEVNVDKRLDCEQCFNHLWISKHQKSLKEIYEKKVLLRFSEKNQMGQPKTELETKYLIEEKINHKGIVA

SEQ ID NO: 122532 - DNA, 1521 bp, Candida glabrata CBS 138
  CDS (1)..(1521)
atgagcctgactataaagaggaataactcagtcgaaaatgaggagaattcgaagcggttaaaagatgccactggagaaagggtgtatgatgtagttgccaccatggtcagtctgatccctggaaaggaacaaagctatgaaattaaagataagtcagttacttctgttggtaggagtcgatcctgtgacatagttctacaggagcctgatatctcgacagttcattgtgaaatgtatattgttagcatgaagctagataactctgagaggaaactgataaatatagtggacaagagcagaaacggaacgtatatcaacggcaataaacttatcaaaagagactatgttttgaagaacggtgatagagttgtgtttggcaaaagatgttcctttttgttcaaatatgcatcaaccacattcgaagacttaaatgaggaagacaaggcttctgatataagtgatgaaaataggaaagatgagagttcaatatttaagaaaccgcaatttagttttactagtagtcaatctcaggtgcgaaaattcgcaaagttaaaacccctgtcattttttgataaatacttgctaggcaaggatttaggctcagggcattatgcaattgtaaaagaagccaaaaacaaaactacaggggaaacagtggcggtaaagatatttcaccctcagcagaatgatgatcaaaagaaaaataaacagtttagagaggaaactactatactaatgaaaatccatcaccccaatatagtcaatctattagacagtttcgtagagcccattagcaaaactcagattcaaaaatatttggtcttggaaaagatcgatgatggtgaactatttgatagaatagtcaagaaaaccagcctaccacaggaagaatcgaaagctatattcaaacagattttaacaggtctaaaatacctacacagtcaaaatatcattcacagagatataaaaccagagaatattcttttgaacataagaagacgccaatctccagatgaaagacaattaggaccatgggatgaggacgaaattgacattcaggttaagatagctgattttggtttagccaaatttactggtgaaatgcaattcaccaatactttatgtggtacaccatcatatgttgctccagaagtcctagtaaaaaaaggttacacttctaaggttgatttatggagtgccggggtaatcctgtatgtttgcttatgcggcttcccaccatttagtgatcaattaggccccccttcactaaaagaacaaattatgagcgcgaaatatgctttttactccccttactgggatgaaattgatgatgcagcccttcatttgatttcaaacttacttgttctggacccagaaaataggtacgacgtcgatgccgcagctgcacatccttggttagattcagtatctcatctggatgtctcacacaatctgaagagattacaaattgatgagaatcgaatgccgaaaacatactcagaactctcttcacttcactag

SEQ ID NO: 122533 - protein, 506 aa, Candida glabrata CBS 138
MSLTIKRNNSVENEENSKRLKDATGERVYDVVATMVSLIPGKEQSYEIKDKSVTSVGRSRSCDIVLQEPDISTVHCEMYIVSMKLDNSERKLINIVDKSRNGTYINGNKLIKRDYVLKNGDRVVFGKRCSFLFKYASTTFEDLNEEDKASDISDENRKDESSIFKKPQFSFTSSQSQVRKFAKLKPLSFFDKYLLGKDLGSGHYAIVKEAKNKTTGETVAVKIFHPQQNDDQKKNKQFREETTILMKIHHPNIVNLLDSFVEPISKTQIQKYLVLEKIDDGELFDRIVKKTSLPQEESKAIFKQILTGLKYLHSQNIIHRDIKPENILLNIRRRQSPDERQLGPWDEDEIDIQVKIADFGLAKFTGEMQFTNTLCGTPSYVAPEVLVKKGYTSKVDLWSAGVILYVCLCGFPPFSDQLGPPSLKEQIMSAKYAFYSPYWDEIDDAALHLISNLLVLDPENRYDVDAAAAHPWLDSVSHLDVSHNLKRLQIDENRMPKTYSELSSLH

SEQ ID NO: 122534 - DNA, 1248 bp, Kluyveromyces lactis NRRL Y-1140
  CDS (1)..(1248)
atgatcaatatcaccgataaaagccgtaatggaacgtttgtgaacggtgataggctcatcagaaaagactatgttttaaagaatggtgataaaatagtattcgggaaaagctgttcatatcttttcaaatatgctacacttacagaaaatggactaagtcaaacaacagccactcaaatttcacaaactacgcaaaacagcgattatgatggggttttcagaaaacctttattcagtagtcaaaatacaaccaagaaactatcaagaacaagggagcagcccagatcctttttcgacaaatacttagctgggaaagaattaggaactggccattacgcgattgtcaaggaggctaggaataaggaaactggtgagaccgtcgcggtaaagatattccatcctcaacaaaatgacgatgacaaaagaacaaaaaaattcacagaagagactaagatccttctatctatccaacatccgaatatagttaaactcatagatagatttgttgaaccggtcagcaaaacacagattcaaacgtatttggtgcttgaaaagatcaatgatggcgaattgtttgaaaggattgttcgaaaaaataaccttcgggaggatgagactaaagctttgtttaggcaattactaaatgggttgaaatacttgcatagtagaaatatcattcacagagatatcaaacctgaaaatattctcttgagtataagtaaaagacgttccccagaagaaattgctttagggccctgggatgacgacgaattagatatacaagttaaaatagcagattttgggttggcgaaattcaccggtgaaatgaagtttaccaatacactatgtggaacaccttcttacgttgctcctgaagttttagtcaaaacagggtatacatccagagtagatatgtggagtgctggcgttcttctatatgtttgtttgtgtggatttccaccattcagtgaacagctagccccacctagtatgaaagagcagatattgcaaggaaagtttgcattttactcaccgtattgggacaatatcgatgattctgtcttacacttaatttctaatctactagttgtgaatcccgcaagcaggttctctgtaaatgacgcacttacgcatccatggttcaccagcaataacgctgaagtcacgatgggtaatgaaagaagatctcagttagagccaggtagactaccaaaaaccttctctgaattatctaatcttcaaaaataa

SEQ ID NO: 122535 - protein, 415 aa, Kluyveromyces lactis NRRL Y-1140
MINITDKSRNGTFVNGDRLIRKDYVLKNGDKIVFGKSCSYLFKYATLTENGLSQTTATQISQTTQNSDYDGVFRKPLFSSQNTTKKLSRTREQPRSFFDKYLAGKELGTGHYAIVKEARNKETGETVAVKIFHPQQNDDDKRTKKFTEETKILLSIQHPNIVKLIDRFVEPVSKTQIQTYLVLEKINDGELFERIVRKNNLREDETKALFRQLLNGLKYLHSRNIIHRDIKPENILLSISKRRSPEEIALGPWDDDELDIQVKIADFGLAKFTGEMKFTNTLCGTPSYVAPEVLVKTGYTSRVDMWSAGVLLYVCLCGFPPFSEQLAPPSMKEQILQGKFAFYSPYWDNIDDSVLHLISNLLVVNPASRFSVNDALTHPWFTSNNAEVTMGNERRSQLEPGRLPKTFSELSNLQK

SEQ ID NO: 122536 - DNA, 1332 bp, Debaryomyces hansenii CBS767
  CDS (1)..(1332)
atgagtatccctagaaaaactgaagatgtccttattggaagaagtagctcgtgtgatgttagaattaatggcaatgatgtttcttccaagcactgtaagttgacattgactataaataataatcgagaatacttatgcataaaggacctcagctcaaatggtacctatttaaatgatgaaataataggtaaagattcgtctatattactaagaagtggggacaagctagattttgccaagacagggggatcctatatatttcgatatatcattgatattaaaaatacaaaagtacaacagtcgaagtctttctttgacgattatatactaggcgaacagctaggttcggggcattatgctgtcgttaaagaagccacagatagatctacaggggacgtagtagctgtcaaaattttccatccaaacaaaactaatggccaaggaaacgaaaacgatgatgttaaactccaacaagaaatgaacttattattatctataaatcatccaaacatagtaagatttatatcacattatgtggagccaatcaaccaatattctgtgacatcgtacttggtgttagaaaaaatgaataatggtgaattgttccaaagaattattaataaactgaaattaagacaagacgaaacgagagctattttcaagcagcttctatcaggattgatgtacttacatgagaatagtattatacatagagacattaaaccagaaaatatattactcgatatcacgccaaggacatcaaaagatcagaagcaaacagggccttgggatgagaatgagtatgatataaaggttaagatagctgactttggtcttgcaaaatttattggtgaactaaaattcacgaacacattatgtggaactcctgcgtatgttgcaccagaaatactaagcaataaaagaaactactctacaaaggttgatttatggctgagtggagtattgctatatgtatgtctttgtgggttccctccgtttagtgatgaattgggaccaccaaatatgagggaacaaatattgaccggaaaatatgcattttattcaccatattgggatgacattaatgattctgtattacatttgattagttcattattggtagttaatccaagcgaaagatttgatgtcatccaaacttgtgagcattattggtttaatgagcaagatgattctagcgaccgcgtgatgataaacaatgatgagagtgtacaaagagctcctgtaagatctaatagtctgccactaagtttaagagataaatacaattctgaaattatgagcgacgctaaccaaaagtcttcaattatgtga

SEQ ID NO: 122537 - protein, 443 aa, Debaryomyces hansenii CBS767
MSIPRKTEDVLIGRSSSCDVRINGNDVSSKHCKLTLTINNNREYLCIKDLSSNGTYLNDEIIGKDSSILLRSGDKLDFAKTGGSYIFRYIIDIKNTKVQQSKSFFDDYILGEQLGSGHYAVVKEATDRSTGDVVAVKIFHPNKTNGQGNENDDVKLQQEMNLLLSINHPNIVRFISHYVEPINQYSVTSYLVLEKMNNGELFQRIINKLKLRQDETRAIFKQLLSGLMYLHENSIIHRDIKPENILLDITPRTSKDQKQTGPWDENEYDIKVKIADFGLAKFIGELKFTNTLCGTPAYVAPEILSNKRNYSTKVDLWLSGVLLYVCLCGFPPFSDELGPPNMREQILTGKYAFYSPYWDDINDSVLHLISSLLVVNPSERFDVIQTCEHYWFNEQDDSSDRVMINNDESVQRAPVRSNSLPLSLRDKYNSEIMSDANQKSSIM

SEQ ID NO: 122538 - DNA, 1443 bp, Apis mellifera
  CDS (1)..(1443)
atgaacgatgaacaaattgttttaacattacctcctactcaagatgcagaatcaatatgttttactcaatcacaagaattattacaagaaaaacctgtgattgtatggggtagattatgtccaagtaaattaccttttagaacaatggaaatgaccaaagatgtatatacacttggtcgctcacaaaactgtgatatttgtataactaataatgaattaaaaccaaagtggcttagtgtaatgagtaagatacatttcaagataactagagaatttattgatgataataccaatgatgccatagtatatttagaagacttaagccaaaatggaacttttgttaatggaaaaaaagtaggacgtgggaataaagtaattcttgaaagcaatgacaaaatagctttagcacaacctatagttattgtttatgtcttcatgagtacaacagcttttgaaagtaataatttgccacctgaactcaaaaataaatatacagtatcacgtaaattaggatctggagcatgtggagaggtgaaaatgatatttaataaagttggttgtaaaaaatttgccttgaaaactattatgaaattaggtggtacaacaaatggacaaaaacatccattaaatgatcctgaaaaaattatgaatgaagttaaaattttgaaagctctaaaacatccttgtataattcgaatggaagaaattgtggataccccaaaagcagtatatatagttttagaattaatggaagggggtgaacttttcgaaagaataaaaagtagaggaagattatcagaaaaatatgcaaaattaatcttttatcaggttgtattagctgttagttaccttcatgactgtggtataactcatagagatttaaagccagaaaatatattattagctagtaattcagatattacattagcaaaagtatcagattttggtttatcaaaattagttgatgctcaaactatgatgaaaacattttgtggaactcctatgtatgttgcacctgaaatattatctactattggacgaggttcttatacaaatcaagttgatgtgtggagtttgggagtaatattatatgcttgtttaagtggttcagttccttttaattgtcaagataaaaatattagtttacaagatcaaataaaaaaaggacaatatagctttcctgcttcaaaatttggacatataacaagtaaagctatagatttgatcaaacgaatgatgacagttaatccaaagaaaaggattacaatcaaacaagttttgttacatccttggttacaagaccgtgaacttcgagaaagtattgacatgatattatcaaaagaaaatgatgaaaatataccacctgaaagtattacttctaatattcaatgtaaaaatgaacagtatcacaatttgatcaaaagagcaagattagaaatatag

SEQ ID NO: 122539 - protein, 480 aa, Apis mellifera
MNDEQIVLTLPPTQDAESICFTQSQELLQEKPVIVWGRLCPSKLPFRTMEMTKDVYTLGRSQNCDICITNNELKPKWLSVMSKIHFKITREFIDDNTNDAIVYLEDLSQNGTFVNGKKVGRGNKVILESNDKIALAQPIVIVYVFMSTTAFESNNLPPELKNKYTVSRKLGSGACGEVKMIFNKVGCKKFALKTIMKLGGTTNGQKHPLNDPEKIMNEVKILKALKHPCIIRMEEIVDTPKAVYIVLELMEGGELFERIKSRGRLSEKYAKLIFYQVVLAVSYLHDCGITHRDLKPENILLASNSDITLAKVSDFGLSKLVDAQTMMKTFCGTPMYVAPEILSTIGRGSYTNQVDVWSLGVILYACLSGSVPFNCQDKNISLQDQIKKGQYSFPASKFGHITSKAIDLIKRMMTVNPKKRITIKQVLLHPWLQDRELRESIDMILSKENDENIPPESITSNIQCKNEQYHNLIKRARLEI

SEQ ID NO: 122540 - DNA, 1947 bp, Aspergillus nidulans FGSC A4
  CDS (1)..(1947)
atggaactcgagagtagcgcgtttcctaagaccctggccgaacaagacaatacgatggtaccacgaaatgagcaaagttcccttaagcgcagcagggttactgcagaccacgaatcgcaagatcaaaagaagcccagacggtctgagaggatcagttcacagcaacaatcgcagacacctgtcatacagtcatacctacccactccgctaacgcatcatgactctacggctacggacttacgaaacgaaatgacagctactccgccaagtcaagctcttccgcggtcaccttctgacctagggtctcctcctggcgatacacaagcgctctcgcaattcgtctaccctcccagagcgtttgccgatgacgtcgaagatgaagccgcagaaggggtttggggttacctcatacctcttgacgataaagtccgggacgctcttgtgctccggaaacgtgatggctgcgacgcgaagcctaccaaggagcgatcatccaaggagcggaaatctagggagtcttccacgaaacacgctgccaaccgacgtcctgggggctacttgattggacgacatccagaatgtgacttgtcgctcaatattccaactgtatctaaccgccattttctggtgttccctgaaaaccgtaggggcgatacagtagctatcctcgaggatttgtccagtaacggcacgtttatcaatgatgcaattgttggccgaaacaaacatcgcgaactggaagatggtgacgaggtgaccgtattggacgaggtgcggttcgtttttagagcaccccggacaaagaatattagcggatttcggcagcagtatcgagtcttgcaacaacttggaaagggacactttgcaacggtctacctttgcgtagaacgcactactggggcaaagtttgcggtaaaagtatttgagaaacgagctgactccaagtctcaaaacgacgcgttgatgcaagaaatcggcctcctgatgagcgttagccatccaaatttgctctgcctcaaggacacatttgatgaaagtgatggggtatatctcgtgctagaacttgctccggaaggggagcttttcaatatgatcatacgcaaacagaagtttacggaaaaagagactcgccacatcttccgtcaactcttcgaaggcctgaaatatctgcatgaccgtggaattgtccaccgagatatcaaaccggagaacatattagttgccgacaacaaattgaccgtaaaattgggagatttcgggctggccaagataattggtgaggactcattcacgactacgctatgtggcacaccaagttatgttgctcccgagatactccaagaatctcgccgtcgaaaatacaccaaagctgtcgatatctggtcacttggtgtcgtcctctacatatgcctctgtggctttccccctttctctgatgaactctatacgccagagaatccttacacactggcccaacaaatcaagctagggcgctttgactacccatcaccgtactgggattctgtgggagatcccgccttggatcttatagacaggatgcttacagtcgacgtcgataaaagaatcactgtcgatgaatgtcttcaacatccatggctcacaggcgagctcccaagcgtgaccgatagcacagacggtctcacgggtgcgttgggaaacttggacttctccaaaaggaaaattgcccgggagagaactctcctcagcggtatcaatgatgtacgttccagccagcaaaagacgggagacggagcctccgttaaagtttaccataagaacattgctggtcaacgtatgcataaccagagggctactcgccagcatgagttcccgaacaagaatagtggacccaaagattttgttaatcttggggagtgcggagatccggtattatttgaagaggaaccgacaagccgccacaattga

SEQ ID NO: 122541 - protein, 648 aa, Aspergillus nidulans FGSC A4
MELESSAFPKTLAEQDNTMVPRNEQSSLKRSRVTADHESQDQKKPRRSERISSQQQSQTPVIQSYLPTPLTHHDSTATDLRNEMTATPPSQALPRSPSDLGSPPGDTQALSQFVYPPRAFADDVEDEAAEGVWGYLIPLDDKVRDALVLRKRDGCDAKPTKERSSKERKSRESSTKHAANRRPGGYLIGRHPECDLSLNIPTVSNRHFLVFPENRRGDTVAILEDLSSNGTFINDAIVGRNKHRELEDGDEVTVLDEVRFVFRAPRTKNISGFRQQYRVLQQLGKGHFATVYLCVERTTGAKFAVKVFEKRADSKSQNDALMQEIGLLMSVSHPNLLCLKDTFDESDGVYLVLELAPEGELFNMIIRKQKFTEKETRHIFRQLFEGLKYLHDRGIVHRDIKPENILVADNKLTVKLGDFGLAKIIGEDSFTTTLCGTPSYVAPEILQESRRRKYTKAVDIWSLGVVLYICLCGFPPFSDELYTPENPYTLAQQIKLGRFDYPSPYWDSVGDPALDLIDRMLTVDVDKRITVDECLQHPWLTGELPSVTDSTDGLTGALGNLDFSKRKIARERTLLSGINDVRSSQQKTGDGASVKVYHKNIAGQRMHNQRATRQHEFPNKNSGPKDFVNLGECGDPVLFEEEPTSRHN

SEQ ID NO: 122542 - DNA, 2100 bp, Candida albicans SC5314
  CDS (1)..(2100): transl_table=12
atggaagtaacacaacggacgcagagtcagacacaaccaacacaacagtcaccgacaactcagacgcaaacccaaagcaaagaggaccagaataggatttgtcaattgatttgctccacgggtcagtttggcaattatgatttgaatatcaacgataaaactatcgtacaaggtaaaatgacgtggtattttggaagagaccccaactcagatttgcaagtggcgtcgtcgtcgagaatttcaaacaagcattttcaaatctggctcaacttcaatgataaatcactatggataaaggacacttcaactaacgggacacaccttaacaacagtcgattggtgaaaggatcaaactaccttcttaatcagggtgatgaaatagcagtaggggttggtagagacgaggacgttgtgaggtttgtcgttgtctttggtgacaaatacaacccggcaaagctacctgattcgaccaacacaattaaagatgaaggaatatacaaagactttattgtgaaaaatgaaacgataggccaaggagcatttgccactgtgaaaaaggcgattgaacgatctacgggcgagtcgtacgcggtgaagattataaatcgaagaaaagcattaaataccggtggtggaagtgccatggcaggagtggaccgtgaattgtccatattagagcggctcaaccacccaaatatagttgctctaaaagctttttatgaagatatggacaattactatattgtgatggaattggtgccgggcggtgatttgatggactttgtggctgcaaacggtgcaataggagaagacgcaacacaagtgatcacgaaacagattctagaaggaattgcctatgttcataatttaggaatctcccatcgtgatttgaagccagataatattttgattatgcaagatgacccaatacttgttaaaatcaccgactttggattggcaaaattcagtgacaatctgacgtttatgaaaactttttgtggtacattggcgtatgttgctcccgaagttatcaccggtaagtatggatcatcgcagatggaactgcaacaaaaggacaactactcttccttggttgacatttggtctttgggatgtttggtttatgtacttttaacttctcatttaccattcaacgggaaaaaccagcaacaaatgtttgccaagatcaaaaggggcgaatttcatgaggctccattaaattcatacgacatttctgaagacggaagagatttcttgcagtgctgcctacaggttaatcctaaactaaggatgacggctgctgaagctttgaaacataaatggttgcaagacttgtatgaagaggattctgtcaaatcattgagtttatcgcaatcacagtcgcaacaatctcgaaagatagataatggtatccatatcgaatcattgagcaaaattgatgaagacgttatgcttcgtccattggatagcgaaagaaataggaaatcaagtaaacagcaagatttcaaggtacccaagcgtgtgattccgttatctcaacatcctgcaacaccgttaccaatgtcacaaccgaaaaagaggccgtatcaaatagaccctagaacaaacaaaaaagtcgatttggaagaacctctgacaagcaagaaagtcaagctaagtgattccgttgttgcggaagactacttgaagttggagccacttgcaaattcgttattccaagaaacaataaatatttcaaagtccccgttttctttcggaagaaatgacacttgtgattgcgagatagacgacgacagactatccaaacttcattgtgtcattaccaaagaaaacgactctatatggttattggataagagtactaactcgtgcttggtcaacaatactagtgttggaaaaggcaacaaagttttgcttagaggaggggagatattacatctcttctttgacccattgtcactgcaacatataggtttcaaagtagtccttgttgatcaactgtctggtgaacataagagtcaagtggaggctttgaaacaaacctcagaagaaatgaatattattccacttatttcgggtttaagtagtataagttcatag

SEQ ID NO: 122543 - protein, 699 aa, Candida albicans SC5314
MEVTQRTQSQTQPTQQSPTTQTQTQSKEDQNRICQLICSTGQFGNYDLNINDKTIVQGKMTWYFGRDPNSDLQVASSSRISNKHFQIWLNFNDKSLWIKDTSTNGTHLNNSRLVKGSNYLLNQGDEIAVGVGRDEDVVRFVVVFGDKYNPAKLPDSTNTIKDEGIYKDFIVKNETIGQGAFATVKKAIERSTGESYAVKIINRRKALNTGGGSAMAGVDRELSILERLNHPNIVALKAFYEDMDNYYIVMELVPGGDLMDFVAANGAIGEDATQVITKQILEGIAYVHNLGISHRDLKPDNILIMQDDPILVKITDFGLAKFSDNSTFMKTFCGTLAYVAPEVITGKYGSSQMESQQKDNYSSLVDIWSLGCLVYVLLTSHLPFNGKNQQQMFAKIKRGEFHEAPLNSYDISEDGRDFLQCCLQVNPKLRMTAAEALKHKWLQDLYEEDSVKSLSLSQSQSQQSRKIDNGIHIESLSKIDEDVMLRPLDSERNRKSSKQQDFKVPKRVIPLSQHPATPLPMSQPKKRPYQIDPRTNKKVDLEEPSTSKKVKLSDSVVAEDYLKLEPLANSLFQETINISKSPFSFGRNDTCDCEIDDDRLSKLHCVITKENDSIWLLDKSTNSCLVNNTSVGKGNKVLLRGGEILHLFFDPLSSQHIGFKVVLVDQSSGEHKSQVEALKQTSEEMNIIPLISGLSSISS

SEQ ID NO: 122544 - DNA, 1245 bp, Candida albicans SC5314
  CDS (1)..(1245): transl_table=12
atgagcaagagaacaagtataattcttaagacaggagataaaattgcatttgctaaaactggagggtgctatattttccgatatattattagtgatcaagaatacaatgaggaagatgatggaaatgtgcagttgaaaaaaaagaaaaagtatgcttcattttttgacgattatattcttggtaaacaattagggtcaggtcattatgctgttgtgaaagaagctaaagataaaaaaacgggacaagctgttgccgttaagattttccatcctaataaatcaggtttggtgaataaagccaactcggcacaacaacagcaagaagatctcaaattacaacaagaaatgaatttattattgtcaattgaccatcctaatatcgtcaaattcattaatcattatattgaaccaattaacaactattccgtcaacacttatttggtattggagaaaatgaatagcggagaattatttcaacgaataattaacaaatcaaaattaagaattgatgaaacaaaagcaattttccgtcaaattttgtctggtttaaaatatttacatgatcatgatattattcatcgtgatattaaacccgaaaacattttattggatataactccaaagacgtcgccacaccagaaatcgatgggaccatgggataaagatgaatttgacatcaaagtcaaaattgctgatttcggattagctaagtttattggggaattgaaatttaccaacactttatgtgggactcctgcttatgtggcaccggaaattcttaaacccaattgtcgaaagtatagtacaaaagtcgatctttggtcactgggggtattattatatgtatgtctttgtgggttcccgccatttagtgatgaattgggtccaccaaatatgaaggaacaaattttgactggtcaatatgcattttattctccttattgggatgaaataagtgatgttgttttggatttgataagtaatttattaattgtggatccgaatgaaagatttaatgttgaacaaacattgaatcatttttggtttaatgaaaaagaacaagacagtctagataatagtgaaggagctgaagaaagtcaaattgtcgaagaatcaagttgtttttcatcttcatctcaaccttcatcgatgataaatggcactaaaagactaatgataagatccaacactcaaccaattactttaaaagaacagcatgaatcacaaatcaatttcaaaacttga

SEQ ID NO: 122545 - protein, 414 aa, Candida albicans SC5314
MSKRTSIILKTGDKIAFAKTGGCYIFRYIISDQEYNEEDDGNVQLKKKKKYASFFDDYILGKQLGSGHYAVVKEAKDKKTGQAVAVKIFHPNKSGLVNKANSAQQQQEDLKLQQEMNLLLSIDHPNIVKFINHYIEPINNYSVNTYLVLEKMNSGELFQRIINKSKLRIDETKAIFRQILSGLKYLHDHDIIHRDIKPENILLDITPKTSPHQKSMGPWDKDEFDIKVKIADFGLAKFIGELKFTNTLCGTPAYVAPEILKPNCRKYSTKVDLWSSGVLLYVCLCGFPPFSDELGPPNMKEQILTGQYAFYSPYWDEISDVVLDLISNLLIVDPNERFNVEQTLNHFWFNEKEQDSLDNSEGAEESQIVEESSCFSSSSQPSSMINGTKRLMIRSNTQPITLKEQHESQINFKT

SEQ ID NO: 122546 - DNA, 2109 bp, Neurospora crassa
  CDS (1)..(2109)
atggctccccgagctgaaggcagcagcactcttaagagagctcgcggttctaccgacgacaacgattccttcaagaaaccccgtcgctccgagcgcctctcctcccagcgcaccggcgacagccccgaacccaagcagaagacgcccctcaagaccaccaaacaattaccctctccagtcacccacgactccgatgaattcccacaggattccaaagagcccactgccacccctccagccggccgtcccagccagctgtcgcaaatcagccctcgcccagaaaaccaacattctcagtcgcaagcgtcccagctcaatgacactcaagcctttagccagttgcccgatctcgacaaggcattgtcggacgaggtcgaggatgaagtcaaggagggagtttggggctacctgtttcccttggatcctaggtacggcggccgctgtgtcgtcttgaggaggagggccgcttgtccccttccagataccgtctcacaggcggttggctccaagagaggtaaacgcggccagaaggcgctgatcaaggaggagcacgatttggacaagaccaaggtcaagggacttccatccggtggctatctgatcggccgacacccggaatgcgacatccaaatagaggaccccatcgtttcgaaccggcactgcatcatcttcacagagaacaagggcaacgataccatcgccgtattagaggatctgtcgagtaacgggacgttcgtcaacgaggcaatagtgggtcgcaaccgaagaagagagctccaagagctagatgagatcgccgttcttggcacagcccgcttcatcttccgataccccaaaagtcgacacaccagcgctttcaggcagcagtacaccatgctgcagaagctgggcaagggccatttcgccgaggtctacctgtgtgtggagaagtcgacgggtacacagtatgccgtcaaggtgttctccaagactcctggcgtcgaggagaggtccaaggacgagggtcttcagcaggaaatcgccgtgctgatgggggttagtcaccccaacgtcttgtgtctcaaagataccttcaatgagcccaacgccgttcacctagttctggagctggcgccaggaggtgagctcttcaactacattgtcaagaagaccaagctttccgagaacgagtgccgcaagctgtttacccagcttttccagggtgtcaagtacttgcacgaccgcaacattgtccaccgcgacatcaaacccgagaacattctgctggtcgatgatgacctgcacgtcaagctggctgattttggtcttgccaagatcatcggcgaggaatccttcactactactctctgtggtacgcccagttatgtggcaccggaaatcctcaccgacacgcgtcatcgcaagtacaccaaggcggtcgatgtttggtctctcggtgtagtgctgtacatttgcttgtgcggctttccacctttttcggatgaactcacctcgcccgacttcccttattccctttcggatcaaattaggcagggcaaattcgactatccatcgccttactgggacccggtggatgatttggctcttgacctgatcgattccatgctcgtcgttgatcccgagaagcgcttcaccattgacgattgtctttctcatccatggatgacgcaaaaaacgcctggcgtcaacgacagcaccaacggccttgttaacggcatcgccggcctcgacgtcaccaggcgcggcgtcctccgcgagcgcaccctcctcagctccatcaacacagtcgagatcgccgacaagatcccgcttggcgagaacaagcccgagctgaagatctacaagaagaatcccacggaaacggtcggtgggcccagcgagcacgaacttgccggtgcacaagcaggaccctcccgccaaaaagaggccagacccgatgacaacagagacccaaatgagtttatgaagatgggtggtaagggtgatgaggtactctttgcggacgatccgaagagtaattacccaaccgccaagaaggatgcgaaggatattgtcgagtcgacgacaaagacgaacggcaaaggtaagggtaagggtaagaaaaaataa

SEQ ID NO: 122547 - protein, 702 aa, Neurospora crassa
MAPRAEGSSTLKRARGSTDDNDSFKKPRRSERLSSQRTGDSPEPKQKTPLKTTKQLPSPVTHDSDEFPQDSKEPTATPPAGRPSQLSQISPRPENQHSQSQASQLNDTQAFSQLPDLDKALSDEVEDEVKEGVWGYLFPLDPRYGGRCVVLRRRAACPLPDTVSQAVGSKRGKRGQKALIKEEHDLDKTKVKGLPSGGYLIGRHPECDIQIEDPIVSNRHCIIFTENKGNDTIAVLEDLSSNGTFVNEAIVGRNRRRELQELDEIAVLGTARFIFRYPKSRHTSAFRQQYTMLQKLGKGHFAEVYLCVEKSTGTQYAVKVFSKTPGVEERSKDEGLQQEIAVLMGVSHPNVLCLKDTFNEPNAVHLVLELAPGGELFNYIVKKTKLSENECRKLFTQLFQGVKYLHDRNIVHRDIKPENILLVDDDLHVKLADFGLAKIIGEESFTTTLCGTPSYVAPEILTDTRHRKYTKAVDVWSLGVVLYICLCGFPPFSDELTSPDFPYSLSDQIRQGKFDYPSPYWDPVDDLALDLIDSMLVVDPEKRFTIDDCLSHPWMTQKTPGVNDSTNGLVNGIAGLDVTRRGVLRERTLLSSINTVEIADKIPLGENKPELKIYKKNPTETVGGPSEHELAGAQAGPSRQKEARPDDNRDPNEFMKMGGKGDEVLFADDPKSNYPTAKKDAKDIVESTTKTNGKGKGKGKKK

SEQ ID NO: 122548 - DNA, 1383 bp, Schizosaccharomyces pombe
  CDS (1)..(1383)
atggaagaaccagaagaagctacgcaggctactcaagaggcaccactacatgttagtcagaacatagccaaacaggtggttaacaacgaaaatgtatttatgaaattggttatgactcgcatgcttgatggtaagacagaagtgattcctcttactacagatgtgcacaatgggttttggagatttggacgtcataaatcttgtgaagtggttttaaacggacctagagttagcaactttcattttgaaatctatcaggggcatagaaatgattccgatgaatctgagaatgtcgtttttttacacgaccactcttctaatggaacatttctgaattttgaacggcttgccaagaatagtagaactatcttgtcaaacggagatgaaattcgaattggcctaggtgtgccgaaagatgaaatttcttttttgtgccaggtaccagttaaacattcacgagattcccagaaaaacatgattaaatccgagaacagtcattacgaaattattcgtacacttggaagtggtacatttgcagttgtcaagctagcggtagaagtgaatagtggcaagtggtatgctattaaaattatcaacaaacgaaaaatccttttgacaagttcggaaaagcgagctactgaaatgtttcaacgagaaattgatatattaaaatctttgcaccatccaggagttgtacaatgccatgaaatttttgaaaatgatgacgagttatttattgttatggaatatgttgagggtggggatcttatggattttttaattgctaatggctccatcgacgaacaagactgtaaacctcttctcaaacaacttttagaaacgcttttacatttgcacaagcagggtgtgacacatagagacataaaacccgagaacattcttataacaaatgatttccatcttaaaatatctgattttggcttggctaaagttattcatgggacgggaacctttttagaaacattttgcgggacaatgggttatctagcaccggaagttttgaagtcaaaaaacgtcaacttggacggaggttatgatgataaagttgatatatggagtttgggatgtgttttatatgtgatgcttactgcgtctattccttttgcatcttcgtcacaagcaaaatgtattgagttgatatcaaaaggtgcatatccgatagagcctttattagaaaacgaaatttcagaagagggaatcgatttaatcaacaggatgcttgaaattaatccagagaaaagaatatctgaaagtgaagctctccagcatccttggttttacactgtgagcacacacgaacatcgtactccaccatcatcgtctgaacatgaggccaccgaacagctcaattcttcgagttag

SEQ ID NO: 122549 - protein, 460 aa, Schizosaccharomyces pombe
MEEPEEATQATQEAPLHVSQNIAKQVVNNENVFMKLVMTRMLDGKTEVIPLTTDVHNGFWRFGRHKSCEVVLNGPRVSNFHFEIYQGHRNDSDESENVVFLHDHSSNGTFLNFERLAKNSRTILSNGDEIRIGLGVPKDEISFLCQVPVKHSRDSQKNMIKSENSHYEIIRTLGSGTFAVVKLAVEVNSGKWYAIKIINKRKILLTSSEKRATEMFQREIDILKSLHHPGVVQCHEIFENDDELFIVMEYVEGGDLMDFLIANGSIDEQDCKPLLKQLLETLLHLHKQGVTHRDIKPENILITNDFHLKISDFGLAKVIHGTGTFLETFCGTMGYLAPEVLKSKNVNLDGGYDDKVDIWSLGCVLYVMLTASIPFASSSQAKCIELISKGAYPIEPLLENEISEEGIDLINRMLEINPEKRISESEALQHPWFYTVSTHEHRTPPSSSEHEATEQLNSSS

SEQ ID NO: 122550 - DNA, 1431 bp, Drosophila melanogaster
  CDS (1)..(1431)
atggcacgcgacacacaaggaacgcagggaacccagagtcaggcctccaatatctggacgcaggtggagagccagccgatggagaagatagtctggggtcgattgtacggcaagaacattaagatcaaatccctgggtacgagttcaaaataccgaatcatttatacgcattcgtccttttctgttgatctcaacaacgacgagttcaccgcaggacgaggggaggccaacgacttgatcctcacgctcaacgatttgcccgagaaaatcctgacgcgcatttccaaagtgcattttatcataaagcgggcaaactgcgaacttaccaatccagtttatattcaggatctctcacgcaacgggacgtttgtgaataacgaaaaaattggcacaaacaggatgcgaatcctaaagaatgacgacgtaatttccctgtcccacccaacgtacaaagcctttgtattcaaggatctcagcccgaatgagtcgatcgggcttcccgaggagattaacaagacgtattatgtaaatcgcaagctgggatctggagcgtacggactggtgcgtttggtctatgacacccgcacctgccagcagtttgcgatgaaaatcgttaagaagaatatgctctctggggcgcgacccagtaccaatttcagtgatcccgaccgggtgctgaacgaagccaagattatgaagaatctttcacatccgtgcgtggttcgcatgcacgacatcgtggacaagccggattctgtgtatatggtgctggagtttatgcgcggcggcgacctgcttaaccggatcatcagcaacaaactacttagcgaggacatctcgaagctttatttttaccaaatgtgccatgccgtcaagtacctacacgatcggggcatcacccatcgtgaccttaagccagacaatgttttgctggagaccaatgacgaggagaccctactgaaggtctccgatttcgggctgagtaagtttgtgcagaaggactcggttatgcgcacgctctgtggcacacctctctacgttgcccctgaggtgctgattaccggcggccgagaagcctacaccaagaaagtggacatttggagcttgggagtggtgctatttacttgcctgagtggcactctgcccttttcggacgagtacggcaccccggcggcccagcaaataaagaagggcagattcgcgtatggacacccttcttggaagagtgtctcgcagcgcgccaagctgctgatcaaccaaatgctcattgtggatcccgagaggcgaccctcaatcgacgacgttttgcagagcagctggctgcgcgatgcgcccatgctgcagaaggcgaagaggctgatgaagctcgatggcatggaaatcgaggaggagaacttccttgagccacccaccaagcgatcgcgacgctag

SEQ ID NO: 122551 - protein, 476 aa, Drosophila melanogaster
MARDTQGTQGTQSQASNIWTQVESQPMEKIVWGRLYGKNIKIKSLGTSSKYRIIYTHSSFSVDLNNDEFTAGRGEANDLILTLNDLPEKILTRISKVHFIIKRANCELTNPVYIQDLSRNGTFVNNEKIGTNRMRILKNDDVISLSHPTYKAFVFKDLSPNESIGLPEEINKTYYVNRKLGSGAYGLVRLVYDTRTCQQFAMKIVKKNMLSGARPSTNFSDPDRVLNEAKIMKNLSHPCVVRMHDIVDKPDSVYMVLEFMRGGDLLNRIISNKLLSEDISKLYFYQMCHAVKYLHDRGITHRDLKPDNVLLETNDEETLLKVSDFGLSKFVQKDSVMRTLCGTPLYVAPEVLITGGREAYTKKVDIWSLGVVLFTCLSGTLPFSDEYGTPAAQQIKKGRFAYGHPSWKSVSQRAKLLINQMLIVDPERRPSIDDVLQSSWLRDAPMLQKAKRLMKLDGMEIEEENFLEPPTKRSRR

SEQ ID NO: 122552 - DNA, 2466 bp, Saccharomyces cerevisiae
  CDS (1)..(2466)
atggaaaatattacacaacccacacagcaatccacgcaggctactcaaaggtttttgattgagaagttttctcaagaacagatcggcgaaaacattgtgtgcagggtcatttgtaccacgggtcaaattcccatccgagatttgtcagctgatatttcacaagtgcttaaggaaaaacgatccataaagaaagtttggacatttggtagaaacccagcctgtgactatcatttaggaaacatttcaagactgtcaaataagcatttccaaatactactaggagaagacggtaaccttttattgaatgacatttccactaatgggacctggttaaatgggcaaaaagtcgagaagaacagcaatcagttactgtctcaaggtgatgaaataaccgttggtgtaggcgtggaatcagatattttatctctggtcattttcataaacgacaaatttaagcagtgcctcgagcagaacaaagttgatcgcataagatctaacctgaaaaatacctctaaaatagcttctcctggtcttacatcatctactgcatcatcaatggtggccaacaagactggtatttttaaggatttttcgattattgacgaagtggtgggccagggtgcatttgccacagtaaagaaagccattgaaagaactactgggaaaacattcgcggtgaagattataagtaaacgcaaagtaataggcaatatggatggtgtgacaagagagttagaagtattgcaaaagctcaatcatccaaggatagtacgattgaaaggattttatgaagatactgagagttattatatggtgatggagttcgtttctggtggtgacttaatggattttgttgctgctcatggtgcggttggagaagatgctgggagggagatatccaggcagatactcacagcaataaaatacattcactctatgggcatcagccatcgtgacctaaagcccgataatattcttattgaacaagacgatcctgtattggtaaagataaccgactttggtctggcaaaagtacaaggaaatgggtcttttatgaaaaccttctgtggcactttggcatatgtggcacctgaagtcatcagaggtaaagatacatccgtatctcctgatgaatacgaagaaaggaatgagtactcttcgttagtggatatgtggtcaatgggatgtcttgtgtatgttatcctaacgggccacttaccttttagtggtagcacacaggaccaattatataaacagattggaagaggctcatatcatgaagggcccctcaaagatttccggatatctgaagaagcaagagatttcatagattcattgttacaggtggatccaaataataggtcgacagctgcaaaagccttgaatcatccctggatcaagatgagtccattgggctcacaatcatatggtgatttttcacaaatatccttatcacaatcgttgtcgcagcagaaattattagaaaatatggacgatgctcaatacgaatttgtcaaagcgcaaaggaaattacaaatggagcaacaacttcaagaacaggatcaggaagaccaagatggaaaaattcaaggatttaaaatacccgcacacgcccctattcgatatacacagcccaaaagcattgaagcagaaactagagaacaaaaacttttacattccaataatactgagaatgtcaagagctcaaagaaaaagggtaatggtaggtttttaactttaaaaccattgcctgacagcattattcaagaaagcctggagattcagcaaggtgtgaatccatttttcattggtagatccgaggattgcaattgtaaaattgaagacaataggttgtctcgagttcattgcttcattttcaaaaagaggcatgctgtaggcaaaagcatgtatgaatctccggcacaaggtttagatgatatttggtattgccacaccggaactaacgtgagctatttaaataataaccgcatgatacagggtacgaaattccttttacaagacggagatgaaatcaagatcatttgggataaaaacaataaatttgtcattggctttaaagtggaaattaacgatactacaggtctgtttaacgagggattaggtatgttacaagaacaaagagtagtacttaagcaaacagccgaagaaaaagatttggtgaaaaagttaacccagatgatggcagctcaacgtgcaaatcaaccctcggcttcttcttcatcaatgtcggctaagaagccgccagttagcgatacaaataataacggcaataattcggtactaaacgacttggtagagtcaccgattaatgcgaatacggggaacattttgaagagaatacattcggtaagtttatcgcaatcacaaattgatcctagtaagaaggttaaaagggcaaaattggaccaaacctcaaaaggccccgagaatttgcaattttcgtaa

SEQ ID NO: 122553 - protein, 821 aa, Saccharomyces cerevisiae
MENITQPTQQSTQATQRFLIEKFSQEQIGENIVCRVICTTGQIPIRDLSADISQVLKEKRSIKKVWTFGRNPACDYHLGNISRLSNKHFQILLGEDGNLLLNDISTNGTWLNGQKVEKNSNQLLSQGDEITVGVGVESDILSLVIFINDKFKQCLEQNKVDRIRSNLKNTSKIASPGLTSSTASSMVANKTGIFKDFSIIDEVVGQGAFATVKKAIERTTGKTFAVKIISKRKVIGNMDGVTRELEVLQKLNHPRIVRLKGFYEDTESYYMVMEFVSGGDLMDFVAAHGAVGEDAGREISRQILTAIKYIHSMGISHRDLKPDNILIEQDDPVLVKITDFGLAKVQGNGSFMKTFCGTLAYVAPEVIRGKDTSVSPDEYEERNEYSSLVDMWSMGCLVYVILTGHLPFSGSTQDQLYKQIGRGSYHEGPLKDFRISEEARDFIDSLLQVDPNNRSTAAKALNHPWIKMSPLGSQSYGDFSQISLSQSLSQQKLLENMDDAQYEFVKAQRKLQMEQQLQEQDQEDQDGKIQGFKIPAHAPIRYTQPKSIEAETREQKLLHSNNTENVKSSKKKGNGRFLTLKPLPDSIIQESLEIQQGVNPFFIGRSEDCNCKIEDNRLSRVHCFIFKKRHAVGKSMYESPAQGLDDIWYCHTGTNVSYLNNNRMIQGTKFLLQDGDEIKIIWDKNNKFVIGFKVEINDTTGLFNEGLGMLQEQRVVLKQTAEEKDLVKKLTQMMAAQRANQPSASSSSMSAKKPPVSDTNNNGNNSVLNDLVESPINANTGNILKRIHSVSLSQSQIDPSKKVKRAKLDQTSKGPENLQFS

SEQ ID NO: 122554 - DNA, 24 bp, Artificial sequence
  primer
atgagtttgtccacgaaaagagag

SEQ ID NO: 122555 - DNA, 26 bp, Artificial sequence
  primer
ttagaggcaagataattctgagtatg

SEQ ID NO: 122556 - protein, 310 aa, Artificial sequence
  consensus sequence
  Variant (3)..(3): Xaa in position 3 is any amino acid
  Variant (5)..(8): Xaa in position 5 to 8 is any amino acid
  Variant (10)..(21): Xaa in position 10 to 21 is any amino acid
  Variant (22)..(23): Xaa in position 22 to 23 is any or no amino acid
  Variant (25)..(25): Xaa in position 25 is any amino acid
  Variant (28)..(42): Xaa in position 28 to 42 is any amino acid
  Variant (43)..(53): Xaa in position 43 to 53 is any or no amino acid
  Variant (55)..(57): Xaa in position 55 to 57 is any amino acid
  Variant (59)..(62): Xaa in position 59 to 62 is any amino acid
  Variant (65)..(79): Xaa in position 65 to 79 is any amino acid
  Variant (80)..(84): Xaa in position 80 to 84 is any or no amino acid
  Variant (86)..(86): Xaa in position 86 is any amino acid
  Variant (88)..(88): Xaa in position 88 is any amino acid
  Variant (90)..(93): Xaa in position 90 to 93 is any amino acid
  Variant (95)..(95): Xaa in position 95 is any amino acid
  Variant (97)..(116): Xaa in position 97 to 116 is any amino acid
  Variant (117)..(119): Xaa in position 117 to 119 is any or no amino acid
  Variant (121)..(126): Xaa in position 121 to 126 is any amino acid
  Variant (130)..(132): Xaa in position 130 to 132 is any amino acid
  Variant (134)..(134): Xaa in position 134 is any amino acid
  Variant (138)..(138): Xaa in position 138 is any amino acid
  Variant (141)..(141): Xaa in position 141 is any amino acid
  Variant (145)..(151): Xaa in position 145 to 151 is any amino acid
  Variant (152)..(170): Xaa in position 152 to 170 is any or no amino acid
  Variant (172)..(173): Xaa in position 172 to 173 is any amino acid
  Variant (178)..(178): Xaa in position 178 is any amino acid
  Variant (180)..(188): Xaa in position 180 to 188 is any amino acid
  Variant (189)..(189): Xaa in position 189 is any or no amino acid
  Variant (191)..(191): Xaa in position 191 is any amino acid
  Variant (196)..(196): Xaa in position 196 is any amino acid
  Variant (202)..(202): Xaa in position 202 is any amino acid
  Variant (204)..(207): Xaa in position 204 to 207 is any amino acid
  Variant (208)..(224): Xaa in position 208 to 224 is any or no amino acid
  Variant (226)..(228): Xaa in position 226 to 228 is any amino acid
  Variant (231)..(231): Xaa in position 231 is any amino acid
  Variant (234)..(234): Xaa in position 234 is any amino acid
  Variant (237)..(237): Xaa in position 237 is any amino acid
  Variant (240)..(241): Xaa in position 240 to 241 is any amino acid
  Variant (243)..(243): Xaa in position 243 is any amino acid
  Variant (245)..(246): Xaa in position 245 to 246 is any amino acid
  Variant (249)..(258): Xaa in position 249 to 258 is any amino acid
  Variant (259)..(263): Xaa in position 259 to 263 is any or no amino acid
  Variant (266)..(267): Xaa in position 266 to 267 is any amino acid
  Variant (269)..(287): Xaa in position 269 to 287 is any amino acid
  Variant (289)..(291): Xaa in position 289 to 291 is any amino acid
  Variant (293)..(295): Xaa in position 293 to 295 is any amino acid
  Variant (297)..(298): Xaa in position 297 to 298 is any amino acid
  Variant (300)..(307): Xaa in position 300 to 307 is any amino acid
  Variant (309)..(309): Xaa in position 309 is any amino acid
LGXGXXXXVXXXXXXXXXXXXXXAXKIXXXXXXXXXXXXXXXXXXXXXXXXXXEXXXLXXXXHPXXXXXXXXXXXXXXXXXXXXYXVXEXXXXGXLXXXXXXXXXXXXXXXXXXXXXXXQXXXXXXYLHXXXIXHRDXKPXNILXXXXXXXXXXXXXXXXXXXXXXXXXXKXXDFGLXKXXXXXXXXXXTXCGTPXYVAPEXLXXXXXXXXXXXXXXXXXXXXXYXXXVDXWSXGVXLYXXLXGXXPFXXXXXXXXXXXXXXXQIXXGXXXXXXXXXXXXXXXXXXXIXXXLXXXPXXRXXXXXXXXHXW

SEQ ID NO: 122557 - protein, 36 aa, Artificial sequence
  protein pattern
  Variant (2)..(4): Xaa in position 2 to 4 is any amino acid
  Variant (5)..(7): Xaa in position 5 to 7 is any or no amino acid
  Variant (9)..(9): Xaa in position 9 is any amino acid
  Variant (10)..(10): Xaa in position 10 is any or no amino acid
  Variant (12)..(12): Xaa in position 12 is Ile, Leu, Met or Val
  Variant (13)..(14): Xaa in position 13 to 14 is any amino acid
  Variant (15)..(15): Xaa in position 15 is Ala or Gly
  Variant (16)..(17): Xaa in position 16 to 17 is any amino acid
  Variant (21)..(21): Xaa in position 21 is Asp, Glu, Gln, Ser or Thr
  Variant (22)..(22): Xaa in position 22 is any amino acid
  Variant (23)..(23): Xaa in position 23 is Asp, Gly, Asn or Ser
  Variant (25)..(25): Xaa in position 25 is any amino acid
  Variant (29)..(29): Xaa in position 29 is Ile or Leu
  Variant (31)..(31): Xaa in position 31 is Leu or Pro
  Variant (32)..(32): Xaa in position 32 is Asp or Glu
  Variant (34)..(34): Xaa in position 34 is Ile, Leu or Val
  Variant (36)..(36): Xaa in position 36 is Leu or Val
EXXXXXXFXXQXXXXXXYLHXXXIXHRDXKXXNXLX

SEQ ID NO: 122558 - protein, 20 aa, Artificial sequence
  protein pattern
  Variant (3)..(3): Xaa in position 3 is Ile, Leu, Met or Val
  Variant (6)..(6): Xaa in position 6 is any amino acid
  Variant (8)..(8): Xaa in position 8 is Cys or Val
  Variant (9)..(9): Xaa in position 9 is Ile, Leu or Val
  Variant (10)..(10): Xaa in position 10 is Leu or Val
  Variant (11)..(11): Xaa in position 11 is Phe or Tyr
  Variant (12)..(13): Xaa in position 12 to 13 is any amino acid
  Variant (15)..(15): Xaa in position 15 is Cys, Ser or Thr
  Variant (16)..(16): Xaa in position 16 is Ala, Gly or Ser
  Variant (17)..(17): Xaa in position 17 is any amino acid
  Variant (18)..(18): Xaa in position 18 is Ile, Leu, Pro or Val
VDXWSXGXXXXXXLXXXXPF

SEQ ID NO: 122559 - protein, 15 aa, Artificial sequence
  protein pattern
  Variant (2)..(2): Xaa in position 2 is any amino acid
  Variant (3)..(3): Xaa in position 3 is any or no amino acid
  Variant (7)..(7): Xaa in position 7 is Leu or Pro
  Variant (8)..(8): Xaa in position 8 is any amino acid
  Variant (14)..(14): Xaa in position 14 is Ile or Val
  Variant (15)..(15): Xaa in position 15 is Ile or Leu
TXXCGTXXYVAPEXX

SEQ ID NO: 122560 - protein, 14 aa, Artificial sequence
  protein pattern
  Variant (2)..(2): Xaa in position 2 is Leu or Met
  Variant (4)..(6): Xaa in position 4 to 6 is any amino acid
  Variant (7)..(7): Xaa in position 7 is Asp, Glu, Gly or Ser
  Variant (9)..(9): Xaa in position 9 is Asp or Glu
  Variant (11)..(11): Xaa in position 11 is Phe, Leu or Met
  Variant (12)..(12): Xaa in position 12 is Asp, Glu, Asn or Gln
  Variant (13)..(13): Xaa in position 13 is any amino acid
  Variant (14)..(14): Xaa in position 14 is Ile, Leu or Val
VXEXXXXGXLXXXX

SEQ ID NO: 122561 - protein, 10 aa, Artificial sequence
  protein pattern
  Variant (2)..(2): Xaa in position 2 is Ile, Leu or Val
  Variant (3)..(3): Xaa in position 3 is Ala, Ser or Thr
  Variant (8)..(8): Xaa in position 8 is Ala or Ser
  Variant (10)..(10): Xaa in position 10 is Phe, Ile or Val
KXXDFGLXKX

SEQ ID NO: 122562 - protein, 15 aa, Artificial sequence
  protein pattern
  Variant (2)..(2): Xaa in position 2 is any amino acid
  Variant (4)..(4): Xaa in position 4 is any amino acid
  Variant (8)..(8): Xaa in position 8 is Phe, Trp or Tyr
  Variant (9)..(9): Xaa in position 9 is Ile, Leu or Val
  Variant (11)..(14): Xaa in position 11 to 14 is any or no amino acid
DXSXNGTXXNXXXXG

SEQ ID NO: 122563 - protein, 14 aa, Artificial sequence
  protein pattern
  Variant (2)..(3): Xaa in position 2 to 3 is any amino acid
  Variant (4)..(4): Xaa in position 4 is Ile, Leu or Val
  Variant (6)..(7): Xaa in position 6 to 7 is any amino acid
  Variant (8)..(8): Xaa in position 8 is Ile, Leu or Val
  Variant (9)..(9): Xaa in position 9 is any amino acid
  Variant (12)..(12): Xaa in position 12 is any amino acid
  Variant (13)..(14): Xaa in position 13 to 14 is Ile, Leu or Val
EXXXLXXXXHPXXX

SEQ ID NO: 122564 - protein, 27 aa, Artificial sequence
  protein pattern
  Variant (2)..(2): Xaa in position 2 is any amino acid
  Variant (4)..(5): Xaa in position 4 to 5 is any or no amino acid
  Variant (7)..(7): Xaa in position 7 is any amino acid
  Variant (8)..(9): Xaa in position 8 to 9 is any or no amino acid
  Variant (11)..(14): Xaa in position 11 to 14 is any amino acid
  Variant (15)..(15): Xaa in position 15 is Asp, Glu or Asn
  Variant (16)..(17): Xaa in position 16 to 17 is any amino acid
  Variant (18)..(18): Xaa in position 18 is Gly, Ser or Thr
  Variant (19)..(19): Xaa in position 19 is Cys or Gly
  Variant (20)..(22): Xaa in position 20 to 22 is any amino acid
  Variant (24)..(24): Xaa in position 24 is Ile, Leu, Met or Val
  Variant (26)..(26): Xaa in position 26 is any amino acid
  Variant (27)..(27): Xaa in position 27 is Phe, Ile or Val
GXGXXAXXXVXXXXXXXXXXXXAXKXX

SEQ ID NO: 122565 - DNA, 1206 bp, Arabidopsis thaliana
  CDS (1)..(1206)
atgtcgatggctttgcttttgacatcgccggctatgaagcagaagccggcggtgataacttctcctcgccgtggttcttctccttctcgtcgtcttcgagtttcttgtgttaccacaaaccctgctaggaagaaaaacgaaacatgcaatcattttcgacctatcaaagaagtaaataaccaattaacacacacaataccacaggagaagcttgagatcttcaaatcaatggaaaattgggcagaacaaaaactactaccttatctcaaaccggtagaagattcatggcaaccacaagacttcttacctgcgccagagaacgacgacgaattctacgaccgagtaaaagagatcagagaaagaacaaaagagatacctgacgattactttgtagttcttgtgggagatatgatcacagaagaagcacttccaacgtatcaaacgacgttaaacacactagacggtgttaaggatgaaaccggtgggagtttatcgccgtgggctgtgtggattagagcctggacggcggaggaaaaccgtcacggtgacttactcaacaagtatctttatctaactggtcgtgttgatatgcgacatgttgagaagactatacaatatcttattggttctggtatggattcgaaatttgagaacaatccatacaatggattcatctacacatcattccaagagcgagcaacattcatctctcacggcaacacggctaggctagccacaacatacggcgatgttaccctcgcgaagatctgcggcacaatcgctgccgacgagaagcgacacgagacggcgtacacgaagatagtggagaagctattcgagatcgaccctgacggatctgttcaggcgttagcgagtatgatgaagaaacggatcacaatgccggctcatcttatgcacgacggaagagataacgatttgtttgatcattacgccgccgtggcgcagcggattggagtttacacggcggcggattacgctgggatacttgagtttctgttgcggcggtggaaggtggagagtttgggattggggttatcaggagaaggaaggagagcacaggagtacttgtgcaccttgccgcagaggatcaagaggttagaggaaagagctaatgatagggtcaaacttgtgtcaaaaccttctgtttcgtttagctgggtttttggtagagatgtgaaactatag

SEQ ID NO: 122566 - protein, 401 aa, Arabidopsis thaliana
MSMALLLTSPAMKQKPAVITSPRRGSSPSRRLRVSCVTTNPARKKNETCNHFRPIKEVNNQLTHTIPQEKLEIFKSMENWAEQKLLPYLKPVEDSWQPQDFLPAPENDDEFYDRVKEIRERTKEIPDDYFVVLVGDMITEEALPTYQTTLNTLDGVKDETGGSLSPWAVWIRAWTAEENRHGDLLNKYLYLTGRVDMRHVEKTIQYLIGSGMDSKFENNPYNGFIYTSFQERATFISHGNTARLATTYGDVTLAKICGTIAADEKRHETAYTKIVEKLFEIDPDGSVQALASMMKKRITMPAHLMHDGRDNDLFDHYAAVAQRIGVYTAADYAGILEFLLRRWKVESLGLGLSGEGRRAQEYLCTLPQRIKRLEERANDRVKLVSKPSVSFSWVFGRDVKL

SEQ ID NO: 122567 - DNA, 1627 bp, Oryza sativa
  CDS (97)..(1299)
gacacccccatcccctctctccgcgcctcgcctcgccacccgcatcgccatctcgcaccgccacctcctccactctcggcggcgggggcctcatcgatggcgtcgaggatggcgctccggcccaacgacgtcacgctccgcctcaccccgcccctcgccgccgccgcgcggcgcaaccgccgcgccgccgccggcggtgtcagggtctacgccgtcgcgtccggggccgtctccaccaaggttgagaacaagaagccatttgctcctccacgagaggtgcacgtccaggttacacattccatgccaccccagaagattgaaatattcaagtctcttgatgattgggccagagataatattttgtcccaccttaagcctgtcgagaaatgttggcaaccacaggattttcttcctgatccagcctcagatgggtttcatgatgaagtcaaagaacttagagaacgtgccaaggaaattcctgatgattattttgtttgtttggttggagacatgattacggaggaagctcttcctacgtaccagactatgcttaacactctcgatggtgtccgagatgaaacaggtgcaagccccactgcctgggctgtttggacaagggcatggactgctgaggagaacaggcatggtgacctcctgaacaaatatctctacctcactggtagggtggacatgagacaaattgagaagacaattcagtatcttattggctctggaatggaccctaggacagagaacaatccttatcttggattcatctacacctccttccaagagcgtgcgaccttcatctcacatgggaacactgctcgccatgccaaagactttggcgacctaaaacttgcacagatctgtggcatcatcgcctcagatgagaagcgtcatgaggctgcatacaccaagattgttgagaagctgtttgagattgaccctgatggcactgtgcttgcttttgctgacatgatgaagaagaagatctcgatgcctgcccacctgatgttcgatggggaggatgataagctctttgagcacttctccatggttgcacagaggcttggtgtttacaccgccaaggactacgccgacatccttgagttcctcgttagcaggtggaagatatctgacctgactggcctatctagcgagggaaacaaggcgcaagactacctttgcacccttgctgctaggatcagaaggctggatgagagggcacaatcgagagccaagaaagctggtacattgcctttcagctgggtatatggtagggaagttcaactctgagcatcagacgccattgcgacttcttcgagctccagtgttactactgtccgtgcttgtcgagacacattttgagaacaataccaggtgtgtcttgctacatagttcttcaggttgaccaaatgaactgagggcatatgttcgtggtatctttgcttagagtgatagagagatttgcgtctgtgttttagctctttttttcttttctgccttttcatgtacaacttctggccgtgtggattggacatgtactgaacgtgagtctgtcgttggccgtgtcaatctgctcgtgtgtttaaactggctgctgttcaggtctgaaaattttgtg

SEQ ID NO: 122568 - protein, 400 aa, Oryza sativa
MASRMALRPNDVTLRLTPPLAAAARRNRRAAAGGVRVYAVASGAVSTKVENKKPFAPPREVHVQVTHSMPPQKIEIFKSLDDWARDNILSHLKPVEKCWQPQDFLPDPASDGFHDEVKELRERAKEIPDDYFVCLVGDMITEEALPTYQTMLNTLDGVRDETGASPTAWAVWTRAWTAEENRHGDLLNKYLYLTGRVDMRQIEKTIQYLIGSGMDPRTENNPYLGFIYTSFQERATFISHGNTARHAKDFGDLKLAQICGIIASDEKRHEAAYTKIVEKLFEIDPDGTVLAFADMMKKKISMPAHLMFDGEDDKLFEHFSMVAQRLGVYTAKDYADILEFLVSRWKISDLTGLSSEGNKAQDYLCTLAARIRRLDERAQSRAKKAGTLPFSWVYGREVQL

SEQ ID NO: 122569 - DNA, 1682 bp, Sorghum bicolor
  CDS (155)..(1348)
ctactggaaacagagcgcgagaatcgcacgcgccctctgccgtttgttcgttcctctcgctcgccaccaggcacctccacccacatcccaatctcgcgagcagcaggggcggcggcggcggcggcagcggcggtgcttcccattggcctccaggatggcgctccgcctcaacgacgtcgcgctctgcctctccccgccgctcgctgcccgacgccgccgccactgccgcagcggcggcggcagcaggttcgtcgccgtcgcctccatgacgtccgccgtctccaccaagctcgagaataagaagccatttgctcctccaagggaggtacatgtccaggttacacattcaatgccacctcagaagattgaaattttcaagtcgcttgatgattgggctagagataatatcttgacgcatctcaagccagttgagaagtgttggcagccacaggatttcctccctgacccatcatctgaaggatttcatgacgaagttaaggagctcagagaacgtgccaaggaaatccctgatgattattttgtttgtttggtgggagacatgattactgaggaagctcttccaacataccagactatgcttaacacccttgacggtgtcagagatgagacaggtgcaagccccactgcctgggctgtttggacgagggcatggactgctgaggagaacaggcatggtgatctgctcaacaagtatatgtacctcactgggagggtggatatgaggcaaattgagaagacaattcagtatcttattggctctggaatggatcctaggactgagaataatccttatcttggtttcatctacacctccttccaagagcgggcgaccttcatctcacacgggaacaccgctcgtcacgccaaggactttggcgacttaaagcttgcacagatctgtggcatcatcgcgtcagatgagaagcgacatgaaactgcgtacaccaagatcgtggagaaactgtttgagatcgaccctgatggtactgtggttgctctggctgacatgatgaagaagaagatcgcaatgcctgctcacctgatgtttgatgggcaggacgacaagctgtttgagcacttctccatggtcgcgcagaggcttggtgtttacactgccagggactacgccgacatccttgagttccttgtcgacaggtggaaggtggcggacctgactggtctgtctggtgaagggaacaaggcacaggactacctttgcacccttgcttcaaggatcaggaagctggacgagagggcccagagcagagccaagaaagcaggcacgctgcctttcagctgggtatatggtagggaagtccaactgtgaaatcggaaacccattgcgactgttgagttgcagcggaagtctatcatgcatcctgagacgcatcacgaagacaagacctggtgtgtcgcgttacatagttgttcaggttttgaccaaatggtctgggagcattctgtttgcctgtgtcgtctcatagagtgataggagaatgttcggctgttttttttctgctttgttgtacaacctgtggccgcatgaactgggcgtgaacatgctgtacgttgtctgtggcgttgtgtttcgctatggttatccagttcttcagatctgttaaaaaatttgtgagctatgaagttcagttctgttgctgttt

SEQ ID NO: 122570 - protein, 397 aa, Sorghum bicolor
MALRLNDVALCLSPPLAARRRRHCRSGGGSRFVAVASMTSAVSTKLENKKPFAPPREVHVQVTHSMPPQKIEIFKSLDDWARDNILTHLKPVEKCWQPQDFLPDPSSEGFHDEVKELRERAKEIPDDYFVCLVGDMITEEALPTYQTMLNTLDGVRDETGASPTAWAVWTRAWTAEENRHGDLLNKYMYLTGRVDMRQIEKTIQYLIGSGMDPRTENNPYLGFIYTSFQERATFISHGNTARHAKDFGDLKLAQICGIIASDEKRHETAYTKIVEKLFEIDPDGTVVALADMMKKKIAMPAHLMFDGQDDKLFEHFSMVAQRLGVYTARDYADILEFLVDRWKVADLTGLSGEGNKAQDYLCTLASRIRKLDERAQSRAKKAGTLPFSWVYGREVQL

SEQ ID NO: 122571 - DNA, 1832 bp, Zea mays
  CDS (250)..(1440)
gcgtgagcagtgtccgcagcagcggtggtggcgagacgagaggccgctaaaacccaagcgcggcccgagccgaacctgaacctgaggtggagagatcgcacgcgccctctgccgcttgttcgttcctcgcgcttgccaccaggcaccaccacacacatcccaatctcgcgagggcaagcagcagggtcctgcggcggcggcggcggcggcggcagcgcttccggctcccctttcccattggcctccacgatggcgctccgcctcaacgacgtcgcgctctgcctctccccgccgctcgccgcccgccgccgccgcagccgcagccgcagcagcggcaggttcgtcgccgtcgcctccatgacgtccgccgtctccaccaaggttgagaataagaagccatttgctcctccaagggaggtacatgtccaggttacacattcaatgccacctcacaagattgaaattttcaagtcgcttgatgattgggctagagataatatcttgacacatctcaagccagtcgagaagtgttggcagccacaggatttcctccctgacccagcatctgaaggatttcatgatgaagttaaggagctcagagaacgtgccaaggaaatccctgatgattattttgtttgtttggtgggagacatgattaccgaggaagctctaccaacataccagactatgcttaacaccctcgatggtgtcagagatgagacaggtgcaagccccactgcctgggctgtttggacgagggcatggactgctgaggagaacaggcatggtgatctgctcaacaagtatatgtacctcactgggagggtggatatgaggcagattgagaagacaattcagtatcttattggctctggaatggatcctaggactgagaataatccttatcttggtttcatctacacctccttccaagagcgggcgaccttcatctcacacgggaacactgctcgtcacgccaaggactttggcgacttaaagcttgcacaaatctgcggcatcattgcctcggatgagaagcgacatgaaactgcgtacaccaagatcgtggagaagctgtttgagatcgaccctgatggtaccgtggtcgctctggctgacatgatgaggaagaagatctcaatgcctgcccacctgatgtttgacgggcaggacgacaagctgttcgagcacttctccatggtcgcgcagaggcttggcgtttacactgccagggactacgccgacatcctcgagttcctcgtcgacaggtggaaggtggtgaacctgactggtctgtcgggtgaagggaacaaggcgcaggactacctttgcacccttgcttcaaggatcaggaggctggaggagagggcccagagcagagccaagaaagccggcacgctgcctttcagctgggtatacggtagggacgtccaactgtgagatcggaaacctgctgcggactgcttagacaagacctgctgtgtctgcgttacataggtctccaggttttgatcaaatggtcccgtgtcgtcttatagagcgataggagaacgtgttggtctgtggtgtagctttgtttttattttgtatttttctgctttgatgtacaacctgtggccgcatgaactggggcgtggagatgggagcgaccatgccgtactttgtctgtcgctggcggtgtgtttcggtatgttatttcagtcgttcagatctgttaaaaaaaaaaaaaaaaaaaaaaaggggccgcagaacttggcggtgtgtttcggtatgttatttgagttgctcagctctgttaaaaattttgtgccccatgcagttcagttctgttc

SEQ ID NO: 122572 - protein, 396 aa, Zea mays
MALRLNDVALCLSPPLAARRRRSRSRSSGRFVAVASMTSAVSTKVENKKPFAPPREVHVQVTHSMPPHKIEIFKSLDDWARDNILTHLKPVEKCWQPQDFLPDPASEGFHDEVKELRERAKEIPDDYFVCLVGDMITEEALPTYQTMLNTLDGVRDETGASPTAWAVWTRAWTAEENRHGDLLNKYMYLTGRVDMRQIEKTIQYLIGSGMDPRTENNPYLGFIYTSFQERATFISHGNTARHAKDFGDLKLAQICGIIASDEKRHETAYTKIVEKLFEIDPDGTVVALADMMRKKISMPAHLMFDGQDDKLFEHFSMVAQRLGVYTARDYADILEFLVDRWKVVNLTGLSGEGNKAQDYLCTLASRIRRLEERAQSRAKKAGTLPFSWVYGRDVQL

SEQ ID NO: 122573 - DNA, 1466 bp, Physcomitrella patens
  CDS (141)..(1385)
aacgagtttcacagctgttgccctcctgcaacgcatctgcggattccacactgtcttccctctctcttctcgctccacactcgctgtgtatcggtcaatgaattttttggggtgaataggtataactagagttccttgagatggcggctataccgatggagttcgcggcagttaacggattgcgaggtgccacctcaacaaccgcttcgctgacttcaacattgaggggccagaagttgaatgtgaatttgaacttagttagacgaacagggaatgttggtccattggaagtatttatgactgctactctgccccctaaaacaaaaggtgcacctataagtaagcgaccaacggagaagcactccaaagttatgcactccatctcaccagagaagttggaaatgttcaagtcccttgaaggctgggcctccgagactctcctgccttacttaaagcctgtagagaagtgctggcaaccacaggattttcttccagagccctccgctgaggacttcttagaccaagtcaaagagcttcgagagagagcagcatgcttgtctgatgactatttagtgtgtttggtcggagacatgatcaccgaagaggctctgcctacgtatcaaactatgctgaacacattggatgggagtcgggatgaaaccggtgccagtcccactccttggggtgtctggacccgtgcatggactgcagaagagaatcgccacggagatcttttaaataaatatttatacttggctggccgggtggacatgaaaagcattgagaaaactatccagtaccttattggatctggcatggaccctcaaacagagaacaatccctacttgggtttcgtttacacctccttccaggaaagggcaacattcatttcacatggtaacactgctcggcacgccaaggaacatggagatgcgaagctcgcaactatttgcggaatcattgccgctgatgaaagaaggcacgagaacgcgtacaccaagatcgtagagaagttatttgagatagacccggatggtgccatgcttgccttcgcagatatgatgagaaagaagatttccatgccagcgcatctaatgtatgatggtcaaaacgatcatcttttcgatgacttttcacttgttgctcaaagaacaggtgtttacactgcccgagattatgcggacatcatggagcacttggtgaagaggtggaatgtttccagtattacagggctctcggaagaagcgctggctgcgcaacaatatgtgtgctcactgcctcctcgtatcagaagactcgatgaacgtgcccaagcgaaagtcaagaagggtcctaagaggggaagcttcagctggatcttcaatagagaggttgctctattgtaggtgccgtcgtttttgtacatataatattttgatgctataaaagatatacgatgtgtaccagtcaaaaaaaaaaaaaaaaaa

SEQ ID NO: 122574 - protein, 414 aa, Physcomitrella patens
MAAIPMEFAAVNGLRGATSTTASLTSTLRGQKLNVNLNLVRRTGNVGPLEVFMTATLPPKTKGAPISKRPTEKHSKVMHSISPEKLEMFKSLEGWASETLLPYLKPVEKCWQPQDFLPEPSAEDFLDQVKELRERAACLSDDYLVCLVGDMITEEALPTYQTMLNTLDGSRDETGASPTPWGVWTRAWTAEENRHGDLLNKYLYLAGRVDMKSIEKTIQYLIGSGMDPQTENNPYLGFVYTSFQERATFISHGNTARHAKEHGDAKLATICGIIAADERRHENAYTKIVEKLFEIDPDGAMLAFADMMRKKISMPAHLMYDGQNDHLFDDFSLVAQRTGVYTARDYADIMEHLVKRWNVSSITGLSEEALAAQQYVCSLPPRIRRLDERAQAKVKKGPKRGSFSWIFNREVALL

SEQ ID NO: 122575 - DNA, 1524 bp, Brassica napus
  CDS (27)..(1226)
ctgaaagaacgtcaaaccttcaaaaaatggcattgaagtttaatcctttggtatctcagccatacaaactcgcttcctcggctcgtccgccagtctctactttcagatctcccaagttcctatgcctcgcttcttcttcttctcctgctctcagctccaaggaggtcgagagcttgaagaagccattcaccccaccaagggaagtccaccttcaagtcctgcactccatgccaccccaaaagatcgaaatcttcaaatccatggaagaccgggccgagcagaaccttctacctcacctcaaagacgtggagaagtcatggcagccccaggacttcttacccgaccctgcttccgacggtttcgaagatcaggtaaaagagttaagagaaagagcaagagagctcccagatgattacttcgttgtcttggttggagacatgatcacagaagaagcgcttcccacctaccaaacaatgttaaacactttggatggagtaagggatgagactggcgctagccccacttcatgggccgtttggactagagcttggaccgctgaagagaatcgccacggtgatcttctcaataagtatctttacttgtctggtcgtgttgacatgaggcagattgaaaagactattcagtacctgattggttccggaatggatccagcgacagagaacaacccttaccttggcttcatctacacttcattccaagagagagccaccttcgtctctcacggcaacacagctcgccaagccaaagagcacggagacctcaagctagcgcaaatctgcgggacaatagctgcagacgagaagcgtcacgagacagcttacaccaagatagttgagaagcttctcgagattgatcctgacggcactgtggtggcctttgcggatatgatgaggaagaaaatctcgatgcctgctcacttgatgtacgatgggcgtgatgataacctctttgacaacttctcctccgtggctcagaggctcggtgtttacactgccaaagactatgcggacattcttgagtttttggccgggaggtggaggatcgagagcttgactgggctttcgggtgaagggaacaaagcgcaagagtatttgtgtgggttgactccgagaatcaggaggttggatgagagagctcaagcaagagccaagaaaggacctaagattccttttagctggatacatgacagagaagtgcagctctgaacacaaaggacaaaagacataataaaaccattttctctctctctctctccgttcatcatttgatatgtctgctcttgaagttggtgtagattactatggtttcctgataatgttcgttggtctagttacaaagttgagaagcagtgtcttagtaactttgtgtttttctttcagtgtcttatgtttggtcttttagtaaacttctggtagttaaaaacagttgagcgtttgggtctgtactcagttttcactgtggagttttgttctagttgaagttagtttttgtgtgttaaaaaaa

SEQ ID NO: 122576 - protein, 399 aa, Brassica napus
MALKFNPLVSQPYKLASSARPPVSTFRSPKFLCLASSSSPALSSKEVESLKKPFTPPREVHLQVLHSMPPQKIEIFKSMEDRAEQNLLPHLKDVEKSWQPQDFLPDPASDGFEDQVKELRERARELPDDYFVVLVGDMITEEALPTYQTMLNTLDGVRDETGASPTSWAVWTRAWTAEENRHGDLLNKYLYLSGRVDMRQIEKTIQYLIGSGMDPATENNPYLGFIYTSFQERATFVSHGNTARQAKEHGDLKLAQICGTIAADEKRHETAYTKIVEKLLEIDPDGTVVAFADMMRKKISMPAHLMYDGRDDNLFDNFSSVAQRLGVYTAKDYADILEFLAGRWRIESLTGLSGEGNKAQEYLCGLTPRIRRLDERAQARAKKGPKIPFSWIHDREVQL

SEQ ID NO: 122577 - DNA, 1258 bp, Thunbergia alata; var. Bojer ex Sims
  CDS (17)..(1180)
attttgtaaagtgaaaatggcattggtattcaagagtataggagcccataagactcctccttgtactttaaatttagcttcaccagctttgtaccacaccagagtcacaatggcttcgactattactcaccctccgccactcaaagatagaaaaatatcgtctactcgacgagtaaggacatatccgttggctccagagaaggctgaaatcttcaattctatgcacgggtgggttgaagacaccattctccctttcctgaagccggtggaggagtcgtggcagccgacggacttcctcccggactccacttctgatgggttccacgagcaagtggaagagcttcgtaaacgaacggccgatctccctgatgattacttagttgcattggtgggagcaatggtgacggaggaagcccttccgacgtatcaaacaatgcttaacacgacagatgtgatatacgatgagagcggcgccagccctgtgccttgggccgtttggacccgggcttggaccgctgaagagaacaggcatggtgatattgtcaacaagtatctctatctttccggtcgtgtcgatatgaagcaaattgagaagactattcaatacttgattggctcgggcatggatcctggtgcggacaacaacccgtacctagcatatatctacacgtcgtatcaggagagggctacagcgatctcccatggaagtctgggccggctagcgaggcagaagggagagatgaaactggctcagatttgtggaacaatttctgccgatgagaagcggcacgaggcggcgtactcgaaaatcgtggagaagctattcgagttggatccagaaggcacaatgttggcgttggcatacatgatgaagatgaagattgtaatgccagctcgtctgatgcacgatgggaaggatccggacatgtttcaacatttctctgctgtgtcgcagcgactggggatttacactgcaaaggagtatacggacattctggagcatatgatagcgcggtggggagtggataagctgacggggctgagcggggagggccgcagggcgcaggattacgtgtgcgggttgccgatgaggtttaggaaggtggaggagagggcgcaggcgtgggcggagaatatatcgcatgttccttttagctggatctttgggagaagagtgtagtctcagtctcagtctcactcggtcactgtgttgtttgttctatgatcaagaaataagtgcaatgccacccttattctc

SEQ ID NO: 122578 - protein, 387 aa, Thunbergia alata; var. Bojer ex Sims
MALVFKSIGAHKTPPCTLNLASPALYHTRVTMASTITHPPPLKDRKISSTRRVRTYPLAPEKAEIFNSMHGWVEDTILPFLKPVEESWQPTDFLPDSTSDGFHEQVEELRKRTADLPDDYLVALVGAMVTEEALPTYQTMLNTTDVIYDESGASPVPWAVWTRAWTAEENRHGDIVNKYLYLSGRVDMKQIEKTIQYLIGSGMDPGADNNPYLAYIYTSYQERATAISHGSLGRLARQKGEMKLAQICGTISADEKRHEAAYSKIVEKLFELDPEGTMLALAYMMKMKIVMPARLMHDGKDPDMFQHFSAVSQRLGIYTAKEYTDILEHMIARWGVDKLTGLSGEGRRAQDYVCGLPMRFRKVEERAQAWAENISHVPFSWIFGRRV

SEQ ID NO: 122579 - DNA, 1529 bp, Brassica napus; cv. 212/86
  CDS (25)..(1230)
aaacctcgtatcaaaaaaaagaaaatggcattgaagcttaaccctttggcatctcagccttacaaactcccttcctcggctcgtccgccaatctctactctcagatctcccaagttcctctgcctcgcttcctcttcttcccctgctctcagctccagcaccaaggaggtcgagagtctgaagaagccattcaccccaccaaaggaagtccacgttcaagtcctgcactccatgccaccccaaaagatcgaaatcttcaaatccatggaagactgggccgagcacaacctcctacctcacctcaaagacgtggagaagtcatggcagccccaggacttcttaccggaccctgcttccgacgggttcgaagaccaggtaaaagagttaagagaaagagcaagagagctcccagatgattacttcgttgtcttggtgggtgacatgatcacagaagaagcgcttcccacctatcaaacaatgctgaacactttggatggtgtaagggatgagactggtgctagccccacttcatgggccgtttggactagagcttggactgctgaagagaatcgccacggtgatcttttgaataagtatctttacttgtctggtcgtgttgacatgaggcagattgagaagactattcagtacctgattggttccggaatggatccacgcacagagaacaacccttaccttggcttcatctacacctcattccaagaaagagccaccttcgtctctcacggcaacacagctcgccaagccaaagagcacggagacctcaagctagcccaaatctgtgggacaatagctgcagacgagaagcgtcacgagacggcttacaccaagatagttgagaagcttcttgagattgatcctgacggcactgtggtggcctttgcggatatgatgaggaagaaaatctcgatgcctgctcacttgatgtacgatgggcgtgacgacaagctctttgacaacttctcctccgtggctcagaggcttggtgtctacactgctaaagattatgcggacattcttgagttcttggtcgggaggtggaagattgagagcttgagtgggctttcgggtgaaggaaacaaagcgcaggagtatctatgtgggttgactccgagaatcaggaggttggatgagagagctcaagcaagagccaagaaaggacctaagattcctttcagctggatacatgacagagaagtgcagctctgaagaaaggacaaaagacataataaaaccattttctctctctctctccgttcgttatttgatatgtctgctcttgaagttggtgtagattactatggtttctgataatgttcgttggtctagttacaaagttgagaagcagtgtcttagtaactttgtttgtttctttcagtgacttatgtttggtcttttagtaaacttctggtagttaaaaacagttgagcgttttgagtctgtactcagttttcactgtggagttttgttctagttgaagttagtttttgtgtcaaaaaaaaaaaaaa

SEQ ID NO: 122580 - protein, 401 aa, Brassica napus; cv. 212/86
MALKLNPLASQPYKLPSSARPPISTLRSPKFLCLASSSSPALSSSTKEVESLKKPFTPPKEVHVQVLHSMPPQKIEIFKSMEDWAEHNLLPHLKDVEKSWQPQDFLPDPASDGFEDQVKELRERARELPDDYFVVLVGDMITEEALPTYQTMLNTLDGVRDETGASPTSWAVWTRAWTAEENRHGDLLNKYLYLSGRVDMRQIEKTIQYLIGSGMDPRTENNPYLGFIYTSFQERATFVSHGNTARQAKEHGDLKLAQICGTIAADEKRHETAYTKIVEKLLEIDPDGTVVAFADMMRKKISMPAHLMYDGRDDKLFDNFSSVAQRLGVYTAKDYADILEFLVGRWKIESLSGLSGEGNKAQEYLCGLTPRIRRLDERAQARAKKGPKIPFSWIHDREVQL

SEQ ID NO: 122581 - DNA, 1714 bp, Zea mays
  CDS (134)..(1312)
ggcacgagctcactgccatttgtttggttgttcctctcgctcgccagtcgccaccaggcagcaggcatcccaatctcgcgagagccagtagcggcggcggcgcttccggcttcccttcccattggcctccgggatggcgctccgcctccacgacgtcgcgctctgcctctccccgccgctcgccgcccgccgccgcagcggcggcagtttcgtcgccgtcgcctccatgacgtccgccgccgtctccaccagggtggagaacaagaagccatttgctcctccgagggaggtacatgtccaggttacacattcaatgccatctcacaagattgaaattttcaagtcacttgatgattgggctagagataatatcttgacacatctcaagccagtcgagaagtgttggcagccacaggatttcctccctgacccagcatctgaaggatttcatgatgaagttaaggagctcagagaacgtgccaaggagatccctgatgattattttgtttgtttggttggagacatgattactgaggaagctctaccaacataccagactatgcttaacaccctcgacggtgtcagagatgagacaggtgcaagccccactgcttgggctgtttggacgagggcatggactgctgaggagaacaggcatggtgatcttctcaacaagtacatgtacctcactgggagggtagatatcaggcaaattgagaagacaattcagtatcttattggctctggaatggatcctaggactgagaataatccttatcttggtttcgtctacacctccttccaagagcgggcgaccttcatctcgcatgggaacactgctcgtcatgccaaggactttggcgacttaaagctcgcacaaatctgtggcatcatcgcctcagatgagaagcgacatgaaactgcgtacaccaagatcgtggagaagttgtttgagatcgaccctgatggtacagtggttgctctggctgacatgatgaagaagaagatctcaatgcctgcccacctgatgtttgacggtcaggacgacaagctgtttgagcacttctccatggtcgcgcagaggcttggcgtttacaccgccagggactacgccgacattcttgagttccttgttgacaggtggaaggtggcggacctgactggtctgtcgggtgaggggaacaaggcgcaggactacctctgcacccttgcttcaaggatccggaggctagacgagagggcccagagcagagccaagaaagcaggcacgctgcctttcagctgggtatatggtagggaagtccaactgtgaaatcggaaacccattgcgactgcttgagttggagcatagtctatcatgcaccctatgacgcatcgcacgacaagacctggtgtgtcgcgtgacatagttgttcaggttttgaccaaatggtctgggagcatttgttttgccttgtgccgtctcatagagcgttaggatagtgtacgtctgtgttctagctttgttttgtctgctgctttgatgtaacttgtggccatgaggctggacatggagtgaacatgttgtacattgtcgctggcggtatgtttcggtatgttatttcagttgcttgagatctgttaattttttgcgcagctatggaggtcgttctgttctggtcaaaaaaaaaaaaaaaaaaaaaaaaaaaaaaaaaaaaaaaaaaaaaaaaaaaaa

SEQ ID NO: 122582 - protein, 392 aa, Zea mays
MALRLHDVALCLSPPLAARRRSGGSFVAVASMTSAAVSTRVENKKPFAPPREVHVQVTHSMPSHKIEIFKSLDDWARDNILTHLKPVEKCWQPQDFLPDPASEGFHDEVKELRERAKEIPDDYFVCLVGDMITEEALPTYQTMLNTLDGVRDETGASPTAWAVWTRAWTAEENRHGDLLNKYMYLTGRVDIRQIEKTIQYLIGSGMDPRTENNPYLGFVYTSFQERATFISHGNTARHAKDFGDLKLAQICGIIASDEKRHETAYTKIVEKLFEIDPDGTVVALADMMKKKISMPAHLMFDGQDDKLFEHFSMVAQRLGVYTARDYADILEFLVDRWKVADLTGLSGEGNKAQDYLCTLASRIRRLDERAQSRAKKAGTLPFSWVYGREVQL

SEQ ID NO: 122583 - DNA, 1621 bp, Zea mays
  CDS (146)..(1327)
cgcacgcgccctctgccgcttgttcgttcctcgcgctcgccaccaggcaccaccacacacatcccaatctcgcgagggcaagcagcagggtctgcggcggcggcggcggccgcgcttccggctccccttcccattggcctccacgatggcgctccgcctcaacgacgtcgcgctctgcctctccccgccgctcgccgcccgccgccgccgccgcagcagcggcaggttcgtcgccgtcgcctccatgacgtccgccgtctccaccaaggtcgagaataagaagccatttgctcctccaagggaggtacatgtccaggttacacattcaatgccacctcacaagattgaaattttcaagtcgcttgatgattgggctagagataatatcttgacgcatctcaagccagtcgagaagtgttggcagccacaggatttcctcccggacccagcatctgaaggatttcatgatgaagttaaggagctcagagaacgtgccaaggaaatccctgatgattattttgtttgtttggtgggagacatgattaccgaggaagctctaccaacataccagactatgcttaacaccctcgacggtgtcagagatgagacaggtgcaagccccactgcctgggctgtttggacgagggcatggactgctgaggagaacaggcatggtgatctgctcaacaagtatatgtacctcactgggagggtggatatgaggcagattgagaagacaattcagtatcttattggctctggaatggatcctaggactgagaataatccttatcttggtttcatctacacctccttccaagagcgggcgaccttcatctcacacgggaacactgctcgtcacgccaaggactttggcgacttaaagcttgcacaaatctgcggcatcatcgcctcagatgagaagcgacatgaaactgcgtacaccaagatcgtggagaagctgtttgagatcgaccctgatggtaccgtggtcgctctggctgacatgatgaggaagaagatctcaatgcctgcccacctgatgtttgacgggcaggacgacaagctgttcgagcacttctccatggtcgcgcagaggcttggcgtttacaccgccagggactacgccgacatcctcgagttcctcgtcgacaggtggaaggtggcgagcctgactggtctgtcgggtgaagggaacaaggcgcaggactacctttgcacccttgcttcaagaatcaggaggctggaggagagggcccagagcagagccaagaaagccggcacgctgcctttcagctgggtatacggtagggacgtccaactgtgagatcggaaacctgctgcggactgcttagacaagacctgctgtgtctgcgttacataggtctccaggttttgatcaaatggtcccgtgtcgtcttatagagcgataggagaacgtgttggtctgtggtgtagctttgtttttattttgtatttttctgctttgatgtacaacctgtggccgcatgaactggggcgtggagatgggagcgaccatgccgtactttgtctgtcgctggcggtgtgtttcggtatgttatttgagttgctcagatctgttaaaaaaaaaaaaaaaaaa

SEQ ID NO: 122584 - protein, 393 aa, Zea mays
MALRLNDVALCLSPPLAARRRRRSSGRFVAVASMTSAVSTKVENKKPFAPPREVHVQVTHSMPPHKIEIFKSLDDWARDNILTHLKPVEKCWQPQDFLPDPASEGFHDEVKELRERAKEIPDDYFVCLVGDMITEEALPTYQTMLNTLDGVRDETGASPTAWAVWTRAWTAEENRHGDLLNKYMYLTGRVDMRQIEKTIQYLIGSGMDPRTENNPYLGFIYTSFQERATFISHGNTARHAKDFGDLKLAQICGIIASDEKRHETAYTKIVEKLFEIDPDGTVVALADMMRKKISMPAHLMFDGQDDKLFEHFSMVAQRLGVYTARDYADILEFLVDRWKVASLTGLSGEGNKAQDYLCTLASRIRRLEERAQSRAKKAGTLPFSWVYGRDVQL

SEQ ID NO: 122585 - DNA, 1381 bp, Hedera helix
  CDS (94)..(1278)
ctttttctctctcttccttgcagaattaatccggtggaaattacaaaatcaaaccagaaaataaaaataaaaactcaagaagaagaagaagaaatggctttgaagctcaatttccaatgcaagaagaaccaccctgctgcgtttgctaagtcaccattaccagtgaccagagttagctctccaagggttttcatggcttccactgtcaactctaactccatggttcttgataatctcaaaagtcctccaaatcttcaagtcactcactctatgccaccccaaaagctagaaatattcaagtcccttgatgattgggctaggaacaatgtgttgattcacctcaaatctgtcgagaaatcttggcaaccacaagactacttgccggatccggtgtcagacggattcgaggagcaagtgcgggagttgagggaaagggccaaggagattcccgacgactattttgtggtgttagttggagatatgatcacagaagaagcacttccaacatatatgtctatgctcaataggtgtgatggtattaaggatgagactggggctgagcccagtgcttgggcaatgtggactagggcatggactgccgaagagaatagacatggtgaccttctcaataagtacctttatttgtctggaagggttgatatgaggaaaattgagaagactattcaatatctcatcggctcaggaatggatatcaagtcagaaaacagcccctacctaggcttcatctacacatccttccaagagagagcaaccttcatatcccatgccaacacagccaagctggcccaacactacggcgacaagaacctcgctcacatctgcggctccatcgcctccgacgagaagcgccacgccacagcctacaccaagatcgtggaaaagctcgctgagatcgaccccgacacaacagtaattgcttttgcagatatgatgcgcaaaaaaataacaatgccagcgcacttgatgtacgacggaagtgacgaacttctttttaaacatttcacggcggttgctcagagagtgggggtttattctgcgttggattattgcgacatcttagagtttctggtggataaatggaatgtggaaaggcttacggggctgtcggacgaggggcgaaaagcgcaggaatatgtgtgtgaattgggtcccaagattaggcgagtggaagagaaagtgcaggggaaggagaagaagaagaaagctgagcaccctgtttctttcagctggattttcaatcgggagttgaagatatgaacaggaagggaagggaatggaggagcaaatgagtgtagtagatttctatatgcatgtttatatattatgaatgattattatataataataagtgtttgagttt

SEQ ID NO: 122586 - protein, 394 aa, Hedera helix
MALKLNFQCKKNHPAAFAKSPLPVTRVSSPRVFMASTVNSNSMVLDNLKSPPNLQVTHSMPPQKLEIFKSLDDWARNNVLIHLKSVEKSWQPQDYLPDPVSDGFEEQVRELRERAKEIPDDYFVVLVGDMITEEALPTYMSMLNRCDGIKDETGAEPSAWAMWTRAWTAEENRHGDLLNKYLYLSGRVDMRKIEKTIQYLIGSGMDIKSENSPYLGFIYTSFQERATFISHANTAKLAQHYGDKNLAHICGSIASDEKRHATAYTKIVEKLAEIDPDTTVIAFADMMRKKITMPAHLMYDGSDELLFKHFTAVAQRVGVYSALDYCDILEFLVDKWNVERLTGLSDEGRKAQEYVCELGPKIRRVEEKVQGKEKKKKAEHPVSFSWIFNRELKI

SEQ ID NO: 122587 - DNA, 1146 bp, Oryza sativa (japonica cultivar-group)
  CDS (1)..(1146)
atgcaggtcgtgggaaccgtgcgtgtcagtggctgcggcgcggtggtggcgccctcgcgccggcagtgccgcgtgtccgcggcggtgctgacggccgcggagacggcgacggcgacgcggcgccgcgtgacgcactcgatgccgccggagaaggcggaggtgttccggtcgctggaagggtgggcgaggtcgtcgctgctgccgctgctcaagcccgtggaggagtgctggcagccgacggacttcctgccggactcgtcgtcggagatgttcgagcaccaggtccacgagctccgcgcgcgcgccgcggggctccccgacgagtacttcgtcgtgctggtcggggacatgattaccgaggaggcgctgccgacgtaccagaccatgatcaacacgctcgacggcgtccgcgacgagaccggcgccagcgcctgcccctgggccgtctggacgcgcacctggaccgccgaggagaaccgccacggcgacatcctcggcaagtacatgtacctctccggccgcgtcgacatgcgcatggtcgagaagaccgtccagtacctcatcggctccggcatggatccggggacggagaacaacccgtacctggggttcgtgtacaccagcttccaggagcgcgcgacggccgtgtcgcacgggaacacggcgcgcctcgccagggcgcacggggacgacgtcctggcgcgcacctgcggcaccatcgccgccgacgagaagcggcacgagacggcgtacgggcgcatcgtggagcagctgctgcggctcgacccggacggcgccatgctcgccatcgccgacatgatgcacaagcggatcaccatgcccgcgcacctcatgcacgacggccgcgacatgaacctgttcgaccacttcgccgccgtggcgcagcgcctcaacgtctacaccgcgcgcgactacgccgacatcgtcgagttcctcgtcaagcggtggaagctggagaccctggagactgggctctccggcgagggccggagggcccgggacttcgtgtgcgggctcgcgaagaggatgcggcgggccgcggagcgggctgaggacagggctaagaaggatgagcagaggaaggtcaagttcagctggatctatgatagggaagtgattgtctag

SEQ ID NO: 122588 - protein, 381 aa, Oryza sativa (japonica cultivar-group)
MQVVGTVRVSGCGAVVAPSRRQCRVSAAVLTAAETATATRRRVTHSMPPEKAEVFRSLEGWARSSLLPLLKPVEECWQPTDFLPDSSSEMFEHQVHELRARAAGLPDEYFVVLVGDMITEEALPTYQTMINTLDGVRDETGASACPWAVWTRTWTAEENRHGDILGKYMYLSGRVDMRMVEKTVQYLIGSGMDPGTENNPYLGFVYTSFQERATAVSHGNTARLARAHGDDVLARTCGTIAADEKRHETAYGRIVEQLLRLDPDGAMLAIADMMHKRITMPAHLMHDGRDMNLFDHFAAVAQRLNVYTARDYADIVEFLVKRWKLETLETGLSGEGRRARDFVCGLAKRMRRAAERAEDRAKKDEQRKVKFSWIYDREVIV

SEQ ID NO: 122589 - DNA, 1203 bp, Oryza sativa (japonica cultivar-group)
  CDS (1)..(1203)
atggcgtcgaggatggcgctccggcccaacgacgtcacgctccgcctcaccccgcccctcgccgccgccgcgcggcgcaaccgccgcgccgccgccggcggtgtcagggtctacgccgtcgcgtccggggccgtctccaccaaggttgagaacaagaagccatttgctcctccacgagaggtgcacgtccaggttacacattccatgccaccccagaagattgaaatattcaagtctcttgatgattgggccagagataatattttgtcccaccttaagcctgtcgagaaatgttggcaaccacaggattttcttcctgatccagcctcagatgggtttcatgatgaagtcaaagaacttagagaacgtgccaaggaaattcctgatgattattttgtttgtttggttggagacatgattacggaggaagctcttcctacgtaccagactatgcttaacactctcgatggtgtccgagatgaaacaggtgcaagccccactgcctgggctgtttggacaagggcatggactgctgaggagaacaggcatggtgacctcctgaacaaatatctctacctcactggtagggtggacatgagacaaattgagaagacaattcagtatcttattggctctggaatggaccctaggacagagaacaatccttatcttggattcatctacacctccttccaagagcgtgcgaccttcatctcacatgggaacactgctcgccatgccaaagactttggcgacctaaaacttgcacagatctgtggcatcatcgcctcagatgagaagcgtcatgagactgcatacaccaagattgttgagaagctgtttgagattgaccctgatggcactgtgcttgcttttgctgacatgatgaagaagaagatctcgatgcctgcccacctgatgttcgatggggaggatgataagctctttgagcacttctccatggttgcacagaggcttggtgtttacaccgccaaggactacgccgacatccttgagttcctcgttagcaggtggaagatatctgacctgactggcctatctagcgagggaaacaaggcgcaagactacctttgcacccttgctgctaggatcagaaggctggatgagagggcacaatcgagagccaagaaagctggtacattgcctttcagctgggtatatggtagggaagttcaactctga

SEQ ID NO: 122590 - protein, 400 aa, Oryza sativa (japonica cultivar-group)
MASRMALRPNDVTLRLTPPLAAAARRNRRAAAGGVRVYAVASGAVSTKVENKKPFAPPREVHVQVTHSMPPQKIEIFKSLDDWARDNILSHLKPVEKCWQPQDFLPDPASDGFHDEVKELRERAKEIPDDYFVCLVGDMITEEALPTYQTMLNTLDGVRDETGASPTAWAVWTRAWTAEENRHGDLLNKYLYLTGRVDMRQIEKTIQYLIGSGMDPRTENNPYLGFIYTSFQERATFISHGNTARHAKDFGDLKLAQICGIIASDEKRHETAYTKIVEKLFEIDPDGTVLAFADMMKKKISMPAHLMFDGEDDKLFEHFSMVAQRLGVYTAKDYADILEFLVSRWKISDLTGLSSEGNKAQDYLCTLAARIRRLDERAQSRAKKAGTLPFSWVYGREVQL

SEQ ID NO: 122591 - DNA, 1257 bp, Oryza sativa (japonica cultivar-group)
  CDS (1)..(1257)
atggcgtcttcaggcctcgcagttgcagcaacagcctcgtcagcctggctctgctgccccaatcatcacatccataccagcagcagcagatctcgcaagcatcttcttctccatggcctgtacgggtctgcacctgcacgtactaggggacgacggccgccggtgtggactgcggcggcggccaccgcagcagcgccggcggacacggcggcgtcggcgcggcgggagcaggtggagatcgcccggtcgctgaacgcgtgggtggaggagaacatgctcccgctgctcacccccgtcgactccgcgtggcagccgcacgacttccttccctgctcggccgcgggcggcggcgaggcgctggcggcgttcacggagggcgtggccgagctgcgcgcgggcgccgccggcgtgccggacgaggtgctggtctgcctcgtggggaacatggtgacggaggaggcgctcccgacgtaccagagcatgggcaaccgcgccgagggcctcgccgacggcaccggcgtgagccccctcccctgggcgcgctggctccgcggctggaccgccgaggagaaccgccacggcgacctcctcaaccgctacctctacctctccggccgcgtcgacatgcgccaggtcgaggccaccgtgcaccgcctcctccgcaacggcatggagatgctggcgccggcgagcccgtaccacggcctgatctacggcgcgttccaggagcgcgccaccttcatctcccacggccacacggcgaggctcgcggggcagcacggcgaccgggcgctcgccaagatctgcggcgtgatcgccgccgacgagaggcggcacgaggcgggctacacgatggcgtccggcaggctgttcgagctcgacccggacggcatggcgcgcgcgctggcggacgtcatgcgcgggaaggtgaccatgccggggcagctcatgtcggacggccgcgacggcgacggcgagcacagcctgttcgcccggttctccgccgtggcggagcgcgccggcgtgtacacggcgagggactacggcgacctcgtcgagcacttcgtgcggaggtggcgggtggcggagctcgcggcggggctctccggcgagggccgacgcgcgcaggagtacctgtgcgggttggcgcccaagatccggaggatggaggagctggcccaccggagggcggcccgcatcgagcccgccatggcccgtttcagctggatcttcgataggcccgtcatgctgggctga

SEQ ID NO: 122592 - protein, 418 aa, Oryza sativa (japonica cultivar-group)
MASSGLAVAATASSAWLCCPNHHIHTSSSRSRKHLLLHGLYGSAPARTRGRRPPVWTAAAATAAAPADTAASARREQVEIARSLNAWVEENMLPLLTPVDSAWQPHDFLPCSAAGGGEALAAFTEGVAELRAGAAGVPDEVLVCLVGNMVTEEALPTYQSMGNRAEGLADGTGVSPLPWARWLRGWTAEENRHGDLLNRYLYLSGRVDMRQVEATVHRLLRNGMEMLAPASPYHGLIYGAFQERATFISHGHTARLAGQHGDRALAKICGVIAADERRHEAGYTMASGRLFELDPDGMARALADVMRGKVTMPGQLMSDGRDGDGEHSLFARFSAVAERAGVYTARDYGDLVEHFVRRWRVAELAAGLSGEGRRAQEYLCGLAPKIRRMEELAHRRAARIEPAMARFSWIFDRPVMLG

SEQ ID NO: 122593 - DNA, 1173 bp, Oryza sativa (japonica cultivar-group)
  CDS (1)..(1173)
atggcgttcgcggcgtcccacaccgcatcgccgtcctcctgcggcggtgtggcgcagaggaggagcaatgggatgtcgccggtggtggccatggcctccaccatcaacagggtcaagactgctaagaagccctacactcctccacgtgaagttcatctccaagtcaagcattcactgccaccccaaaagcgggagattttcgattcgcttcaaccttgggccaaagagaaccttttgaacctcctgaagccagttgagaagtcatggcagccacaggacttcctgccagacccttcttccgatgggttttatgatgaagtaaaagagctgcgggagagggctaaggagatccctgatgactactttgtttgcttagttggagacatggttactgaggaagctcttcctacctatcaaacaatgcttaacacccttgatggtgtccgagatgaaactggcgcaagcccaaccacctgggctgtttggacaagagcatggactgctgaagagaacaggcatggtgatcttcttaataagtacatgtaccttactggacgtgttgacatgaaacaaattgagaagacaatacaatacctgattgggtctgggatggatccaggaactgagaataatccctacttgggtttcctttacacatcatttcaagaaagagctacatttatatcccatggcaatactgcaaggcacgccaaggagtacggggaccttaagctggctcagatatgtgggacaatagcagctgatgagaagcgccatgagacagcttacaccaagatagtggagaagctcttcgagattgatcctgactacacagttcttgcatttgctgacatgatgaggaagaagatctcaatgcctgctcatctgatgtatgacggcaaggacgacaacttgttcgagcatttcagcgctgtggcacagcggctgggtgtctacactgcaagagactatgccgacatcctggagttcttggtccagaggtggaaagtcgcagatctcaccgggctgtccggagaagggagaagggctcaggatttcgtctgcacgttggcgccgagaatcaggcggctggatgaaagagcccaagcaagagctaagcaagcgcctgttattcctttcagctgggtttatgaccgcaaagtgcagctttga

SEQ ID NO: 122594 - protein, 390 aa, Oryza sativa (japonica cultivar-group)
MAFAASHTASPSSCGGVAQRRSNGMSPVVAMASTINRVKTAKKPYTPPREVHLQVKHSLPPQKREIFDSLQPWAKENLLNLLKPVEKSWQPQDFLPDPSSDGFYDEVKELRERAKEIPDDYFVCLVGDMVTEEALPTYQTMLNTLDGVRDETGASPTTWAVWTRAWTAEENRHGDLLNKYMYLTGRVDMKQIEKTIQYLIGSGMDPGTENNPYLGFLYTSFQERATFISHGNTARHAKEYGDLKLAQICGTIAADEKRHETAYTKIVEKLFEIDPDYTVLAFADMMRKKISMPAHLMYDGKDDNLFEHFSAVAQRLGVYTARDYADILEFLVQRWKVADLTGLSGEGRRAQDFVCTLAPRIRRLDERAQARAKQAPVIPFSWVYDRKVQL

SEQ ID NO: 122595 - DNA, 1260 bp, Oryza sativa (japonica cultivar-group)
  CDS (1)..(1260)
atggctgcaacagcaacaatggcgatgcctttagctaataggcttcgttgcaaaccaaacaccaactcttcttcaccatcaagaacactatttggtagacgagtcaccatgatcagtagcagccgctggggtagtgctgtcagtggcagcgcgatcatgtcggcggcggccgacgtcgccgccgccgtgcggcgggaggaagacgaggagatgaggagctacctgtcgccggagaagctagaggtgctgacgcagatggagccgtgggtggaggagcacgtgctgccgctgctgaagccggtggaggcggcgtggcagccgtcggacctgctcccggacccggcggtgctcggcggcgaggggttccacgcggcgtgcgccgagctgcgggagcgcgccgccggcgtgccggacctgctcctggtgtgcctcgtggcgaacatggtgacggaggaggcgctgcccacgtaccagagctcgctgaaccgcgtccgcgccgtcggcgacctcaccggcgccgacgccacggcgtgggcgcggtggatccgcgggtggtccgccgaggagaaccgccacggcgacgtgctcaaccggtacatgtacctctccggccgcttcgacatggccgaggtggagcgcgccgtgcaccgcctcatccgctccggcatggccgtcgacccgccgtgcagcccgtaccacgccttcgtctacacggcgttccaggagcgcgccacggcggtcgcccacggcaacacggcgcggctggtcggcgcgcgagggcacggcgacgccgccctcgcccgcgtctgcggcaccgtcgccgccgacgagaagcggcacgaggccgcctacacccgcatcgtctccaggctcctcgaggccgacccggacgccggcgtgcgcgcggtggcgcgcatgctacggcgaggggtcgccatgccgacctcgcccatctccgacggccgccgcgacgacctctacgcctgcgtcgtgtccctcgccgagcaggccgggacgtacacggtgtcggactactgctccatcgtcgagcacctggtgcgggagtggcgcgtggaggagctcgcggcggggctctccggcgaagggcggcgcgcgcgggactacgtgtgcgagctgccgcagaagatccggaggatgaaggagaaggcccatgagagggcggtcaaggcccagaagaagcccatcagcatcccgattaattggatatttgataggcacgtcagtgtcatgctgccctaa

SEQ ID NO: 122596 - protein, 419 aa, Oryza sativa (japonica cultivar-group)
MAATATMAMPLANRLRCKPNTNSSSPSRTLFGRRVTMISSSRWGSAVSGSAIMSAAADVAAAVRREEDEEMRSYLSPEKLEVLTQMEPWVEEHVLPLLKPVEAAWQPSDLLPDPAVLGGEGFHAACAELRERAAGVPDLLLVCLVANMVTEEALPTYQSSLNRVRAVGDLTGADATAWARWIRGWSAEENRHGDVLNRYMYLSGRFDMAEVERAVHRLIRSGMAVDPPCSPYHAFVYTAFQERATAVAHGNTARLVGARGHGDAALARVCGTVAADEKRHEAAYTRIVSRLLEADPDAGVRAVARMLRRGVAMPTSPISDGRRDDLYACVVSLAEQAGTYTVSDYCSIVEHLVREWRVEELAAGLSGEGRRARDYVCELPQKIRRMKEKAHERAVKAQKKPISIPINWIFDRHVSVMLP

SEQ ID NO: 122597 - DNA, 1215 bp, Oryza sativa (japonica cultivar-group)
  CDS (1)..(1215)
atggcggcatcggcaacgacctccaccttagcagtaaccatgtttgggtatccaaaccgcaactgtcacctcaagccgccggcaactgccactctccgattctggcggagcgcggcggcggcggcggtggcgacgtcacggcgggaggcggaggcggaggaggcggacgaggtgaggaggtgcctggcgccggcgaggcttgaggtgctggagcagatggagccgtgggtggaggcgcacgtgctgccgctgctgaagccggcggaggaggcgtggcagccggcggacctggtgcccgacgcggcggcgctcggcgccgacgggttccacgcggcgtgcgtcgagctccgggggcgcgccgccggcgtgcccgacgcgcacctggtgtgcctggtggggaacatggtgacggaggaggcgctccccacgtaccagagcatggcgaaccggttcgagtcggcgcgcgacgtcaccggcgccgacgcgacggcgtgggcgcggtggatccgcgggtggtccgccgaggagaaccgccacggcgacgtgctcaaccgctacatgtacctctccggccgcctcgacatgcgccaggtggagcgcacggtgcaccggctgatcggctccggcatggcgatgcacgcgccggcgagcccctaccacggcttcatctacgtcgcgttccaggagcgcgccaccgccatctcccacggcaacacggcgcgcaacgtccgcgcccacggcgacgacgcgctcgcccgcatctgcggcgccatcgcctccgacgagaagcgtcatgaggccgcctacacccgcgtcgtcgagaggctcctcgaggccgacccggacaccaccgtgcgcgcgctggcgtacatgatgcgccgccggatcaccatgcccgccgcgctcatggacgacggccgcgacgccgacctgttcgcccactacgccgcggcggcgcagcaggccgggacgtacaccgcgtcggactaccggggaatcctcgagcacctgatacggcggtggcgcgtggcggagctggaggcggggctctccggcgaggggcggcgcgcgcgggactacgtgtgcgcgctgccgcagaagatccggaggatggaggagaaggcccatgacagagcggcccagatgaggaaaaggcccacggccattccatttagctggatctttgataagcccgtggatctcatgctgccctaa

SEQ ID NO: 122598 - protein, 404 aa, Oryza sativa (japonica cultivar-group)
MAASATTSTLAVTMFGYPNRNCHLKPPATATLRFWRSAAAAAVATSRREAEAEEADEVRRCLAPARLEVLEQMEPWVEAHVLPLLKPAEEAWQPADLVPDAAALGADGFHAACVELRGRAAGVPDAHLVCLVGNMVTEEALPTYQSMANRFESARDVTGADATAWARWIRGWSAEENRHGDVLNRYMYLSGRLDMRQVERTVHRLIGSGMAMHAPASPYHGFIYVAFQERATAISHGNTARNVRAHGDDALARICGAIASDEKRHEAAYTRVVERLLEADPDTTVRALAYMMRRRITMPAALMDDGRDADLFAHYAAAAQQAGTYTASDYRGILEHLIRRWRVAELEAGLSGEGRRARDYVCALPQKIRRMEEKAHDRAAQMRKRPTAIPFSWIFDKPVDLMLP

SEQ ID NO: 122599 - DNA, 1176 bp, Arabidopsis thaliana
  CDS (1)..(1176)
atgcttgcgcacaagtctcttctctcctttaccacccaatgggctacactaatgccatctccgtctacttttctcgcctctcgcccccgtggaccggccaagatctcggccgtggcagcaccagtgaggccggctctaaaacaccaaaacaaaatccacaccatgccaccggagaaaatggagatattcaaatctttagatggatgggccaaggatcaaatcttgcctcttctcaaacccgttgaccaatgttggcaacccgcttctttcttacccgacccggccttacccttctccgagtttaccgaccaggttcgtgagctgagggaaagaacggcctcgctgccagacgaatacttcgtggtgttggttggagatatgataacggaggacgcgttgcctacttaccagacgatgatcaacacccttgatggcgtaagggacgagactggtgcgagtgagagcgcgtgggcaagttggacacgagcgtggacggctgaggagaaccgtcatggtgatttgttgcggacttacttgtacttatccggtcgtgttgatatgcttatggttgaacgcaccgttcagcatctcatcggctcgggcatggatccaggaactgagaacaatccatacttaggtttcgtgtacacgtcattccaagagcgagccacatttgtgtctcacggcaacacggcaaggctagccaagtccgcaggagatcctgtcctcgctcgcatctgcggaaccattgcagctgacgagaagcgccatgaaaacgcttacgtacgcatcgttgagaagctcctcgagatcgaccctaacggtgcagtctcagccgtggccgacatgatgcggaagaagatcacaatgccggctcatctaatgacagacggtcgagacccgatgctattcgaacatttctccgccgtggctcagcggctagaggtttacacggcggatgattacgctgacatcttggagtttttggttggacggtggagattggagaagctagaaggattgacgggtgagggccaacgtgcacaggagtttgtgtgtgggttagctcagaggattagacgccttcaagagcgtgcagacgagagagctaagaagcttaagaagacccatgaggtttgctttagttggatcttcgataagcagattagtgtgtaa

SEQ ID NO: 122600 - protein, 391 aa, Arabidopsis thaliana
MLAHKSLLSFTTQWATLMPSPSTFLASRPRGPAKISAVAAPVRPALKHQNKIHTMPPEKMEIFKSLDGWAKDQILPLLKPVDQCWQPASFLPDPALPFSEFTDQVRELRERTASLPDEYFVVLVGDMITEDALPTYQTMINTLDGVRDETGASESAWASWTRAWTAEENRHGDLLRTYLYLSGRVDMLMVERTVQHLIGSGMDPGTENNPYLGFVYTSFQERATFVSHGNTARLAKSAGDPVLARICGTIAADEKRHENAYVRIVEKLLEIDPNGAVSAVADMMRKKITMPAHLMTDGRDPMLFEHFSAVAQRLEVYTADDYADILEFLVGRWRLEKLEGLTGEGQRAQEFVCGLAQRIRRLQERADERAKKLKKTHEVCFSWIFDKQISV

SEQ ID NO: 122601 - DNA, 1206 bp, Arabidopsis thaliana
  CDS (1)..(1206)
atggctctaaagtttaaccctttggtggcatctcagccttacaaattcccttcctcgactcgtccgccaactccttctttcagatctcccaagttcctctgcctcgcttcttcttctccggctctcagctccggccccaaggaggttgagagtttgaagaaaccatttacgccacccagggaagtgcatgttcaagtcttgcactccatgccacctcaaaagatcgagatcttcaaatctatggaaaactgggccgaggagaaccttctgattcacctcaaggatgtggagaagtcttggcaaccccaggatttcttgcctgaccctgcatcagatgggtttgaagatcaggtaagagagttaagagagagggctagagagctccctgatgattactttgttgttttggtgggggacatgatcacagaagaagcacttccgacctatcaaactatgttgaacactttggatggagttagggatgaaacaggtgctagtcctacttcatgggctatttggaccagagcttggactgcagaagaaaaccgacatggcgatcttctgaataaatacctttacttgtctggtcgtgttgacatgaggcagatcgaaaagaccattcagtacttgattggatctggaatggatccgcggacagagaataacccctaccttggcttcatctatacgtcattccaagaaagagcgacattcatctctcacggaaacacagcccgccaagccaaagagcacggggacatcaaactagcccaaatatgtggcacaatagctgcagacgagaagcgtcatgaaacagcatacaccaagatagttgaaaagctctttgagattgatcctgatggtactgtcatggcttttgcagacatgatgagaaagaaaatctcaatgcctgctcacttgatgtatgatgggcgcaacgacaacctctttgacaacttctcttccgtggctcagaggctcggtgtttacaccgccaaagactatgcagacattcttgagtttctggttggtaggtggaaaatccaggacttaaccgggctttcaggtgaaggaaacaaagcacaagactatttatgcgggttggctccaaggatcaagagattggatgagagagctcaagcaagagccaagaaaggacccaagattcctttcagttggatacacgacagagaagtgcagctctaa

SEQ ID NO: 122602 - protein, 401 aa, Arabidopsis thaliana
MALKFNPLVASQPYKFPSSTRPPTPSFRSPKFLCLASSSPALSSGPKEVESLKKPFTPPREVHVQVLHSMPPQKIEIFKSMENWAEENLLIHLKDVEKSWQPQDFLPDPASDGFEDQVRELRERARELPDDYFVVLVGDMITEEALPTYQTMLNTLDGVRDETGASPTSWAIWTRAWTAEENRHGDLLNKYLYLSGRVDMRQIEKTIQYLIGSGMDPRTENNPYLGFIYTSFQERATFISHGNTARQAKEHGDIKLAQICGTIAADEKRHETAYTKIVEKLFEIDPDGTVMAFADMMRKKISMPAHLMYDGRNDNLFDNFSSVAQRLGVYTAKDYADILEFLVGRWKIQDLTGLSGEGNKAQDYLCGLAPRIKRLDERAQARAKKGPKIPFSWIHDREVQL

SEQ ID NO: 122603 - DNA, 1242 bp, Arabidopsis thaliana
  CDS (1)..(1242)
atgaagatggctcttctcttgaactcgacgataacggtggctatgaagcagaatccgctggtcgcggtatcttttccgcggactacttgcttgggatctagtttttctcctcctcgtcttcttcgagtttcgtgtgttgccacaaaccctagcaagacgagtgaagaaacagacaagaaaaagtttcgacccatcaaagaagtaccaaaccaagtgacccacacaataacacaagagaaactggagatcttcaaatcaatggagaattgggcccaagaaaacttattatcttacctcaaacccgtcgaagcttcctggcaaccacaagactttttgccggaaaccaacgacgaagaccgattctacgaacaagtaaaagagctaagagatcgaacaaaagagatccctgacgattactttgtagttcttgtcggagatatgatcaccgaagaagctttaccaacttatcaaactactttgaacactctcgacggcgtaaaagacgagaccggtggtagtctaacgccgtgggcggtttgggttcgagcatggacggcggaggaaaatcgacacggtgatttgttgaataagtatctttacttatcaggtcgtgttgacatgcgacatgttgaaaagactattcaatatcttatcggatccggcatggactccaaatttgagaacaatccctataatggcttcatctatacttcttttcaagagagagccactttcatctcccatggcaacacggcgaagctagccacaacctacggcgacacaactctcgccaaaatctgcggaacaatcgcggcggatgagaagcggcatgagacggcgtatacacggatcgtcgagaagcttttcgagatcgatcccgatggtaccgtacaagctctagcgagtatgatgaggaagcgaatcacgatgccggctcatctgatgcacgacggtcgcgacgacgatctgttcgatcattacgctgcggtggcgcagagaatcggagtttataccgcgacggattacgcagggattttggagtttttgttgcggcggtgggaggtggagaagttagggatgggtttgtccggcgaaggaaggagagcacaggattatctgtgtaccttgccgcagaggatcaggaggttagaggaaagagctaacgatagagtcaaacttgcgtcaaagtcaaaaccttctgtttccttcagctggatttatgggagagaagttgaactataa

SEQ ID NO: 122604 - protein, 413 aa, Arabidopsis thaliana
MKMALLLNSTITVAMKQNPLVAVSFPRTTCLGSSFSPPRLLRVSCVATNPSKTSEETDKKKFRPIKEVPNQVTHTITQEKLEIFKSMENWAQENLLSYLKPVEASWQPQDFLPETNDEDRFYEQVKELRDRTKEIPDDYFVVLVGDMITEEALPTYQTTLNTLDGVKDETGGSLTPWAVWVRAWTAEENRHGDLLNKYLYLSGRVDMRHVEKTIQYLIGSGMDSKFENNPYNGFIYTSFQERATFISHGNTAKLATTYGDTTLAKICGTIAADEKRHETAYTRIVEKLFEIDPDGTVQALASMMRKRITMPAHLMHDGRDDDLFDHYAAVAQRIGVYTATDYAGILEFLLRRWEVEKLGMGLSGEGRRAQDYLCTLPQRIRRLEERANDRVKLASKSKPSVSFSWIYGREVEL

SEQ ID NO: 122605 - DNA, 1191 bp, Arabidopsis thaliana
  CDS (1)..(1191)
atggctctgctcttgaactcgacgatgactgtggctatgaagcagaatcccgcgaccgcggtatcttttatgcagactacttgtttgggatctagtttttctcctcctcgtcatcttcaagtttccaagacgtttcgacccatcaaagaagtatcaaaccaagtgacacacacaataacacaagagaaactggagatcttcaaatcaatggagaattgggcccaagaaaacttattatcttacctcaaacccgtcgaaacttcatggcaaccacaagactttttgccagaaaccaaagacgaagaccgattctacgaacaagtgaaagagctaagagatcgaacaaaagagatccctgacgattactttgtagttcttgtcggagatatgatcaccgaagaagcattaccgacttatcaaacggttatgaacactctcgacggagccaaagacgagaccggtgttagtctaacaccgtgggcggtttggcttagagcatggacggcggaggaaaatcgacacggtgatttgttgaataagtacctttacttatcaggtcgtgttgatacgcgacatgttgaaaagactattcaatatcttatcggatccggcatggacaccaaatatgagaacaatccctacaacggctacatctacacttcttttcaagagagagcaacttttatctcccacgccaacacggcgaagctagccacgacatacggcgacacaactctcgccaaaatctgtggaacaatcgcggcggatgagaagcggcacgagatggcgtatacgcggatcgtcgagaagctattcgagattgatcccgatggtaccgtacaagctctagcgagtatgatgaggaagcgaatcacgatgccggctcagctgatgcacgacggtcgcgatgacaatctgttcgatcattacgctgctgtggcgcagagaatcggagtgtataccgcgacggattacgcagggattttggagtttttgttgcggcggtgggaggtggagaagttagggatgggtttgtccggtgaaggaaggagagcacaggattatctgtgtaccttgccgcagaggatcaggaggttagaggaaagagctgacgatagagtcaaacgtgcgtcaaagtctaaaccttctgtttcgttcagctggatttacgggagagaagttgaactctaa

SEQ ID NO: 122606 - protein, 396 aa, Arabidopsis thaliana
MALLLNSTMTVAMKQNPATAVSFMQTTCLGSSFSPPRHLQVSKTFRPIKEVSNQVTHTITQEKLEIFKSMENWAQENLLSYLKPVETSWQPQDFLPETKDEDRFYEQVKELRDRTKEIPDDYFVVLVGDMITEEALPTYQTVMNTLDGAKDETGVSLTPWAVWLRAWTAEENRHGDLLNKYLYLSGRVDTRHVEKTIQYLIGSGMDTKYENNPYNGYIYTSFQERATFISHANTAKLATTYGDTTLAKICGTIAADEKRHEMAYTRIVEKLFEIDPDGTVQALASMMRKRITMPAQLMHDGRDDNLFDHYAAVAQRIGVYTATDYAGILEFLLRRWEVEKLGMGLSGEGRRAQDYLCTLPQRIRRLEERADDRVKRASKSKPSVSFSWIYGREVEL

SEQ ID NO: 122607 - DNA, 1191 bp, Arabidopsis thaliana
  CDS (1)..(1191)
atggcgatggctatggatcggatcgtcttctccccttcatcttacgtctatcgtccttgtcaagctaggggatccagatcttccagagtttccatggcttctacgattcgctctgcgactacagaggttacgaatggaaggaaactgtatatccctcccagagaggtgcatgtccaagtcaaacattcaatgccgccacaaaagttagagatctttaagtctttagaaggatgggctgatgaaaccctgttgacttatttaaaacctgttgagaaatcgtggcagcctaccgattttcttcccgaacctgagtcggaaggattctatgaccaagtcaaggagctaagggaaaggtgcaaggaacttcctgatgactattttgtggtgcttgttggggatatgatcactgaagaagcacttcctacttaccagaccatgttgaacacattggatggtgttagggatgagacaggagctagtcctactccttgggctatatggaccagggcttggactgctgaggagaatagacatggggatctccttaacaagtatctttatctgtctggtcgggtagacatgaggcagattgaaaagactattcagtacctgattggttctggaatggatccaaaaactgaaaacaacccttacttgggtttcatctacacatcatttcaagaaagagcgaccttcatctcccatggaaacactgccagactggcgaaagatcgtggagatttgaaacttgcgcagatatgcgggaccattgctgctgatgagaggcgtcatgagactgcttacaccaagattgtagagaagctctttgaaattgaccctgatggcacgatcttgggcctggctgatatgatgaagaaaaagatatcaatgcctgcacatttaatgtatgatggccaagatgataacctgtttgagcacttctcaaccgttgcccagaggctcggtgtctacactgccaaggactatgctgatattctggagtttcttgttgaacggtggaatgtggagactttgacagacctttctagtgaaggacacagggcccaggactttgtctgcggactacctgcaagaatccgtaaaattgaagagagagctcaaggaagagccaaagaagctgccaaaaacataccattcagctggatatttggtcgaaatatcagggcttaa

SEQ ID NO: 122608 - protein, 396 aa, Arabidopsis thaliana
MAMAMDRIVFSPSSYVYRPCQARGSRSSRVSMASTIRSATTEVTNGRKLYIPPREVHVQVKHSMPPQKLEIFKSLEGWADETLLTYLKPVEKSWQPTDFLPEPESEGFYDQVKELRERCKELPDDYFVVLVGDMITEEALPTYQTMLNTLDGVRDETGASPTPWAIWTRAWTAEENRHGDLLNKYLYLSGRVDMRQIEKTIQYLIGSGMDPKTENNPYLGFIYTSFQERATFISHGNTARLAKDRGDLKLAQICGTIAADERRHETAYTKIVEKLFEIDPDGTILGLADMMKKKISMPAHLMYDGQDDNLFEHFSTVAQRLGVYTAKDYADILEFLVERWNVETLTDLSSEGHRAQDFVCGLPARIRKIEERAQGRAKEAAKNIPFSWIFGRNIRA

SEQ ID NO: 122609 - DNA, 1185 bp, Arabidopsis thaliana
  CDS (1)..(1185)
atggttatggctatggatcggatcgctttgttctcttcctcatcatctgtttatcatcacggttcttctcattctcatggctccaaatcttccagagttttcactattcgttccgactctacagcggttggaaggaaactgtatattcctcctcgagaggttcatcttcaagtgaagtattcaatgccaccacaaaagctggagattttcaagtccttagaaggatgggctaatgacaacttgttggcttacttaaaacctgttgagaaatcatggcaaccaactgattttctccctgaacctgagtcagaaggattctatgaccaagttaaggagttaagagaaaggtgtaaggagctctctgatgactaccttatagtgcttgttggtgatatgatcacagaggaagcacttccgacttatcagaccatgattaatacattggacggggttagagatgagacgggagcaagtccaactccttgggcagtatggactagggcatggactgcggaagagaatagacatggtgatcttcttaacaagtacctttatctgtctggacgagtagacatgagacagattgaaaaaactattcaatacctcattggttctggaatggatccaaaaactgaaaacaatccttacttgggattcatatatacttcttttcaagaaagagctacattcatctcccatggaaacactgctagactggcaaaggatcttggagacttgacacttgggaagatttgtggcaccattgctgctgatgagaggcgccatgaacacgcctacaccaagattgtagagaagctctttgaaattgatcctgataccacagtcgtgggctttgctgacatgatgaggaaaaagatctcgatgcctgctcatttgatgtatgatggtcgtgatgataatctatttgatcacttctcgtccgtggcccagaggcttggtgtctacactgccaaggactatgctgatatactgcaacatcttgtggaaaggtggaatgtggagaagttgtcagacctttctagtgaaggaaacagggcccaggactacctctgtggattacctgctagaatccgcaaacttgaagagagggctcaagggagaaccaaagaagcagcaaaaaacataccattcagctggatttttggtcgagaagtcagggcttaa

SEQ ID NO: 122610 - protein, 394 aa, Arabidopsis thaliana
MVMAMDRIALFSSSSSVYHHGSSHSHGSKSSRVFTIRSDSTAVGRKLYIPPREVHLQVKYSMPPQKLEIFKSLEGWANDNLLAYLKPVEKSWQPTDFLPEPESEGFYDQVKELRERCKELSDDYLIVLVGDMITEEALPTYQTMINTLDGVRDETGASPTPWAVWTRAWTAEENRHGDLLNKYLYLSGRVDMRQIEKTIQYLIGSGMDPKTENNPYLGFIYTSFQERATFISHGNTARLAKDLGDLTLGKICGTIAADERRHEHAYTKIVEKLFEIDPDTTVVGFADMMRKKISMPAHLMYDGRDDNLFDHFSSVAQRLGVYTAKDYADILQHLVERWNVEKLSDLSSEGNRAQDYLCGLPARIRKLEERAQGRTKEAAKNIPFSWIFGREVRA

SEQ ID NO: 122611 - DNA, 1206 bp, Arabidopsis thaliana
  CDS (1)..(1206)
atggctctaaagtttaaccctttggtggcatctcagccttacaaattcccttcctcgactcgtccgccaactccttctttcagatctcccaagttcctctgcctcgcttcttcttctccggctctcagctccggccccaagtcagttgagagtttgaagaaaccatttacgccacccagggaagtgcatgttcaagtcttgcactccatgccacctcaaaagatcgagatcttcaaatctatggaaaactgggccgaggagaaccttctgattcacctcaaggatgtggagaagtcttggcaaccccaggatttcttgcctgaccctgcatcagatgggtttgaagatcaggtaagagagttaagagagagggctagagagctccctgatgattactttgttgttttggtgggggacatgatcacagaagaagcacttccgacctatcaaactatgttgaacactttggatggagttagggatgaaacaggtgctagtcctacttcatgggctatttggaccagagcttggactgcagaagaaaaccgacatggcgatcttctgaataaatacctttacttgtctggtcgtgttgacatgaggcagatcgaaaagaccattcagtacttgattggatctggaatggatccgcggacagagaataacccctaccttggcttcatctatacgtcattccaagaaagagcgacattcatctctcacggaaacacagcccgccaagccaaagagcacggggacatcaaactagcccaaatatgtggcacaatagctgcagacgagaagcgtcatgaaacagcatacaccaagatagttgaaaagctctttgagattgatcctgatggtactgtcatggcttttgcagacatgatgagaaagaaaatctcaatgcctgctcacttgatgtatgatgggcgcaacgacaacctctttgacaacttctcttccgtggctcagaggctcggtgtttacaccgccaaagactatgcagacattcttgagtttctggttggtaggtggaaaatccaggacttaaccgggctttcaggtgaaggaaacaaagcacaagactatttatgcgggttggctccaaggatcaagagattggatgagagagctcaagcaagagccaagaaaggacccaagattcctttcagttggatacacgacagagaagtgcagctctaa

SEQ ID NO: 122612 - protein, 401 aa, Arabidopsis thaliana
MALKFNPLVASQPYKFPSSTRPPTPSFRSPKFLCLASSSPALSSGPKSVESLKKPFTPPREVHVQVLHSMPPQKIEIFKSMENWAEENLLIHLKDVEKSWQPQDFLPDPASDGFEDQVRELRERARELPDDYFVVLVGDMITEEALPTYQTMLNTLDGVRDETGASPTSWAIWTRAWTAEENRHGDLLNKYLYLSGRVDMRQIEKTIQYLIGSGMDPRTENNPYLGFIYTSFQERATFISHGNTARQAKEHGDIKLAQICGTIAADEKRHETAYTKIVEKLFEIDPDGTVMAFADMMRKKISMPAHLMYDGRNDNLFDNFSSVAQRLGVYTAKDYADILEFLVGRWKIQDLTGLSGEGNKAQDYLCGLAPRIKRLDERAQARAKKGPKIPFSWIHDREVQL

SEQ ID NO: 122613 - DNA, 1002 bp, Croceibacter atlanticus HTCC2559
  CDS (1)..(1002): transl_table=11
atggccttaacgaatgtaagattagaagtaatgcagcttttagaaaagaaagttgatggctttttagaagagtttcttattcctgttgacaccatttggcagccaacagattttcttcctaattcacaaaatgaagatacattttttgacgaggtaaaagaaataagagagcttgctaaagaactaccctatgatttttgggtaaccttagtaggagatacaattacagaagaagcgttgcctacctatgagtcttggcttatggatgtagaaggtattaaccaacatgatggtgtacaaggtaacggttggagtaaatgggtacgccactggacagccgaagaaaaccgtcacggtgatacgttaaacaaatacttatatctttctggacgagtagacatgaaagaaattgagcgtactacacaacaccttattatggatggttttgatattggtactggacaagacccatataagaactttgtgtacactagctttcaagaactagcaacgtacatttctcacaatagagttgctaagttggctcgtaaatacaaaaacaaatctttgtctaaaatgtgtactatcatctctggagatgaaatgagacactacaacgcttatagtcgttttgttcaagaaatctttaaggtggatcctagtaatatgatgattgcatttaaagatatgatggttaataaaattgtcatgcctgctcaatttttacgagaatctggagactctcttggtgctgcgttcgaagaatttagtaatgctgcccaacgtattggagtttatactgctcaagattatgtagacattatgcgtaagcttatcgtaaaatgggacattgccaatttaaatgaattaacagatgaagctcaaaaagctagagattttgtgatggcattacccaaccgtatggaacgtattagccaacgcattaagataccacaagaagtaactcattttaaatgggttaatcctgctatggtgaagtaa

SEQ ID NO: 122614 - protein, 333 aa, Croceibacter atlanticus HTCC2559
MALTNVRLEVMQLLEKKVDGFLEEFLIPVDTIWQPTDFLPNSQNEDTFFDEVKEIRELAKELPYDFWVTLVGDTITEEALPTYESWLMDVEGINQHDGVQGNGWSKWVRHWTAEENRHGDTLNKYLYLSGRVDMKEIERTTQHLIMDGFDIGTGQDPYKNFVYTSFQELATYISHNRVAKLARKYKNKSLSKMCTIISGDEMRHYNAYSRFVQEIFKVDPSNMMIAFKDMMVNKIVMPAQFLRESGDSLGAAFEEFSNAAQRIGVYTAQDYVDIMRKLIVKWDIANLNELTDEAQKARDFVMALPNRMERISQRIKIPQEVTHFKWVNPAMVK

SEQ ID NO: 122615 - DNA, 1005 bp, Flavobacteria bacterium BBFL7
  CDS (1)..(1005): transl_table=11
atggatatcaagcccctaaaaaatatacgcatcgaggtgatgcaatccctagaaagtaaggtacagtcttttatggacgagtacttgattcctgtggaaaagatctggcagcctactgactttttaccagattcacaatccgattcttttcttgatgaggtaacagagttacgcgagctggccaaagaattaccgtatgatttctgggtagctctagtcggagataccattactgaagaagcattacctacttatgagtcttggcttatggatgtagaaggcatcaatcaggtagaaggaaaaggaaatatctggtctaaatgggtacgtcagtggactggagaagagaaccgtcatggtgatgtgttgaataaatatttatatctatctggacgtgtaaacatgcgtgaaatagaaatcactacacaacacttaattaatgatggttttgatattggaacagatcgagatccttataagaattttatttataccagttttcaagagcttgcgacttatatatcacataatagagtagcaaaattagctcgtggatatggtaatgctgcgttatctaaaatgtgtcgcatgatctctggagatgagatgcgccatcataaagcatacagcacatttgtggccgaaatttttaaagttgaccctgataatatgatggttgcctttaaagatatgatggttaataagatagtaatgccagctatgtttttaagagaagcaggacagtctatgggatctgcatttgaggacttttcaaacagtgcacaacgtataggtgtttatactgcacaagattatatcgatatcatgcaaaagcttatagaccagtgggatattgcaaatatgaaaggattaaatgaagaggcagagaaagctcgtgattatttaatgaagcttcctgcacgtatggagcgtgtttctcaacgtataaaaataccacaagaaataactcgatttacttgggtaaatccagcgatgactacttaa

SEQ ID NO: 122616 - protein, 334 aa, Flavobacteria bacterium BBFL7
MDIKPLKNIRIEVMQSLESKVQSFMDEYLIPVEKIWQPTDFLPDSQSDSFLDEVTELRELAKELPYDFWVALVGDTITEEALPTYESWLMDVEGINQVEGKGNIWSKWVRQWTGEENRHGDVLNKYLYLSGRVNMREIEITTQHLINDGFDIGTDRDPYKNFIYTSFQELATYISHNRVAKLARGYGNAALSKMCRMISGDEMRHHKAYSTFVAEIFKVDPDNMMVAFKDMMVNKIVMPAMFLREAGQSMGSAFEDFSNSAQRIGVYTAQDYIDIMQKLIDQWDIANMKGLNEEAEKARDYLMKLPARMERVSQRIKIPQEITRFTWVNPAMTT

SEQ ID NO: 122617 - DNA, 1161 bp, Glycine max
  CDS (1)..(1161)
atgcagatacgaacctgccactccatcaccacccaaacccttccacaacttccgtgttcttctagaaaagcccaccaccgccaccttcttccgccgttaaacgctgcggtttccgcggcgccgttcaaagcccggaaggcccactcaatgcctccagaaaagaaagaaattttcaagtccttggagggatgggcctcggagtgggtcctaccgctgctgaagcccgtggagcaatgctggcagccacaaaacttcctccctgacccctcccttccgcatgaagagttcagccatcaggtgaaggagcttcgcgaacgcactaaagagttacctgatgagtactttgtggtgctggtgggtgatatggtcaccgaggacgcgcttcccacttaccagaccatgatcaacaaccttgatggagtgaaagatgacagcggcacgagcccgagcccgtgggccgtgtggacccgggcctggaccgccgaggaaaacagacacggggatctgctcagaacttatttgtatctctctgggagggttgacatggctaaggtcgaaaagaccgtacattacctcatttcagctggcatggaccctgggacagacaacaacccatatttggggtttgtgtacacgtcattccaagagcgagcaacatttgtggcgcacgggaacacggctcggctcgcgaaggagggcggggatccagtgctggcgcgcctatgcgggaccatcgcagcggacgagaagcggcacgagaacgcgtactcaagaatcgtggagaagcttctggaagtggaccccaccggggcaatggtggccatagggaacatgatggagaagaagatcacgatgccggcgcaccttatgtacgatggggatgaccccaggctattcgagcactactccgctgtggcgcagcgcataggcgtgtacaccgccaacgactacgcagacatcttggagtttctcgttgaacggtggagattggagaagcttgaaggattgatggctgaggggaagcgggcgcaggatttcgtgtgtgggttggcgccgaggattaggaggttgcaagagcgcgctgatgagcgagcgcgtaagatgaagaagcatcatggcgttaagttcagttggattttcaataaagaattgcttttgtga

SEQ ID NO: 122618 - protein, 386 aa, Glycine max
MQIRTCHSITTQTLPQLPCSSRKAHHRHLLPPLNAAVSAAPFKARKAHSMPPEKKEIFKSLEGWASEWVLPLLKPVEQCWQPQNFLPDPSLPHEEFSHQVKELRERTKELPDEYFVVLVGDMVTEDALPTYQTMINNLDGVKDDSGTSPSPWAVWTRAWTAEENRHGDLLRTYLYLSGRVDMAKVEKTVHYLISAGMDPGTDNNPYLGFVYTSFQERATFVAHGNTARLAKEGGDPVLARLCGTIAADEKRHENAYSRIVEKLLEVDPTGAMVAIGNMMEKKITMPAHLMYDGDDPRLFEHYSAVAQRIGVYTANDYADILEFLVERWRLEKLEGLMAEGKRAQDFVCGLAPRIRRLQERADERARKMKKHHGVKFSWIFNKELLL

SEQ ID NO: 122619 - DNA, 1161 bp, Glycine max
  CDS (1)..(1161)
atgcagatacgaacctgccactccatcaccacccaaacccttccacaacttccgtgttcttctagaaaagcccaccaccgccaccttcttccgccgttaaacgctgcggtttccgcggcgccgttcaaagcccggaaggcccactcaatgcctccagaaaagaaagaaattttcaagtccttggagggatgggcctcggagtgggtcctaccgctgctgaagcccgtggagcaatgctggcagccacaaaacttcctccctgacccctcccttccgcatgaagagttcagccatcaggtgaaggagcttcgcgaacgcactaaagagttacctgatgagtactttgtggtgctggtgggtgatatggtcaccgagaacgcgcttcccacttaccagaccatgatcaacaaccttgatggagtgaaagatgacagcggcacgagcccgagcccgtgggccgtgtggacccgggcctggaccgccgaggaaaacagacacggggatctgctcagaacttatttgtatctctctgggagggttgacatggctaaggtcgaaaagaccgtacattacctcatttcagctggcatggaccctgggacagacaacaacccatatttggggtttgtgtacacgtcattccaagagcgagcaacatttgtggcgcacgggaacacggctcggctcgcgaaggagggcggggatccagtgctggcgcgcctatgcgggaccatcgcagcggacgagaagcggcacgagaacgcgtactcaagaatcgtggagaagcttctggaagtggaccccaccggggcaatggtggccatagggaacatgatggagaagaagatcacgatgccggcgcaccttatgtacgatggggatgaccccaggctattcgagcactactccgctgtggcgcagcgcataggcgtgtacaccgccaacgactacgcagacatcttggagtttctcgttgaacggtggagattggagaagcttgaaggattgatggctgaggggaagcgggcgcaggatttcgtgtgtgggttggcgccgaggattaggaggttgcaagaacgcgctgatgagcgagcgcgtaagatgaagaagcatcatggcgttaagttcagttggattttcaataaagaattgcttttgtga

SEQ ID NO: 122620 - protein, 386 aa, Glycine max
MQIRTCHSITTQTLPQLPCSSRKAHHRHLLPPLNAAVSAAPFKARKAHSMPPEKKEIFKSLEGWASEWVLPLLKPVEQCWQPQNFLPDPSLPHEEFSHQVKELRERTKELPDEYFVVLVGDMVTENALPTYQTMINNLDGVKDDSGTSPSPWAVWTRAWTAEENRHGDLLRTYLYLSGRVDMAKVEKTVHYLISAGMDPGTDNNPYLGFVYTSFQERATFVAHGNTARLAKEGGDPVLARLCGTIAADEKRHENAYSRIVEKLLEVDPTGAMVAIGNMMEKKITMPAHLMYDGDDPRLFEHYSAVAQRIGVYTANDYADILEFLVERWRLEKLEGLMAEGKRAQDFVCGLAPRIRRLQERADERARKMKKHHGVKFSWIFNKELLL

SEQ ID NO: 122621 - DNA, 1176 bp, Oryza sativa subsp
  CDS (1)..(1176)
atggcgttcgcgccgtcccacaccgcctcgccgtcctactgcggcgtcgcgcagggtgggaggaggagcaatgggatgtcgccggtggtggccatggcctccaccatcaacagggtcaagactgctaagaagccctatactcctccacgtgaagttcatctccaagtcaagcattcactgccaccccaaaagcgggagatattcgattcacttcaaccttgggccaaagagaaccttttgaacctcctgaagccagttgagaagtcgtggcagccacaggacttcctgccagacccttcttccgatgggttttatgatgaagtaaaagagctgcgggagagggctaaggagatccctgatgactactttgtttgcttagttggagacatggttactgaggaagctcttcctacctatcaaacaatgcttaacacccttgatggtgtccgagatgaaactggcgcaagcccaaccacctgggctgtttggacaagagcatggactgctgaagagaacaggcatggtgatcttcttaataagtacatgtaccttactggacgtgttgacatgaaacaaattgagaagacaatacaatacctgattgggtctgggatggatccaggaactgagaataatccctacttgggtttcctttacacatcatttcaagaaagagctacatttatatcccatggtaatactgcaaggcacgccaaggagtacggggacctcaagctggctcagatatgtggaacaatagcagctgatgagaagcgccatgagacagcttacaccaagatagtggaaaagctcttcgagattgatcctgactacacggttcttgcatttgctgacatgatgaggaagaagatctcaatgcctgctcatctgatgtatgatggcaaggacgacaacttgttcgagcatttcagcgcggtggcacagcggctgggcgtctacactgcaagagactatgccgacatcctggagttcttggtccagaggtggaaagtcgcagatctcaccgggctgtctggagaagggagaagggctcaggatttcgtctgcactttggcgccgagaatcaggcggctggatgaaagagcccaagcaagagctaagcaagcgcctgttattcctttcagctgggtttatgaccgcaaagtgcagctttaa

SEQ ID NO: 122622 - protein, 391 aa, Oryza sativa subsp
MAFAPSHTASPSYCGVAQGGRRSNGMSPVVAMASTINRVKTAKKPYTPPREVHLQVKHSLPPQKREIFDSLQPWAKENLLNLLKPVEKSWQPQDFLPDPSSDGFYDEVKELRERAKEIPDDYFVCLVGDMVTEEALPTYQTMLNTLDGVRDETGASPTTWAVWTRAWTAEENRHGDLLNKYMYLTGRVDMKQIEKTIQYLIGSGMDPGTENNPYLGFLYTSFQERATFISHGNTARHAKEYGDLKLAQICGTIAADEKRHETAYTKIVEKLFEIDPDYTVLAFADMMRKKISMPAHLMYDGKDDNLFEHFSAVAQRLGVYTARDYADILEFLVQRWKVADLTGLSGEGRRAQDFVCTLAPRIRRLDERAQARAKQAPVIPFSWVYDRKVQL

SEQ ID NO: 122623 - DNA, 1104 bp, Oryza sativa subsp
  CDS (1)..(1104)
atgaagatgaagtttttaacgcaaaacgaggtggtattaacggtcaagactgctaagaagccctacactcctccacgtgaagttcatctccaagtcaagcattcactgccaccccaaaagcgggagattttcgattcgcttcaaccttgggccaaagagaaccttttgaacctcctgaagccagttgagaagtcatggcagccacaggacttcctgccagacccttcttccgatgggttttatgatgaagtaaaagagctgcgggagagggctaaggagatccctgatgactactttgtttgcttagttggagacatggttactgaggaagctcttcctacctatcaaacaatgcttaacacccttgatggtgtccgagatgaaactggcgcaagcccaaccacctgggctgtttggacaagagcatggactgctgaagagaacaggcatggtgatcttcttaataagtacatgtaccttactggacgtgttgacatgaaacaaattgagaagacaatacaatacctgattgggtctgggatggatccaggaactgagaataatccctacttgggtttcctttacacatcatttcaagaaagagctacatttatatcccatggcaatactgcaaggcacgccaaggagtacggggaccttaagctggctcagatatgtgggacaatagcagctgatgagaagcgccatgagacagcttacaccaagatagtggagaagctcttcgagattgatcctgactacacagttcttgcatttgctgacatgatgaggaagaagatctcaatgcctgctcatctgatgtatgacggcaaggacgacaacttgttcgagcatttcagcgctgtggcacagcggctgggtgtctacactgcaagagactatgccgacatcctggagttcttggtccagaggtggaaagtcgcagatctcaccgggctgtccggagaagggagaagggctcaggatttcgtctgcacgttggcgccgagaatcaggcggctggatgaaagagcccaagcaagagctaagcaagcgcctgttattcctttcagctgggtttatgaccgcaaagtgcagctttga

SEQ ID NO: 122624 - protein, 367 aa, Oryza sativa subsp
MKMKFLTQNEVVLTVKTAKKPYTPPREVHLQVKHSLPPQKREIFDSLQPWAKENLLNLLKPVEKSWQPQDFLPDPSSDGFYDEVKELRERAKEIPDDYFVCLVGDMVTEEALPTYQTMLNTLDGVRDETGASPTTWAVWTRAWTAEENRHGDLLNKYMYLTGRVDMKQIEKTIQYLIGSGMDPGTENNPYLGFLYTSFQERATFISHGNTARHAKEYGDLKLAQICGTIAADEKRHETAYTKIVEKLFEIDPDYTVLAFADMMRKKISMPAHLMYDGKDDNLFEHFSAVAQRLGVYTARDYADILEFLVQRWKVADLTGLSGEGRRAQDFVCTLAPRIRRLDERAQARAKQAPVIPFSWVYDRKVQL

SEQ ID NO: 122625 - DNA, 1194 bp, Haematococcus pluvialis
  CDS (1)..(1194)
atgaacactcgcaaagtggcagatactgtcgcccaaggtgcgccagcaagccggcctctggcacccacacgacggtcacgcaggaactgcacctctgtgcgcgccgtcgtcgccgagcccaagcttctagtgtctaagccatcaccgattatcctgaatggccaaattgcgcactccatcacgcacgagaggctggagctggtccgggggatgggggattacatggaggcaaacgtagtgccgctgctgaagccagtggacaagtgctggcagcctaatgacctgctgccgcactctgaggagcctgacttcctggacaaggtgcatgacctgcgcaagcgcgccgcctgcctgccagacgattatctggtagtgtttgcgggggacctgatcacggaggaggcgctgcccacctacatgaccatgttgaacaccctggacggcgtgcgggacgagacgggtgccagcaacaccccctgggccaactggacaagggcctggaccgcagaggaaaaccgtcacggggacgtgatgaacaagtatatctacctcacaggcagagtcaacctgcgcgctattgaggttaccatccagaacttgattggcagtggcatggaccccaagactgagaacaacccgtacctgggctttgtgtacacctcgttccaggagcgagcaaccaagatttctcatggtaatactgcccgccatgcgctggagcacggcgacgatgtgctggccaaaatttgcgggttgatcgcggctgacgaggggcggcatgagcaagcatacaccaagattattgacggcgtgttggagcgcgatccgaacggcgcggtgctggcattcgcggacatgatgcgcaagcaaatcgtgatgccggcgcacctcatggacgacggggagcatgaggcgcggaacaagcgcaacctcttcaccgacttcagctcagtggctgagcgcacggggacttacacggcatttgactacgccgacatcatgcagcacctcatcaaccgctggcgcatcgccgagcgccagggcctgagtggggaggccgctgaggctcaggagtacctcatgaagctgccagaccgcatccgcaagctggcagagcgtgcccatgcccgcaagaagaagggccagacggcgaacttcagctggatcttcaaccgggaggtggtcctgcactga

SEQ ID NO: 122626 - protein, 397 aa, Haematococcus pluvialis
MNTRKVADTVAQGAPASRPLAPTRRSRRNCTSVRAVVAEPKLLVSKPSPIILNGQIAHSITHERLELVRGMGDYMEANVVPLLKPVDKCWQPNDLLPHSEEPDFLDKVHDLRKRAACLPDDYLVVFAGDLITEEALPTYMTMLNTLDGVRDETGASNTPWANWTRAWTAEENRHGDVMNKYIYLTGRVNLRAIEVTIQNLIGSGMDPKTENNPYLGFVYTSFQERATKISHGNTARHALEHGDDVLAKICGLIAADEGRHEQAYTKIIDGVLERDPNGAVLAFADMMRKQIVMPAHLMDDGEHEARNKRNLFTDFSSVAERTGTYTAFDYADIMQHLINRWRIAERQGLSGEAAEAQEYLMKLPDRIRKLAERAHARKKKGQTANFSWIFNREVVLH

SEQ ID NO: 122627 - DNA, 1335 bp, Helianthus annuus
  CDS (84)..(1274)
aaaaatctgaacaactgccgactgcaatacacacacacaacacacactcaatcacacacacatcatcatcttcttcatcaacgatggcgcttcgaatgagtccggtgacgcttcaacgggagatatatccttcatacacttttcatcaatcgaaaaatctcagatctcctaaattcgcgatggcttccaccatcggatcctccactccgaaggttgaaagtaccaagaagcccttcaccccaccacgcgaggtacaccttcaggtgacacactccatgcccccacaaaagatagaaatcttcaaatcaattgagggttgggccgaagacaacatcttggtccacctaaagccagtcgagaaatgctggcaaccacaggatttcttaccagaacccgcatctgacggtttcgaggaacaagtgaaagaactaagggctcgggccaaagaaattcccgatgaatacttcgttgtattggttggagacatgatcacagaggaagccttacctacctaccaaaccatgcttaacacactagacggtgtgcgtgatgagaccggagctagccctacaccttgggctatctggaccagggcttggaccgctgaggaaaaccggcacggtgatcttcttcaccagtatctctacctttcggggcgcgttgacatgaggcaaattcagaaaaccattcaatatctcattgggtctggaatggatccacgaaccgaaaacagtccgtacctagggttcatctacacatcatttcaagaacgcgccaccttcatctcgcatggaaacaccgcgcgtcacgcaaaggattacggggatctaaaactggctcaaatttgtggtacgatcgccgctgatgaaaaaaggcacgaaaccgcctacactaaaatcgctgaaaaactattcgaaatcgaccctgatggcacggttcttgcttttgccgacatgatgaggaaaaagatctccatgcccgcacacttgatgtatgacgggcgcgatgacgaccttttcgaccatttttcggccgttgcacaaagactcggtgtgtataccgcgaaagactatgcggacattttggagttcttggtgggtcggtggaaggtggcggatcttaccgggctttctggtgaagggcgtaaggcccaagactatgtgtgcgggctaccgtcgagaatcagaaggctcgaggagagggctgccgcaagagcaaaagaaggaccgagcattccgttcagctggattttcgatagagaagtgaagctctgaaaaaacaagttttaaggttctgttgctttccatggatagaggtaaaaaaaaaaaaaaaaaa

SEQ ID NO: 122628 - protein, 396 aa, Helianthus annuus
MALRMSPVTLQREIYPSYTFHQSKNLRSPKFAMASTIGSSTPKVESTKKPFTPPREVHLQVTHSMPPQKIEIFKSIEGWAEDNILVHLKPVEKCWQPQDFLPEPASDGFEEQVKELRARAKEIPDEYFVVLVGDMITEEALPTYQTMLNTLDGVRDETGASPTPWAIWTRAWTAEENRHGDLLHQYLYLSGRVDMRQIQKTIQYLIGSGMDPRTENSPYLGFIYTSFQERATFISHGNTARHAKDYGDLKLAQICGTIAADEKRHETAYTKIAEKLFEIDPDGTVLAFADMMRKKISMPAHLMYDGRDDDLFDHFSAVAQRLGVYTAKDYADILEFLVGRWKVADLTGLSGEGRKAQDYVCGLPSRIRRLEERAAARAKEGPSIPFSWIFDREVKL

SEQ ID NO: 122629 - DNA, 1426 bp, Helianthus annuus
  CDS (59)..(1249)
ggaaaacacaactcaaaaaactgtgcaacaacaagcacacacaagaacaacatcaacaatggcgattcgcatcaatacggcgacgtttcaatcagacctgtaccgttcattcgcgtttcctcaaccgaaacctctcagatctcccaaattcgccatggcttccaccattggatccgccacaacgaaggttgaaagcaccaaaaagccctttacccctccaagggaggttcaccaacaggtgctacactcaatgccgccacaaaagatcgaaatcttcaaatccatggagggttgggccgaagataacatattggttcacctaaagcccgtcgaaaaatgctggcaagcacaggatttcctaccagatcccgcatctgacggatttatggaacaagtggaggaactacgagctcgggctaaggagattccggatgattactttgttgttttggtgggagatatgattactgaagaagcactgcctacttaccaaacaatgcttaatactcttgatggtgtgcgtgatgagaccggggctagccctacttcttgggctatctggactcgggcttggaccgctgaagaaaacaggcacggtgatcttctacatcagtatctgtatcttagcgggcgggtcgacatgaggcagattcagaagacaattcagtacctcattgggtctggaatggacccccggaccgaaaacagtccttaccttgggttcatctacacttcatttcaagagcgtgccaccttcatctctcacggaaacacagcccggcacgcaaaggagcatggtgacgtgaagctggctcaaatgtgcgggataattgcagctgatgaaaaaaggcacgaaaccgcctacacaaaaatagtagaaaaactcttcgaaattgacccggacggcactgttctcgcttttgctgacatgatgaggaaaaagatctccatgcctgcacacttgatgtacgatgggcgtgacgataacctcttcgaaaatttctcagctgttgcccaaaggctcggtgtgtacactgcgaaggactatgcagacattctggagtttctggtgggccggtggaaggtggcggatttaaccgggctttctggtgaagggcgtaaagcccaagactatgtgtgcgggctggccccaagaatcagaaggcttgaggagaggaactcggcaagggcgaaggaaagtgtgaacgttccgttcagctggatctttgatagagaagtgaagctctgaaagttgcgatagtaagttgttaaaacctatattagattgtcgtttctttcgtgtagtgctgatatgtgttttcttctcgactttgtaatgtgtctcgagttcgagtgtttgtaaacttgttggacgtattataaaacttgttatgccagttttgatgaaaaaaaaaaaaaaaaaaaa

SEQ ID NO: 122630 - protein, 396 aa, Helianthus annuus
MAIRINTATFQSDLYRSFAFPQPKPLRSPKFAMASTIGSATTKVESTKKPFTPPREVHQQVLHSMPPQKIEIFKSMEGWAEDNILVHLKPVEKCWQAQDFLPDPASDGFMEQVEELRARAKEIPDDYFVVLVGDMITEEALPTYQTMLNTLDGVRDETGASPTSWAIWTRAWTAEENRHGDLLHQYLYLSGRVDMRQIQKTIQYLIGSGMDPRTENSPYLGFIYTSFQERATFISHGNTARHAKEHGDVKLAQMCGIIAADEKRHETAYTKIVEKLFEIDPDGTVLAFADMMRKKISMPAHLMYDGRDDNLFENFSAVAQRLGVYTAKDYADILEFLVGRWKVADLTGLSGEGRKAQDYVCGLAPRIRRLEERNSARAKESVNVPFSWIFDREVKL

SEQ ID NO: 122631 - DNA, 1191 bp, Macfadyena unguis
  CDS (1)..(1191)
atggccttgaagctgaatgccatcaactttcaatctcccaaatgctcttcttttggacttcccccagtcgtcagcctcagatctcctaagctttccgtggctgccactcttcgttctggtttgagggatgttgagaccgtcaagaaaacttttagtcctgcacgtgaggttcatgttcaagtaacacactctatggcaccacaaaaaattgagatcttcaaagctatggaagactgggctgagaacaatatactggttcaccttaaaaatgttgaaaaatgcccgcaacctcaggatttcctgcccgacccagcttctgatgaatttcatgatcagatcaaggaattacgagaaagagccaaggagattcctgatgattatttcgttgttctagttggtgatatgataactgaagaagcccttccgacatatcaaacaatgcttaatacctgggatggtgtgcgagatgaaacgggggcaagcccaacatcatgggcaatttggacaagggcgtggactgctgaagaaaataggcatggagaccctctaaataaatatctctacctatccggacgagtggatatgaaacaaatagagaagaccatccaatatctcatcgggtcaggaatggatcctaggacagaaaacagcccgtacttaggattcatatacacatccttccaagaaagggctactttcatctcccacgggaacacagccaggcttgcgagggaccacggggacttcaaactggctcaaatctgcggtactattgcctcggacgagaagcgtcatgaaactgcatataccaagatagtggagaagctatttgagatcgaccctgatgggacagtgctagcttttggcgacatgatgaagaagaagatctctatgccggaccactttatgtacgatggtcgtgatgataacctctttgatcacttctcttctgttgctcagcgccttggtgtgtacactgctaaagactatgcagacatccttgaacatttggtcggaagatggaaagtggaaaagctaaccggactgtccgcagaagggcagaaagctcaggactacgtctgtgggctgcctccaagaatcagacggttggaggagagagctcaaattcgggccaaacaggcaccgaggctcccatttagctggatatatgacagagaggtgcaactctga

SEQ ID NO: 122632 - protein, 396 aa, Macfadyena unguis
MALKLNAINFQSPKCSSFGLPPVVSLRSPKLSVAATLRSGLRDVETVKKTFSPAREVHVQVTHSMAPQKIEIFKAMEDWAENNILVHLKNVEKCPQPQDFLPDPASDEFHDQIKELRERAKEIPDDYFVVLVGDMITEEALPTYQTMLNTWDGVRDETGASPTSWAIWTRAWTAEENRHGDPLNKYLYLSGRVDMKQIEKTIQYLIGSGMDPRTENSPYLGFIYTSFQERATFISHGNTARLARDHGDFKLAQICGTIASDEKRHETAYTKIVEKLFEIDPDGTVLAFGDMMKKKISMPDHFMYDGRDDNLFDHFSSVAQRLGVYTAKDYADILEHLVGRWKVEKLTGLSAEGQKAQDYVCGLPPRIRRLEERAQIRAKQAPRLPFSWIYDREVQL

SEQ ID NO: 122633 - DNA, 1191 bp, Linum usitatissimum
  CDS (1)..(1191)
atggctctcaagctcaacccagtcaccaccttcccttcaacacgctccctcaacaacttctcctccagatctcctcgcacctttctcatggctgcttccactttcaattccacctccaccaaggaggctgagaagctaaagaagtcacatggaccaccaaaagaggtgcatatgcaagtgacccattccatgcccccacagaagctggagatatttaagtctctggaaggttgggctgaggatgttctattaccgcacctgaagccagttgagaaatgctggcagccacaggatttcctgcccgaacctgagtcggatgggttcgaggagcaagtgaaggagctcagggcaagggccaaagaactgcccgatgactattttgttgtgctggttggggatatgatcaccgaagaagctctgccgacttaccagacaatgctcaacacccttgacggggtgagggacgagactggagccagccttacgccgtgggcaatctggacaagggcgtggaccgctgaagagaataggcacggtgaccttctcaacaagtatctatacctctctggaagggtggacatgaggcaaattgaaaagaccattcagtatctcatcggctctggaatggatccaaaaacagaaaacaacccctacctcggtttcatctacacctcattccaagagagggcaacgttcatctcccacggaaacacagccagactcgccaaggaccatggggacatgaagctggcgcagatctgcgggatcatcgcagcagacgagaaacggcacgaaaccgcatacaccaagatcgtcgagaagctcttcgagatcgaccctgacggtacagtgctggcactggcggacatgatgaggaagaagatatcgatgcccgcccacttgatgtacgatggagaagacgacaacctcttcgacaattactcgtcagtcgctcaacgcatcggggtgtatactgccaaggattatgccgatatcctggagttcctggtggggaggtggaaagtggatgcttttacggggctttccggggaagggaacaaagctcaggattttgtctgcgggcttcctgcgaggattcgaaagttggaggagagggctgcggggagggcaaagcaaacgtcgaaatctgtcccgttcagctggatcttcagcagagaattggtactctaa

SEQ ID NO: 122634 - protein, 396 aa, Linum usitatissimum
MALKLNPVTTFPSTRSLNNFSSRSPRTFLMAASTFNSTSTKEAEKLKKSHGPPKEVHMQVTHSMPPQKLEIFKSLEGWAEDVLLPHLKPVEKCWQPQDFLPEPESDGFEEQVKELRARAKELPDDYFVVLVGDMITEEALPTYQTMLNTLDGVRDETGASLTPWAIWTRAWTAEENRHGDLLNKYLYLSGRVDMRQIEKTIQYLIGSGMDPKTENNPYLGFIYTSFQERATFISHGNTARLAKDHGDMKLAQICGIIAADEKRHETAYTKIVEKLFEIDPDGTVLALADMMRKKISMPAHLMYDGEDDNLFDNYSSVAQRIGVYTAKDYADILEFLVGRWKVDAFTGLSGEGNKAQDFVCGLPARIRKLEERAAGRAKQTSKSVPFSWIFSRELVL

SEQ ID NO: 122635 - DNA, 1284 bp, Asclepias syriaca
  CDS (61)..(1218)
cttttgtccattatttgtaagagaagaaaagaaaaaaaaagtcttgcacacgacgttaccatgcaaactttggtattctccaccaccaacccatccgcatggaatacacatggctacactatcaagaacccaccaaaatccaccgctgtattccgccgactaccaaacgtctccgccgtagcatcaccaccagcattgcgtacattgccaccggaaaaagttcaaatctttaagtcactagaatcttgggcaacccaaaatgtccttccccttctcaaacccgttgagaaatcatggcaacccaccgaattcctcccgaacccggctcagaatttcgacgatttcaccaaagaagttcacgccctccgtcaccgtacctccgatcttcccgatgagttcttggtcgttcttgtcggtgacatgattacggaagaagcattgccaacttatcaaagtatgattaacagacttgacggcgttaaggatgagacgggagcttgtacttccccttgggctatttggacacgagcttggacggcggaagaaaaccgtcacggcgatttactcaagacttatctttacctttccggcagagttgacatgacaatgattgacaaaactatccaatatttacttagttccggcatgaatactggtacaaatagaaatccgtattttggatttgtgtacacgtcattccaagagcgagccacatttgtgtcacatggtaatacggctcggctcgccaaggagagaggggatcctgtgctagccaagatatgtggttcaattgcatccgacgagaagcgccacgagagtgcttactcgagaatcgtcgagaaattagtcgaagtggatccgagcggagccatgttagccataggtgaaatgatgagaatgaaaataacaatgccggctcatctaatgtacgacggccaagatccgaatctgttcgctcatttctcggctgtagctcaacgactcggggtttatactgccggagattatgctgacattcttgaatttttaattcaacggtggagattagagaagctcgagggtttgacggatgatgcgagacgtgcacaagagttcgtgtgtggactagctcctaggatgaggaggttacaagagaaagctgacgagcgagccaagaagctccggaccacgactggagtgaaatttagctggatctttaataaggagctatatttgtgaaattttattttgtggacttgaattaaatgtatgcagaatatctggggccaaactataagaacaaaa

SEQ ID NO: 122636 - protein, 385 aa, Asclepias syriaca
MQTLVFSTTNPSAWNTHGYTIKNPPKSTAVFRRLPNVSAVASPPALRTLPPEKVQIFKSLESWATQNVLPLLKPVEKSWQPTEFLPNPAQNFDDFTKEVHALRHRTSDLPDEFLVVLVGDMITEEALPTYQSMINRLDGVKDETGACTSPWAIWTRAWTAEENRHGDLLKTYLYLSGRVDMTMIDKTIQYLLSSGMNTGTNRNPYFGFVYTSFQERATFVSHGNTARLAKERGDPVLAKICGSIASDEKRHESAYSRIVEKLVEVDPSGAMLAIGEMMRMKITMPAHLMYDGQDPNLFAHFSAVAQRLGVYTAGDYADILEFLIQRWRLEKLEGLTDDARRAQEFVCGLAPRMRRLQEKADERAKKLRTTTGVKFSWIFNKELYL

SEQ ID NO: 122637 - DNA, 1230 bp, Brassica rapa subsp
  CDS (1)..(1230)
atgttcggttatcttcggatatccattcgggttcgggtattatccgttcgggttcggatatccaatctcttcttattcaatacccattcgggtattttgctacttcggttcggatttcggttcgggtttttcggatcgggttcggatgccacttcggatatcggggaggtcgagagcttgaagaagccattcactccccctaaggaagtccacgttcaagtcctgcactcaatgccaccccaaaagatcgaaatcttcaaatccatggaagactgggccgagcacaacctcctacctcacctcaaagacgtggagaagtcatggcagccccaggacttcttaccggaccctgcttccgacgggttcgaagaccaggtaaaagagttaagagaaagagcaagagagctcccagatgattacttcgttgtcttggtgggtgacatgatcacagaagaagcgcttcccacctatcaaacaatgctgaacactttggatggtgtaagggatgagactggtgctagccccacttcatgggccgtttggactagagcttggaccgctgaagagaatcgccacggtgatcttttgaataagtatctttacttgtctggtcgtgttgacatgaggcagattgagaagactattcagtacctgattggttccggaatggatccacgcacagagaacaacccttaccttggcttcatctacacctcattccaagaaagagccaccttcgtctctcacggcaacacagctcgccaagccaaagagcacggagacctcaagctagcccaaatctgcggcacaatagctgcagacgagaagcgtcacgagacagcttacaccaagatagttgagaagcttcttgagattgatcctgacggcactgtggtggcctttgcggatatgatgaggaagaaaatctcgatgcctgctcacttgatgtacgatgggcgtgacgacaagctctttgacaacttctcctccgtggctcagaggcttggtgtctacactgctaaagattatgcggacattcttgagttcttggtcgggaggtggaagattgagagcttgagtgggctttcgggtgaaggaaacaaagcgcaggagtatctatgtgggttgactccgagaatcaggaggttggatgagagagctcaagcaagagccaagaaaggacctaagattcctttcagctggatacatgacagagaagtgcagctctga

SEQ ID NO: 122638 - protein, 409 aa, Brassica rapa subsp
MFGYLRISIRVRVLSVRVRISNLFLFNTHSGILLLRFGFRFGFFGSGSDATSDIGEVESLKKPFTPPKEVHVQVLHSMPPQKIEIFKSMEDWAEHNLLPHLKDVEKSWQPQDFLPDPASDGFEDQVKELRERARELPDDYFVVLVGDMITEEALPTYQTMLNTLDGVRDETGASPTSWAVWTRAWTAEENRHGDLLNKYLYLSGRVDMRQIEKTIQYLIGSGMDPRTENNPYLGFIYTSFQERATFVSHGNTARQAKEHGDLKLAQICGTIAADEKRHETAYTKIVEKLLEIDPDGTVVAFADMMRKKISMPAHLMYDGRDDKLFDNFSSVAQRLGVYTAKDYADILEFLVGRWKIESLSGLSGEGNKAQEYLCGLTPRIRRLDERAQARAKKGPKIPFSWIHDREVQL

SEQ ID NO: 122639 - DNA, 1555 bp, Saussurea involucrata
  CDS (211)..(1401)
cgtgccgactccgcgccgcgtgtcagggcgcgaggttcgattgcataccttcgtatagcatatatgttatacgactctcataggacggtaccggacatatgcccgggaattcggccattacggccggggctcacttgtgtggaggaaaacagaactcaaaaaactttgcgactgcgaacaaggagaaaaagaagaagaacaagatcaagaatggctcttcggatcagtccggtgaccttgcaatcggagaggtatcgttcattttcgtttcctaaaacggctaatctcagatctcccaaattcgctatggcttccaccttgggatcttcgacaccgaaggttgagaataccaagaagccttttagccctccacgagaggttcatgttcaggtgacacactccatgccaccacaaaagatagagattttcaaatccatagagggttgggctgagcagaacatattggttcacctaaagccagtggagaaatgttggcgagcacaggatttcttgcctgaacctgcatctgaaggatttgatgaacaagtcaaggaactaagagcgagggcaaaagagattcctgatgattactttgttgttttggttggagatatgattacagaggaagccctacctacctaccaaacaatgcttaataccctagatggtgtacgagatgaaactggggctagccttacaccttgggctgtctggactagggcttggacggctgaagaaaacagacatggtgatctcctccacacttatctttacctttctggccgggtagacatgaggcagattcagaagactattcagtatctgattgggtcaggaatggatcctcgtaccgaaaacagtccctaccttgggttcatctacacgtcatttcaagagcgtgccacatttatttcgcatggaaacaccgcaaggcatgcaaaggaccacggggatgtgaaactggcgcaaatttgtggtacaatcgcatctgatgaaaagcgtcatgaaaccgcttacacaaagatagtcgaaaagctatttgagatcgatcctgatggcactgttcttgcttttgctgacatgatgaggaaaaagatctccatgcctgcacacttgatgtacgatgggcatgatgacaacctctttgaccacttctcagctgttgcacaaagacttggcgtttacaccgccaaagactatgcagacatactggaatttctggtggggcggtggaaagtggcggatttaactggtttatctggagaagggcgtaaagcccaagattatgtttgtgggttgccgccaagaatcagaaagctggaggagagagctcaagggcgagcaaaggaagggcccattgttccgttcagctggattttcgatagacaggtgaagctctgaaaaaagtaagtttggtttctgttggtttatggggtagaggttaaaacctgttttagatgtttatttcgtgtagtgtgcgtttttttcttttcttgaatccggtattgtgtcgttgagtttgcgtgtttgtaaacttgtgtggctgtgggcatat

SEQ ID NO: 122640 - protein, 396 aa, Saussurea involucrata
MALRISPVTLQSERYRSFSFPKTANLRSPKFAMASTLGSSTPKVENTKKPFSPPREVHVQVTHSMPPQKIEIFKSIEGWAEQNILVHLKPVEKCWRAQDFLPEPASEGFDEQVKELRARAKEIPDDYFVVLVGDMITEEALPTYQTMLNTLDGVRDETGASLTPWAVWTRAWTAEENRHGDLLHTYLYLSGRVDMRQIQKTIQYLIGSGMDPRTENSPYLGFIYTSFQERATFISHGNTARHAKDHGDVKLAQICGTIASDEKRHETAYTKIVEKLFEIDPDGTVLAFADMMRKKISMPAHLMYDGHDDNLFDHFSAVAQRLGVYTAKDYADILEFLVGRWKVADLTGLSGEGRKAQDYVCGLPPRIRKLEERAQGRAKEGPIVPFSWIFDRQVKL

SEQ ID NO: 122641 - DNA, 1206 bp, Brassica napus
  CDS (1)..(1206)
atggcattgaagcttaaccctttggcatctcagccttacaaactcccttcctcggctcgtccgccaatctctactctcagatctcccaagttcctctgcctcgcttcctcttcttcccctgctctcagctccagcaccaaggaggtcgagagcttgaagaagccattcactccccctaaggaagtccacgttcaagtcctgcactcaatgccaccccaaaagatcgaaatcttcaaatccatggaagactgggccgagcagaaccttctaactcacctcaaggacgtggagaagtcatggcagccccaggacttcttaccggaccctgcttccgacgggttcgaagatcaggtaaaggagttaagagaaagagcaagagagctcccagatgattacttcgttgtcttggttggagacatgatcacagaagaagcgcttcccacctatcaaactatgctgaacactctggatggagtaagggatgaaactggcgctagccccacttcatgggccgtttggactagagcttggactgctgaagagaatcgccacggtgatcttctcaataagtatctttacttgtctggtcgtgttgacatgaggcagattgagaagactattcagtacttgattggttccggaatggatccacgcacagagaacaacccttaccttggcttcatctacacttcgttccaagagagagccaccttcgtctctcacggcaacacagctcgccaagccaaagagcacggagacctcaagctagcgcaaatctgtgggacaatagctgcagacgagaagcgtcacgagacagcttacaccaagatagttgagaagcttcttgagattgatcctgacggcactgtggtggcctttgcggatatgatgaggaagaaaatctcgatgcctgctcacttgatgtacgatgggcgtgacgacaagctctttgacaacttctcctccgtggctcagaggcttggtgtctacactgctaaagattatgcggacattcttgagttcttggtcgggaggtggaagattgagagcttgagtgggctttcgggtgaaggaaacaaagcgcaggagtatctatgtgggttgactccgagaatcaggaggttggatgagagagctcaagcaagagccaagaaaggacctaagattcctttcagctggatacatgacagagaagtgcagctctga

SEQ ID NO: 122642 - protein, 401 aa, Brassica napus
MALKLNPLASQPYKLPSSARPPISTLRSPKFLCLASSSSPALSSSTKEVESLKKPFTPPKEVHVQVLHSMPPQKIEIFKSMEDWAEQNLLTHLKDVEKSWQPQDFLPDPASDGFEDQVKELRERARELPDDYFVVLVGDMITEEALPTYQTMLNTLDGVRDETGASPTSWAVWTRAWTAEENRHGDLLNKYLYLSGRVDMRQIEKTIQYLIGSGMDPRTENNPYLGFIYTSFQERATFVSHGNTARQAKEHGDLKLAQICGTIAADEKRHETAYTKIVEKLLEIDPDGTVVAFADMMRKKISMPAHLMYDGRDDKLFDNFSSVAQRLGVYTAKDYADILEFLVGRWKIESLSGLSGEGNKAQEYLCGLTPRIRRLDERAQARAKKGPKIPFSWIHDREVQL

SEQ ID NO: 122643 - DNA, 1179 bp, Zea mays
  CDS (1)..(1179)
atggcgctccgcctccacgacgtcgcgctctgcctctccccgccgctcgccgcccgccgccgcagcggcggcagtttcgtcgccgtcgcctccatgacgtccgccgccgtctccaccagggtggagaacaagaagccatttgctcctccgagggaggtacatgtccaggttacacattcaatgccatctcacaagattgaaattttcaagtcacttgatgattgggctagagataatatcttgacacatctcaagccagtcgagaagtgttggcagccacaggatttcctccctgacccagcatctgaaggatttcatgatgaagttaaggagctcagagaacgtgccaaggagatccctgatgattattttgtttgtttggttggagacatgattactgaggaagctctaccaacataccagactatgcttaacaccctcgacggtgtcagagatgagacaggtgcaagccccactgcttgggctgtttggacgagggcatggactgctgaggagaacaggcatggtgatcttctcaacaagtacatgtacctcactgggagggtggatatgaggcaaattgagaagacaattcagtatcttattggctctggaatggatcctaggactgaaaataatccttatcttggtttcatctacacctccttccaagagcgggcgaccttcatctcgcatgggaacactgctcgtcatgccaaggactttggcgacttaaagctcgcacaaatctgtggcatcatcgcctcagatgagaagcgacatgaaactgcgtacaccaagatcgtggagaagctgtttgagatcgaccctgatggtaccgtggtcgctctggctgacatgatgaggaagaagatctcaatgcctgcccacctgatgtttgacgggcaggacgacaagctgttcgagcacttctccatggtcgcgcagaggcttggcgtttacaccgccagggactacgccgacatcctcgagttcctcgtcgacaggtggaaggtggcgaacctgactggtctgtcgggtgaagggaacaaggcgcaggactacctttgcacccttgcttcaaggatcaggaggctggaggagagggcccagagcagagccaagaaagcaggcacgctgcctttcagctgggtatacggtagggacgtccaactgtga

SEQ ID NO: 122644 - protein, 392 aa, Zea mays
MALRLHDVALCLSPPLAARRRSGGSFVAVASMTSAAVSTRVENKKPFAPPREVHVQVTHSMPSHKIEIFKSLDDWARDNILTHLKPVEKCWQPQDFLPDPASEGFHDEVKELRERAKEIPDDYFVCLVGDMITEEALPTYQTMLNTLDGVRDETGASPTAWAVWTRAWTAEENRHGDLLNKYMYLTGRVDMRQIEKTIQYLIGSGMDPRTENNPYLGFIYTSFQERATFISHGNTARHAKDFGDLKLAQICGIIASDEKRHETAYTKIVEKLFEIDPDGTVVALADMMRKKISMPAHLMFDGQDDKLFEHFSMVAQRLGVYTARDYADILEFLVDRWKVANLTGLSGEGNKAQDYLCTLASRIRRLEERAQSRAKKAGTLPFSWVYGRDVQL

SEQ ID NO: 122645 - DNA, 1179 bp, Zea mays
  CDS (1)..(1179)
atggcgctccgcctccacgacgtcgcgctctgcctctccccgccgctcgccgcccgccgccgcagcggcggcagtttcgtcgccgtcgcctccatgacgtccgccgccgtctccaccagggtggagaacaagaagccatttgctcctccgagggaggtacatgtccaggttacacattcaatgccatctcacaagattgaaattttcaagtcacttgatgattgggctagagataatatcttgacacatctcaagccagtcgagaagtgttggcagccacaggatttcctccctgacccagcatctgaaggatttcatgatgaagttaaggagctcagagaacgtgccaaggagatccctgatgattattttgtttgtttggttggagacatgattactgaggaagctctaccaacataccagactatgcttaacaccctcgacggtgtcagagatgagacaggtgcaagccccactgcttgggctgtttggacgagggcatggactgctgaggagaacaggcatggtgatcttctcaacaagtacatgtacctcactgggagggtagatatgaggcaaattgagaagacaattcagtatcttattggctctggaatggatcctaggactgagaataatccttatcttggtttcatctacacctccttccaagagcgggcgaccttcatctcgcatgggaacactgctcgtcatgccaaggactttggcgacttaaagctcgcacaaatctgtggcatcatcgcctcagatgagaagcgacatgaaactgcgtacaccaagatcgtggagaagctgtttgagatcgaccctgatggtaccgtggtcgctctggctgacatgatgaggaagaagatctcaatgcctgcccacctgatgtttgacgggcaggacgacaagctgttcgagcacttctccatggtcgcgcagaggcttggcgtttacactgccagggactacgccgacatcctcgagttcctcgtcgacaggtggaaggtggtgaacctgactggtctgtcgggtgaagggaacaaggcgcaggactacctttgcacccttgcttcaaggatcaggaggctggaggagagggcccagagcagagccaagaaagcaggcacgctgcctttcagctgggtatacggtagggacgtccaactgtga

SEQ ID NO: 122646 - protein, 392 aa, Zea mays
MALRLHDVALCLSPPLAARRRSGGSFVAVASMTSAAVSTRVENKKPFAPPREVHVQVTHSMPSHKIEIFKSLDDWARDNILTHLKPVEKCWQPQDFLPDPASEGFHDEVKELRERAKEIPDDYFVCLVGDMITEEALPTYQTMLNTLDGVRDETGASPTAWAVWTRAWTAEENRHGDLLNKYMYLTGRVDMRQIEKTIQYLIGSGMDPRTENNPYLGFIYTSFQERATFISHGNTARHAKDFGDLKLAQICGIIASDEKRHETAYTKIVEKLFEIDPDGTVVALADMMRKKISMPAHLMFDGQDDKLFEHFSMVAQRLGVYTARDYADILEFLVDRWKVVNLTGLSGEGNKAQDYLCTLASRIRRLEERAQSRAKKAGTLPFSWVYGRDVQL

SEQ ID NO: 122647 - DNA, 1272 bp, Pelargonium hortorum
  CDS (8)..(1114)
atagaagatgggtgttctacttaacatatgttcctctccatttccagtagtagcatctgctgcttctacttccatttccaaggttaatcatataagaaaagttggagtaactggtgtaatggctccccaaaaaatagaaatattcaaatctatggaggaatggggtaagcacaacattttgccactggcgaaaccagttgaaaaatcatggcaaccaacagactttttgccggacccttcctccgaaggattcatggaagaatataatgcatttaaggagaggacgagagagcttccagacgaatacttcgttgttttggcgggcgatatgattacggaagaggctcttcctacctaccaaacattggtgaacaggccagatgaagttgcagatgaaacaggccacagtgagagcccgtgggcagtttggtcgagggcgtggactgcagaagaaaataggcacggcgatcttctcaacaagtacttgtacctctcggggaagcttgacatgagacaagtagagaagaccattcaatatctcattgccttaggacaggacatcggaaccgaaaagaacccctaccacttgtttatatacacgtcatttcaagaaagggcaacattcatttcccacgcaaataccgcaaaactagcccagcaacacggggacaagcaacttgcccaaatatgcggtaccatcgccgcggacgagaagcgccacgaaacggcatacacccgcatagttgacaagctttttgagttggatccagacgaaacaatgtcctgcctcgcccacatgatgaagaggaagatcacaatgccggctcacctaatgcgcgatggtcgagacccgcatttgttccaacacttctcggtggtagcgtctcgaacaggggtgtatacggtgatggactatataaatatactggagcattttgtggagaagtggaatatcgagaagataacggcagggctttcagataagggaagggaagctcaggattacgtttgcaagttaggtgaaaggttaagaaaagtggaggagagggctcatcaaagagtcgtacaagctgaccctattccatttagctggatatttgatagaaaagtctagtggtatatctataaagttaaaataagggtactccgtaatatttttctaaaaagattacaactataaaaataagtttttagaaaaaatctggggtcgactgaccccaattgaaccatgtagttccgctactgtttatatatttacgtattttcatcgtc

SEQ ID NO: 122648 - protein, 368 aa, Pelargonium hortorum
MGVLLNICSSPFPVVASAASTSISKVNHIRKVGVTGVMAPQKIEIFKSMEEWGKHNILPLAKPVEKSWQPTDFLPDPSSEGFMEEYNAFKERTRELPDEYFVVLAGDMITEEALPTYQTLVNRPDEVADETGHSESPWAVWSRAWTAEENRHGDLLNKYLYLSGKLDMRQVEKTIQYLIALGQDIGTEKNPYHLFIYTSFQERATFISHANTAKLAQQHGDKQLAQICGTIAADEKRHETAYTRIVDKLFELDPDETMSCLAHMMKRKITMPAHLMRDGRDPHLFQHFSVVASRTGVYTVMDYINILEHFVEKWNIEKITAGLSDKGREAQDYVCKLGERLRKVEERAHQRVVQADPIPFSWIFDRKV

SEQ ID NO: 122649 - DNA, 1622 bp, Arabidopsis thaliana
  CDS (49)..(1272)
agagctctagctctgtagaaaagaaggattcattcatcatatccagaaatggctctaaagtttaaccctttggtggcatctcagccttacaaattcccttcctcgactcgtccgccaacttcttctttcagatctcccaagttcctctgcctcgcttcttcttctccggctctcagctccggccccaaggaggttgagagtttgaagaaaccatttacgccacccagggaagtgcatgttcaagtcttgcactccatgccacctcaaaagatcgagatcttcaaatctatggaaaactgggccgaggagaaccttctgattcacctcaaggatgtggagaagtcttggcaaccccaggatttcttgcctgaccctgcatcagatgggtttgaagatcaggtaagagagttaagagagagggctagagacctccctgatgattactttgttgttttggtgggggacatgatcacagaagaagcacttccgacctatcaaactatgttgaacactttggatggagttagggatgaaacaggtgctagtcctacttcatgggctatttggaccagagcttggactgcagaagaaaacgcacatggcgatcttctgaataaatacctttacttgtctggtcgtgttgacatgaggcagatcgaaaagaccattcagtacttgattggatctggaatggatccgcggacagagaataacccctaccttggcttcatctatacgtcattccaagaaagagcgacattcatctctcacggaaacacagcccgccaagccaaagagcacggggacatcaaactagcccaaatatgtggcacaatagctgcagacgagaagcgtcatgaaacagcatacaccaagatagttgaaaagctctttgagattgatcctgatggtactgtcatggcttttgcagacatgatgagaaagaaaatctcaatgcctgctcacttgatgtatgatggggcgaacgacaacctctttgacaacttctcttccgtggctcagaggctcggtgtttacaccgccaaagactatgcagacattcttgagtttctggttggtaggtggaaaatccaggacttaaccgggctttcaggtgaaggaaacaaagcacaagactatttatgcgggttggctccaaggatcaagagattggatgagagagctcaagcaagagccaagctaaaaggacaaagacaaaaacctatcctcccggttcctcatttcatctgtctgctcttaaaattggtgtagattactatggttttctgataatgttggtgggtctagttacaaagttgagatgcagtgatttagtagctttgtttttcccagtcactatatgtttggtctttggtccgttagcacacttgtagtagttaaaccagtttaagtatggtctgtacttcagtcttcctcttctctgtggagttttgtttaagttcaggttagttttgttttgtctcttcctgttctcgacaaacaactcatgtggctttttagcaattttgatggatgatcatgatgaataaacaactcatgtggctttttagcaattttgatggatgatcatgatgaataaaaaaaaaaaaaaaaaaaaaaaa

SEQ ID NO: 122650 - protein, 407 aa, Arabidopsis thaliana
MALKFNPLVASQPYKFPSSTRPPTSSFRSPKFLCLASSSPALSSGPKEVESLKKPFTPPREVHVQVLHSMPPQKIEIFKSMENWAEENLLIHLKDVEKSWQPQDFLPDPASDGFEDQVRELRERARDLPDDYFVVLVGDMITEEALPTYQTMLNTLDGVRDETGASPTSWAIWTRAWTAEENAHGDLLNKYLYLSGRVDMRQIEKTIQYLIGSGMDPRTENNPYLGFIYTSFQERATFISHGNTARQAKEHGDIKLAQICGTIAADEKRHETAYTKIVEKLFEIDPDGTVMAFADMMRKKISMPAHLMYDGANDNLFDNFSSVAQRLGVYTAKDYADILEFLVGRWKIQDLTGLSGEGNKAQDYLCGLAPRIKRLDERAQARAKLKGQRQKPILPVPHFICLLLKLV

SEQ ID NO: 122651 - DNA, 1580 bp, Sesamum indicum
  CDS (112)..(1302)
ctgtcccacctctctctctctcttctcactctgtctcttacatagcttgcgactctctcttttgtggaggaaacaaaacctgaaaaagaatacaagaacagcaaatagaggatggccttgaagctgaatgccatcaattttcaatccccgaaatgcccttcgtttgctcttccaccggttgccagcgttagatctcctaagttcttcatggcttccactcttcgctctggttctaaggaggtcgagacggtcaagaggccttttaatcctccccgagaggttcatgttcaagtgacacactctatgccaccacaaaagattgagatcttcaaagctctggaagactgggctgacaataatatacttgttcaccttaagcctgttgagaaatgttggcaacctcaggatttcctgcctgatccatcttctgacggattcgatgatcaggtcaaggaattgagggagagagccaaggagattccagatgattattttgttgttttagtcggtgatatgatcacagaagaagcccttccaacatatcaaacaatgcttaataccttagacggtgtgcgggatgaaacgggggccagcccaacttcttgggctatttggacaagggcatggactgctgaagaaaataggcatggggaccttctaaataaatatctctatctctctggacgagtagatatgagacaaattgagaagactatccagtatctgataggatcaggaatggatccacggacagaaaacagcccatatcttggatttatctatacatccttccaagaaagggctactttcatctcccatggcaacactgcaagacttgcaagggaacatggggacttgaagctggcccaaatctgcggcacaattgccgcagatgagaagcgtcatgaaactgcatacaccaagatagtggaaaagctatttgagattgaccccaacgacactgttcttgcttttgctgacatgatgaggaagaagatctccatgccagcccacttgatgtatgatggccgtgacgataacctcttcgaccacttctcatctgttgctcagcggcttggcgtctatacggccaaagactatgccgacatcctagaacacttggtcgccagatggaaagtggcaaatttaacaggactatctgctgatggcagaaaagcccaagactatgtctgtgggctgcccccaagaatcaggaggttagaggagagagctcaagggcgggccaagcaagcaccaaagatcccatttagctggatacatgatcgagaggtgcaactctgagttcagttcggatgagtttcttgtgctccatcgatgtaactattggtaagaaaagaaattgcattgtagcttgtttgcaccaccgatttattgttccttcagaaggattatgtcgggagtgaaagagactgtagatagtggtttgttatcttttcgaagtcttttagatcttcatataggggcagctctagttgttacgttgttctaatgtgggctggtatgatttcttgtctagctattgtgactgaaactgccaaatatcgtaagggaattttggt

SEQ ID NO: 122652 - protein, 396 aa, Sesamum indicum
MALKLNAINFQSPKCPSFALPPVASVRSPKFFMASTLRSGSKEVETVKRPFNPPREVHVQVTHSMPPQKIEIFKALEDWADNNILVHLKPVEKCWQPQDFLPDPSSDGFDDQVKELRERAKEIPDDYFVVLVGDMITEEALPTYQTMLNTLDGVRDETGASPTSWAIWTRAWTAEENRHGDLLNKYLYLSGRVDMRQIEKTIQYLIGSGMDPRTENSPYLGFIYTSFQERATFISHGNTARLAREHGDLKLAQICGTIAADEKRHETAYTKIVEKLFEIDPNDTVLAFADMMRKKISMPAHLMYDGRDDNLFDHFSSVAQRLGVYTAKDYADILEHLVARWKVANLTGLSADGRKAQDYVCGLPPRIRRLEERAQGRAKQAPKIPFSWIHDREVQL

SEQ ID NO: 122653 - DNA, 1191 bp, Sesamum indicum
  CDS (1)..(1191)
atggccttgaagctgaatgccatcaattttcaatccccgaaatgcccttcgtttgctcttccaccggttgccagcgttagatctcctaagttcttcatggcttccactcttcgctctggttctaaggaggtcgagacggtcaagaggccttttaatcctccccgagaggttcatgttcaagtgacacactctatgccaccacaaaagattgagatcttcaaagctctggaagactgggctgacaataatatacttgttcaccttaagcctgttgagaaatgttggcaacctcaggatttcctgcctgatccatcttctgacggattcgatgatcaggtcaaggaattgagggagagagccaaggagattccagatgattattttgttgttttagtcggtgatatgatcacagaagaagcccttccaacatatcaaacaatgcttaagaccttagacggtgtgtgggatgaaacgggggccagcccaacttcttgggctatttggacaagggcatggactgctgaagaaaataggcatggggaccttctaaataaatatctctatctctctggacgagtagatatgagacaaattgagaagactatccagtatctgataggatcaggaatggatccacggacagaaaacagcccatatcttggatttatctatacatccttccaagaaagggctactttcatctcccatggcaacactgcaagacttgcaagggaacatggggacttgaagctggcccaaatctgcggcacaattgccgcagatgagaagcgtcatgaaactgcatacaccaagatagtggaaaagctatttgagattgaccccaacgacactgttcttgcttttgctgacatgatgaggaagaagatctccatgccagcccacttgatgtatgatggccgtgacgataacctcttcgaccacttctcatctgttgctcagcggcttggcgtctatacggccaaagactatgccgacatcctagaacacttggtcgccagatggaaagtggcaaatttaacaggactatctgctgatggcagaaaagcccaagactatgtctgtgggctgcccccaagaatcaggaggttagaggagagagctcaagggcgggccaagcaagcaccaaagatcccatttagctggatacatgatcgagaggtgcaactctga

SEQ ID NO: 122654 - protein, 396 aa, Sesamum indicum
MALKLNAINFQSPKCPSFALPPVASVRSPKFFMASTLRSGSKEVETVKRPFNPPREVHVQVTHSMPPQKIEIFKALEDWADNNILVHLKPVEKCWQPQDFLPDPSSDGFDDQVKELRERAKEIPDDYFVVLVGDMITEEALPTYQTMLKTLDGVWDETGASPTSWAIWTRAWTAEENRHGDLLNKYLYLSGRVDMRQIEKTIQYLIGSGMDPRTENSPYLGFIYTSFQERATFISHGNTARLAREHGDLKLAQICGTIAADEKRHETAYTKIVEKLFEIDPNDTVLAFADMMRKKISMPAHLMYDGRDDNLFDHFSSVAQRLGVYTAKDYADILEHLVARWKVANLTGLSADGRKAQDYVCGLPPRIRRLEERAQGRAKQAPKIPFSWIHDREVQL

SEQ ID NO: 122655 - DNA, 1337 bp, Thunbergia alata
  CDS (37)..(1209)
cacaaaacctcatttttctgaagaaatatagacgaaatggcgctgaaatgtagcgtaaccccccaccaggtgccttcttttcctgttaatcagctcagatctcaccgagtttacatggcttcaactctcgattcggcatccgctaatgttgggaaaggtaaaaaggctttcaccccccctcgagaagtcaaggttcaactgacgcatcccatggctccagaaaagcgcgagatcttccattcactgcacggttgggcggaagaaaaccttctgtctctcttgaagcctgttgagaagtgttggcagcccaacgactttcttcccgacccttcttcagaaggctttgatgaacaggtcagggagcttcggctaagaaccaaggaactacccgatgaatactttgttgtgttggttggcgacatgatcacggaagaagctctccctacttatcagacgatgatcaacactttagatgcagtccgtgatgagaccggtgcaagccttactccttgggctatttggactagagcatggactgcggaagagaataggcacggtgatcttctcaacaaatatctttacctttcgggacgcgtggacatgaggcaaattgagaagacgattcaatacctcatcggttcaggaatggatcctcgcacggataacaacccgtacctcggattcatctacacctcgttccaggagagggcgacattcatttctcatgggaacacggctaggcttgccaaggaacacggggaccttaaactggcacagatatgcggcagcatagctgcagatgagaaacggcacgaaactgcttacaccaaaattatcgaaaagctgtttgagatcgaccctgatgggacagtacttgctctagccgatatgatgaggaagaaagtgtctatgccggcacatttgatgtatgatggacaagatgaaaatctgtttgaacactttgcagctgtggcgcaacgcattggagtgtacactgcgaaagactatgctgatatactggaatttttagttgggagatgggaggtggagaaactaacaggactttcaggggagggtcgtaacgcgcaggagtacgtgtgcgggttggctcctcggatcagaaggttggaagagagagcacaggcacgggcaaagcagggggcacctgtgcccttctcctgggtttatggtcgagaagttaaaatttgaaccgtcggacggattccgagttagtttgcttctgtgaactcctcttttcagctttgctattagcaagaaaatttttatcaagtttatgtgtttttaaaatatataatatcaattgtttttgggtttta

SEQ ID NO: 122656 - protein, 390 aa, Thunbergia alata
MALKCSVTPHQVPSFPVNQLRSHRVYMASTLDSASANVGKGKKAFTPPREVKVQLTHPMAPEKREIFHSLHGWAEENLLSLLKPVEKCWQPNDFLPDPSSEGFDEQVRELRLRTKELPDEYFVVLVGDMITEEALPTYQTMINTLDAVRDETGASLTPWAIWTRAWTAEENRHGDLLNKYLYLSGRVDMRQIEKTIQYLIGSGMDPRTDNNPYLGFIYTSFQERATFISHGNTARLAKEHGDLKLAQICGSIAADEKRHETAYTKIIEKLFEIDPDGTVLALADMMRKKVSMPAHLMYDGQDENLFEHFAAVAQRIGVYTAKDYADILEFLVGRWEVEKLTGLSGEGRNAQEYVCGLAPRIRRLEERAQARAKQGAPVPFSWVYGREVKI

SEQ ID NO: 122657 - DNA, 1443 bp, Thunbergia alata
  CDS (56)..(1228)
aagttgaagaattctttacatttttctggtgtcgatttgaagaaatatagaggaaatggcgcttaaatttagcattacgccccacaagatgccttccttccctgatttccagctcagatctcaccgggtttgcatgacttcaactctctattctgcatccgttgaggtcggcaatggtaaaaagcctttcagtccccctcgagaagtcaatattcaagtgacacatcccatgcctccagaaaagcgcgagatcttcaactcattgcatggatgggcggaaactaatcttctgtctctcttgaagcctgttgacaagtgttggcagcccagtgactttctacccgacccttccgcagatggctttgacgagcaggtcagagagttacggaaaagaaccaaggaactacccgatgaatattttattgtgttgattggtgacatgattacggaggaagctctcccaacttatcagactatgatcaacacgcttgatgcagtccgggatgagactggtgcaagccttactccttgggctatttggaatagagcatggactgctgaagagaataggcatggtgatcttctcaacaaatatctctacctttcgggacgtgtggacatgaagcaagtcgaaaagacaattcagtacctgattggttcaggaatggaccctcatactgataacaacccgtaccttggattcatctacacatcgtttcaggagagagcaacattcatttctcatgggaacacggctaggcttgccaaggaacacggtgatatgaaactggcacagatttgtggtaccatcgctgcagatgagaaacgtcatgaaactgcctacacaaaaattattgaaaagctgtttcagctggaccctgatgggacaatactcgctctagctgacatgatgcggaagaaagtgtcgatgcctgcccacctgatgtttgatgggaaagatcaaaatctatttgaacacttctctgctgtggcgcaacgtattggagtgtacactgccaaggactatgctgatatattggaatatctagtggcgagatgggaggtggagaagctgacagggcttacaggagaggggcgtaaagcgcaagagtatgtgtgtggcttggctccgaggatcagaaggttggatgagagagcacaggcacgtgcaaaggaagcagcgcctgtgccctttacatggatttttggccgagaagttcgtctctagtaatactattgaatggtcaaataaaacatgcagcaaggatgtggaaacgggctattaggtcgattttgccataagcctatttacttgaagaaaaccttaaattattaaaaggattgctgttgaggcctaaaaattgctaatacatcaaagacacatattcaccaacattattaatgtattgtgtttttgtgaggttatgaagtactcatttatta

SEQ ID NO: 122658 - protein, 390 aa, Thunbergia alata
MALKFSITPHKMPSFPDFQLRSHRVCMTSTLYSASVEVGNGKKPFSPPREVNIQVTHPMPPEKREIFNSLHGWAETNLLSLLKPVDKCWQPSDFLPDPSADGFDEQVRELRKRTKELPDEYFIVLIGDMITEEALPTYQTMINTLDAVRDETGASLTPWAIWNRAWTAEENRHGDLLNKYLYLSGRVDMKQVEKTIQYLIGSGMDPHTDNNPYLGFIYTSFQERATFISHGNTARLAKEHGDMKLAQICGTIAADEKRHETAYTKIIEKLFQLDPDGTILALADMMRKKVSMPAHLMFDGKDQNLFEHFSAVAQRIGVYTAKDYADILEYLVARWEVEKLTGLTGEGRKAQEYVCGLAPRIRRLDERAQARAKEAAPVPFTWIFGREVRL

SEQ ID NO: 122659 - DNA, 1506 bp, Jatropha curcas
  CDS (5)..(1195)
aacaatggctctcaagctcaatcctttcatttctcaatttcacaagttgcctactttcgctctcccaccaatggccaatctcagatctcccaagttctatatggcttctaccctcaagtccggttccaaggaggtggagaatcttaagaagccttttatgcctcctcgggaggtgcatgttcaggttactcattctatgccaccccagaagattgagatatttaaatctctagatgaatgggctgagcagaacattcttgttcatctgaaaccagttgagaagtgttggcaaccacaggattttttgcctgatccttcctctgatggatttgatgaacaagtcagggaacttagggagagagtgaaggagattccagatgactactttgttgttttggttggagacatgatcacagaagaagcccttcccacttatcaaacaatgctgaacactttagatggagttcgggatgaaactggtgctagccttacttcttgggcaatttggacaagggcatggactgctgaagagaatagacatggcgaccttctcaataagtatctctatctgtctggacgagtggacatgaggcaaattgagaagacaattcaatatttgattggatcaggaatggatccacggactgaaaacagtccctatcttggattcatctacacatcattccaagaaagggcaacgttcatctcgcatggaaacactgccagacttgccaaagaacatggagacataaagttggctcaaatatgtggtacaattgctgcagatgagaagcgacatgagacagcatacacaaagatagtggaaaagctcttcgagattgatcctgatggaactgtgttggcttttgctgacatgatgagaaagaaaatttccatgccggcacacttgatgtatgatggtcgtgatgacaatctttttgaccacttttcagctgttgcacagcggcttggtgtctatactgcaaaggactatgcagatatattggagttcttggtgggcagatggaaggtggataagctaacaggactttcagctgaggggcaaaaggctcaggattacgtttgtcggctacctccaagaattagaaggctggaagagagagctcaaggacgagccaaggaaggacccacaattcctttcagttggatttttgatagagaagtgaagctgtaagtgcagaatgaaacacaaatagtcagtttggccctttttcatgtcccttcctgcagaatcagaagcggggcagaattttgtagtttcattttgtttacaaatccagtttagttttatgtctgggaaaggggagtgaatttggtaaattgtagattcagttgggtcttgtgtgttttcttgagtatgctgatagggggcatctgtagttttggtattgtgttcttttacatggtctcttctattagtttgtttgtctttagtttcttgagtataagcatacaatccttgtggcaaaaaaaaaaaaaaaaaaa

SEQ ID NO: 122660 - protein, 396 aa, Jatropha curcas
MALKLNPFISQFHKLPTFALPPMANLRSPKFYMASTLKSGSKEVENLKKPFMPPREVHVQVTHSMPPQKIEIFKSLDEWAEQNILVHLKPVEKCWQPQDFLPDPSSDGFDEQVRELRERVKEIPDDYFVVLVGDMITEEALPTYQTMLNTLDGVRDETGASLTSWAIWTRAWTAEENRHGDLLNKYLYLSGRVDMRQIEKTIQYLIGSGMDPRTENSPYLGFIYTSFQERATFISHGNTARLAKEHGDIKLAQICGTIAADEKRHETAYTKIVEKLFEIDPDGTVLAFADMMRKKISMPAHLMYDGRDDNLFDHFSAVAQRLGVYTAKDYADILEFLVGRWKVDKLTGLSAEGQKAQDYVCRLPPRIRRLEERAQGRAKEGPTIPFSWIFDREVKL

SEQ ID NO: 122661 - DNA, 1086 bp, Hedera helix
  CDS (1)..(1086)
atggcttccactgtcaactctaactccatggttcttgataatctcaaaagtccgccaaatcttcaagtcactcactctatgccaccccaaaagctagaaatattcaagtcccttgatgattgggctaggaacaatgtgttgattcacctcaaatctgtcgagaaatcttggcaaccacaagactacttgccggatccggtgtcagacggattcgaggagcaagtgcgggagttgagggaaagggccaaggagattcccgacgactattttgtggtgttagttggagatatgatcacagaagaagcacttccaacatatatgtctatgctcaataggtgtgatggtattaaggatgagactggggctgagcccagtgcttgggcaatgtggactagggcatggactgccgaagagaatagacatggtgaccttctcaataagtacctttatttgtctggaagggttgatatgaggaaaattgagaagactattcaatatctcatcggctcaggaatggatatcaagtcagaaaacagcccctacctaggcttcatctacacatccttccaagagagagcaaccttcatatcccatgccaacacagccaagctggcccaacactacggcgacaagaacctcgctcacatctgcggctccatcgcctccgacgagaagcgccacgccacagcctacaccaagatcgtggaaaagctcgctgagatcgaccccgacacaacagtaattgcttttgcagatatgatgcgcaaaaaaataacaatgccagcgcacttgatgtacgacggaagtgacgaacttctttttaaacatttcacggcggttgctcagagagtgggggtttattctgcgttggattattgcgacatcttagagtttctggtggataaatggaatgtggaaaggcttacggggctgtcggacgaggggcgaaaagcgcaggaatatgtgtgtgaattgggtcccaagattaggcgagtggaagagaaagtgcaggggaaggagaagaagaagaaagctgagcaccctgtttctttcagctggattttcaatcgggagttgaagatatga

SEQ ID NO: 122662 - protein, 361 aa, Hedera helix
MASTVNSNSMVLDNLKSPPNLQVTHSMPPQKLEIFKSLDDWARNNVLIHLKSVEKSWQPQDYLPDPVSDGFEEQVRELRERAKEIPDDYFVVLVGDMITEEALPTYMSMLNRCDGIKDETGAEPSAWAMWTRAWTAEENRHGDLLNKYLYLSGRVDMRKIEKTIQYLIGSGMDIKSENSPYLGFIYTSFQERATFISHANTAKLAQHYGDKNLAHICGSIASDEKRHATAYTKIVEKLAEIDPDTTVIAFADMMRKKITMPAHLMYDGSDELLFKHFTAVAQRVGVYSALDYCDILEFLVDKWNVERLTGLSDEGRKAQEYVCELGPKIRRVEEKVQGKEKKKKAEHPVSFSWIFNRELKI

SEQ ID NO: 122663 - DNA, 1325 bp, Lotus japonicus
  CDS (88)..(1272)
atcaatccaacaccaccagaaccagaagaagaagaagaagaagaagaagaagcatcatcaacagaggaagaaccagcaacaacaacaatggctctcagaatgaaccctctccccacacaaacctcatccttcatggcactccctcagattgcttccctcagatcccccaagttcgtcatggcttccaccctccgctctggttccaaagaggtagaaagcatcaagaagccttttacgcctcccagagaagtgcatgttcaagtaacccactctatgccaccacagaagattgagattttcaaatctcttgagggttgggctgaggagaacatcttggttcaccttaaaccggtagaaaaatgctggcaaccacaggattttctacctgatgcttccgctgatggatttgaagagcaagtgagggaactgagagagagagcaaaggagattccagatgattactttgttgttctggttggggacatgatcacggaagaagcccttcctacttaccaaacaatgcttaacactttggacggcgttcgtgatgaaacaggggccagccctactccgtggggagtttggacaagggcatggactgctgaagaaaatagacacggtgatctgcttaacaaatatctttacttgtgtggacgtgttgatatgagacaaattgagaagacaattcagtacctgattgggtctggaatggatcctcgaactgagaacagcccctaccttggtttcatctacacttcatttcaagagagggcgacctttatttcccacggaaacacggccaggcatgctaaggagcatggtgatataaagctggctcagatctgtggtctgatcgccgctgatgagaaacgccacgagaccgcctacaccaagattgtggaaaagctgtttgagattgatcctgatggaacagtcatggcatttgctgacatgatgaagaagaaaattgctatgccagcacacctgatgtacgatggccgagatgataacctgtttgacaactactcttccgtagcccagcgtatcggggtctacactgccagggactacgctgatatactcgagtttctagtcgggaggtggaaggtggagcagataactggactgtcaggcgagggacggaaggctcaggagtacgtttgtgggctgccaccaagaatccgaaggctggaggagagagctgcagcaagagtgaaggaaacatcaacaattccattcagctggattcatgacagggaagtactactctgaactcagcaaggagcattatcgtgaatccattaccggcaatctatttggagatc

SEQ ID NO: 122664 - protein, 394 aa, Lotus japonicus
MALRMNPLPTQTSSFMALPQIASLRSPKFVMASTLRSGSKEVESIKKPFTPPREVHVQVTHSMPPQKIEIFKSLEGWAEENILVHLKPVEKCWQPQDFLPDASADGFEEQVRELRERAKEIPDDYFVVLVGDMITEEALPTYQTMLNTLDGVRDETGASPTPWGVWTRAWTAEENRHGDLLNKYLYLCGRVDMRQIEKTIQYLIGSGMDPRTENSPYLGFIYTSFQERATFISHGNTARHAKEHGDIKLAQICGLIAADEKRHETAYTKIVEKLFEIDPDGTVMAFADMMKKKIAMPAHLMYDGRDDNLFDNYSSVAQRIGVYTARDYADILEFLVGRWKVEQITGLSGEGRKAQEYVCGLPPRIRRLEERAAARVKETSTIPFSWIHDREVLL

SEQ ID NO: 122665 - DNA, 1511 bp, Medicago truncatula
  CDS (83)..(1264)
  misc_feature (1506)..(1506): n is a, g, c or t
cacacatacactctctcttctctctttctctcaaatccgtgattcccaaattcatcttcttcttcttcaatcgaatccaacaatggctctcagagcaacccctttccctacacaaacatcctccttctctctccctcaaatggccagtctcagatctcccaaattcgtcatggcttccaccctccgttctggttccaaagaggttgaaaatattaagaaggctttcacacctcccagagaagtgcatgttcaagtaacccactctatgcctccccaaaagattgaaattttcaaatcgttggagggttgggctgaggaaaccttattgactcaccttaaacccgtggagaagtgttggcaaccacaggattttctccctgatccttcctcagatggattcgaagagcaagtgaaggaactgagagagagggcaaaagagcttccagatgactactttgttgttctggttggagatatggtcacagaagaagctcttcctacttaccaaactatgcttaatactttggacggggttcgtgatgaaacaggtgccagccctactccctgggctatttggacaagggcatggacagctgaagaaaatagacacggtgatcttcttaacaagtatctttacttgtccgggcgcgttgatatgagacaaattgaaaagacaattcagtacttgattggctctggaatggatcctcggactgagaatagcccttaccttggctttatctacacttcatttcaagagagggcaacctttatatcgcatggaaacacagctaggcttgctaaggaacgcggcgatttgaagttggctcagatctgtggtctgattgcctcagatgagaaacgccatgagactgcttacacaaagatagtggaaaagctattggagattgatcctgatggaacagttattgcttttgctgacatgatgaggaagaaaattgctatgccagcacacctgatgtatgatggccgagacgacaacctgtttgataactattctgctgttgcccagcgcattggagtctacactgccaaggactatgctgatatacttgagtttctggttgggaggtggaaggtggccgacataaccggactttcaggtgagggacgaaaggcacaggagtatgtttgtgggttgccaccaagaatcagaaggctggaggagagagcttcagcaagagcaaaggaatcatccaaacttgcattcagttggattcatgatagggaagtactactctaagcatagtaaggatcatattaaatcttccaacaactctacttggagcaatgttgaatagttgaaaattcagtttgtcatttttgtttgttgaaacaattgttctcttgcgtggtctgttaagcataagcaatcagggggcagctgtagtaataggaatgctattttttttttccttttccttgcagtagtgatatgtttcaagtataagttgacgtttttatcttgcaattttgatgataaanaaaat

SEQ ID NO: 122666 - protein, 393 aa, Medicago truncatula
MALRATPFPTQTSSFSLPQMASLRSPKFVMASTLRSGSKEVENIKKAFTPPREVHVQVTHSMPPQKIEIFKSLEGWAEETLLTHLKPVEKCWQPQDFLPDPSSDGFEEQVKELRERAKELPDDYFVVLVGDMVTEEALPTYQTMLNTLDGVRDETGASPTPWAIWTRAWTAEENRHGDLLNKYLYLSGRVDMRQIEKTIQYLIGSGMDPRTENSPYLGFIYTSFQERATFISHGNTARLAKERGDLKLAQICGLIASDEKRHETAYTKIVEKLLEIDPDGTVIAFADMMRKKIAMPAHLMYDGRDDNLFDNYSAVAQRIGVYTAKDYADILEFLVGRWKVADITGLSGEGRKAQEYVCGLPPRIRRLEERASARAKESSKLAFSWIHDREVLL

SEQ ID NO: 122667 - DNA, 1236 bp, Glycine max
  CDS (1)..(1236)
atggctctgagactgaaccctatccccacccaaaccttctccctcccccaaatggccagtctcagatctcccaggttccgcatggcctccaccctccgctccggttccaaagaggttgaaaatattaagaagccattcactcctcccagagaagtgcatgttcaagtaacccactctatgcctccccagaagattgagattttcaaatctttggaggattgggctgagcagaacatcttgactcatcttaaacctgttgaaaaatgttggcaaccacaagattttttaccggatccttcctctgatggatttgaagagcaagtgaaggaactgagagagagggcaaaggagcttccagatgattactttgttgttctggtcggagacatgatcacagaggaagccctgcctacttaccaaacaatgttaaatactttggatggagttcgtgatgaaacaggtgccagccttacttcctgggcaatttggacaagggcatggactgctgaagaaaacagacacggtgatcttcttaacaaatatctttacttgagtggtcgagttgacatgaaacaaattgaaaagacaattcagtaccttattgggtctggaatggatccccgagccgagaacagcccctaccttggtttcatttacacttcatttcaagagagggcaaccttcatatcccacggaaacacggccaggcttgcgaaggagcatggtgacataaaattggcacagatctgcggcatgattgcctcagatgagaagcgccacgagactgcatacacaaagatagtggaaaagctgtttgaggttgatcctgatggtacagttatggcatttgccgacatgatgaggaagaagattgctatgccagcacaccttatgtatgacggccgcgacgacaacctgtttgataactactctgccgtcgcgcagcgcattggggtctacactgcaaaggactatgctgacatactcgagtttctggtggggaggtggaaggtggagcagctaaccggactttcaggtgagggaagaaaggctcaggaatacgtttgtgggctgccaccaagaatcagaaggttggaggagagagctcaagcaagaggcaaggagtcgtcaacacttaaattcagttggattcatgacagggaaagtactactctaaatgcaccaagggaggagcatggtgaaatcttccggcaataccgttctgagaaatgttga

SEQ ID NO: 122668 - protein, 411 aa, Glycine max
MALRLNPIPTQTFSLPQMASLRSPRFRMASTLRSGSKEVENIKKPFTPPREVHVQVTHSMPPQKIEIFKSLEDWAEQNILTHLKPVEKCWQPQDFLPDPSSDGFEEQVKELRERAKELPDDYFVVLVGDMITEEALPTYQTMLNTLDGVRDETGASLTSWAIWTRAWTAEENRHGDLLNKYLYLSGRVDMKQIEKTIQYLIGSGMDPRAENSPYLGFIYTSFQERATFISHGNTARLAKEHGDIKLAQICGMIASDEKRHETAYTKIVEKLFEVDPDGTVMAFADMMRKKIAMPAHLMYDGRDDNLFDNYSAVAQRIGVYTAKDYADILEFLVGRWKVEQLTGLSGEGRKAQEYVCGLPPRIRRLEERAQARGKESSTLKFSWIHDRESTTLNAPREEHGEIFRQYRSEKC

SEQ ID NO: 122669 - DNA, 1236 bp, Glycine max
  CDS (1)..(1236)
atggctctgagactgaaccctatccccacccaaaccttctccctcccccaaatggccagtctcagatctcccaggttccgcatggcctccaccctccgctccggttccaaagaggttgaaaatattaagaagccattcactcctcccagagaagtgcatgttcaagtaacccactctatgcctccccagaagattgagattttcaaatctttggaggattgggctgagcagaacatcttgactcatcttaaacctgttgaaaaatgttggcaaccacaagattttttaccggatccttcctctgatggatttgaagagcaagtgaaggaactgagagagagggcaaaggagcttccagatgattactttgttgttctggtcggagacatgatcacagaggaagccctgcctacttaccaaacaatgttaaatactttggatggagttcgtgatgaaacaggtgccagccttacttcctgggcaatttggacaagggcatggactgctgaagaaaacagacacggtgatcttcttaacaaatatctttacttgagtggtcgagttgacatgaaacaaattgaaaagacaattcagtaccttattgggtctggaatggatcctcgaaccgagaacagcccctaccttggtttcatttacacttcatttcaagagagggcaaccttcatatcccacggaaacacagccaggcttgctaaggagcacggcgatataaagttggcccagatctgcggcatgattgcctcagatgggaaacgccatgagactgcatacacgaagatagtggaaaagctatttgaggtcgatcctgacggtacagttatggcgtttgccgacatgatgaggaagaagattgccatgccagcacacctcatgtatgacggccgtgatgacgacctgtttgatagctactcttcggtcgcgcagcgcattggggtctacaccgccaaggactatgctgacatacttgagtttctggtggggaggtggaaggtggagcagctaactggactttcaggcgagggaagaaaggctcaagaatacatttgcgggctgccgccaagaatcagaaggttggaggagagagctcaagcaagagtcaaggagtcgtcaacacttaaattcagttggattcatgacagggaaagtactactctaaatgcaccaagggaggagcatggtgaaatcttccggcaataccgttctgagaaatgttga

SEQ ID NO: 122670 - protein, 411 aa, Glycine max
MALRLNPIPTQTFSLPQMASLRSPRFRMASTLRSGSKEVENIKKPFTPPREVHVQVTHSMPPQKIEIFKSLEDWAEQNILTHLKPVEKCWQPQDFLPDPSSDGFEEQVKELRERAKELPDDYFVVLVGDMITEEALPTYQTMLNTLDGVRDETGASLTSWAIWTRAWTAEENRHGDLLNKYLYLSGRVDMKQIEKTIQYLIGSGMDPRTENSPYLGFIYTSFQERATFISHGNTARLAKEHGDIKLAQICGMIASDGKRHETAYTKIVEKLFEVDPDGTVMAFADMMRKKIAMPAHLMYDGRDDDLFDSYSSVAQRIGVYTAKDYADILEFLVGRWKVEQLTGLSGEGRKAQEYICGLPPRIRRLEERAQARVKESSTLKFSWIHDRESTTLNAPREEHGEIFRQYRSEKC

SEQ ID NO: 122671 - DNA, 1242 bp, Arabidopsis thaliana
  CDS (1)..(1242)
atgaagatggctcttctcttgagctcgacgataacggtggctatgaagcagaatccgctggtcgcggtatcttttccgcggactacttgcttgggatctagtttttctcctcctcgtcttcttcgagtttcgtgtgttgccacaaaccctagcaagacgagtgaagaaacagacaagaaaaagtttcgacccatcaaagaagtaccaaaccaagtgacccacacaataacacaagagaaactggagatcttcaaatcaatggagaattgggcccaagaaaacttattatcttacctcaaacccgtcgaagcttcctggcaaccacaagactttttgccggaaaccaacgacgaagaccgattctacgaacaagtaaaagagctaagagatcgaacaaaagagatccctgacgattactttgtagttcttgtcggagatatgatcaccgaagaagctttaccaacttatcaaactactttgaacactctcgacggcgtaaaagacgagaccggtggtagtctaacgtcgtgggcggtttgggttcgagcatggacggcggaggaaaatcgacacggtgatttgttgaataagtatctttacttatcaggtcgtgttgacatgcgacatgttgaaaagactattcaatatcttatcggatccggcatggactccaaatttgagaacaatccctataatggcttcatctatacttcttttcaagagagagccactttcatctcccatggcaacacggcgaagctagccacaacctacggcgacacaactctcgccaaaatctgcggaacaatcgcggcggatgagaagcggcatgagacggcgtatacacggatcgtcgagaagcttttcgagatcgatcccgatggtaccgtacaagctctagcgagtatgatgaggaagcgaatcacgatgccggctcatctgatgcacgacggtcgcgacgacgatctgttcgatcattacgctgcggtggcgcagagaatcggagtttataccgcgacggattacgcagggattttggagtttttgttgcggcggtgggaggtggagaagttagggatgggtttgtccggcgaaggaaggagagcacaggattatctgtgtaccttgccgcagaggatcaggaggttagaggaaagagctaacgatagagtcaaacttgcgtcaaagtcaaaaccttctgtttccttcagctggatttatgggagagaagttgaactataa

SEQ ID NO: 122672 - protein, 413 aa, Arabidopsis thaliana
MKMALLLSSTITVAMKQNPLVAVSFPRTTCLGSSFSPPRLLRVSCVATNPSKTSEETDKKKFRPIKEVPNQVTHTITQEKLEIFKSMENWAQENLLSYLKPVEASWQPQDFLPETNDEDRFYEQVKELRDRTKEIPDDYFVVLVGDMITEEALPTYQTTLNTLDGVKDETGGSLTSWAVWVRAWTAEENRHGDLLNKYLYLSGRVDMRHVEKTIQYLIGSGMDSKFENNPYNGFIYTSFQERATFISHGNTAKLATTYGDTTLAKICGTIAADEKRHETAYTRIVEKLFEIDPDGTVQALASMMRKRITMPAHLMHDGRDDDLFDHYAAVAQRIGVYTATDYAGILEFLLRRWEVEKLGMGLSGEGRRAQDYLCTLPQRIRRLEERANDRVKLASKSKPSVSFSWIYGREVEL

SEQ ID NO: 122673 - DNA, 1229 bp, Brassica napus
  CDS (15)..(1214)
caaaccttcaaaaaatggcattgaagtttaatcctttggtatctcagccatacaaactcgcttcctcggctcgtccgccagtctctactttcagatctcccaagttcctatgcctcgcttcttcctcttctcctgctctcagctccaaggaggtcgagagcttgaagaagccattcaccccaccaagggaagtccaccttcaagtcctgcactccatgccaccccaaaagatcgaaatcttcaaatccatggaagactgggccgagcagaaccttctacctcacctcaaagacgtggagaagacatggcagccccaggacttcttacccgaccctgcttccggcggtttcgaagatcaggtaaaagagttaagagaaagagcaagagagctcccagatgattacttcgttgtcttggttggagacatgatcacagaagaagcgcttcccacctaccaaacaatgttaaacactttggatggagtaagggatgagactggcgctagccccacttcatgggccgtttggactagagcttggaccgctgaagagaatcgccacggtgatcttctcaataagtatctttacttgtctggtcgtgttgacatgaggcagattgaaaagactattcagtacctgattggttccggaatggatccacgcacagagaacaacccttaccttggcttcatccacacttcattccaagagagagccaccttcgtctctcacggcaacacagctcgccaagccaaagagcacggagacctcaagctagcgcaaatctgcgggacaatagctgcagacgagaagcgtcacgagacagcttacaccaagatagttgagaagcttctcgagattgatcctgacggcactgtggtggcctttgcggatatgatgaggaagaaaatttcgatgcctgctcacttgatgtacgatgggcgtgatgataacctctttgacaacttctcctccgtggctcagaggctcggtgtttacactgccaaagactatgcggacattcttgagtttttggtcgggaggtggaggatcgagagcttgactgggctttcgggtgaagggaacaaagcgcaagagtatttgtgtgggttgactccgagaatcaggaggttggatgagagagctcaagcaagagccaagaaaggacctaagattccttttagctggatacatgacagagaagtgcagctctgaacacaaaggacaaaa

SEQ ID NO: 122674 - protein, 399 aa, Brassica napus
MALKFNPLVSQPYKLASSARPPVSTFRSPKFLCLASSSSPALSSKEVESLKKPFTPPREVHLQVLHSMPPQKIEIFKSMEDWAEQNLLPHLKDVEKTWQPQDFLPDPASGGFEDQVKELRERARELPDDYFVVLVGDMITEEALPTYQTMLNTLDGVRDETGASPTSWAVWTRAWTAEENRHGDLLNKYLYLSGRVDMRQIEKTIQYLIGSGMDPRTENNPYLGFIHTSFQERATFVSHGNTARQAKEHGDLKLAQICGTIAADEKRHETAYTKIVEKLLEIDPDGTVVAFADMMRKKISMPAHLMYDGRDDNLFDNFSSVAQRLGVYTAKDYADILEFLVGRWRIESLTGLSGEGNKAQEYLCGLTPRIRRLDERAQARAKKGPKIPFSWIHDREVQL

SEQ ID NO: 122675 - DNA, 1236 bp, Arabidopsis thaliana
  CDS (1)..(1236)
atggctcttctcttgaactcgacgataacggtggctatgaagcagaatccgctggtcgcggtatcttttccgcggactacttgcttgggatctagtttttctcctcctcgtcttcttcgagtttcgtgtgttgccacaaaccctagcaagacgagtgaagaaacagacaagaaaaagtttcgacccatcaaagaagtaccaaaccaagtgacccacacaataacacaagagaaactggagatcttcaaatcaatggagaattgggcccaagaaaacttattatcttacctcaaacccgtcgaagcttcctggcaaccacaagactttttgccggaaaccaacgacgaagaccgattctacgaacaagtaaaagagctaagagatcgaacaaaagagatccctgacgattactttgtagttcttgtcggagatatgatcaccgaagaagctttaccaacttatcaaactactttgaacactctcgacggcgtaaaagacgagaccggtggtagtctaacgtcgtgggcggtttgggttcgagcatggacggcggaggaaaatcgacacggtgatttgttgaataagtatctttacttatcaggtcgtgttgacatgcgacatgttgaaaagactattcaatatcttatcggattcggcatggactccaaatttgagaacaatccctataatggcttcatctatacttcttttcaagagagagccactttcatctcccatggcaacacggcgaagctagccacaacctacggcgacacaactctcgccaaaatctgcggaacaatcgcggcggatgagaagcggcatgagacggcgtatacacggatcgtcgagaagcttttcgagatcgatcccgatggtaccgtacaagctctagcgagtatgatgaggaagcgaatcacgatgccggctcatctgatgcacgacggtcgcgacgacgatctgttcgatcattacgctgcggtggcgcagagaatcggagtttataccgcgacggattacgcagggattttggagtttttgttgcggcggtgggaggtggagaagttagggatgggcttgtccggcgaaggaaggagagcacaggattatctgtgtaccttgccgcagaggatcaggaggttagaggaaagagctaacgatagagtcaaacttgcgtcaaagtcaaaaccttctgtttccttcagctggatttatgggagagaagttgaactataa

SEQ ID NO: 122676 - protein, 411 aa, Arabidopsis thaliana
MALLLNSTITVAMKQNPLVAVSFPRTTCLGSSFSPPRLLRVSCVATNPSKTSEETDKKKFRPIKEVPNQVTHTITQEKLEIFKSMENWAQENLLSYLKPVEASWQPQDFLPETNDEDRFYEQVKELRDRTKEIPDDYFVVLVGDMITEEALPTYQTTLNTLDGVKDETGGSLTSWAVWVRAWTAEENRHGDLLNKYLYLSGRVDMRHVEKTIQYLIGFGMDSKFENNPYNGFIYTSFQERATFISHGNTAKLATTYGDTTLAKICGTIAADEKRHETAYTRIVEKLFEIDPDGTVQALASMMRKRITMPAHLMHDGRDDDLFDHYAAVAQRIGVYTATDYAGILEFLLRRWEVEKLGMGLSGEGRRAQDYLCTLPQRIRRLEERANDRVKLASKSKPSVSFSWIYGREVEL

SEQ ID NO: 122677 - DNA, 1369 bp, Carica papaya
  CDS (78)..(1235)
gcacgagtgaatccccccactaccacccaccacagtcagcaaacaatgcatgcctcctattacttgtccaacgccacatgtccttcctggacccatatccctccaccctcaccccccgccgctcgccatcgtcatccaccgtcagattccggaattcacagctctcgatctccgcagtcgctgcctcaccactgtcactgaaacaacagacaacccactccatgccgcctgagaagatggcagtcttcgagtcactcgaggactgggccacccatcacgtgctgccgctcctcaaacccgtcgaacagtgctggcaacccgcctcgtttttgcccgatccgacacaaaacaaagccgatttccacgatcaggtgcgcgctcttcgcgaacgcacggctcagctgccggacgactactttgtggtgttggtgggggatatgattacggaagatgatttacccacgtatcagaccataataaacacactggacggggttaggacgagactggggcgaagccctacccctgggcaatgtggactcgggcctggaccgcggaagaagaaccgccacggtgacttgttgaggacctatctctatctatcgggtcgggtggacatgctgatgatagagaggacaattcagtatctgattggagctggaatggagcccaggaaacagaggaacaacccggatctgggttcggttaaccgtcatttccaaaacgaaccgacgtttgatcccatggcaaccggctcgttggcaaagcaagccggggatcctgtgctggccgcgcatattcggggcccatctgcatcatacgaaacgacccgagaacgctatccgctaagaatcgtagaggagctactcgaagttgatccgacggggccaatgatggcaatttccagcatgatggagaagaagattacgatgccagcccacctgatgtacgacggaaaggaaccgcggctgtttgagcacttctcggcggtggcgcaaaggctgggggtatacgcggcggatgattacgcggacatattggagttcctggtgggacggtggggattggagaagctggagggattgacgggggaagggagacgtgctcgggacttcgtatgtgggttagcgccgaggatcaggaagctgcaggagcgagccgacgagagggctaagaagatggagccacattatgccaagttcagctggatcttcaacaaggaggttcttttgtgattcagtaacttacaaataaacaaacgactctctgtgaaaagttttagtttttttttttttttcttaatcactaatctggtctgttttgagtaagaaatattttaggttattttacaaaaaaaaaaaaaaaaaaa

SEQ ID NO: 122678 - protein, 385 aa, Carica papaya
MSFLDPYPSTLTPRRSPSSSTVRFRNSQLSISAVAASPLSLKQQTTHSMPPEKMAVFESLEDWATHHVLPLLKPVEQCWQPASFLPDPTQNKADFHDQVRALRERTAQLPDDYFVVLVGDMITEDDLPTYQTIINTLDGVRTRLGRSPTPGQCGLGPGPRKKNRHGDLLRTYLYLSGRVDMLMIERTIQYLIGAGMEPRKQRNNPDLGSVNRHFQNEPTFDPMATGSLAKQAGDPVLAAHIRGPSASYETTRERYPLRIVEELLEVDPTGPMMAISSMMEKKITMPAHLMYDGKEPRLFEHFSAVAQRLGVYAADDYADILEFLVGRWGLEKLEGLTGEGRRARDFVCGLAPRIRKLQERADERAKKMEPHYAKFSWIFNKEVLL

SEQ ID NO: 122679 - DNA, 1242 bp, Oryza sativa subsp
  CDS (1)..(1242)
atggcgatgcctttagctaataggcttcgttgcaaaccaaacaccaactcttcttcaccatcaagaacactatttggtagacgagtcaccatgatcagtagcagccgctggggtagtgctgtcagtggcagcgcgatcatgtcggcggcggccgacgtcgccgccgccgtgcggcgggaggaagacgaggagatgaggagctacctgtcgccggagaagctagaggtgctgacgcagatggagccgtgggtggaggagcacgtgctgccgctgctgaagccggtggaggcggcgtggcagccgtcggacctgctcccggacccggcggtgctcggcggcgaggggttccacgcggcgtgcgccgagctgcgggagcgcgccgccggcgtgccggacctgctcctggtgtgcctcgtggcgaacatggtgacggaggaggcgctgcccacgtaccagagctcgctgaaccgcgtccgcgccgtcggcgacctcaccggcgccgacgccacggcgtgggcgcggtggatccgcgggtggtccgccgaggagaaccgccacggcgacgtgctcaaccggtacatgtacctctccggccgcttcgacatggccgaggtggagcgcgccgtgcaccgcctcatccgctccggcatggccgtcgacccgccgtgcagcccgtaccacgccttcgtctacacggcgttccaggagcgcgccacggcggtcgcccacggcaacacggcgcggctggtcggcgcgcgagggcacggcgacgccgccctcgcccgcgtctgcggcaccgtcgccgccgacgagaagcggcacgaggccgcctacacccgcatcgtctccaggctcctcgaggccgacccggacgccggcgtgcgcgcggtggcgcgcatgctacggcgaggggtcgccatgccgacctcgcccatctccgacggccgccgcgacgacctctacgcctgcgtcgtgtccctcgccgagcaggccgggacgtacacggtgtcggactactgctccatcgtcgagcacctggtgcgggagtggcgcgtggaggagctcgcggcggggctctccggcgaagggcggcgcgcgcgggactacgtgtgcgagctgccgcagaagatccggaggatgaaggagaaggcccatgagagggcggtcaaggcccagaagaagcccatcagcatcccgattaattggatatttgataggcacgtcagtgtcatgctgccctaa

SEQ ID NO: 122680 - protein, 413 aa, Oryza sativa subsp
MAMPLANRLRCKPNTNSSSPSRTLFGRRVTMISSSRWGSAVSGSAIMSAAADVAAAVRREEDEEMRSYLSPEKLEVLTQMEPWVEEHVLPLLKPVEAAWQPSDLLPDPAVLGGEGFHAACAELRERAAGVPDLLLVCLVANMVTEEALPTYQSSLNRVRAVGDLTGADATAWARWIRGWSAEENRHGDVLNRYMYLSGRFDMAEVERAVHRLIRSGMAVDPPCSPYHAFVYTAFQERATAVAHGNTARLVGARGHGDAALARVCGTVAADEKRHEAAYTRIVSRLLEADPDAGVRAVARMLRRGVAMPTSPISDGRRDDLYACVVSLAEQAGTYTVSDYCSIVEHLVREWRVEELAAGLSGEGRRARDYVCELPQKIRRMKEKAHERAVKAQKKPISIPINWIFDRHVSVMLP

SEQ ID NO: 122681 - DNA, 1176 bp, Arabidopsis thaliana
  CDS (1)..(1176)
atgcttgcgcacaagtctcttctctcctttaccacccaatgggctacactaatgccatctccgtctacttttctcgcctctcgcccccgtggaccggccaagatctcggccgtggcagcaccagtgaggccggctctaaaacaccaaaacaaaatccacaccatgccaccggagaaaatggagatattcaaatctttagatggatgggccaaggatcaaatcttgcctcttctcaaacccgttgaccaatgttggcaacccgcttctttcttacccgacccggccttacccttctccgagtttaccgaccaggttcgtgagctgagggaaagaacggcctcgctgccagacgaatacttcgtggtgttggttggagatatgataacggaggacgcgttgcctacttaccagacgatgatcaacacccttgatggcgtaagggacgagactggtgcgagtgagagcgcgtgggcaagttggacacgagcgtggacggctgaggagaaccgtcatggtgatttgttgcggacttacttgtacttatccggtcgtgttgatatgcttatggttgaacgcaccgttcagcatctcatcggctcgggcatggatccaggaactgagaacaatccatacttaggtttcgtgtacacgtcattccaagagcgagccacatttgtgtctcgcggcaacacggcaaggctagccaagtccgcaggagatcctgtcctcgctcgcatctgcggaaccattgcagctgacgagaagcgccatgaaaacgcttacgtacgcatcgttgagaagctcctcgagatcgaccctaacggtgcagtctcagccgtggccgacatgatgcggaagaagatcacaatgccggctcatctaatgacagacggtcgagacccgatgctattcgaacatttctccgccgtggctcagcggctagaggtttacacggcggatgattacgctgacatcttggagtttttggttggacggtggagattggagaagctagaaggattgacgggtgagggccaacgtgcacaggagtttgtgtgtgggttagctcagaggattagacgccttcaagagcgtgcagacgagagagctaagaagcttaagaagacccatgaggtttgctttagttggatcttcgataagcagattagtgtgtaa

SEQ ID NO: 122682 - protein, 391 aa, Arabidopsis thaliana
MLAHKSLLSFTTQWATLMPSPSTFLASRPRGPAKISAVAAPVRPALKHQNKIHTMPPEKMEIFKSLDGWAKDQILPLLKPVDQCWQPASFLPDPALPFSEFTDQVRELRERTASLPDEYFVVLVGDMITEDALPTYQTMINTLDGVRDETGASESAWASWTRAWTAEENRHGDLLRTYLYLSGRVDMLMVERTVQHLIGSGMDPGTENNPYLGFVYTSFQERATFVSRGNTARLAKSAGDPVLARICGTIAADEKRHENAYVRIVEKLLEIDPNGAVSAVADMMRKKITMPAHLMTDGRDPMLFEHFSAVAQRLEVYTADDYADILEFLVGRWRLEKLEGLTGEGQRAQEFVCGLAQRIRRLQERADERAKKLKKTHEVCFSWIFDKQISV

SEQ ID NO: 122683 - DNA, 1464 bp, Tropaeolum majus
  CDS (39)..(1214)
acgggggaaactcaaacactgctctaataaaaaccaaaatgtctctcaagcttaatcctttcctctttcaatctcaacatcttccatcaatgaccaccttcagatctcccaagttcatcatggcctctacccttagctctggctccaagtcagttgaaaatctcaagaagccatttgcaccacctaaggaggtacatgttcaagtaacccactctctaccacctcaaaagattgagatcttcaaatctttggaagattgggctctagacaacattctggttcacctaaagccggttgagaagtgttggcaacctcaggactttctgccagacccttcttctgatgggttcgaagagcaagtcagggagataagggagagagcgaaagagattccggacgactactacgttacattggttggagatatgatcactgaagaagctcttccaacttatcaaacaatgctcaacaccttagatggtgtccgagatgaaaccggtgcaagccctacttcctgggctgtttggacaagagcatggactgctgaagagaacaggcatggtgaccttcttaacaagtacctttatctcagtggaagagtagacatgaggcagattgaaaagaccatccaatatcttattgggtctggaatggatcccgggacggaaaacaacccctaccttggttttatctacacttcgtttcaagagagagcgaccttcatctcccacggcaacaccgcacgtcatgctaaagatcacggcgacctgaagctggctcaaatctgcggcataattgcagctgacgagaagcgccacgagacagcttacagcaagatcgtggagaagctctttgagatcgatcctgacggaaccgtcatgtgttttgccgacatgatgaagaggaaaatatctatgccagcccacttgatgtatgatggtcgcgacgacaacctttttgagcacttctctgccgtcgcgcagcggcttggggtgtacactgccaaagactacgcagacatacttgagttcttagtgggcagatggaaagttggtgatctaactggactttccggcgacggacggaaagcgcaagactttgtttgtgggttagctccgaggattaaaaagctagaggaaagagctcaagcaagggctaaacaaggaccgcggattccgttcagttgggtttatgatcgggaagtgcagctctaatgttgtgtacaaaacgtagattggcccaacagtgtttaatgctatacctgagttactattctccgatgagcttgaaatccgccgggtaaagttagcctattgcagtttctttttccgatccattcagaataatctggattggttgatgtgcaatacaatttgtgtttcttttgttggtttgattaggtgatatatgttgttaggttcggtttgtaattttgatgttgtgtttgtgataaaaaaaaaaaaa

SEQ ID NO: 122684 - protein, 391 aa, Tropaeolum majus
MSLKLNPFLFQSQHLPSMTTFRSPKFIMASTLSSGSKSVENLKKPFAPPKEVHVQVTHSLPPQKIEIFKSLEDWALDNILVHLKPVEKCWQPQDFLPDPSSDGFEEQVREIRERAKEIPDDYYVTLVGDMITEEALPTYQTMLNTLDGVRDETGASPTSWAVWTRAWTAEENRHGDLLNKYLYLSGRVDMRQIEKTIQYLIGSGMDPGTENNPYLGFIYTSFQERATFISHGNTARHAKDHGDLKLAQICGIIAADEKRHETAYSKIVEKLFEIDPDGTVMCFADMMKRKISMPAHLMYDGRDDNLFEHFSAVAQRLGVYTAKDYADILEFLVGRWKVGDLTGLSGDGRKAQDFVCGLAPRIKKLEERAQARAKQGPRIPFSWVYDREVQL

SEQ ID NO: 122685 - DNA, 1279 bp, Arabidopsis thaliana
  CDS (1)..(1191)
atggcgatggctatggatcggatcgtcttctccccttcatcttacgtctatcgtccttgtcaagctaggggatccagatcttccagagtttccatggcttctacgattcgctctgcgactacagaggttacgaatggaaggaaactgtatatccctcccagagaggtgcatgtccaagtcaaacattcaatgccgccacaaaagttagatatctttaagtctttagaaggatgggctgatgaaaccctgttgacttatttaaaacctgttgagaaatcgtggcagcctaccgattttcttcccgaacctgagtcggaaggattctatgaccaagtcaaggagctaagggaaaggtgcaaggaacttcctgatgactattttgtggtgcttgttggggatatgatcactgaagaagcacttcctacttaccagaccatgttgaacacattggatggtgttagggatgagacaggagctagtcctactccttgggctatatggaccagggcttggactgctgaggagaatagacatggggatctccttaacaagtatctttatctgtctggtcgggtagacatgaggcagattgaaaagactattcagtacctgattggttctggaatggatccaaaaactgaaaacaacccttacttgggtttcatctacacatcatttcaagaaagagcgaccttcatctcccatggaaacactgccagactggcgaaagatcgtggagatttgaaacttgcgcagatatgcgggaccattgctgctgatgagaggcgtcatgagactgcttacaccaagattgtagagaagctctttgaaattgaccctgatggcacgatcttgggcctggctgatatgatgaagaaaaagatatcaatgcctgcacatttaatgtatgatggccaagatgataacctgtttgagcacttctcaaccgttgcccagaggctcggtgtctacactgccaaggactatgctgatattctggagtttcttgttgaacggtggaatgtggagactttgacagacctttctagtgaaggacacagggcccaggactttgtctgcggactacctgcaagaatccgtaaaattgaagagagagctcaaggaagagccaaagaagctgccaaaaacataccattcagctggatatttggtcgaaatatcagggcttaagaagtttactacacaattctctttccaattatcccaagtaagtcataaaggtcttcaccaaccatttcaccaatgaaggaccagtttt

SEQ ID NO: 122686 - protein, 396 aa, Arabidopsis thaliana
MAMAMDRIVFSPSSYVYRPCQARGSRSSRVSMASTIRSATTEVTNGRKLYIPPREVHVQVKHSMPPQKLDIFKSLEGWADETLLTYLKPVEKSWQPTDFLPEPESEGFYDQVKELRERCKELPDDYFVVLVGDMITEEALPTYQTMLNTLDGVRDETGASPTPWAIWTRAWTAEENRHGDLLNKYLYLSGRVDMRQIEKTIQYLIGSGMDPKTENNPYLGFIYTSFQERATFISHGNTARLAKDRGDLKLAQICGTIAADERRHETAYTKIVEKLFEIDPDGTILGLADMMKKKISMPAHLMYDGQDDNLFEHFSTVAQRLGVYTAKDYADILEFLVERWNVETLTDLSSEGHRAQDFVCGLPARIRKIEERAQGRAKEAAKNIPFSWIFGRNIRA

SEQ ID NO: 122687 - DNA, 1188 bp, Arabidopsis thaliana
  CDS (1)..(1188)
  misc_feature (954)..(954): r is g or a
atggttatggctatggatcggatcgctttgttctcttcctcatcatcatctgtttatcgtcatcgttcgtctcattctcatggctccaaatcttccagagttttcactattcgttccgactctacagcggttggaaggaaactgtatattcctcctcgagaggttcatcttcaagtgaagtattcaatgccaccacaaaagctggagattttcaagtccttagaaggatgggctaatgagaacttgttggcttacttaaaacctgttgagaaatcatggcaaccaactgattttctccctgaacctgagtcagaaggattctatgaccaagttaaggagttaagagaaaggtgtaaggagctctctgatgactaccttatagtgcttgttggtgatatgatcacagaggaagcacttccgacttatcagaccatgattaatacattggacggggttagagatgagacgggagcaagtccaactccttgggccgtatggactagggcatggactgcggaagagaatagacatggtgatcttcttaacaagtacctttatctgtctggacgagtagacatgagacagattgaaaaaactattcaatacctcattggttctggaatggatccaaaaactgaaaacaacccttacttgggattcatatatacttcttttcaagaaagagctacattcatctcccatggaaacactgctagactggcaaaggatcttggagacttgacacttgggaagatttgtggcaccattgctgctgatgagaggcgtcatgaacacgcctacaccaagattgtagagaagctctttgaaattgatcctgataccacagtcgtgggatttgctgacatgatgaggaaaaagatctcgatgcctgctcatttgatgtatgatggtcgtgatgataatctatttgatcacttctcgtccgtggcccaraggcttggtgtctacactgccaaggactatgctgatatactgcaacatcttgtggaaaggtggaatgtggagaagttgtcagacctttctagtgaagggaacagggcccaggactacctctgtggattacctgctagaatccgcaaacttgaagagagggctcaagggagaaccaaagaagcagcaaaaaacataccattcagctggatttttggtcgagaagtcagggcttaa

SEQ ID NO: 122688 - protein, 395 aa, Arabidopsis thaliana
MVMAMDRIALFSSSSSSVYRHRSSHSHGSKSSRVFTIRSDSTAVGRKLYIPPREVHLQVKYSMPPQKLEIFKSLEGWANENLLAYLKPVEKSWQPTDFLPEPESEGFYDQVKELRERCKELSDDYLIVLVGDMITEEALPTYQTMINTLDGVRDETGASPTPWAVWTRAWTAEENRHGDLLNKYLYLSGRVDMRQIEKTIQYLIGSGMDPKTENNPYLGFIYTSFQERATFISHGNTARLAKDLGDLTLGKICGTIAADERRHEHAYTKIVEKLFEIDPDTTVVGFADMMRKKISMPAHLMYDGRDDNLFDHFSSVAQRLGVYTAKDYADILQHLVERWNVEKLSDLSSEGNRAQDYLCGLPARIRKLEERAQGRTKEAAKNIPFSWIFGREVRA

SEQ ID NO: 122689 - DNA, 1191 bp, Arabidopsis thaliana
  CDS (1)..(1191)
atggcgatggctatggatcggatcgtcttctccccttcatcttacgtctatcttccttgtcaagctaggggatccagatcttccagagtttccatggcttctacgattcgctctgcgactacagaggttacgaatggaaggaaactgtatatccctcccagagaggtgcatgtccaagtcaaacattcaatgccgccacaaaagttagagatctttaagtctttagaaggatgggctgatgaaaccctgttgacttatttaaaacctgttgagaaatcgtggcagcctaccgattttcttcccgaacctgagtcggaaggattctatgaccaagtcaaggagctaagggaaaggtgcaaggaacttcctgatgactattttgtggtgcttgttggggatatgatcactgaagaagcacttcctacttaccagaccatgttgaacacattggatggtgttagggatgagacaggagctagtcctactccttgggctatatggaccagggcttggactgctgaggagaatagacatggggatctccttaacaagtatctttatctgtctggtcgggtagacatgaggcagattgaaaagactattcagtacctgattggttctggaatggatccaaaaactgaaaacaacccttacttgggtttcatctacacatcatttcaagaaagagcgaccttcatctcccatggaaacactgccagactggcgaaagatcgtggagatttgaaacttgcgcagatatgcgggaccattgctgctgatgagaggcgtcatgagactgcttacaccaagattgtagagaagctctttgaaattgaccctgatggcacgatcttgggcctggctgatatgatgaagaaaaagatatcaatgcctgcacatttaatgtatgatggccaagatgataacctgtttgagcacttctcaaccgttgcccagaggctcggtgtctacactgccaaggactatgctgatattctggagtttcttgttgaacggtggaatgtggagactttgacagacctttctagtgaaggacacagggcccaggactttgtctgcggactacctgcaagaatccgtaaaattgaagagagagctcaaggaagagccaaagaagctgccaaaaacataccattcagctggatatttggtcgaaatatcagggcttaa

SEQ ID NO: 122690 - protein, 396 aa, Arabidopsis thaliana
MAMAMDRIVFSPSSYVYLPCQARGSRSSRVSMASTIRSATTEVTNGRKLYIPPREVHVQVKHSMPPQKLEIFKSLEGWADETLLTYLKPVEKSWQPTDFLPEPESEGFYDQVKELRERCKELPDDYFVVLVGDMITEEALPTYQTMLNTLDGVRDETGASPTPWAIWTRAWTAEENRHGDLLNKYLYLSGRVDMRQIEKTIQYLIGSGMDPKTENNPYLGFIYTSFQERATFISHGNTARLAKDRGDLKLAQICGTIAADERRHETAYTKIVEKLFEIDPDGTILGLADMMKKKISMPAHLMYDGQDDNLFEHFSTVAQRLGVYTAKDYADILEFLVERWNVETLTDLSSEGHRAQDFVCGLPARIRKIEERAQGRAKEAAKNIPFSWIFGRNIRA

SEQ ID NO: 122691 - DNA, 1176 bp, Arabidopsis thaliana
  CDS (1)..(1176)
atgcttacgcacaagtctcttctctcccccaccacccaatgggctacactaatgccatctccgtctacttttctcgcctctcgcccccgtggaccggccaagatatcggccgtggcagcacctgtgaggccggctctaaaacaccaaaacaaaatccacaccatgccaccggagaaaatggagatattcaaatctttagatggatgggccacggatcaaatcttgcctcttctcaaacccgttgaccaatgttggcaacccgcttctttcttacccgacccggccttacccttctccgagtttaccgaccaggttcgtgagctgagggaaagaatggcctcactgccagacgaatacttcgtggtgttggttggagatatgataacggaggacgcgttgcctacttaccagacgatgatcaacacccttgacggcgtaagggacgagactggtgcgagtgagagcgcgtgggcaagttggacaagagcgtggacggctgaagagaatcgtcatggtgatttgttgcggacttacttgtacttatccggtcgtgttgatatgcttatggttgaacgcaccgttcagcatctcatcggctcgggcatggatccaggaactgagaacaatccatacttaggtttcgtgtacacgtcattccaagagcgagccacatttgtgtctcacggcaacacggcacggctagccaagtccgcaggagatcctgtcctcgctcgaatctgcggcaccattgcagctgacgagaagcgccatgaaaacgcttacgtacgcatcgttgagaagctcctcgagatcgaccctaacggtgcagtctcagccgtggccgacatgatgcggaagaagatcacaatgccggctcatctaatgacagacggtcgagacccgatgctattcgaacatttctccgccgtggctcagcggctagaggtttacacggcggatgattacgctgacatcttggagtttttggttggacggtggagattggagaagctagaaggattgacgggtgagggccaacgtgcacaggagtttgtgtgtgggttagctcagaggattagacgccttcaagagcgtgcagacgagagagctaagaagcttaagaagacccatgaggtttgctttagttggatcttcgataagcagattagtgtgtaa

SEQ ID NO: 122692 - protein, 391 aa, Arabidopsis thaliana
MLTHKSLLSPTTQWATLMPSPSTFLASRPRGPAKISAVAAPVRPALKHQNKIHTMPPEKMEIFKSLDGWATDQILPLLKPVDQCWQPASFLPDPALPFSEFTDQVRELRERMASLPDEYFVVLVGDMITEDALPTYQTMINTLDGVRDETGASESAWASWTRAWTAEENRHGDLLRTYLYLSGRVDMLMVERTVQHLIGSGMDPGTENNPYLGFVYTSFQERATFVSHGNTARLAKSAGDPVLARICGTIAADEKRHENAYVRIVEKLLEIDPNGAVSAVADMMRKKITMPAHLMTDGRDPMLFEHFSAVAQRLEVYTADDYADILEFLVGRWRLEKLEGLTGEGQRAQEFVCGLAQRIRRLQERADERAKKLKKTHEVCFSWIFDKQISV

SEQ ID NO: 122693 - DNA, 1339 bp, Argania spinosa
  CDS (5)..(1177)
agcaatggcactgaaactttgctttccaccccacaagatgccttccttccccgatgctcgtatcagatctcacacggttttcatggcttcaactattcgttctccttctatggaggtcggaaaagttaaaaagcctttcacgcctccaccagaggtacatgttcaagtaacccattccttagcaccagaaaagcgcgagatttttaattctctgaacaattgggcccaagagaatatcttggtgctcctaaaggatgtcgataaatgctggcaaccaagtgactttctacccgactcagcttctgaaggctttgacgagcaggtcatggagctacgtacaagatgcaaggaaattcctgatgattatttcattctcttggttggagatatgattacaggggaagcacttcccacttaccagacgatgcttaacaccctagatggagttcgagacgagacgggtgctagccttactccttgggctatttggactagagcatggactgctgaagagaataggcatggtgaccttctgaacaaatatctttatctttctggacgggttgacatgaagcaaattgaaaagacaattcaatacctaatcggttccgggatggatcctcgtacggaaaacaatccctacctgggatttatctacacttcattccaggcgagggcaaccttcatttctcatggaaacacggctaggcttgccaaggaacacggggacctgaaattggctcagatatgcggtatcattgctgcagatgagaagcgccatgaaactgcgtataccaaaattgttgaaaagctattcgagattgaccctgatggcactgtgttggcacttgccgacatgatgaggaagaaagtctctatgccagctcatctgatgtacgatgcccaggacgataatctctttgagaacttctcttctgtagcacagcggctagggctctatactgccaaggactatgccgatattttggaatttttggtcggaaggtgggatattgagaagttgacaggtctttctggagaggggcgtaaagcacaagattacgtgtgcactttgcctcctagaatccgaaggttggaggagcgagcacaatcaagggtcaagaacgcatcggccacccccttcagctggattttcggtcgagaaatcaatctatgaacgctgcactggacgtagggactcttctagcagcctttgataagcaaatatataaggtcggtctgtcgccatctggtctgtatcaagaaatgtgttaaaaataaacataaaattgttccagaggtataactctcgttccgttatttgtttagttttcatcag

SEQ ID NO: 122694 - protein, 390 aa, Argania spinosa
MALKLCFPPHKMPSFPDARIRSHTVFMASTIRSPSMEVGKVKKPFTPPPEVHVQVTHSLAPEKREIFNSLNNWAQENILVLLKDVDKCWQPSDFLPDSASEGFDEQVMELRTRCKEIPDDYFILLVGDMITGEALPTYQTMLNTLDGVRDETGASLTPWAIWTRAWTAEENRHGDLLNKYLYLSGRVDMKQIEKTIQYLIGSGMDPRTENNPYLGFIYTSFQARATFISHGNTARLAKEHGDLKLAQICGIIAADEKRHETAYTKIVEKLFEIDPDGTVLALADMMRKKVSMPAHLMYDAQDDNLFENFSSVAQRLGLYTAKDYADILEFLVGRWDIEKLTGLSGEGRKAQDYVCTLPPRIRRLEERAQSRVKNASATPFSWIFGREINL

SEQ ID NO: 122695 - DNA, 1191 bp, Helianthus annuus
  CDS (1)..(1191)
  misc_feature (7)..(7): n is a, g, c or t
  misc_feature (12)..(12): n is a, g, c or t
  misc_feature (768)..(768): y is t or c
  misc_feature (843)..(843): n is a, g, c or t
  misc_feature (858)..(858): n is a, g, c or t
  misc_feature (921)..(921): n is a, g, c or t
  misc_feature (933)..(933): n is a, g, c or t
  misc_feature (945)..(945): n is a, g, c or t
  misc_feature (1009)..(1009): n is a, g, c or t
  misc_feature (1167)..(1167): n is a, g, c or t
atggcgnttcgnatcaatccggcgacgtttcaatcagacatgtatcgttcattcgcgtttcctcaaccgaaacctctcagatctcccaaattcgccatggcttccaccattggatccgctacaacgaaggttgaaagcaccaaaaagccctttacccctccaagggaggttcaccaacaggtgctacactcaatgccgccacaaaagatcgaaatcttcaaatccatggagggttgggccgaagataacatattggttcacctaaagcccgtcgaaaaatgctggcaagcacaggatttcctaccagatcccgcatctgacggatttatggaacaagtggaggaactacgagctcgggctaaggagattccggatgattactttgttgttttggtgggagatatgattactgaagaagcactgcctacttaccaaacaatgcttaatactcttgatggtgtgcgtgatgagaccggggctagccctacttcttgggctatctggactcgggcttggaccgctgaagaaaacaggcacggtgatcttctacatcagtatctgtatcttagtgggcgggtcgacatgaggcagattcagaagacaattcagtacctcattgggtctggaatggacccccggactgaaaacagtccttaccttgggttcatctacacttcatttcaagagcgtgccaccttcatctctcacggaaacacagcccggcacgcaaaggagcatggtgacgtgaagctggctcaaatgtgcggyataattgcagctgatgaaaaaaggcacgaaaccgcctacactaaaatagtagaaaaactcttcgaaattgacccngacggcactgttctngcttttgctgacatgatgaggaaaaagatctccatgcctgcacacttgatgtacgatgggcgngacgataacctnttcgaaaatttntcagctgttgcccaaaggctcggtgtgtacactgcaaaggactatgcagacattctggagtttntggtgggccggtggaaggtggcggatttaaccgggctttctggtgaagggcgtaaagcccaagactatgtgtgcgggctggccccaagaatcaaaaggcttgaggagaggaactcggcaagggcgaaagaaagagtgaacgttccgttcagctggatnttagatagagaagtgaagctctga

SEQ ID NO: 122696 - protein, 396 aa, Helianthus annuus
  misc_feature (3)..(3): The Xaa at location 3 stands for Ile, Leu, Phe, or Val.
  misc_feature (315)..(315): The Xaa at location 315 stands for Leu, or Phe.
  misc_feature (337)..(337): The Xaa at location 337 stands for Leu, Met, or Val.
  misc_feature (389)..(389): The Xaa at location 389 stands for Ile, or Met.
MAXRINPATFQSDMYRSFAFPQPKPLRSPKFAMASTIGSATTKVESTKKPFTPPREVHQQVLHSMPPQKIEIFKSMEGWAEDNILVHLKPVEKCWQAQDFLPDPASDGFMEQVEELRARAKEIPDDYFVVLVGDMITEEALPTYQTMLNTLDGVRDETGASPTSWAIWTRAWTAEENRHGDLLHQYLYLSGRVDMRQIQKTIQYLIGSGMDPRTENSPYLGFIYTSFQERATFISHGNTARHAKEHGDVKLAQMCGIIAADEKRHETAYTKIVEKLFEIDPDGTVLAFADMMRKKISMPAHLMYDGRDDNLFENXSAVAQRLGVYTAKDYADILEFXVGRWKVADLTGLSGEGRKAQDYVCGLAPRIKRLEERNSARAKERVNVPFSWXLDREVKL

SEQ ID NO: 122697 - DNA, 1191 bp, Helianthus annuus
  CDS (1)..(1191)
  misc_feature (7)..(7): n is a, g, c or t
  misc_feature (17)..(17): n is a, g, c or t
  misc_feature (19)..(19): n is a, g, c or t
  misc_feature (921)..(921): n is a, g, c or t
  misc_feature (933)..(933): n is a, g, c or t
  misc_feature (945)..(945): n is a, g, c or t
  misc_feature (1103)..(1103): n is a, g, c or t
  misc_feature (1125)..(1125): n is a, g, c or t
  misc_feature (1167)..(1167): n is a, g, c or t
atggcgnttcgcatcantncggcgacgtttcaatcagacctgtatcgttcattcgcgtttcctcaaccgaaacctctcagatctcccaaattcgccatggcttccaccattggatccgctacaacgaaggttgaaagcaccaaaaagccctttacccctccaagggaggttcaccaacaggtgctacactcaatgccgccacaaaagatcgaaatcttcaaatccatggagggttgggccgaagataacatattggttcacctaaagcccgtcgaaaaatgctggcaagcacaggatttcctaccagatcccgcatctgacggatttatggaacaagtggaggaactacgagctcgggctaaggagattccggatgattactttgttgttttggtgggagatatgattactgaagaagcactgcctacttaccaaacaatgcttaatactcttgatggtgtgcgtgatgagaccggggctagccctacttcttgggctatctggactcgggcttggaccgctgaagaaaacaggcacggtgatcttctacatcagtatctgtatcttagtgggcgggtcgacatgaggcagattcagaagacaattcagtacctcattgggtctggaatggacccccggactgaaaacagtccttaccttgggttcatctacacttcatttcaagagcgtgccaccttcatctctcacggaaacacagcccggcacgcaaaggagcatggtgacgtgaagctggctcaaatgtgcggtataattgcagctgatgaaaaaaggcacgaaaccgcctacacaaaaatagtagaaaaactcttcgaaattgacccggacggcactgttctcgcttttgctgacatgatgaggaaaaagatctccatgcctgcacacttgatgtacgatgggcgngacgataacctnttcgaaaatttntcagctgttgcccaaaggctcggtgtgtacactgcaaaggactatgcagacattctggagtttctggtgggccggtggaaggtggcggatttaaccgggctttctggtgaagggcgtaaagcccaagactatgtgtgcgggctggccccaagaatcanaaggcttgaggagaggaactcngcaagggcgaaagaaagagtgaacgttccgttcagctggatnttaaatagagaagtgaagctctga

SEQ ID NO: 122698 - protein, 396 aa, Helianthus annuus
  misc_feature (3)..(3): The Xaa at location 3 stands for Ile, Leu, Phe, or Val.
  misc_feature (6)..(6): The Xaa at location 6 stands for Asn, Ile, Ser, or Thr.
  misc_feature (7)..(7): The Xaa at location 7 stands for Ala, Pro, Ser, or Thr.
  misc_feature (315)..(315): The Xaa at location 315 stands for Leu, or Phe.
  misc_feature (368)..(368): The Xaa at location 368 stands for Arg, Ile, Lys, or Thr.
  misc_feature (389)..(389): The Xaa at location 389 stands for Ile, or Met.
MAXRIXXATFQSDLYRSFAFPQPKPLRSPKFAMASTIGSATTKVESTKKPFTPPREVHQQVLHSMPPQKIEIFKSMEGWAEDNILVHLKPVEKCWQAQDFLPDPASDGFMEQVEELRARAKEIPDDYFVVLVGDMITEEALPTYQTMLNTLDGVRDETGASPTSWAIWTRAWTAEENRHGDLLHQYLYLSGRVDMRQIQKTIQYLIGSGMDPRTENSPYLGFIYTSFQERATFISHGNTARHAKEHGDVKLAQMCGIIAADEKRHETAYTKIVEKLFEIDPDGTVLAFADMMRKKISMPAHLMYDGRDDNLFENXSAVAQRLGVYTAKDYADILEFLVGRWKVADLTGLSGEGRKAQDYVCGLAPRIXRLEERNSARAKERVNVPFSWXLNREVKL

SEQ ID NO: 122699 - DNA, 1194 bp, Sesamum indicum
  CDS (4)..(1194)
aggatggccttgaagctgaatgccatcaattttcaatccccgaaatgcccttcgtttgctcttccaccggttgccagcgttagatctcctaagttcttcgtggcttccactcttcgctctggttctaaggaggtcgagacggtcaagaggccttttaatcctccccgagaggttcatgttcaagtgacacactctatgccaccacaaaagattgagatcttcaaagctctggaagactgggctgacaataatatacttgttcaccttaagcctgttgagaaatgttggcaacctcaggatttcctgcctgatccatcttctgacggattcgatgatcaggtcaaggaattgagggagagagccaaggagattccagatgattattttgttgttttagtcggtgatatgatcacagaagaagcccttccaacatatcaaacaatgcttaataccttagacggtgtgcgggatgaaacgggggccagcccaacttcttgggctatttggacaagggcatggactgctgaagaaaataggcatggggaccttctaaataaatatctctatctctctggacgagtagatatgagaccaaatgggaaaaccttccggtatctgataggatcaggaatggatccacggacagaaaacagcccatatcttggatttatctatacatccttccaagaaagggctactttcatctcccatggcaacactgcaagacttgcaagggaacatggggacttgaagctggcccaaatctgcggcacaattgccgcagatgagaagcgtcatgaaactgcatacaccaagatagtggaaaagctatttgagattgaccccaacgacactgtgctggcttttgctgacatgatgaggaagaagatctccatgccagcccacttgatgtatgatggccgtgacgataacctcttcgatcacttctcatctgttgctcagcggcttggcgtctatacggccaaagactatgccgacatcctagaacacttggtcgccagatggaaagtggcaaatttaacaggactatctgctgatgggcagaaagcccaagactatgtctgtgggctgcccccaagaatcaggaggttagaggagagagctcaagggcgggccaagcaagcaccaaagatcccatttagctgggtacatgatcgagaggtgcaactctga

SEQ ID NO: 122700 - protein, 396 aa, Sesamum indicum
MALKLNAINFQSPKCPSFALPPVASVRSPKFFVASTLRSGSKEVETVKRPFNPPREVHVQVTHSMPPQKIEIFKALEDWADNNILVHLKPVEKCWQPQDFLPDPSSDGFDDQVKELRERAKEIPDDYFVVLVGDMITEEALPTYQTMLNTLDGVRDETGASPTSWAIWTRAWTAEENRHGDLLNKYLYLSGRVDMRPNGKTFRYLIGSGMDPRTENSPYLGFIYTSFQERATFISHGNTARLAREHGDLKLAQICGTIAADEKRHETAYTKIVEKLFEIDPNDTVLAFADMMRKKISMPAHLMYDGRDDNLFDHFSSVAQRLGVYTAKDYADILEHLVARWKVANLTGLSADGQKAQDYVCGLPPRIRRLEERAQGRAKQAPKIPFSWVHDREVQL

SEQ ID NO: 122701 - DNA, 1200 bp, Kochia scoparia
  CDS (1)..(1200)
atggcattgaaacttcaacacccattatcactccaatcatctaactcaacctcttctttctcagtccctcgatctcaccttctcagatctcctaatcgcgttttcatggcttccaccattggcgtcacctcaaaagagactcaaaatggtaaaaagccatacatgcccccaaaagaagtacacgtgcagaagactcactcattgacaccccaaaagattgagatgttcaagtctttggagaattgggctgaagaaaatcttctggttgttctaaagcctgttgagaagtgttggcaaccacaagattttctaccagaccctgcatcagaaggatttgaagagcaagttcaggagctgagggaaagaactaaagaactccccgatgactactttgttgttttggttggtgatatgatcaccgaagaagcccttcctacttaccagactatgcttaacacattggatggagttagggatgagactggcgcgagtctctctccctgggctatctggaccagggcgtggacggctgaggagaacaggcatggcgatctgttgaacaagtatctctacctctctggacgagttgacatgaagcaaattgagaagacaatccagtacctcataggatcaggaatggacccacaaactgagaacaacccctatctcggtttcatctacacttccttccaggagagagctaccttcatctcccacggtaatactgcaaggttagccaaggatcatggtgatcttaaattggcacaggtgtgcggtataattgctgcagatgagaagcgccatgaaactgcctacacaaaaatcgtggagaagctctttgaacttgaaccagatggcacaatcttggctttagctgatatgatgaggaagaaggtgtctatgcctgcccacggaatgtatgatggcattgatgacaaccttttcgacaactacgcatctgttgctcaacgcattggagtctacaccgcccaggactacgctgacatcctggaatttctagttcagagatggaacgtatcaactttgaccggactttcaggcgagggacgtaaagcacaagatttcgtgtgtgggttggctccaaggatcaggaggcttgaggagagagctcaagctcgagctaaacaatcctccctagccccattcagctggattttcggtaaagagttgaccgtctaa

SEQ ID NO: 122702 - protein, 399 aa, Kochia scoparia
MALKLQHPLSLQSSNSTSSFSVPRSHLLRSPNRVFMASTIGVTSKETQNGKKPYMPPKEVHVQKTHSLTPQKIEMFKSLENWAEENLLVVLKPVEKCWQPQDFLPDPASEGFEEQVQELRERTKELPDDYFVVLVGDMITEEALPTYQTMLNTLDGVRDETGASLSPWAIWTRAWTAEENRHGDLLNKYLYLSGRVDMKQIEKTIQYLIGSGMDPQTENNPYLGFIYTSFQERATFISHGNTARLAKDHGDLKLAQVCGIIAADEKRHETAYTKIVEKLFELEPDGTILALADMMRKKVSMPAHGMYDGIDDNLFDNYASVAQRIGVYTAQDYADILEFLVQRWNVSTLTGLSGEGRKAQDFVCGLAPRIRRLEERAQARAKQSSLAPFSWIFGKELTV

SEQ ID NO: 122703 - DNA, 1206 bp, Arabidopsis thaliana
  CDS (1)..(1206)
atggctctaaagtttaaccctttggtggcatctcagccttacaaattcccttcctcgactcgtccgccaactccttctttcagatctcccaagttcctctgcctcgcttcttcttctccggctctcagctccggccccaaggaggttgagagtttgaagaaaccatttacgccacccagggaagtgcatgttcaagtcttgcactccatgccacctcaaaagatcgagatcttcaaatctatggaaaactgggccgaggagaaccttctgattcacctcaaggatgtggagaagtcttggcaaccccaggatttcttgcctgaccctgcatcagatgggtttgaagatcaggtaagagagttaagagagagggctagagagctccctgatgattactttgttgttttggtgggggacatgatcacagaagaagcacttccgacctatcaaactatgttgaacactttggatggagttagggatgaaacaggtgctagtcctacttcatgggctatttggaccagagcttggactgcagaagaaaaccgacatggcgatcttctgaataaatacctttacttgtctggtcgtgttgacatgaggcagatcgaaaagaccattcagtacttgattggatctggaatggatccgcggacagagaataacccctaccttggcttcatctatacgtcattccaagaaagagcgacattcatctctcacggaaacacagcccgccaagccaaagagcacggggacatcaaactagcccaaatatgtggcacaatagctgcagacgagaagcgtcataaaacagcatacaccaagatagttgaaaagctctttgagattgatcctgatggtactgtcatggcttttgcagacatgatgagaaagaaaatctcaatgcctgctcacttgatgtatgatgggcgcaacgacaacctctttgacaacttctcttccgtggctcagaggctcggtgtttacaccgccaaagactatgcagacattcttgagtttctggttggtaggtggaaaatccaggacttaaccgggctttcaggtgaaggaaacaaagcacaagactatttatgcgggttggctccaaggatcaagagattggatgagagagctcaagcaagagccaagaaaggacccaagattcctttcagttggatacacgacagagaagtgcagctctaa

SEQ ID NO: 122704 - protein, 401 aa, Arabidopsis thaliana
MALKFNPLVASQPYKFPSSTRPPTPSFRSPKFLCLASSSPALSSGPKEVESLKKPFTPPREVHVQVLHSMPPQKIEIFKSMENWAEENLLIHLKDVEKSWQPQDFLPDPASDGFEDQVRELRERARELPDDYFVVLVGDMITEEALPTYQTMLNTLDGVRDETGASPTSWAIWTRAWTAEENRHGDLLNKYLYLSGRVDMRQIEKTIQYLIGSGMDPRTENNPYLGFIYTSFQERATFISHGNTARQAKEHGDIKLAQICGTIAADEKRHKTAYTKIVEKLFEIDPDGTVMAFADMMRKKISMPAHLMYDGRNDNLFDNFSSVAQRLGVYTAKDYADILEFLVGRWKIQDLTGLSGEGNKAQDYLCGLAPRIKRLDERAQARAKKGPKIPFSWIHDREVQL

SEQ ID NO: 122705 - DNA, 1191 bp, Gossypium hirsutum
  CDS (1)..(1191)
atggctttgaattttaatgccatcgcctcgaaatctcagaagctcccttgctttgctcttccaccaaaggccacccttagatctcccaagttttccatgatctccaccattccttctggctccaaagaggttgggaatctgaaaaagcctttcacgcctccaaaggaggtgcctgttcagatcacccactccatgccgcctcacaagattgagatctttaaatctttggagggctgggctgagaacaacattctgactcacctcaaaccagttgagaaatgttggcaacccgccgactttcttccagatcctaattctgatggatttcatgagcaagtcaaagagcttagggaaagggcaaaggagatcccagatgattactttgtagttttggttggtgatatgatcaccgaggaagccctttcaacttatcaaacaatgcttaataccttggatggaactcgtgatgagacaggtgctagccttaccccttgggccatttggaccagggcttggactgctgaagaaaacaggcatggtgatctgcttaataagtatctctacttgtctgggagagtggacatgaggcaaattgagaggacaatccagtacttgattggatcgggaatggatcctcatacagagaatagtccttaccgaggattcatatatacttcgttccaagaaagggcaacttttatttcccatgggaatacaggcaggctggctaaggagtatggggatattaacttggctcaaatttgtggtagcattgcctcagatgagaagcgccacgagacagcctataccaaaatcgttgaaaagctgtttgagattgatcctgatgaaacagtcctggcatttgctgacatgatgaagaagaaaatcgccatgccggctgagttcatctatgatggcagagattataacttatttgaccactactcagctgttgcccaaagaatcggggtttacactgctaaggactatgttgatatagtagagcacctggtggatcgatggaaggtgaaggagctagctgggctttcagccgaggggcgtaaagctcaggactacttgtgttcacttccttcgagaattagaaggttagaggagagagcgcaagaaaaggccaaggaagcacccagtgtcccattcagttggatatttgatagagaagtgaaactttag

SEQ ID NO: 122706 - protein, 396 aa, Gossypium hirsutum
MALNFNAIASKSQKLPCFALPPKATLRSPKFSMISTIPSGSKEVGNLKKPFTPPKEVPVQITHSMPPHKIEIFKSLEGWAENNILTHLKPVEKCWQPADFLPDPNSDGFHEQVKELRERAKEIPDDYFVVLVGDMITEEALSTYQTMLNTLDGTRDETGASLTPWAIWTRAWTAEENRHGDLLNKYLYLSGRVDMRQIERTIQYLIGSGMDPHTENSPYRGFIYTSFQERATFISHGNTGRLAKEYGDINLAQICGSIASDEKRHETAYTKIVEKLFEIDPDETVLAFADMMKKKIAMPAEFIYDGRDYNLFDHYSAVAQRIGVYTAKDYVDIVEHLVDRWKVKELAGLSAEGRKAQDYLCSLPSRIRRLEERAQEKAKEAPSVPFSWIFDREVKL

SEQ ID NO: 122707 - DNA, 1236 bp, Arabidopsis thaliana
  CDS (1)..(1236)
atggctcttctcttgaactcgacgataacggtggctatgaagcagaatccgctggtcgcggtatcttttccgcggactacttgcttgggatctagtttttctcctcctcgtcttcttcgagtttcgtgtgttgccacaaaccctagcaagacgagtgaagaaacagacaagaaaaagtttcgacccatcaaagaagtaccaaaccaagtgacccacacaataacacaagagaaactggagatcttcaaatcaatggagaattgggcccaagaaaacttattatcttacctcaaacccgtcgaagcttcctggcaaccacaagactttttgccggaaaccaacgacgaagaccgattctacgaacaagtaaaagagctaagagatcgaacaaaagagatccctgacgattactttgtagttcttgtcggagatatgatcaccgaagaagctttaccaacttatcaaactactttgaacactctcgacggcgtaaaagacgagaccggtggtagtctaacgccgtgggcggtttgggttcgagcatggacggcggaggaaaatcgacacggtgatttgttgaataagtatctttacttatcaggtcgtgttgacatgcgacatgttgaaaagactattcaatatcttatcggatccggcatggactccaaatttgagaacaatccctataatggcttcatctatacttcttttcaagagagagccactttcatctcccatggcaacacggcgaagctagccacaacctacggcgacacaactctcgccaaaatctgcggaacaatcgcggcggatgagaagcggcatgagacggcgtatacacggatcgtcgagaagcttttcgagatcgatcccgatggtaccgtacaagctctagcgagtatgatgaggaagcgaatcacgatgccggctcatctgatgcacgacggtcgcgacgacgatctgttcgatcattacgctgcggtggcgcagagaatcggagtttataccgcgacggattacgcagggattttggagtttttgttgcggcggtgggaggtggagaagttagggatgggtttgtccggcgaaggaaggagagcacaggattatctgtgtaccttgccgcagaggatcaggaggttagaggaaagagctaacgatagagtcaaacttgcgtcaaagtcaaaaccttctgtttccttcagctggatttatgggagagaagttgaactataa

SEQ ID NO: 122708 - protein, 411 aa, Arabidopsis thaliana
MALLLNSTITVAMKQNPLVAVSFPRTTCLGSSFSPPRLLRVSCVATNPSKTSEETDKKKFRPIKEVPNQVTHTITQEKLEIFKSMENWAQENLLSYLKPVEASWQPQDFLPETNDEDRFYEQVKELRDRTKEIPDDYFVVLVGDMITEEALPTYQTTLNTLDGVKDETGGSLTPWAVWVRAWTAEENRHGDLLNKYLYLSGRVDMRHVEKTIQYLIGSGMDSKFENNPYNGFIYTSFQERATFISHGNTAKLATTYGDTTLAKICGTIAADEKRHETAYTRIVEKLFEIDPDGTVQALASMMRKRITMPAHLMHDGRDDDLFDHYAAVAQRIGVYTATDYAGILEFLLRRWEVEKLGMGLSGEGRRAQDYLCTLPQRIRRLEERANDRVKLASKSKPSVSFSWIYGREVEL

SEQ ID NO: 122709 - DNA, 1125 bp, Arabidopsis thaliana
  CDS (1)..(1125)
atgccatctccgtctacttttctcgcctctcgcccccgtggaccggccaagatctcggccgtggcagcaccagtgaggccggctctaaaacaccaaaacaaaatccacaccatgccaccggagaaaatggagatattcaaatctttagatggatgggccaaggatcaaatcttgcctcttctcaaacccgttgaccaatgttggcaacccgcttctttcttacccgacccggccttacccttctccgagtttaccgaccaggttcgtgagctgagggaaagaacggcctcgctgccagacgaatacttcgtggtgttggttggagatatgataacggaggacgcgttgcctacttaccagacgatgatcaacacccttgatggcgtaagggacgagactggtgcgagtgagagcgcgtgggcaagttggacacgagcgtggacggctgaggagaaccgtcatggtgatttgttgcggacttacttgtacttatccggtcgtgttgatatgcttatggttgaacgcaccgttcagcatctcatcggctcgggcatggatccaggaactgagaacaatccatacttaggtttcgtgtacacgtcattccaagagcgagccacatttgtgtctcacggcaacacggcaaggctagccaagtccgcaggagatcctgtcctcgctcgcatctgcggaaccattgcagctgacgagaagcgccatgaaaacgcttacgtacgcatcgttgagaagctcctcgagatcgaccctaacggtgcagtctcagccgtggccgacatgatgcggaagaagatcacaatgccggctcatctaatgacagacggtcgagacccgatgctattcgaacatttctccgccgtggctcagcggctagaggtttacacggcggatgattacgctgacatcttggagtttttggttggacggtggagattggagaagctagaaggattgacgggtgagggccaacgtgcacaggagtttgtgtgtgggttagctcagaggattagacgccttcaagagcgtgcagacgagagagctaagaagcttaagaagacccatgaggtttgctttagttggatcttcgataagcagattagtgtgtaa

SEQ ID NO: 122710 - protein, 374 aa, Arabidopsis thaliana
MPSPSTFLASRPRGPAKISAVAAPVRPALKHQNKIHTMPPEKMEIFKSLDGWAKDQILPLLKPVDQCWQPASFLPDPALPFSEFTDQVRELRERTASLPDEYFVVLVGDMITEDALPTYQTMINTLDGVRDETGASESAWASWTRAWTAEENRHGDLLRTYLYLSGRVDMLMVERTVQHLIGSGMDPGTENNPYLGFVYTSFQERATFVSHGNTARLAKSAGDPVLARICGTIAADEKRHENAYVRIVEKLLEIDPNGAVSAVADMMRKKITMPAHLMTDGRDPMLFEHFSAVAQRLEVYTADDYADILEFLVGRWRLEKLEGLTGEGQRAQEFVCGLAQRIRRLQERADERAKKLKKTHEVCFSWIFDKQISV

SEQ ID NO: 122711 - DNA, 1191 bp, Linum usitatissimum
  CDS (1)..(1191)
atggctctcaagctcaacccagtcaccaccttcccttcgacccgctccctcaacaacttctcctccagatctcctcgcacctttctcatggctgcttccactttcaattccacttccaccaaggaggctgagaagctaaagaagtcacatggaccaccaaaagaggtgcatatgcaagtgacccattccatgcccccacagaagctggagatctttaagtcccttgaaggttgggcagaggacgttctgttgccgcacctgaagccggttgagaaatgctggcagccacaagatttcctgcccgaacccgagtcggatgggttcgaggagcaagtgaaggagctcagggcaagggctaaagaactccccgatgactattttgttgtgctggttggggatatgatcaccgaagaagctctaccgacttaccagacaatgctcaacacccttgacggggtgagggacgagactggagccagccttacgccgtgggcaatctggacaagggcgtggaccgctgaagagaataggcacggtgaccttctcaacaagtatctttacctctctggaagggtggacatgaggcaaattgaaaagaccattcagtatctcatcggctctggaatggatccaaaaacagaaaacaacccctacctcggtttcatctacaccccattccaagagagggcaacgttcatctcccacggaaatacggccagactcgccaaggaccacggggacatgaagctggcgcagatctgcgggatcatcgcagcagacgagaagcggcacgaaacagcatacaccaagatcgtcgagaagctcttcgagatcgaccctgacggtacagtgttggctctggcggacatgatgaggaagaagatatcgatgcccgcccacttgatgtacgatggagaagacgacaacctcttcgacaattactcgtcggtcgctcaacgcatcggggtgtatactgccaaggattatgctgatatcctggagttcctggtggggaggtggaaagtggatgcttttacgggactttccggggaagggaacaaagctcaggagtttgtctgtgggcttccagcgaggattcgaaaattggaggagagggctgcggggagggcaaagcaaacgtcgaaatctgtcccattcagctggatcttcagcagagaattggtactctaa

SEQ ID NO: 122712 - protein, 396 aa, Linum usitatissimum
MALKLNPVTTFPSTRSLNNFSSRSPRTFLMAASTFNSTSTKEAEKLKKSHGPPKEVHMQVTHSMPPQKLEIFKSLEGWAEDVLLPHLKPVEKCWQPQDFLPEPESDGFEEQVKELRARAKELPDDYFVVLVGDMITEEALPTYQTMLNTLDGVRDETGASLTPWAIWTRAWTAEENRHGDLLNKYLYLSGRVDMRQIEKTIQYLIGSGMDPKTENNPYLGFIYTPFQERATFISHGNTARLAKDHGDMKLAQICGIIAADEKRHETAYTKIVEKLFEIDPDGTVLALADMMRKKISMPAHLMYDGEDDNLFDNYSSVAQRIGVYTAKDYADILEFLVGRWKVDAFTGLSGEGNKAQEFVCGLPARIRKLEERAAGRAKQTSKSVPFSWIFSRELVL

SEQ ID NO: 122713 - DNA, 1517 bp, Persea americana
  CDS (79)..(1269)
gggcacgagcacttcttctctcacactttctcgtttttgtcgtcccctctgctctctctctctatcaggcacggagaaatggcactgaaactcagtccagtcatgtttcaatctcagaagcttccatttcttgcctcctatccgccttccaatctcagatctccgagggttttcatggcctccaccctccgctcaagcaccaaggaggttgataatatcaagaagcccttcagtcctcctcgggaggtacatgttcaggtcacccactcaatgccaccgcagaaaatagagatcttcaaatccttggaagattgggcggaagagaacatcttggtacatctgaagcctgttgagaagtgttggcaaccgcaggatttcctgcctgaacctgaatcagagggatttctggaatcagttgaggaactcagaaagcgagcaaaagagattccagatgaatattttgtctgcttggttggagatatgatcacagaggaagctcttcctacttatcaaacaatgctcaacacccttgatggtgtcagagatgaaacgggtgcgagccccacatcttgggctatctggacgagggcatggactgccgaagagaacaggcacggggaccttctcaacaaatatctctacctctctggaagagtggacatgagacagatcgagaaaacgatccagtatctgatcgggtcaggaatggatccacggacagagaatagcccctacctcggatttgtgtatacatccttccaagagagagctaccttcatttcccatgggaacacggccaggcacgccaaggaatatggggacgacaagttggccaaaatatgtggcaccatagctgcagacgagaagcgccatgagactgcctacacgaagattgtggagaagttgtttgagatcgaccctgatggtactgtactggcattctgtgatatgatgaaaaagaagatttcaatgccagcccacctgatgtatgatggtcaggatgacgacctctttgggcacttttcatctgtcgcccagcgacttggtgtctacactgccaaggactatgcggacatactcgaatttctggtgcgccggtgggacgtggagcatctgacaggcctctcccctgaggggaagacggcccaagaattcatttgcaaactggctccaaggatcaggagtctggaagagagggctcgaagcagggccaaagaaggacctaccattcctttcagctggattttcaacagagaagtaaagctttaatgagcactttggagaatggcactatcgtctttaaggtcacgtgacattgttctacttgcattggtggctttattcatctgtcatatttcgaaaattttctcgcttcgaatctgttactctactttctgcaggggatttggcagttgtagagatactctttttctttcatggtattaggttgttgcagtttgggaagtcttctttaacttaggaaggcatgtatcttgagtaatagaactatgttcgat

SEQ ID NO: 122714 - protein, 396 aa, Persea americana
MALKLSPVMFQSQKLPFLASYPPSNLRSPRVFMASTLRSSTKEVDNIKKPFSPPREVHVQVTHSMPPQKIEIFKSLEDWAEENILVHLKPVEKCWQPQDFLPEPESEGFLESVEELRKRAKEIPDEYFVCLVGDMITEEALPTYQTMLNTLDGVRDETGASPTSWAIWTRAWTAEENRHGDLLNKYLYLSGRVDMRQIEKTIQYLIGSGMDPRTENSPYLGFVYTSFQERATFISHGNTARHAKEYGDDKLAKICGTIAADEKRHETAYTKIVEKLFEIDPDGTVLAFCDMMKKKISMPAHLMYDGQDDDLFGHFSSVAQRLGVYTAKDYADILEFLVRRWDVEHLTGLSPEGKTAQEFICKLAPRIRSLEERARSRAKEGPTIPFSWIFNREVKL

SEQ ID NO: 122715 - DNA, 1548 bp, Arachis hypogaea
  CDS (28)..(1257)
gtcaatttcgaagacgcaacacgaaaaatggctctgaggctgaaccctaacccttcacagaagctctttctctctccttcttcatcatcatcttcttcttcttcatcgttctcgcttcctcaaatggctagcctcagatctccaaggttccgcatggcctccaccctccgcactggttcaaaagaggttgaaaatctcaagaagcctttcacgcctccccgagaggtacatgttcaaggtaaccactccatgccaccccagaagattgagattttcaaatcgttagagggttgggctgaggagaacattttgactctcctcaaacctgtagagaagtgctggcagccacaggactatttaccagaaccttcagaggatggatttgaggagcaagtgagggaactgagagcaagggcaaaagagcttcctgatgattactttgttgttctggtcggagacatgatcactgaagaagcccttcctacttaccagacaatgcttaatactctcgacggggttcgagatgaaacaggtgccagccttacttcctgggcagtttggacaagggcatggactgcggaggaaaatagacatggtgatcttcttaacaagtatctttacttgtctggccgcgttgacttgaggcaaattgagaagacaattcagtacttgattggctctggaatggatcctcggaccgagaacagcccctaccttggtttcatttatacttcatttcaagagagggccacctttatatcccatgggaacacagctaggctggccaaaggacatggggatatgaagttggcacaaatatgtggtatgattgcctcagatgagaaacgccacgagactgcatacacaaagatagtggagaagctgtttgagatcgatcctgatggaactgtaatggcttttgctgacatgatgaggaagaaaatagctatgccggcacacttgatgtatgatggccgtgatgacaacctgttcgaaaactattctgccgtcgctcagcgcatcggagtctacactgccaaggactatgctgatatccttgaatttcttgtggcgcggtggaaggtggcagacctaaccggactctctggtgagggaaggaaagctcaggattatgtttgccggtgccgtccaagaatccgaagaatccgaaggctggaggagagagctcaaggaagagccaaggaatccccaagacttaaattcagttggatttacgatagggaagtgcaactctaaacaaatcaaatggaggaggatcatgatatgaatcattatgcatcattatgcaatatcctattctgagaaagtgttgaatagtgaagaaagcttcagtttgtcatttccttttttttttttttttttttgggttttcttactctctataatgtcatttgtaaggggaaacagttgttaaatggttaactggttaagggtttaagccagtttaggagctgtagtaattagaaacgctatgtttttcggtgtggtgtccctttttttcctttgtggtagaagtggtagcggccg

SEQ ID NO: 122716 - protein, 409 aa, Arachis hypogaea
MALRLNPNPSQKLFLSPSSSSSSSSSSFSLPQMASLRSPRFRMASTLRTGSKEVENLKKPFTPPREVHVQGNHSMPPQKIEIFKSLEGWAEENILTLLKPVEKCWQPQDYLPEPSEDGFEEQVRELRARAKELPDDYFVVLVGDMITEEALPTYQTMLNTLDGVRDETGASLTSWAVWTRAWTAEENRHGDLLNKYLYLSGRVDLRQIEKTIQYLIGSGMDPRTENSPYLGFIYTSFQERATFISHGNTARLAKGHGDMKLAQICGMIASDEKRHETAYTKIVEKLFEIDPDGTVMAFADMMRKKIAMPAHLMYDGRDDNLFENYSAVAQRIGVYTAKDYADILEFLVARWKVADLTGLSGEGRKAQDYVCRCRPRIRRIRRLEERAQGRAKESPRLKFSWIYDREVQL

SEQ ID NO: 122717 - DNA, 1470 bp, Lupinus luteus
  CDS (115)..(1269)
ggaatacggcacgagaaaatgtagagctcacattttagaattataccttcagtataccagctccttacaaatatatccccctatacactattttcatcacctcactaaaaaaacatgcagattcaaacctgctactctatcagaattcaaattcttcctcttccatgggccagaagaactggccgccacaaaatgctgccacccatagcagccatctccgccacaccgccgtcgctgaaatctcctaagacccactcaatgccaccagaaaagatagagatattcaagtcacttgagagctgggcatcacaatcggtgcttccacttctgaagccagtggaacaatgctggcagccacaagaattcgtccctgactcctccttgccgtttggggatttcacggatcaggtgaaggccctccgtgaccgcacggcggagctgccggaggagtacttcgtggtattggtgggtgacatgataacagaggatgcgctgccaacgtaccagagcatgatcaacaatcttgatggggtaagggatgagactgggtcaagcccgagcccatgggctttatggacccgggcttggactgcagaagagaaaagacatggagatttgcttagaacttatttgtatctttctggtcgtgttgatatgaagaagatcgagaagactgttcagtaccttattggatctggcatggacccgggaacagaaaacaacccatatttgggatttgtatacacgtcattccaagagcgagccacatttgtgtcacatggcaacacagctcggctagccaaagagggtggcgatccagtgctggctcgcatatgcgggaccattgctgcagacgagaagcgccacgagaatgcctattccagaatcgtcgagaagcttctagaattggaccccacaggagcaatggtagctattggagacatgatgcagaaaaagatcacaatgccagcacacttgatgtacgatggagaagaccctaagttgtttgatcacttctctgcggtggcgcagcgaatgggtgtttacacggccaatgattatgctgatatcttggagtttttgatcggacggtggagattggagaaggttcaagatttgaaggatgagggaaagaaggcacaggattttgtgtgtgggttggcaccgaggatcaggaggttgcaagagcgtgctgatgaacgagcgcgaaaaatgaaaccgcatgctgtgaaattcagctggatttttaataaagagattattttgtgacttttgttttctagatcacagttaagagttatgtctcttgctagattgaagaaaaaaatctgattttccaatgttatgtaatacactcaaacaattattattgttgcttttatttcatttttattggtcttattatttttattttcattagtgtaggatactttataaagatatgctttgaaacaaaaaaaaaaaaaaaaa

SEQ ID NO: 122718 - protein, 384 aa, Lupinus luteus
MQIQTCYSIRIQILPLPWARRTGRHKMLPPIAAISATPPSLKSPKTHSMPPEKIEIFKSLESWASQSVLPLLKPVEQCWQPQEFVPDSSLPFGDFTDQVKALRDRTAELPEEYFVVLVGDMITEDALPTYQSMINNLDGVRDETGSSPSPWALWTRAWTAEEKRHGDLLRTYLYLSGRVDMKKIEKTVQYLIGSGMDPGTENNPYLGFVYTSFQERATFVSHGNTARLAKEGGDPVLARICGTIAADEKRHENAYSRIVEKLLELDPTGAMVAIGDMMQKKITMPAHLMYDGEDPKLFDHFSAVAQRMGVYTANDYADILEFLIGRWRLEKVQDLKDEGKKAQDFVCGLAPRIRRLQERADERARKMKPHAVKFSWIFNKEIIL

SEQ ID NO: 122719 - DNA, 1206 bp, Brassica juncea
  CDS (1)..(1206)
atggcattgaagcttaaccctttggcatctcagccttacaacttcccttcctcggctcgtccgccaatctctactttcagatctcccaagttcctctgcctcgcttcttcttcttcccctgctctcagctccagcaccaaggaggtcgagagtctgaagaagccattcaccccaccaaaggaagtccacgttcaagtcctacactcaatgccaccccaaaagatcgaaatcttcaaatccatggaagactgggccgagcagaaccttctaactcacctcaaagacgtggagaagtcatggcagccccaggacttcttacctgaccctgcatccgacgggttcgaagatcaggtaaaggagttaagagaaagagcaagagagctcccagatgattacttcgttgtcttggtgggtgacatgatcacagaagaagcgcttcccacctatcaaacaatgctgaacactttggatggagtgagggatgagactggcgctagccccactccatgggccgtttggactagagcttggaccgctgaagagaatcgtcacggtgatcttctcaataagtatctttacttgtctggtcgtgtggacatgaggcagattgagaagactattcagtacttgattggttccggaatggatccacgcacagagaacaacccttaccttggcttcatctacacttcgttccaagagagagccaccttcgtctctcacggcaacacagctcgccaagctaaagagcacggggacctcaagctagcccaaatctgtggcacaatagctgcagacgagaagcgtcacgaaacagcttacaccaagatagttgagaagcttctcgagattgatcctgacggcactgtggtggcctttgcggacatgatgaggaagaaaatctcgatgcctgctcacttgatgtacgatgggcgtgatgataacctctttgacaacttctcttctgttgctcagaggcttggtgtctacactgctaaagattatgcggacattcttgagttcttggccgggaggtggaagattgagagcttgagtgggctttcgggtgaagggaacaaagcgcaagagtatttgtgtgggttgactccgagaatcaggaggttggatgagagagctcaggcaagagccaagaaaggacctaagattcctttcagctggatacatgacagagaagtgcagctctga

SEQ ID NO: 122720 - protein, 401 aa, Brassica juncea
MALKLNPLASQPYNFPSSARPPISTFRSPKFLCLASSSSPALSSSTKEVESLKKPFTPPKEVHVQVLHSMPPQKIEIFKSMEDWAEQNLLTHLKDVEKSWQPQDFLPDPASDGFEDQVKELRERARELPDDYFVVLVGDMITEEALPTYQTMLNTLDGVRDETGASPTPWAVWTRAWTAEENRHGDLLNKYLYLSGRVDMRQIEKTIQYLIGSGMDPRTENNPYLGFIYTSFQERATFVSHGNTARQAKEHGDLKLAQICGTIAADEKRHETAYTKIVEKLLEIDPDGTVVAFADMMRKKISMPAHLMYDGRDDNLFDNFSSVAQRLGVYTAKDYADILEFLAGRWKIESLSGLSGEGNKAQEYLCGLTPRIRRLDERAQARAKKGPKIPFSWIHDREVQL

SEQ ID NO: 122721 - DNA, 1524 bp, Brassica napus
  CDS (27)..(1226)
ctgaaagaacgtcaaaccttcaaaaaatggcattgaagtttaatcctttggtatctcagccatacaaactcgcttcctcggctcgtccgccagtctctactttcagatctcccaagttcctatgcctcgcttcttcttcttctcctgctctcagctccaaggaggtcgagagcttgaagaagccattcaccccaccaagggaagtccaccttcaagtcctgcactccatgccaccccaaaagatcgaaatcttcaaatccatggaagaccgggccgagcagaaccttctacctcacctcaaagacgtggagaagtcatggcagccccaggacttcttacccgaccctgcttccgacggtttcgaagatcaggtaaaagagttaagagaaagagcaagagagctcccagatgattacttcgttgtcttggttggagacatgatcacagaagaagcgcttcccacctaccaaacaatgttaaacactttggatggagtaagggatgagactggcgctagccccacttcatgggccgtttggactagagcttggaccgctgaagagaatcgccacggtgatcttctcaataagtatctttacttgtctggtcgtgttgacatgaggcagattgaaaagactattcagtacctgattggttccggaatggatccacgcacagagaacaacccttaccttggcttcatctacacttcattccaagagagagccaccttcgtctctcacggcaacacagctcgccaagccaaagagcacggagacctcaagctagcgcaaatctgcgggacaatagctgcagacgagaagcgtcacgagacagcttacaccaagatagttgagaagcttctcgagattgatcctgacggcactgtggtggcctttgcggatatgatgaggaagaaaatctcgatgcctgctcacttgatgtacgatgggcgtgatgataacctctttgacaacttctcctccgtggctcagaggctcggtgtttacactgccaaagactatgcggacattcttgagtttttggccgggaggtggaggatcgagagcttgactgggctttcgggtgaagggaacaaagcgcaagagtatttgtgtgggttgactccgagaatcaggaggttggatgagagagctcaagcaagagccaagaaaggacctaagattccttttagctggatacatgacagagaagtgcagctctgaacacaaaggacaaaagacataataaaaccattttctctctctctctctccgttcatcatttgatatgtctgctcttgaagttggtgtagattactatggtttcctgataatgttcgttggtctagttacaaagttgagaagcagtgtcttagtaactttgtgtttttctttcagtgtcttatgtttggtcttttagtaaacttctggtagttaaaaacagttgagcgtttgggtctgtactcagttttcactgtggagttttgttctagttgaagttagtttttgtgtgttaaaaaaa

SEQ ID NO: 122722 - protein, 399 aa, Brassica napus
MALKFNPLVSQPYKLASSARPPVSTFRSPKFLCLASSSSPALSSKEVESLKKPFTPPREVHLQVLHSMPPQKIEIFKSMEDRAEQNLLPHLKDVEKSWQPQDFLPDPASDGFEDQVKELRERARELPDDYFVVLVGDMITEEALPTYQTMLNTLDGVRDETGASPTSWAVWTRAWTAEENRHGDLLNKYLYLSGRVDMRQIEKTIQYLIGSGMDPRTENNPYLGFIYTSFQERATFVSHGNTARQAKEHGDLKLAQICGTIAADEKRHETAYTKIVEKLLEIDPDGTVVAFADMMRKKISMPAHLMYDGRDDNLFDNFSSVAQRLGVYTAKDYADILEFLAGRWRIESLTGLSGEGNKAQEYLCGLTPRIRRLDERAQARAKKGPKIPFSWIHDREVQL

SEQ ID NO: 122723 - DNA, 1516 bp, Brassica napus
  CDS (4)..(1200)
caaatggcattgaagcttaaccctttggcatctcagccttacaacttcccttcctcggctcgtccgccaatctctactttcagatctcccaagttcctctgcctcgcttcttcttctcccgctctcagctccaaggaggttgagagtttgaagaagccattcacaccacctaaggaagtgcacgttcaagtcctgcattccatgccaccccagaagatcgagatcttcaaatccatggaagactgggccgagcagaaccttctaactcagctcaaagacgtggagaagtcgtggcagccccaggacttcttacccgaccctgcatccgatgggtttgaagatcaggtaagagagttaagagaaagagcaagagaactccctgatgattacttcgttgttctggtgggagacatgatcacggaagaagcgcttccgacctatcaaaccatgctgaacactttggatggagtgagggatgaaactggcgctagccccacttcatgggctatttggacaagagcttggactgcggaagagaaccgacacggtgatcttctcaataagtatctttacttgtctggacgtgttgacatgaggcagattgaaaagaccattcagtacttgattggttctggaatggatcctagaacagagaacaatccttacctcggcttcatctacacttcattccaagaaagagccaccttcatctctcacggaaacacagctcgccaagccaaagagcacggagacctcaagctagcccaaatctgcggcacaatagctgcagacgagaagcgtcatgagacagcttacaccaagatagttgagaagctctttgagattgatcctgatggtactgtgatggcgtttgcagacatgatgaggaagaaaatctcgatgcctgctcacttgatgtacgatgggcgcgatgaaagcctctttgacaacttctcttccgtggctcagaggctcggtgtgtacactgctaaagactatgcggacattcttgagtttttggttgggaggtggaagattgagagcttaaccgggctttcaggtgaaggaaacaaagcgcaagagtacttgtgtgggttgactccgagaatcaggaggttggatgagagagctcaagcaagagccaagaaaggtcccaaggttcctttcagctggatacatgacagagaagtgcagctctaaaaaaggaacaaagctttaaaaccttttcactctccattccccatttgatctgtctgctcttgaaattggtgtagattactatggtttgtgataatgttcgtgggtctagttacaaagttgagaagcagtgatttagtagctttgttgtttccagtctttatatgtttttgtgtttggtccctttagtaaacttgttgtagttaaatcagttgaactgtctggtctgtactcagttttcactgtggagttttgtttcagtttgaggttagtttcattgcagagagaacttctttatccattaatatgaaacttgctt

SEQ ID NO: 122724 - protein, 398 aa, Brassica napus
MALKLNPLASQPYNFPSSARPPISTFRSPKFLCLASSSPALSSKEVESLKKPFTPPKEVHVQVLHSMPPQKIEIFKSMEDWAEQNLLTQLKDVEKSWQPQDFLPDPASDGFEDQVRELRERARELPDDYFVVLVGDMITEEALPTYQTMLNTLDGVRDETGASPTSWAIWTRAWTAEENRHGDLLNKYLYLSGRVDMRQIEKTIQYLIGSGMDPRTENNPYLGFIYTSFQERATFISHGNTARQAKEHGDLKLAQICGTIAADEKRHETAYTKIVEKLFEIDPDGTVMAFADMMRKKISMPAHLMYDGRDESLFDNFSSVAQRLGVYTAKDYADILEFLVGRWKIESLTGLSGEGNKAQEYLCGLTPRIRRLDERAQARAKKGPKVPFSWIHDREVQL

SEQ ID NO: 122725 - DNA, 1533 bp, Carthamus tinctorius
  CDS (106)..(1296)
gctcacttgtgtggtggaggagaaaaacagaactcacaaaaagctttgcgactgccaagaacaacaacaacaacaagatcaagaagaagaagaagaagatcaaaaatggctcttcgaatcactccagtgaccttgcaatcggagagatatcgttcgttttcgtttcctaagaaggctaatctcagatctcccaaattcgccatggcctccaccctcggatcatccacaccgaaggttgacaatgccaagaagccttttcaacctccacgagaggttcatgttcaggtgacgcactccatgccaccacagaagatagagattttcaaatccatcgagggttgggctgagcagaacatattggttcacctaaagccagtggagaaatgttggcaagcacaggatttcttgccggaccctgcatctgaaggatttgatgaacaagtcaaggaactaagggcaagagcaaaggagattcctgatgattactttgttgttttggttggagatatgattacagaggaagccctacctacttaccaaacaatgcttaataccctagatggtgtacgtgatgagactggggctagccttacgccttgggctgtctggactagggcttggacagctgaagagaacaggcatggcgatcttctccacacctatctctacctttctgggcgggtagacatgaggcagatacagaagacaattcagtatctcattgggtcaggaatggatcctcgtaccgaaaacagcccctaccttgggttcatctacacatcgtttcaagagcgtgccacatttgtttctcacggaaacaccgccaggcatgcaaaggatcatggggacgtgaaactggcgcaaatttgtggtacaatcgcgtctgacgaaaagcgtcacgagaccgcttatacaaagatagtcgaaaagctattcgagatcgatcctgatggcaccgttcttgcttttgccgacatgatgaggaaaaagatctcgatgcccgcacacttgatgtacgatgggcgtgatgacaacctcttcgaacatttctcggcggttgcccaaagactcggcgtctacaccgccaaagactacgccgacatactggaatttctggtcgggcggtggaaagtggcggatttgaccggcctatctggtgaagggcgtaaagcgcaagattatgtttgcgggttgccaccaagaatcagaaggctggaggagagagctcaagggcgagcaaaggaaggacctgttgttccattcagctggattttcgatagacaggtgaagctgtgaagaaaaaaaaaacgagcagtgagttcggtttctgttggcttattgggtagaggttaaaacctattttagatgtctgtttcgtgtaatgtggttttttttcttctaatcttgaatctggtattgtgtcgttgagttcgcgtgtgtgtaaacttgtgtggctgtggacatattatagaactcgttatgccaattttgatgacggtggttatcgtctcccctggtgtttttttattgttt

SEQ ID NO: 122726 - protein, 396 aa, Carthamus tinctorius
MALRITPVTLQSERYRSFSFPKKANLRSPKFAMASTLGSSTPKVDNAKKPFQPPREVHVQVTHSMPPQKIEIFKSIEGWAEQNILVHLKPVEKCWQAQDFLPDPASEGFDEQVKELRARAKEIPDDYFVVLVGDMITEEALPTYQTMLNTLDGVRDETGASLTPWAVWTRAWTAEENRHGDLLHTYLYLSGRVDMRQIQKTIQYLIGSGMDPRTENSPYLGFIYTSFQERATFVSHGNTARHAKDHGDVKLAQICGTIASDEKRHETAYTKIVEKLFEIDPDGTVLAFADMMRKKISMPAHLMYDGRDDNLFEHFSAVAQRLGVYTAKDYADILEFLVGRWKVADLTGLSGEGRKAQDYVCGLPPRIRRLEERAQGRAKEGPVVPFSWIFDRQVKL

SEQ ID NO: 122727 - DNA, 1309 bp, Coriandrum sativum
  CDS (7)..(1164)
gcaaaaatggccatgaaactgaatgccctcatgactcttcagtgcccaaaaaggaacatgtttacgagaattgcccctcctcaagcagggagagtgagatcaaaggtgtccatggcttcaactcttcatgctagcccactggtgttcgacaagctgaaggctgggaggcctgaggtggatgaattgttcaactctctggagggttgggccagggacaacatccttgtgcacctgaaatccgtagagaactcatggcagccgcaagactatctgcccgatcccacatccgatgcatttgaagatcaagtcaaggagatgagagaacgggccaaggacatccctgatgaatactttgttgttcttgttggagacatgatcactgaagaggcactcccaacttacatgtctatgcttaacagatgtgatggcattaaggatgacactggcgctcaacctacttcttgggccacttggaccagggcttggactgctgaggagaaccgccatggcgatcttctcaacaagtatctttatctctctggccgagttgatatgaggatgattgagaagactattcaatatcttatcggctctggaatggatacaaaaacagagaactgtccctacatgggcttcatctacacatctttccaggaaagagccacattcatctcccatgccaacacagccaaacttgctcaacactacggtgacaagaacctagctcaagtgtgtggcaacattgcttctgacgagaaacgccatgccaccgcctacaccaaaatcgtggagaagcttgcggagattgacccagacaccactgttatcgcattttctgacatgatgaggaagaaaatacaaatgccagctcatgcaatgtacgatggctccgatgatatgcttttcaagcacttcacagccgttgctcagcagattggagtctactctgcatgggattactgtgacataattgattttctggtggataaatggaacgttgcgaagatgacagggctgtcgggtgaagggagaaaggctcaagaatatgtttgtagcttggctgctaagatcaggagagttgaggagaaggttcaaggcaaggagaagaaagctgtgttgcctgtggctttcagctggattttcaaccgtcagatcatcatatgagtggtcgtcgacattcaatattagacttttcaattatgcttatgcttttccttttgatgttattatgtttatgcttatgctatcggtcggtgtttgttgtcagatctggttatgtaaaacttatatttaaatgaatgttggattt

SEQ ID NO: 122728 - protein, 385 aa, Coriandrum sativum
MAMKLNALMTLQCPKRNMFTRIAPPQAGRVRSKVSMASTLHASPLVFDKLKAGRPEVDELFNSLEGWARDNILVHLKSVENSWQPQDYLPDPTSDAFEDQVKEMRERAKDIPDEYFVVLVGDMITEEALPTYMSMLNRCDGIKDDTGAQPTSWATWTRAWTAEENRHGDLLNKYLYLSGRVDMRMIEKTIQYLIGSGMDTKTENCPYMGFIYTSFQERATFISHANTAKLAQHYGDKNLAQVCGNIASDEKRHATAYTKIVEKLAEIDPDTTVIAFSDMMRKKIQMPAHAMYDGSDDMLFKHFTAVAQQIGVYSAWDYCDIIDFLVDKWNVAKMTGLSGEGRKAQEYVCSLAAKIRRVEEKVQGKEKKAVLPVAFSWIFNRQIII

SEQ ID NO: 122729 - DNA, 1407 bp, Cucumis sativus
  CDS (124)..(1314)
atacgtaaagtggcctcggtttcttcaactccgactccggtattcttcttcctctttccttcacgtactgtttttccgactaactcacctgaatattcaacgttgattacgagctacctgaaaatggcgctcaaattccatcctctcacctctcaatctcctaagttgccgtcctttcggatgccgcagcttgcaagtctcagatctcctaagtttgttatggcctccactctccgctccacctccagggaggttgagacgcttaagaaaccctttatgcctccaagggaagtgcatcttcaagtaactcactcaatgccaccccaaaagatggagatatttaaatctttggaggactgggctgaagaaaaccttttggttcatttgaaaccagtggagaggtgttggcaaccacaggactttctgccagactcggcatttgagggattccacgagcaggtcagagagcttagagagagggcaaaggaactccctgatgagtactttgttgttttagttggagacatgattacagaagaagcccttcctacttaccagacaatgctgaatactttggatggagtcagggacgaaacaggagcaagccccaccccttgggcaatttggacaagggcttggactgctgaagagaacagacatggtgaccttctgaataaatatctttacctatctggacgagtggacatgaggcaggttgagaaaacaattcagtatttgattggatcgggaatggacccaaggactgaaaacaatccttacctaggatttatatacacctcattccaagaaagggcaaccttcatctcccatgggaacactgccagactagcaaaagagcacggagacataaagttagctcaaatatgtggaacaatcactgcagatgagaagcgacacgagactgcatatactaagatagtggagaaactctttgagatagaccctgaaggaacggtcatagcttttgaagaaatgatgaggaagaaagtctcaatgcctgctcatctgatgtacgatggccgcgacgacaacttgttccatcacttctcagcagttgcacagaggcttggagtttacacagcaaaagactacgcagacatattggagtttttagttgggagatggaaggtggaaagtttgaccggactgtcaggcgaggggcagaaggctcaggattatgtgtgcgcattgcctgcaagaattagaaagctagaagaaagagctcagggacgggcaaaagaaggtcctaccattcctttcagttggattttcgatcgacaggttaagctgtagaaggtgaatggagtaggaaggaagagaatgtgtagaagaggagttgatggggtaagggaaaaagaaaactcgtgcctaaagagttcgaataat

SEQ ID NO: 122730 - protein, 396 aa, Cucumis sativus
MALKFHPLTSQSPKLPSFRMPQLASLRSPKFVMASTLRSTSREVETLKKPFMPPREVHLQVTHSMPPQKMEIFKSLEDWAEENLLVHLKPVERCWQPQDFLPDSAFEGFHEQVRELRERAKELPDEYFVVLVGDMITEEALPTYQTMLNTLDGVRDETGASPTPWAIWTRAWTAEENRHGDLLNKYLYLSGRVDMRQVEKTIQYLIGSGMDPRTENNPYLGFIYTSFQERATFISHGNTARLAKEHGDIKLAQICGTITADEKRHETAYTKIVEKLFEIDPEGTVIAFEEMMRKKVSMPAHLMYDGRDDNLFHHFSAVAQRLGVYTAKDYADILEFLVGRWKVESLTGLSGEGQKAQDYVCALPARIRKLEERAQGRAKEGPTIPFSWIFDRQVKL

SEQ ID NO: 122731 - DNA, 1557 bp, Gossypium hirsutum
  CDS (13)..(1206)
cgaaaagaaaaaatggctttgaattttaatgccatcgcctcgaaatctcagaagctcccttgctttgctcttccaccaaaggccacccttagatctcccaagttttccatgatctccaccattccttctggctccaaagaggttgggaatctgaaaaagcctttcacgcctccaaaggaggtgcctgttcagatcacccactccatgccgcctcacaagattgagatctttaaatctttggagggctgggctgagaacaacattctgactcacctcaaaccagttgagaaatgttggcaacccgccgactttcttccagatcctaattctgatggatttcatgagcaagtcaaagagcttagggaaagggcaaaggagatcccagatgattactttgtagttttggttggtgatatgatcaccgaggaagccctttcaacttatcaaacaatgcttaataccttggatggaactcgtgatgagacaggtgctagccttaccccttgggccatttggaccagggcttggactgctgaagaaaacaggcatggtgatctgcttaataagtatctctacttgtctgggagagtggacatgaggcaaattgagaggacaatccagtacttgattggatcgggaatggatcctcatacagagaatagtccttaccgaggattcatatatacttcgttccaagaaagggcaacttttatttcccatgggaatacaggcaggctggctaaggagtatggggatattaacttggctcaaatttgtggtagcattgcctcagatgagaagcgccacgagacagcctataccaaaatcgttgaaaagctgtttgagattgatcctgatgaaacagtcctggcatttgctgacatgatgaagaagaaaatcgccatgccggctgagttcatctatgatggcagagattataacttatttgaccactactcagctgttgcccaaagaatcggggtttacactgctaaggactatgttgatatagtagagcacctggtggatcgatggaaggtgaaggagctagctgggctttcagccgaggggcgtaaagctcaggactacttgtgttcacttccctcgagaattagaaggttagaggagagagcgcaagaaaaggcccaaggaagcaccccagtgtccccattcagttggatatttgatagagaagtgaaactttaggtcatgaaatacagttaagactcctgcaatgcatttgaggaaacaaacacgaagaaagctgaatgccaacttctctttatatatccgatgtaatagaggttgtatatgtaacaggaggaattgcgtggctttggttagggtagcacatgttttctggatgtgttgtgtccttaaaaaataaatccgatagcggcagctgtgatagttttagatgtttgttttcataatgtctgttatatcgttgtacgagtagtatgtgttgtttttgttgaaacaatcttcatatcttagtgataaatgataatgctgtgtagtcatagtttttagtttgcaataaaaaaaaaaaaaaaa

SEQ ID NO: 122732 - protein, 397 aa, Gossypium hirsutum
MALNFNAIASKSQKLPCFALPPKATLRSPKFSMISTIPSGSKEVGNLKKPFTPPKEVPVQITHSMPPHKIEIFKSLEGWAENNILTHLKPVEKCWQPADFLPDPNSDGFHEQVKELRERAKEIPDDYFVVLVGDMITEEALSTYQTMLNTLDGTRDETGASLTPWAIWTRAWTAEENRHGDLLNKYLYLSGRVDMRQIERTIQYLIGSGMDPHTENSPYRGFIYTSFQERATFISHGNTGRLAKEYGDINLAQICGSIASDEKRHETAYTKIVEKLFEIDPDETVLAFADMMKKKIAMPAEFIYDGRDYNLFDHYSAVAQRIGVYTAKDYVDIVEHLVDRWKVKELAGLSAEGRKAQDYLCSLPSRIRRLEERAQEKAQGSTPVSPFSWIFDREVKL

SEQ ID NO: 122733 - DNA, 1191 bp, Helianthus annuus
  CDS (1)..(1191)
atggcgattcgcatcaatacggcgacgtttcaatcagacctgtaccgttcattcgcgtttcctcaaccgaaacctctcagatctcccaaattcgccatggcttccaccattggatccgctacaacgaaggttgaaagcaccaaaaagccctttacccctccaagggaggttcaccaacaggtgctacactcaatgccgccacaaaagatcgaaatcttcaaatccatggagggttgggccgaaaataacatattggttcacctaaagcctgtcgaaaaatgctggcaagcacaggatttcctaccagatcccgcatctgacggatttatggaacaagtggaggaattacgggctcgggctaaggagattccggatgattactttgttgttttggttggagatatgattactgaagaagcactgcctacttaccaaacaatgcttaatactcttgatggtgtgcgtgatgagaccggggctaccctacttcttgggctagtctggactcgggcttggaccgctgaagaaaacaggcacggtgatcttctacatcagtatctgtatcttagtgggcgggtcgacatgaggcagattcagaagacaattcagtacctcattgggtctggaatggacccccggaccgaaaacagtccttaccttgggttcatctacacttcatttcaagagcgtgccaccttcatctctcacggaaacacagcccggcacgcaaaggagcatggtgacgtgaagctggctcaaatgtgcggtataattgcagctgatgaaaaaaggcacgaaaccgcctacacaaaaatagtagaaaaactcttcgaaattgacccggacggcactgttctcgcttttgccgacatgatgaggaaaaagatctccatgcctgcacacttgatgtacgatgggcgtgatgataacctcttcgaaaatttctcagctgttgcccaaaggctcggtgtgtacactgcgaaggactatgcagacattctggagtttctggtgggccggtggaaggtggcggatttaaccgggctttctggtgaagggcgtaaagcccaagactatgtgtgcgggctggccccaagaatcagaaggcttgaggagaggaactcggcaagggcgaaggaaagtgtgaacgttccgttcagctggatctttgatagagaagtgaagctctga

SEQ ID NO: 122734 - protein, 396 aa, Helianthus annuus
MAIRINTATFQSDLYRSFAFPQPKPLRSPKFAMASTIGSATTKVESTKKPFTPPREVHQQVLHSMPPQKIEIFKSMEGWAENNILVHLKPVEKCWQAQDFLPDPASDGFMEQVEELRARAKEIPDDYFVVLVGDMITEEALPTYQTMLNTLDGVRDETGATLLLGLVWTRAWTAEENRHGDLLHQYLYLSGRVDMRQIQKTIQYLIGSGMDPRTENSPYLGFIYTSFQERATFISHGNTARHAKEHGDVKLAQMCGIIAADEKRHETAYTKIVEKLFEIDPDGTVLAFADMMRKKISMPAHLMYDGRDDNLFENFSAVAQRLGVYTAKDYADILEFLVGRWKVADLTGLSGEGRKAQDYVCGLAPRIRRLEERNSARAKESVNVPFSWIFDREVKL

SEQ ID NO: 122735 - DNA, 1447 bp, Linum usitatissimum
  CDS (132)..(1322)
cgacaaccattcaattcaaaagtttttccaatttccatttcctcatctgccttacccataaatctcgacggacaccaaaaaactcagccagcttgcccccaaacaacagcgcagaaaaaccttcaacaacaatggctctcaagctcaacccagtcaccaccttcccttcaacacgctccctcaacaacttctcctccagatctcctcgcacctttctcatggctgcttccactttcagttccacctccaccaaggaggctgaagctaaagaagtcacatggaccaccaaaagaggtgcatatgcaagtgacccattccatgcccccacaggaagctgggagatatttaagtctctgggaaggttggggctgagggatgttcttatttcgcacctgaagccagttgagaaatgctggcagccacaggatttcctgcccgaacctgagtcggatgggttcgaggagcaagtgaaggagctcagggcaagggccaaagaactgcccgatgactattttgttgtgctggttggggatatgatcaccgaagaagctctgccgacttaccagacaatgctcaacacccttgacggggtgagggacgagactggagccagccttacgccgtgggcaatctggacaagggcgtggaccgctgaagagaataggcacggtgaccttctcaacaagtatctatacctctctggaagggtggacatgaggcaaattgaaaagaccattcagtatctcatcggctctggaatggatccaaaaacagaaaacaacccctacctcggtttcatctacacctcattccaagagagggcaacgttcatctcccacggaaacacagccagactcgccaaggaccatggggacatgaagctggcgcagatctgcgggatcatcgcagcagacgagaaacggcacgaaaccgcatacaccaagatcgtcgagaagctcttcgagatcgaccctgacggtacagtgctggcactggcggacatgatgaggaagaagatatcgatgcccgcccacttgatgtacgatggagaagacgacaacctcttcgacaattactcgtcagtcgctcaacgcatcggggatactgccaaggattatgccgatatcctggagttcctggtggggaggtggaaagtggatgcttttacggggctttccggggaagggaacaaagctcaggattttgtctgcgggcttcctgcgaggattcgaaagttggaggagagggctgcggggagggcaaagcaaacgtcgaaatctgtcccgttcagctggatcttcagcagagaattggtactctaatggagtttgcttgagagtagagtgtggaatgattggagtatgatggcatgtacttgttttgttcgttatagttgtgtgtgttctaaaccttaaaccctaagtatcctgtgttgtctttttctagc

SEQ ID NO: 122736 - protein, 396 aa, Linum usitatissimum
MALKLNPVTTFPSTRSLNNFSSRSPRTFLMAASTFSSTSTKEAEAKEVTWTTKRGAYASDPFHAPTGSWEIFKSLGRLGLRDVLISHLKPVEKCWQPQDFLPEPESDGFEEQVKELRARAKELPDDYFVVLVGDMITEEALPTYQTMLNTLDGVRDETGASLTPWAIWTRAWTAEENRHGDLLNKYLYLSGRVDMRQIEKTIQYLIGSGMDPKTENNPYLGFIYTSFQERATFISHGNTARLAKDHGDMKLAQICGIIAADEKRHETAYTKIVEKLFEIDPDGTVLALADMMRKKISMPAHLMYDGEDDNLFDNYSSVAQRIGDTAKDYADILEFLVGRWKVDAFTGLSGEGNKAQDFVCGLPARIRKLEERAAGRAKQTSKSVPFSWIFSRELVL

SEQ ID NO: 122737 - DNA, 1493 bp, Olea europaea
  CDS (45)..(1217)
acaaattttctgattattgttttcattcaataatttgagaagaaatggcactgaaactttgctttccaccccacaagatgccttccttccccgatgctcgtatcagatctcacagggttttcatggcttcaactattcattctccttctatggaggtcggaaaagttaaaaagcctttcacgcctccacgagaggtacatgttcaagtaacccattccttagcaccagaaaagcgcgagatttttaattctctgaacaattgggcccaagagaatatcttggtgctcctaaaggatgtcgataaatgctggcaaccaagtgactttctacccgactcagcttctgaaggctttgacgagcaggtcatggagctacgtaaaagatgcaaggaaattcctgatgattatttcattgtcttggttggagatatgattacagaggaagcacttcccacttaccagacgatgcttaacaccctagatggagttcgagacgagacgggtgctagccttactccttgggctatttggactagagcatggactgctgaagagaataggcatggtgaccttctgaacaaatatctttatctttctggacgggttgacatgaagcaaattgaaaagacaattcaatacctaatcggttccgggatggatcctcgtacggaaaacaatccctacctgggatttatctacacttcattccaggagagggcaaccttcatttctcatggaaacacggctaggcttgccaaggaacacggggacctgaaattggctcagatatgcggtatcattgctgcagatgagaagcgccatgaaactgcgtataccaaaattgttgaaaagctattcgagattgaccctgatggcactgtgttggcacttgccgacatgatgaggaagaaagtctctatgccagctcatctgatgtacgatggccaggacgataatctctttgagaacttctcttctgtagcacagcggctaggggtctatactgccaaggactatgccgatattttggaatttttggtcggaaggtgggatattgagaagttgacaggtctttctggagaggggcgtaaagcacaagattacgtgtgcactttgcctcctagaatccgaaggttggaggagcgagcacaatcaagggtcaagaaagcatcggccacccccttcagctggattttcggtcgagaaatcaatctatgaacgctgcactgaacgtagggactcttctagcagcctttgataagcaaatatataaggtcggtctgtcgccatctggtctgtatcaagaaatgtgttaaaaataaacataaaattgttccagtggtatatttctcgttcctttatttgtttagttttgatcagatatgacagacgaataattcgagtcgagtgaggagacgatttcttgctgcaatctttgttttctttatcaactcgcttacgagtattataaaagtagaatcttgtgcttgttta

SEQ ID NO: 122738 - protein, 390 aa, Olea europaea
MALKLCFPPHKMPSFPDARIRSHRVFMASTIHSPSMEVGKVKKPFTPPREVHVQVTHSLAPEKREIFNSLNNWAQENILVLLKDVDKCWQPSDFLPDSASEGFDEQVMELRKRCKEIPDDYFIVLVGDMITEEALPTYQTMLNTLDGVRDETGASLTPWAIWTRAWTAEENRHGDLLNKYLYLSGRVDMKQIEKTIQYLIGSGMDPRTENNPYLGFIYTSFQERATFISHGNTARLAKEHGDLKLAQICGIIAADEKRHETAYTKIVEKLFEIDPDGTVLALADMMRKKVSMPAHLMYDGQDDNLFENFSSVAQRLGVYTAKDYADILEFLVGRWDIEKLTGLSGEGRKAQDYVCTLPPRIRRLEERAQSRVKKASATPFSWIFGREINL

SEQ ID NO: 122739 - DNA, 1643 bp, Ricinus communis
  CDS (49)..(1239)
ttccggcaaataacaaaaaaccaaaagaaaaaggtaagaaaaaaaacaatggctctcaagctcaatcctttcctttctcaaacccaaaagttaccttctttcgctcttccaccaatggccagtaccagatctcctaagttctacatggcctctaccctcaagtctggttctaaggaagttgagaatctcaagaagcctttcatgcctcctcgggaggtacatgttcaggttacccattctatgccaccccaaaagattgagatctttaaatccctagacaattgggctgaggagaacattctggttcatctgaagccagttgagaaatgttggcaaccgcaggattttttgccagatcccgcctctgatggatttgatgagcaagtcagggaactcagggagagagcaaaggagattcctgatgattattttgttgttttggttggagacatgataacggaagaagcccttcccacttatcaaacaatgctgaataccttggatggagttcgggatgaaacaggtgcaagtcctacttcttgggcaatttggacaagggcatggactgcggaagagaatagacatggtgacctcctcaataagtatctctacctatctggacgagtggacatgaggcaaattgagaagacaattcaatatttgattggttcaggaatggatccacggacagaaaacagtccataccttgggttcatctatacatcattccaggaaagggcaaccttcatttctcatgggaacactgcccgacaagccaaagagcatggagacataaagttggctcaaatatgtggtacaattgctgcagatgagaagcgccatgagacagcctacacaaagatagtggaaaaactctttgagattgatcctgatggaactgttttggcttttgctgatatgatgagaaagaaaatttctatgcctgcacacttgatgtatgatggccgagatgataatctttttgaccacttttcagctgttgcgcagcgtcttggagtctacacagcaaaggattatgcagatatattggagttcttggtgggcagatggaaggtggataaactaacgggcctttcagctgagggacaaaaggctcaggactatgtttgtcggttacctccaagaattagaaggctggaagagagagctcaaggaagggcaaaggaagcacccaccatgcctttcagctggattttcgataggcaagtgaagctgtaggtggctaaagtgcaggacgaaaccgaaatggttagtttcactctttttcatgcccatccctgcagaatcagaagtagaggtagaattttgtagttgcttttttattacaagtccagtttagtttaaggtctgtggaagggagttagttgaggagtgaatttagtaagttgttgatactgttgtgttcttgtgttgtcatgagtctgcttgatagtgagtttcttttgtttccttttgttgtgttcttttatctggtctctctctctctctctctctctttttctcttatcccaagtgtctcaagtataataagcaaacgatccatgtggcaattttgatgatggtgatcagtctcacaacttgatcttttgtcttctattggaaacacagcctgcttgtttgaa

SEQ ID NO: 122740 - protein, 396 aa, Ricinus communis
MALKLNPFLSQTQKLPSFALPPMASTRSPKFYMASTLKSGSKEVENLKKPFMPPREVHVQVTHSMPPQKIEIFKSLDNWAEENILVHLKPVEKCWQPQDFLPDPASDGFDEQVRELRERAKEIPDDYFVVLVGDMITEEALPTYQTMLNTLDGVRDETGASPTSWAIWTRAWTAEENRHGDLLNKYLYLSGRVDMRQIEKTIQYLIGSGMDPRTENSPYLGFIYTSFQERATFISHGNTARQAKEHGDIKLAQICGTIAADEKRHETAYTKIVEKLFEIDPDGTVLAFADMMRKKISMPAHLMYDGRDDNLFDHFSAVAQRLGVYTAKDYADILEFLVGRWKVDKLTGLSAEGQKAQDYVCRLPPRIRRLEERAQGRAKEAPTMPFSWIFDRQVKL

SEQ ID NO: 122741 - DNA, 1576 bp, Simmondsia chinensis
  CDS (98)..(1294)
gcatctatattctcattgattatttccttcaccgtcttcgtctcttctctctctaggttgagcggttaccaacagaagcacttaggagagagaagcaatggcgttgaagcttcaccacacggccttcaatccttccatggcggttacctcttcgggacttcctcgatcgtatcacctcagatctcaccgcgttttcatggcttcttctacaattggaattacttctaaggagatacccaatgccaaaaagcctcacatgcctcctagagaagctcatgtgcaaaagacccattcaatgccgcctcaaaagattgagattttcaaatccttggagggttgggctgaggagaatgtcttggtgcatcttaaacctgtggagaagtgttggcaaccacaagattttctacccgacccggcctccgagggatttatggatcaagtcaaggagttgagggaaagaaccaaagaaatcccggatgagtaccttgtggtgttggttggcgatatgatcactgaagaagctcttccgacctaccagacgatgctaaacacgctcgatggagtacgtgatgagacgggtgccagccttacttcttgggctatctggacccgggcatggaccgctgaagagaataggcacggtgatcttttgaacaagtatctttaccttactggtcgagttgacatgaagcagatagagaagacaatccagtatctaatcggatctggaatggaccctcgaagtgaaaacaacccctatctaggcttcatctacacttccttccaagagagagcaaccttcatctcccatggaaacaccgctaggctcgccaaagaccacggcgactttcaactagcacaagtatgtggcatcatcgctgcagatgagaagcgccacgaaactgcctacacaaaaattgtcgaaaagctctttgaaatcgacccagacggcgctgttctagcactagctgacatgatgagaaagaaggtttccatgccagcccacttaatgtatgatggcaaagatgacaatctctttgagaactactcagccgtcgctcaacaaattggagtttacaccgcgaaggactacgctgacatcctcgaacacctcgttaatcgctggaaagtcgagaatttaatgggtctgtctggcgagggacataaggctcaagatttcgtatgtgggttggccccgaggatcaggaaactcggggagagagctcagtcgctaagcaaaccggtatctcttgtccccttcagctggattttcaacaaggaattgaaggtttaaatgaggaagaagatgaagaaagaaggaaataatcaaagggaaagtaagtatgtgcatctatattctcattttgtttgaaaatgttgtggaagaagtacttgtagatactgttcggtttggtcatttacatgttgatttcatgagcatatttgaaattaggaacgccacccccccacccacccccaaaaccccaaaaaaaaaaaatgtactagtcttgctcaaagtttgtgttgtactagtgaaccattttgttactattaagtgtttcctcataatttaatt

SEQ ID NO: 122742 - protein, 398 aa, Simmondsia chinensis
MALKLHHTAFNPSMAVTSSGLPRSYHLRSHRVFMASSTIGITSKEIPNAKKPHMPPREAHVQKTHSMPPQKIEIFKSLEGWAEENVLVHLKPVEKCWQPQDFLPDPASEGFMDQVKELRERTKEIPDEYLVVLVGDMITEEALPTYQTMLNTLDGVRDETGASLTSWAIWTRAWTAEENRHGDLLNKYLYLTGRVDMKQIEKTIQYLIGSGMDPRSENNPYLGFIYTSFQERATFISHGNTARLAKDHGDFQLAQVCGIIAADEKRHETAYTKIVEKLFEIDPDGAVLALADMMRKKVSMPAHLMYDGKDDNLFENYSAVAQQIGVYTAKDYADILEHLVNRWKVENLMGLSGEGHKAQDFVCGLAPRIRKLGERAQSLSKPVSLVPFSWIFNKELKV

SEQ ID NO: 122743 - DNA, 1768 bp, Solanum commersonii
  CDS (187)..(1368)
  misc_feature (1537)..(1537): n is a, g, c or t
aattcggcacgagcggcacgagtcgagttttgttttttttttttagtcattttcacttgcccttgtcttcttctgcacgattttccttttaatttggtgcatctgtctcgaagcctcttcacttctctctccctgtggtgtctttaggcggaccaaacgaggtaccctgaaaaaccattggaaacaatggctctgaatttcaattctccgacgtttcagtccattaaaacgacaaggcgtccgtgttcaccactcagatctcctagagttttcatggcttcaacacttcgtcctccttctgtggaagatggaaatgttaagaagccattcagtcctccacgagaggtgcatgttcaagttactcattccatgccgccagagaagcgtgaaatctttgattccctgcatggttgggctgacaataatattttggtgcacctaaagcctgtcgagaagtgttggcaggccagtgactttcttcctgatcctgcctcagaaggatttgaagaccaagtcaaggagctgcgggagaggtgcaaggaaattcctgatgactactttgttgtattagttggagatatgatcacagaggaggctcttccaacttatcagacaatgcttaacaccctagatggagttcgtgatgaaactggtgccagcctaactccttgggctatttggactagggcatggactgctgaggaaaataggcatggtgaccttctcaacaaatatttatatctttctggaagagttgatatgaggcaaattgaaaagacaattcagtacctcattggttcagggatggatcctcgcacggaaaacaacccgtatctgggttttatctacacttccttccaagagagggctaccttcatttctcatggaaatacagctcggcatgctaaagagcatggggacatgaaactagcacaggtatgtggtataattgctgcagatgagaagcgccacgagaccgcatataccaagattgtggagaagctatttgaagttgacccagatggcactgtattggctgttgctgacatgatgaggaaaaaaatctcgatgccagctcatttaatgtatgatggccgggatgacaacctcttcgaacacttctccaccgtagctcaacgccttggtgtatacactgcaaaagattatgcagatattcttgaatttcttgtgggaagatgggaaatagagaaattgactggtctttctggcgaaggacacaaagcacgagattatgtatgtggtctggctccgcgtataagaaaattggaggagagggcacaagcaagggccaagcagaaggctcctgttcctttcagctgggtatttggtaaagatattaaactttgaatgatatatgttgtagggttatgttactttcggaacaccaatcaccataggaattctagtaagtaatttcaggttatggtatctatgaagtcattatttgtaaggaacatgctatggagttataactactgcactcgaatcctgtagataccttaaattttgtttttgntctgcaattgtttttgggtcatagcaagaaaaagacagcctttagtttttacctccccttttagaacatgtaggttctgtatgttcgttacaagtttgatatatgaaatgttgagtggttatgtataagaagtttaatgccatattttgcttctttttttccaaaaaaaaaaaaaaaaaaaaaaaaaaaaaaaaaaaaaaaaaaaaaaaaaaaaaaaaaaaaaaaaaaaaa

SEQ ID NO: 122744 - protein, 393 aa, Solanum commersonii
MALNFNSPTFQSIKTTRRPCSPLRSPRVFMASTLRPPSVEDGNVKKPFSPPREVHVQVTHSMPPEKREIFDSLHGWADNNILVHLKPVEKCWQASDFLPDPASEGFEDQVKELRERCKEIPDDYFVVLVGDMITEEALPTYQTMLNTLDGVRDETGASLTPWAIWTRAWTAEENRHGDLLNKYLYLSGRVDMRQIEKTIQYLIGSGMDPRTENNPYLGFIYTSFQERATFISHGNTARHAKEHGDMKLAQVCGIIAADEKRHETAYTKIVEKLFEVDPDGTVLAVADMMRKKISMPAHLMYDGRDDNLFEHFSTVAQRLGVYTAKDYADILEFLVGRWEIEKLTGLSGEGHKARDYVCGLAPRIRKLEERAQARAKQKAPVPFSWVFGKDIKL

SEQ ID NO: 122745 - DNA, 1507 bp, Solanum tuberosum
  CDS (56)..(1237)
cgcggccgcaaattgctcaggcgaaatagtcgaggtgaaaaacagagcatcaacaatggcactgaatatcaatggggtgtcgttaaaatctcacaaaatgttaccatttccttgttcttcagccagatctgagcgagttttcatggcttcaaccattcatcgaccttctgtggaagttggaagtgtgaagaaggcattcactcctccacgagaggtgcatgttcaagtaacccattccatgccaccagaaaagattgaagtttttgattctctgcgcgattgggctgcacagaatctcctggtgcacctaaaacctgtcgagaagtgttggcagcctactgattttcttcctgatcctgcttccgaggggtttgatgagcaggtcaaggagctaagggaaaggtgtaaggaaattcctgatgactactttgttgtattaattggagatatgatcacagaggaggcccttccaacttatcagaccatgataaacaccctggatggtgttcgtgatgaaactggcgccaccgtcactccctgggctatttggactagggcatggacagcggaggaaaataggcatggtgatcttctcaacaaatatctttatctttccggaagagttgatatgaagcaaattgaaaagacaatccagtacctaattggttctgggatggatcctcgcacggaaaacaacccctatctaggtttcgtctacacttctttaaggaagggcgtgacctttgtttcacatggaaacacagctaggctcgccaaggagcatggggatatgaaactagcacaaatatgtggttcaattgctgcagacgagaagcgccatgaaactgcatataccaagatcgtggagaagctactcgaggttgatcctgatggcgccgtattggctattggtgacatgatgaggaaaaatatctcaatgcctgctcatctgatgtatgatggcagggatgacaacctctttgaacacttctctgctgtagctcaacggcttggtgtatacactgccaaggactatgcagatattctggaattccacgtggggagatgggaagtagaaaaattaactggtctttccagtgaaggacgcagagcacaagattatgtatgtggactggctccgcggattagaaaattggaggagagagcacaggcaagggccaagcatgcgaagtccgttcctttcagctggatttttggtaaagagattaagctgtaagcacttgtgttgcagggcaatgccatattactttctgatcatataaatttgccataaatttatgttaagaaactttaagggtatgatatgaagtctgtgcagggtagttgaagctacttcgctagagtactggtttttctttttgcaattgtgtttaggccatagggaaaaacatagttcttagcaataaagatgaaccttttggtaccctttttctttttttcttttcaagtcaagattatgcattatatatatgacttattaggcggc

SEQ ID NO: 122746 - protein, 393 aa, Solanum tuberosum
MALNINGVSLKSHKMLPFPCSSARSERVFMASTIHRPSVEVGSVKKAFTPPREVHVQVTHSMPPEKIEVFDSLRDWAAQNLLVHLKPVEKCWQPTDFLPDPASEGFDEQVKELRERCKEIPDDYFVVLIGDMITEEALPTYQTMINTLDGVRDETGATVTPWAIWTRAWTAEENRHGDLLNKYLYLSGRVDMKQIEKTIQYLIGSGMDPRTENNPYLGFVYTSLRKGVTFVSHGNTARLAKEHGDMKLAQICGSIAADEKRHETAYTKIVEKLLEVDPDGAVLAIGDMMRKNISMPAHLMYDGRDDNLFEHFSAVAQRLGVYTAKDYADILEFHVGRWEVEKLTGLSSEGRRAQDYVCGLAPRIRKLEERAQARAKHAKSVPFSWIFGKEIKL

SEQ ID NO: 122747 - DNA, 1623 bp, Glycine max
  CDS (99)..(1334)
gaattcgcggccgcgccttacatcacatacttcactctcttgtttttccctttcctctcctcaaaatttcttctgattcatttaatctttactcatcaatggctctgagactgaaccctatccccacccaaaccttctccctcccccaaatggccagtctcagatctcccaggttccgcatggcctctaccctccgctccggttccaaagaggttgaaaatattaagaagccattcactcctcccagagaagtgcatgttcaagtaacccactctatgcctcctcagaagattgagatctttcaatctttggaggattgggctgaggagaacatcttggctcatcttaagcctgttgaaaaatgttggcaaccacaagattttttaccggatccttcctctgatggatttgaagagcaagtgaaggaactgagagagagggcaaaggagcttccagatgattactttgttgttctggtcggagacatgatcacagaggaagccctgcctacttaccaaacaatgttaaatactttggatggagttcgtgatgaaacaggtgccagccttacttcctgggcaatttggacaagggcatggactgctgaagaaaacagacacggtgatcttcttaacaaatatctttacttgagtggtcgagtcgacatgaaacaaattgaaaagacaattcagtaccttattgggtctggaatggatcctcgaaccgagaacagcccctaccttggtttcatttacacttcatttcaagagagggcaaccttcatatcccacggaaacacagccaggcttgctaaggagcacggcgatataaagttggcccagatctgcggcatgattgcctcagatgagaaacgccatgagactgcatacacgaagatagtggaaaagctatttgagtcggatcctgacggtacagttatggcgtttgccgacatgatgaggaagaagattgccatgccagcacacctcatgtatgacggccgtgatgacaacctttttgataactactcttcggtcgcgcagcgtattggggtctacaccgccaaggactatgctgacatacttgagtttctggtggggaggtggaaggtggagcagctaactggactttcaggcgagggaagaaaggctcaagaatacatttgcgggctgccgccaagaatcagaaggttggaggagagagctcaagcaagagtcaaggagtcgtcaacacttaaattcagttggattcatgacagggaaagtactactctaaatgcaccaagggaggagcatggtgaaatcttccggcaataccgttctgagaaatgttgaatagttgaaaattcagtttgtcatttttatcttttatttttcctccttttttggtctttgttatatgtcactgtaaggtgaagcagttgttcttgcatggttcgcaagttaagcagttaggggcagctgtagtattagaaatggtattttttttttttggtttcgcttttctctgtggtagtgatgtcttgtcgaagtattaagtaaacgtttttttttctctggcaattttggatgataaagaaaatttagttcttcctgtggttgggtccaaagcggccgcgaattc

SEQ ID NO: 122748 - protein, 411 aa, Glycine max
MALRLNPIPTQTFSLPQMASLRSPRFRMASTLRSGSKEVENIKKPFTPPREVHVQVTHSMPPQKIEIFQSLEDWAEENILAHLKPVEKCWQPQDFLPDPSSDGFEEQVKELRERAKELPDDYFVVLVGDMITEEALPTYQTMLNTLDGVRDETGASLTSWAIWTRAWTAEENRHGDLLNKYLYLSGRVDMKQIEKTIQYLIGSGMDPRTENSPYLGFIYTSFQERATFISHGNTARLAKEHGDIKLAQICGMIASDEKRHETAYTKIVEKLFESDPDGTVMAFADMMRKKIAMPAHLMYDGRDDNLFDNYSSVAQRIGVYTAKDYADILEFLVGRWKVEQLTGLSGEGRKAQEYICGLPPRIRRLEERAQARVKESSTLKFSWIHDRESTTLNAPREEHGEIFRQYRSEKC

SEQ ID NO: 122749 - DNA, 1610 bp, Spinacia oleracea
  CDS (17)..(1216)
caacaagaatccaacaatggctctgaatctcaaccccgtttccacaccatttcagtgtcgtcgattgccgtctttctcacctcgtcaaacgccttctcgcagatctcccaaattcttcatggcttccactctcagcagctcttctcctaaggaagcggaaagcctgaagaagccttttagccctccacgtgaggtgcatgtgcaagtaacacattccatgccacaagaaaagatagagatattcaagtccctggaaggttgggcggaagagaatctcctggtccatttgaaacctgttgagaaatgttggcagcctcaagattatcttcccgatccagcttcagaggattttcgtgatcaggtcaaggagattcaagagagggccaaggagattccagatgatctgtatgtggttttggtaggggatatgatcactgaagaagctcttccaacctaccaaactatgcttaataccttagatggagccaaggatgaaactggtgccagtcctacttcatgggctgtgtggacaagagcatggacggctgaagaaaataggcatggtgatcttttgaacaaatacctctatctttctggccgtgtggacatgagatcaatcgagaaaacaatccaatatttgattgggtcaggaatggatcctaggactgaaaacaatccttatcttggttttgtgtacacatcgtttcaagaaagggcgacctttgtttcccatggaaacagtgcaaggcttgccaaagagcatggggatctgaagatggcacagatatgtggcataattgcttcagatgagaagcggcatgaaactgcttacactaaaatagtggagaaactctttgaaatagaccctgatgctacggttcttgcttttgctgacatgatgaagaagaagatctctatgccagcacacctaatgtacgatggtcgtgatgacaatttgtttgatcatttttctgctgttgctcaacggcttggagtctacaccgcaaaggattacgctgacatattggaatttttggtgggccgttgggaggttgagaagcttacagggctgtcatcagagggacaaaaagctcaggactatgtatgcagtttacccccaagaatcagaaggctcgaagagagggctcgtgagagagccaagcaagcaccttctatgcctttcagttggatctttgatagacaagtaaagctttgagttcttactgtctcaacttatcgattcaagattcaagattcaagattcaagattagcactccccttataaacagaagagtgggttattagaggtacattttctttcatgctgatccggtagggtgtgcctcgaaagtgaaaattgttttgagggtaactggctgcttgtagatacgtttctttctttctttctttaccttgaaatccttcatatgattgggggttattagacgtctgttttcaacttcaaatggaattataggtcttattgtatttgttctctagtcttttgtttcttaataagtctaatatacccaattttgaatgtgattgttctatacttgtgttgttagtgactgttattgtgtacttgaaacatactccataatataaa

SEQ ID NO: 122750 - protein, 399 aa, Spinacia oleracea
MALNLNPVSTPFQCRRLPSFSPRQTPSRRSPKFFMASTLSSSSPKEAESLKKPFSPPREVHVQVTHSMPQEKIEIFKSLEGWAEENLLVHLKPVEKCWQPQDYLPDPASEDFRDQVKEIQERAKEIPDDLYVVLVGDMITEEALPTYQTMLNTLDGAKDETGASPTSWAVWTRAWTAEENRHGDLLNKYLYLSGRVDMRSIEKTIQYLIGSGMDPRTENNPYLGFVYTSFQERATFVSHGNSARLAKEHGDLKMAQICGIIASDEKRHETAYTKIVEKLFEIDPDATVLAFADMMKKKISMPAHLMYDGRDDNLFDHFSAVAQRLGVYTAKDYADILEFLVGRWEVEKLTGLSSEGQKAQDYVCSLPPRIRRLEERARERAKQAPSMPFSWIFDRQVKL

SEQ ID NO: 122751 - DNA, 1269 bp, Oryza sativa
  CDS (1)..(1269)
atggctgcaacagcaacaatggcgatgcctttagctaataggcttcgttgcaaaccaaacaccaactcttcttcaccatcaagaacactatttggtagacgagtcaccatgatcagtagcagccgctggatgtgcaggggtagtgctgtcagtggcagcgcgatcatgtcggcggcggccgacgtcgccgccgccgtgcggcgggaggaagacgaggagatgaggagctacctgtcgccggagaagctagaggtgctgacgcagatggagccgtgggtggaggagcacgtgctgccgctgctgaagccggtggaggcggcgtggcagccgtcggacctgctcccggacccggcggtgctcggcggcgaggggttccacgcggcgtgcgccgagctgcgggagcgcgccgccggcgtgccggacctgctcctggtgtgcctcgtggcgaacatggtgacggaggaggcgctgcccacgtaccagagctcgctgaaccgcgtccgcgccgtcggcgacctcaccggcgccgacgccacggcgtgggcgcggtggatccgcgggtggtccgccgaggagaaccgccacggcgacgtgctcaaccggtacatgtacctctccggccgcttcgacatggccgaggtggagcgcgccgtgcaccgcctcatccgctccggcatggccgtcgacccgccgtgcagcccgtaccacgccttcgtctacacggcgttccaggagcgcgccacggcggtcgcccacggcaacacggcgcggctggtcggcgcgcgagggcacggcgacgccgccctcgcccgcgtctgcggcaccgtcgccgccgacgagaagcggcacgaggccgcctacacccgcatcgtctccaggctcctcgaggccgacccggacgccggcgtgcgcgcggtggcgcgcatgctacggcgaggggtcgccatgccgacctcgcccatctccgacggccgccgcgacgacctctacgcctgcgtcgtgtccctcgccgagcaggccgggacgtacacggtgtcggactactgctccatcgtcgagcacctggtgcgggagtggcgcgtggaggagctcgcggcggggctctccggcgaagggcggcgcgcgcgggactacgtgtgcgagctgccgcagaagatccggaggatgaaggagaaggcccatgagagggcggtcaaggcccagaagaagcccatcagcatcccgattaattggatatttgataggcacgtcagtgtcatgctgccctaa

SEQ ID NO: 122752 - protein, 422 aa, Oryza sativa
MAATATMAMPLANRLRCKPNTNSSSPSRTLFGRRVTMISSSRWMCRGSAVSGSAIMSAAADVAAAVRREEDEEMRSYLSPEKLEVLTQMEPWVEEHVLPLLKPVEAAWQPSDLLPDPAVLGGEGFHAACAELRERAAGVPDLLLVCLVANMVTEEALPTYQSSLNRVRAVGDLTGADATAWARWIRGWSAEENRHGDVLNRYMYLSGRFDMAEVERAVHRLIRSGMAVDPPCSPYHAFVYTAFQERATAVAHGNTARLVGARGHGDAALARVCGTVAADEKRHEAAYTRIVSRLLEADPDAGVRAVARMLRRGVAMPTSPISDGRRDDLYACVVSLAEQAGTYTVSDYCSIVEHLVREWRVEELAAGLSGEGRRARDYVCELPQKIRRMKEKAHERAVKAQKKPISIPINWIFDRHVSVMLP

SEQ ID NO: 122753 - DNA, 1194 bp, Brassica napus
  CDS (1)..(1194)
atggttatggctatggatcggatcgcttttacctcatccccatccgcttatcaacgttcttatcatcctcatggctacagatcttcaagagttttcatgtcttctaccatccgtcccgcctctacagaggttaccaatggaaggaaaccctatctccctcctcgagaggtgcaacttcaagtgaaatactcaatgccaccacaaaagctggagatcttcaagtccttagaaggatgggctaatgacaacttgttgccttacctaaaacccgttgagaaatcatggcagccaactgatttcctccctgaaccagagtcagaaggtttctatgaccaagtcaaggagttaagagagaggtgtaaagagctttctgacgactactttgtagtccttattggtgatatgatcacagaggaagcacttcccacttatcagaccatgattaatacgttggacggtgttagagatgagactggagcaagtcctactccttgggcagtgtggacgagggcctggactgccgaggagaataggcatggtgatcttcttaacaagtatctttacctctctggaagagtagacatgaggcagattgaaaagaccattcaatatctgattggttctggaatggatccaaagactgaaaataacccttacttgggtttcatctacacatcttttcaagagagagcaactttcatctcccatggaaatactgctgggctagcaaaaaagctcggggactcaaaactagcgcagatttgcggcaccattgccgctgatgagaagcgtcatgagactgcttacaccaagattgtagaaaagctttttgagattgatcctgacaccactgttgtaggctttgctgacatgatgaagaaaaagatagccatgcctgctcatttgatgtatgatggttgtgatgacaatctgtttgagcatttctcctccgtggcccagaggcttggtgtctacactgctagggactatgctgatatactggagtttcttgtgaggcggtggaacgtggagaacttggtaggcctttctggtgatggacacaaggcccaggactatctctgtaaattgcctgctaggatccgcaaactcgaagagagggctcaagggagaaacaaagatgctgcaagaaacatacccttcagctggatattcggccgagagatcagggcttaa

SEQ ID NO: 122754 - protein, 397 aa, Brassica napus
MVMAMDRIAFTSSPSAYQRSYHPHGYRSSRVFMSSTIRPASTEVTNGRKPYLPPREVQLQVKYSMPPQKLEIFKSLEGWANDNLLPYLKPVEKSWQPTDFLPEPESEGFYDQVKELRERCKELSDDYFVVLIGDMITEEALPTYQTMINTLDGVRDETGASPTPWAVWTRAWTAEENRHGDLLNKYLYLSGRVDMRQIEKTIQYLIGSGMDPKTENNPYLGFIYTSFQERATFISHGNTAGLAKKLGDSKLAQICGTIAADEKRHETAYTKIVEKLFEIDPDTTVVGFADMMKKKIAMPAHLMYDGCDDNLFEHFSSVAQRLGVYTARDYADILEFLVRRWNVENLVGLSGDGHKAQDYLCKLPARIRKLEERAQGRNKDAARNIPFSWIFGREIRA

SEQ ID NO: 122755 - DNA, 1230 bp, Brassica napus
  CDS (1)..(1230)
atgactatgactcttcccttgaattcgacgaagacgacgccaatgaagcagaatccggtggtggcggtatcttcttcgccgtctctttccttgggtccgagttttcctcgccgtcttcgagtttcatgcgttgccactagccctagaaaaacaagtgaacaaacacacaagaagacgtttcgacccatcaaagaagtaccaaaccaaataacccacacaataacacaagagaagcttgagatcttcaaatcaatggagaattgggcacaagaaaacttactgtcttacctcaaacccgtcgaaacttcatggcaaccacaagaccttttgcctcagaccaatgacgaagaccaattctacgagcaagtgaaagagctaagagatcgaacaagagagattcccgacgattactttgtagttcttgtcggagatatgatcaccgaagaagcattgccaacttatcaaacgactttgaatacactcgacggtgtcaaggatgagaccggcgggagtttgacgccgtgggcggtttgggttagagcgtggacggcagaggaaaaccgacacggtgatttgttgaataagtatctctatctatctggtcgtgttgatatgcaacatgttgaaagaactattcaatatctaatcggatctggcatggactcaaaatttgaaaacaacccttacaatggcttcatttacacgtctttccaagagagagcgactttcatctcccacgccaacacggcgaagctagccactacctacggcgacaccactctcgccaagatctgcggtacaatcgcagctgacgagaagcggcacgagacagcttacacacggatcgtcgagaagctcttcgagatcgatcctgatgggaccgtacaggctctagcgagcatgatgaggaagcgaatcacgatgccggctcatctgatgcacgatggtcgcgacgacaatctgttcgaccattacggtgcggtggcgcaacgaataggagtttatacggcgatggattacgccgggatattggagtttttgctgaggcggtggaaggtggagagcttaggagtgggtttgaccggcgaaggaaggagagcacaggagtatctgtgtagcctgccgcagaggatcacgaggttagaggaaagggctaacgatagagtgaaacttgggtcgaggccttctgttgccttcagctggatctacgggagagaagtcggattataa

SEQ ID NO: 122756 - protein, 409 aa, Brassica napus
MTMTLPLNSTKTTPMKQNPVVAVSSSPSLSLGPSFPRRLRVSCVATSPRKTSEQTHKKTFRPIKEVPNQITHTITQEKLEIFKSMENWAQENLLSYLKPVETSWQPQDLLPQTNDEDQFYEQVKELRDRTREIPDDYFVVLVGDMITEEALPTYQTTLNTLDGVKDETGGSLTPWAVWVRAWTAEENRHGDLLNKYLYLSGRVDMQHVERTIQYLIGSGMDSKFENNPYNGFIYTSFQERATFISHANTAKLATTYGDTTLAKICGTIAADEKRHETAYTRIVEKLFEIDPDGTVQALASMMRKRITMPAHLMHDGRDDNLFDHYGAVAQRIGVYTAMDYAGILEFLLRRWKVESLGVGLTGEGRRAQEYLCSLPQRITRLEERANDRVKLGSRPSVAFSWIYGREVGL

SEQ ID NO: 122757 - DNA, 1197 bp, Brassica napus
  CDS (1)..(1197)
atggctatgtctatggatcggatcgtcgtttctccttcttcttacgtttgccgtccctctcaagctcggggatctagatcttccgtagtttccatggcttccacgattcgctccgcttctacttacagagaggttactaatggaaagaaactctacatccctccacgagaggtgcatgttcaagtgaaacactctatgccaccacagaagctggagatcttcaagtccttagaaggatgggctgatgagaccctcttgacttacttaaagcccgttgagaagtcctggcagccgacagactttctcccggaagctgagtctgaagggttctacgaccaagtcaaggagctaagggagaggtgtaaggagcttccagacgagtatttcgttgtgcttgttggtgatatgatcactgaagaagcgcttccgacttaccagaccatgttgaacacattggacggtgttagggatgagacgggagcgagtcctactccttgggcggtgtggactcgggcttggactgctgaagagaataggcatggggatttgcttaacaagtatctttatttgtctgggagagttgacatgaggcagattgagaagactattcagtaccttattggctctggaatggatcctaaaactgagaacaacccttacttgggtttcatctacacttccttccaagagagagccaccttcatctcccatggaaacactgctaggctggcgaaagatcgtggagacttgaaacttgcgcagatatgcgggaccattgctgctgatgagaagcgccacgagactgcttacaccaagattgtggagaagctctttgaaattgacgctgatggcacgatcttgggattggctgatatgatgaagaaaaagatctcaatgcctgcgcatttaatgtacgatggccaagatgataacctgtttgagcacttctcgaccgttgctcagaggctaggtgtatacactgccaaggactatgctgatattctggagtttcttgttgagctgtggaacgttgagactttgtcaggcctttctagtgaaggacacatggcccaggactttgtctgcggattacctgcaagaatccgcaggattgaagagagagctcaaggaagagccaaagaagcagccaaaaacgtaccatttagctggatctttggtcgagagattagggcttaa

SEQ ID NO: 122758 - protein, 398 aa, Brassica napus
MAMSMDRIVVSPSSYVCRPSQARGSRSSVVSMASTIRSASTYREVTNGKKLYIPPREVHVQVKHSMPPQKLEIFKSLEGWADETLLTYLKPVEKSWQPTDFLPEAESEGFYDQVKELRERCKELPDEYFVVLVGDMITEEALPTYQTMLNTLDGVRDETGASPTPWAVWTRAWTAEENRHGDLLNKYLYLSGRVDMRQIEKTIQYLIGSGMDPKTENNPYLGFIYTSFQERATFISHGNTARLAKDRGDLKLAQICGTIAADEKRHETAYTKIVEKLFEIDADGTILGLADMMKKKISMPAHLMYDGQDDNLFEHFSTVAQRLGVYTAKDYADILEFLVELWNVETLSGLSSEGHMAQDFVCGLPARIRRIEERAQGRAKEAAKNVPFSWIFGREIRA

SEQ ID NO: 122759 - DNA, 1209 bp, Glycine max
  CDS (1)..(1209)
atgcttccattgcttcatctgactcactcatcaatggctctgagactgaaccctatccccacccaaaccttctccctcccccaaatgcccagcctcagatctccccgcttccgcatggcttccaccctccgctccggttccaaagaggttgaaaatattaagaagccattcactcctcccagagaagtgcatgttcaagtaacccactctatgcctccccagaagattgagattttcaaatctttggaggattgggctgaccagaacatcttgactcatcttaaacctgtagaaaaatgttggcaaccacaggattttttacccgacccctcctcagatggatttgaagagcaagtgaaggaactgagagagagagcaaaggagattccagatgattactttgttgttcttgtcggagacatgatcacagaggaagctctgcctacttaccaaactatgttaaatactttggatggagttcgtgatgaaacaggtgccagccttacttcctgggcaatttggacaagggcatggactgctgaagaaaacagacacggtgatcttcttaacaaatatctgtacttgagtggacgagttgacatgaaacaaattgagaagacaattcagtaccttattgggtctgggatggatcctcggaccgagaacagcccctaccttggtttcatttacacttcatttcaagagagggcaaccttcatatcccacggaaacacggccaggcttgcgaaggagcatggtgacataaaattggcacagatctgcggcatgattgcctcagatgagaagcgccacgagactgcatacacaaagatagtggaaaagctgtttgaggttgatcctgatggtacagttatggcatttgccgacatgatgaggaagaagattgctatgccagcacaccttatgtatgacggccgcgacgacaacctgtttgataactactctgccgtcgcgcagcgcattggggtctacactgcaaaggactatgctgacatactcgaatttctggtggggaggtggaaggtggagcagctaaccggactttcaggtgagggaagaaaggctcaggaatacgtttgtgggctgccaccaagaatcagaaggttggaggagagagctcaagcaagaggcaaggagtcgtcaacacttaaattcagttggattcatgacagggaagtactactctaa

SEQ ID NO: 122760 - protein, 402 aa, Glycine max
MLPLLHLTHSSMALRLNPIPTQTFSLPQMPSLRSPRFRMASTLRSGSKEVENIKKPFTPPREVHVQVTHSMPPQKIEIFKSLEDWADQNILTHLKPVEKCWQPQDFLPDPSSDGFEEQVKELRERAKEIPDDYFVVLVGDMITEEALPTYQTMLNTLDGVRDETGASLTSWAIWTRAWTAEENRHGDLLNKYLYLSGRVDMKQIEKTIQYLIGSGMDPRTENSPYLGFIYTSFQERATFISHGNTARLAKEHGDIKLAQICGMIASDEKRHETAYTKIVEKLFEVDPDGTVMAFADMMRKKIAMPAHLMYDGRDDNLFDNYSAVAQRIGVYTAKDYADILEFLVGRWKVEQLTGLSGEGRKAQEYVCGLPPRIRRLEERAQARGKESSTLKFSWIHDREVLL

SEQ ID NO: 122761 - DNA, 1200 bp, Brassica napus
  CDS (1)..(1200)
atggcattgaagtttaatcctttggtatctcagccatacaaactcgcttcctcggctcgtccgccagtctctactttcagatctcccaagttcctatgcctcgcttcttcttcttctcctgctctcagctccaaggaggtcgagagcttgaagaagccattcaccccaccaagggaagtccaccttcaagtcctgcactccatgccaccccaaaagatcgaaatcttcaaatccatggaagactgggccgagcagaaccttctacctcacctcaaagacgtggagaagtcatggcagccccaggacttcttacccgaccctgcttccgacggtttcgaagatcaggtaaaagagttaagagaaagagcaagagagctcccagatgattacttcgttgtcttggttggagacatgatcacagaagaagcgcttcccacctaccaaacaatgttaaacactttggatggagtaagggatgagactggcgctagccccacttcatgggccgtttggactagagcttggaccgctgaagagaatcgccacggtgatcttctcaataagtatctttacttgtctggtcgtgttgacatgaggcagattgaaaagactattcagtacctgattggttccggaatggatccacgcacagagaacaacccttaccttggcttcatctacacttcattccaagagagagccaccttcgtctctcacggcaacacagctcgccaagccaaagagcacggagacctcaagctagcgcaaatctgcgggacaatagctgcagacgagaagcgtcacgagacagcttacaccaagatagttgagaagcttctcgagattgatcctgacggcactgtggtggcctttgcggatatgatgaggaagaaaatctcgatgcctgctcacttgatgtacgatgggcgtgatgataacctctttgacaacttctcctccgtggctcagaggctcggtgtttacactgccaaagactatgcggacattcttgagtttttggtcgggaggtggaggatcgagagcttgactgggctttcgggtgaagggaacaaagcgcaagagtatttgtgtgggttgactccgagaatcaggaggttggatgagagagctcaagcaagagccaagaaaggacctaagattccttttagctggatacatgacagagaagtgcagctctga

SEQ ID NO: 122762 - protein, 399 aa, Brassica napus
MALKFNPLVSQPYKLASSARPPVSTFRSPKFLCLASSSSPALSSKEVESLKKPFTPPREVHLQVLHSMPPQKIEIFKSMEDWAEQNLLPHLKDVEKSWQPQDFLPDPASDGFEDQVKELRERARELPDDYFVVLVGDMITEEALPTYQTMLNTLDGVRDETGASPTSWAVWTRAWTAEENRHGDLLNKYLYLSGRVDMRQIEKTIQYLIGSGMDPRTENNPYLGFIYTSFQERATFVSHGNTARQAKEHGDLKLAQICGTIAADEKRHETAYTKIVEKLLEIDPDGTVVAFADMMRKKISMPAHLMYDGRDDNLFDNFSSVAQRLGVYTAKDYADILEFLVGRWRIESLTGLSGEGNKAQEYLCGLTPRIRRLDERAQARAKKGPKIPFSWIHDREVQL

SEQ ID NO: 122763 - DNA, 1197 bp, Brassica napus
  CDS (1)..(1197)
atggcattgaagcttaaccctttggcatctcagccttacaacttcccttcctcggctcgtccgccaatctctactttcagatctcccaagttcctctgcctcgcttcttcttctcccgctctcagctccaaggaggttgagagtttgaagaagccattcacaccacctaaggaagtgcacgttcaagtcctgcattccatgccaccccagaagatcgagatcttcaaatccatggaagactggaccgagcagaaccttctaactcagctcaaagacgtggagaagtcgtggcagccccaggacttcttacccgaccctgcatccgatgggtttgaagatcaggtaagagagttaagagaaagagcaagagaactccctgatgattacttcgttgttctggtgggagacatgatcacggaagaagcgcttccgacctatcaaaccatgctgaacactttggatggagtgagggatgaaactggcgctagccccacttcatgggctatttggacaagagcttggactgcggaagagaaccgacacggtgatcttctcaataagtatctttacttgtctggacgtgttgacatgaggcagattgaaaagaccattcagtacttgattggttctggaatggatcctagaacagagaacaatccttacctcggcttcatctacacttcattccaagaaagagccaccttcatctctcacggaaacacagctcgccaagccaaagagcacggagacctcaagctagcccaaatctgcggcacaatagctgcagacgagaagcgtcatgagacagcttacaccaagatagttgagaagctctttgagattgatcctgatggtactgtgatggcgtttgcagacatgatgaggaagaaaatctcgatgcctgctcacttgatgtacgatgggcgcgatgaaagcctctttgacaacttctcttccgtggctcagaggctcggtgtgtacactgctaaagactatgcggacattcttgagtttttggttgggaggtggaagattgagagcttaaccgggctttcaggtgaaggaaacaaagcgcaagagtacttgtgtgggttgactccgagaatcaggaggttggatgagagagctcaagcaagagccaagaaaggacccaaggttcctttcagctggatacatgacagagaagtgcagctctaa

SEQ ID NO: 122764 - protein, 398 aa, Brassica napus
MALKLNPLASQPYNFPSSARPPISTFRSPKFLCLASSSPALSSKEVESLKKPFTPPKEVHVQVLHSMPPQKIEIFKSMEDWTEQNLLTQLKDVEKSWQPQDFLPDPASDGFEDQVRELRERARELPDDYFVVLVGDMITEEALPTYQTMLNTLDGVRDETGASPTSWAIWTRAWTAEENRHGDLLNKYLYLSGRVDMRQIEKTIQYLIGSGMDPRTENNPYLGFIYTSFQERATFISHGNTARQAKEHGDLKLAQICGTIAADEKRHETAYTKIVEKLFEIDPDGTVMAFADMMRKKISMPAHLMYDGRDESLFDNFSSVAQRLGVYTAKDYADILEFLVGRWKIESLTGLSGEGNKAQEYLCGLTPRIRRLDERAQARAKKGPKVPFSWIHDREVQL

SEQ ID NO: 122765 - DNA, 1176 bp, Triticum aestivum
  CDS (1)..(1176)
atgtatctgatggcatccctgccttcccacggcgccttccatgcacctctttggtattcttgctcgaggagcaaaaccatggtgatggccacggcttccaaggccaaggatggagttcccggaaaggccttcagtcctcgcaaggcgtctcatagagaccgagtagctcactcattgccacctgaaaagagagagatttttgattcgcttaacagttgggcagaggacaacattctggtcctcttgaagccggttgaaagatcctggcagccacaggactacctgccagacccttccttggatagattttatgacgaagtcaaggagctgagggagcgagccgaggagatccccgacgactacttggtatgtctggttggagacatggtcactgaggaagcactccctacctatcagaaaatgctcaatatccttgatggcggtgtccgcgacgaaactggcagcagcccaaccagctgggctgtctggacgagggcatggacggccgaggagaaccgacacggtgatctcatgaacaagtatatttatctcactgggagggctgatatgaggcaggtggagaagaccatacagtatctggttggtgctggaattgatccaaaaaccgaggccaacccctatgagtttttcatttacacatctttccaagagagggcaacattcatatctcacggcaacactgcaaggcacgccaggaagtacggggacttgaagctggcccagatatgcggcaccatcgcggctgacgaaaggcgccatgagcttgcctataccaagatagtggagaagctcttcgtggtcgatcccgactacacggtcctggccttcgccagcattatgaagaagaagatcacgatgcctgcccacctgatgtatgatgggcaggaggacaacctctttgagcacttcagcgcggtggcacagaggctgggcgtttacaccgccatggactacgccgacatcctcgagttcctggtcaagaggtggaacgtcgccggcctcactgggttgtccggtgaagggcggcgcgctcaggattacctatgctccctaggaccaaggtttaggaagctggtggagcgagctcaggggagcgggaagcagttgcctgttgttcctttcagctggatctatggccggaaagtgcagctttga

SEQ ID NO: 122766 - protein, 391 aa, Triticum aestivum
MYLMASLPSHGAFHAPLWYSCSRSKTMVMATASKAKDGVPGKAFSPRKASHRDRVAHSLPPEKREIFDSLNSWAEDNILVLLKPVERSWQPQDYLPDPSLDRFYDEVKELRERAEEIPDDYLVCLVGDMVTEEALPTYQKMLNILDGGVRDETGSSPTSWAVWTRAWTAEENRHGDLMNKYIYLTGRADMRQVEKTIQYLVGAGIDPKTEANPYEFFIYTSFQERATFISHGNTARHARKYGDLKLAQICGTIAADERRHELAYTKIVEKLFVVDPDYTVLAFASIMKKKITMPAHLMYDGQEDNLFEHFSAVAQRLGVYTAMDYADILEFLVKRWNVAGLTGLSGEGRRAQDYLCSLGPRFRKLVERAQGSGKQLPVVPFSWIYGRKVQL

SEQ ID NO: 122767 - DNA, 1179 bp, Zea mays
  CDS (1)..(1179)
atggcgttgagggtgtcccccgtgtcgcatggcgccgcggcagcgccgctgccgccgctcgcccggaggaggatggcccgtggggtggtggtggccatggcgtccaccatcaacagggtcaagactgtcaaagaaccctatactcctccacgtgaggtacatcgccaaattacccattcactaccacctcagaagcgggagattttcgattcacttcaaccttgggccaaggataacctattgaacctgctgaagccagttgaaaagtcatggcagccacaggacttcctaccagagccgtcttctgatggattttatgatgaggttaaagaactgagggaacgggcaaatgaaatacctgatgagtactttgtttgcttagttggtgatatggttactgaggaagccttaccaacctatcaaacaatgcttaacacccttgatggagtccgggatgaaactggtgcaagtccaaccacgtgggcagtttggacaagggcatggacagctgaagagaacagacatggtgacctccttaataagtacatgtaccttactggacgggttgacatgaaacaaattgagaagaccattcagtatctgattggttccggaatggatcctgggactgagaacaacccgtacttgggtttcctttacacatcatttcaagaaagagcaacatttgtatcacatggaaacactgcaagacatgccaaggagtatggtgatctcaagctggcacagatatgcggtacgatagcagctgacgaaaagcgccacgaaacagcctacaccaagatagtcgagaagctcttcgagactgatcctgactacacggtgcttgcattttctgacatgatgaggaagaagatcacaatgcctgctcatctcatgtacgatggcaaggacgacaacctgtttgagcacttcagtgcagtagcacagaggatgggtgtgtacactgctaaagattatgccgacatcctcgagttcttggtccagaggtggaaagtcgcagatctcaccgggctgtctggagaagggagaagggcgcaagatttcgtctgtaccttggcaccgagaatcaggcggttggatgaaagagctcgggcaagggcgaagcaagcaccggttattcctttcagttggatttatggccgcaaggtgcagctttaa

SEQ ID NO: 122768 - protein, 392 aa, Zea mays
MALRVSPVSHGAAAAPLPPLARRRMARGVVVAMASTINRVKTVKEPYTPPREVHRQITHSLPPQKREIFDSLQPWAKDNLLNLLKPVEKSWQPQDFLPEPSSDGFYDEVKELRERANEIPDEYFVCLVGDMVTEEALPTYQTMLNTLDGVRDETGASPTTWAVWTRAWTAEENRHGDLLNKYMYLTGRVDMKQIEKTIQYLIGSGMDPGTENNPYLGFLYTSFQERATFVSHGNTARHAKEYGDLKLAQICGTIAADEKRHETAYTKIVEKLFETDPDYTVLAFSDMMRKKITMPAHLMYDGKDDNLFEHFSAVAQRMGVYTAKDYADILEFLVQRWKVADLTGLSGEGRRAQDFVCTLAPRIRRLDERARARAKQAPVIPFSWIYGRKVQL

SEQ ID NO: 122769 - DNA, 1191 bp, Linum usitatissimum
  CDS (1)..(1191)
atggctctcaagctcaacccagtcaccaccttcccttcgacccgctccctcaacaacttctcctccagatctcctcgcacctttctcatggctgcttccactttcaattccacttccaccaaggaggctgagaagctaaagaagtcacatggaccaccaaaagaggtgcatatgcaagtgacccattccatgcccccacagaagctggagatctttaagtcccttgaaggttgggcagaggacgttctgttgccgcacctgaagccggttgagaaatgctggcagccacaagatttcctgcccgaacccgagtcggatgggttcgaggagcaagtgaaggagctcagggcaagggctaaagaactccccgatgactattttgttgtgctggttggggatatgatcaccgaagaagctctaccgacttaccagacaatgctcaacacccttgacggggtgagggacgagactggagccagccttacgccgtgggcaatctggacaagggcgtggaccgctgaagagaataggcacggtgaccttctcaacaagtatctttacctctctggaagggtggacatgaggcaaattgaaaagaccattcagtatctcatcggctctggaatggatccaaaaacagaaaacaacccctacctcggtttcatctacacctcattccaagagagggcaacgttcatctcccacggaaatacggccagactcgccaaggaccacggggacatgaagctggcgcagatctgcgggatcatcgcagcagacgagaagcggcacgaaacagcatacaccaagatcgtcgagaagctcttcgagatcgaccctgacggtacagtgttggctctggcggacatgatgaggaagaagatatcgatgcccgcacacttgatgtacgatggagaagacgacaacctcttcgacaattactcgtcggtcgctcaacgcatcggggtgtatactgccaaggattatgctgatatcctggagttcctggtggggaggtggaaagtggatgcttttacgggactttccggggaagggaacaaagctcaggagtttgtctgtgggcttccagcgaggattcgaaaattggaggagagggctgcggggagggcaaagcaaacgtcgaaatctgtcccattcagctggatcttcagcagagaattggtactctaa

SEQ ID NO: 122770 - protein, 396 aa, Linum usitatissimum
MALKLNPVTTFPSTRSLNNFSSRSPRTFLMAASTFNSTSTKEAEKLKKSHGPPKEVHMQVTHSMPPQKLEIFKSLEGWAEDVLLPHLKPVEKCWQPQDFLPEPESDGFEEQVKELRARAKELPDDYFVVLVGDMITEEALPTYQTMLNTLDGVRDETGASLTPWAIWTRAWTAEENRHGDLLNKYLYLSGRVDMRQIEKTIQYLIGSGMDPKTENNPYLGFIYTSFQERATFISHGNTARLAKDHGDMKLAQICGIIAADEKRHETAYTKIVEKLFEIDPDGTVLALADMMRKKISMPAHLMYDGEDDNLFDNYSSVAQRIGVYTAKDYADILEFLVGRWKVDAFTGLSGEGNKAQEFVCGLPARIRKLEERAAGRAKQTSKSVPFSWIFSRELVL

SEQ ID NO: 122771 - DNA, 1191 bp, Brassica napus
  CDS (1)..(1191)
atggctatgtctatggatcggatcgtcgtttctccttcttcttacgtttgccgtccctctcaagctcggggatctagatcttccgtagtttccatggcttccacgattcgctccgcttctacagaggttactaatggaaagaaactctacatccctccacgagaagtgcatgtccaagtgaaacactctatgccaccacagaagctggagatcttcaaatccttagaaggatgggctgatgagaccctcttgacttacttaaaacccgttgagaagtcctggcagccgacagactttctcccggaagctgagtctgaagggttctacgaccaagtcaaggagctaagggagaggtgtaaggagcttccagacgagtatttcgttgtgcttgttggtgatatgatcactgaagaagcgcttccgacttaccagaccatgttgaacaccttggacggagttagggatgagacgggagcgagtcctactccttgggcggtgtggactcgggcttggactgctgaagagaataggcatggggatttgcttaacaagtatctttatttgtctgggagagttgacatgaggcagattgagaagactattcagtaccttattggctctggaatggatcctaaaactgagaacaacccttacttgggtttcatctacacttccttccaagagagagccaccttcatctcccatggaaacactgctaggctggcgaaagatcgtggagacttgaaacttgcgcagatatgcgggaccattgctgctgatgagaagcgccacgagactgcttacaccaagattgtggagaagctctttgaaattgacgctgatggcacgatcttgggattggctgatatgatgaagaaaaagatctcaatgcctgcgcatttaatgtacgatggccaagatgataacctgtttgagcacttctcgaccgttgctcagaggctaggtgtatacactgccaaggactatgctgatattctggagtttcttgttgagctgtggaacgttgagactttgtcaggcctttctagtgaaggacacatggcccaggactttgtctgcggattacctgcaagaatccgcagaattgaagagagagctcaaggaagagccaaggaagcagccaaaaacgtgccattcagctggatctttggtcgagagattagggcttaa

SEQ ID NO: 122772 - protein, 396 aa, Brassica napus
MAMSMDRIVVSPSSYVCRPSQARGSRSSVVSMASTIRSASTEVTNGKKLYIPPREVHVQVKHSMPPQKLEIFKSLEGWADETLLTYLKPVEKSWQPTDFLPEAESEGFYDQVKELRERCKELPDEYFVVLVGDMITEEALPTYQTMLNTLDGVRDETGASPTPWAVWTRAWTAEENRHGDLLNKYLYLSGRVDMRQIEKTIQYLIGSGMDPKTENNPYLGFIYTSFQERATFISHGNTARLAKDRGDLKLAQICGTIAADEKRHETAYTKIVEKLFEIDADGTILGLADMMKKKISMPAHLMYDGQDDNLFEHFSTVAQRLGVYTAKDYADILEFLVELWNVETLSGLSSEGHMAQDFVCGLPARIRRIEERAQGRAKEAAKNVPFSWIFGREIRA

SEQ ID NO: 122773 - DNA, 1200 bp, Brassica napus
  CDS (1)..(1200)
atggcattgaagtttaatcctttggtatctcagccatacaaactcgcttcctcggctcgtccgccagtctctactttcagatctcccaagttcctctgcctcgcttcttcttcttctcctgctctcagctccaaggaggtcgagagcttgaagaagccattcaccccaccaagggaagtccaccttcaagtcctgcactccatgccaccccaaaagatcgaaatcttcaaatccatggaagactgggccgagcagaaccttctacctcacctcaaagacgtggagaagtcatggcagccccaggacttcttacccgaccctgcttccgacggtttcgaagatcaggtaaaagagttaagagaaagagcaagagagctcccagatgattacttcgttgtcttggttggagacatgatcacagaagaagcgcttcccacctaccaaacaatgttaaacactttggatggagtaagggatgagactggcgctagccccacttcatgggccgtttggactagagcttggaccgctgaagagaatcgccacggtgatcttctcaataagtatctttacttgtctggtcgtgttgacatgaggcagattgaaaagactattcagtacctgattggttccggaatggatccacgcacagagaacaacccttaccttggcttcatctacacctcattccaagaaagagccaccttcgtctctcacggcaacacagctcgccaagccaaagagcacggagacctcaagctagcccaaatctgtgggacaatagctgcagacgagaagcgtcacgagacggcttacaccaagatagttgagaagcttcttgagattgatcctgacggcactgtggtggcctttgcggatatgatgaggaagaaaatctcgatgcctgctcacttgatgtacgatgggcgtgatgataacctctttgacaacttctcctccgtggctcagaggcttggtgtttacactgctaaagactatgcggacattcttgagtttttggtcgggaggtggaagatagagagcttgagtgggctttcgggtgaaggaaacaaagcgcaagagtatttgtgtgggttgactccgagaatcaggaggttggatgagagagctcaagcaagagccaagaaaggacctaagattccattcagctggatacatgacagagaagtgcagctctga

SEQ ID NO: 122774 - protein, 399 aa, Brassica napus
MALKFNPLVSQPYKLASSARPPVSTFRSPKFLCLASSSSPALSSKEVESLKKPFTPPREVHLQVLHSMPPQKIEIFKSMEDWAEQNLLPHLKDVEKSWQPQDFLPDPASDGFEDQVKELRERARELPDDYFVVLVGDMITEEALPTYQTMLNTLDGVRDETGASPTSWAVWTRAWTAEENRHGDLLNKYLYLSGRVDMRQIEKTIQYLIGSGMDPRTENNPYLGFIYTSFQERATFVSHGNTARQAKEHGDLKLAQICGTIAADEKRHETAYTKIVEKLLEIDPDGTVVAFADMMRKKISMPAHLMYDGRDDNLFDNFSSVAQRLGVYTAKDYADILEFLVGRWKIESLSGLSGEGNKAQEYLCGLTPRIRRLDERAQARAKKGPKIPFSWIHDREVQL

SEQ ID NO: 122775 - DNA, 1182 bp, Brassica napus
  CDS (1)..(1182)
atggctatggctatgaaccggatcgtagttttgccttcttcatacgcctatcgtcctcatcaagctcgtggatccagatctcccattgcttcttcgattcgctccgctactacagaggttactaacggaaggaagctctacatccctccacgagaggtgcatgtccaagtgaaacattccatgccgccgcaaaagctcgagatcttcaaatccctagaagggtgggctgacgagaccctcttgacctacttaaaacccgtcgagaagtcgtggcagccgactgattttctcccggaagctgagtcagaagggttctacgaccaagtcaaggagctaagagaacggtgtaaggagctgcccgacgagtatttcgtggtgcttgtcggtgatatgatcactgaagaagcgcttccgacttatcagaccatgttgaacacgttggatggtgttagggatgagacgggagctagtcctactccttgggcggtgtggactagggcgtggactgctgaagagaataggcatggggatttgcttaacaagtatctttatttgtctgggagagttgacatgaggcagattgagaagactattcagtaccttattggctctggaatggatccaaaaactgaaaacaacccttacttgggtttcatctacacttcctttcaagaaagagcaaccttcatctcccacggaaacactgccagacacgcgaaagatcttggagatttgaaacttgcgcagatatgcgggaccattgctgctgatgagaagcgccacgagactgcttacaccaagattgtggagaagctcttcgaaatcgacgctgatggcaccatcttgggattggctgatatgatgaagaaaaagatctcgatgcctgcgcatttgatgtatgacggccaagatgataacctgtttgagcacttctcaaccgttgcccagaggcttggtgtttacactgccaaggactatgctgatattctggagtttcttgttgaacggtggaacgttgagactttgtcaggcctttctagtgaaggacacaaggctcaggactttgtctgtggattacctgcaagaatccggaagattgaagagagagctcaaggaagagccaaagaagcagccaaaaacgtaccgttcagctggatatttggtcgggagattagggcttaa

SEQ ID NO: 122776 - protein, 393 aa, Brassica napus
MAMAMNRIVVLPSSYAYRPHQARGSRSPIASSIRSATTEVTNGRKLYIPPREVHVQVKHSMPPQKLEIFKSLEGWADETLLTYLKPVEKSWQPTDFLPEAESEGFYDQVKELRERCKELPDEYFVVLVGDMITEEALPTYQTMLNTLDGVRDETGASPTPWAVWTRAWTAEENRHGDLLNKYLYLSGRVDMRQIEKTIQYLIGSGMDPKTENNPYLGFIYTSFQERATFISHGNTARHAKDLGDLKLAQICGTIAADEKRHETAYTKIVEKLFEIDADGTILGLADMMKKKISMPAHLMYDGQDDNLFEHFSTVAQRLGVYTAKDYADILEFLVERWNVETLSGLSSEGHKAQDFVCGLPARIRKIEERAQGRAKEAAKNVPFSWIFGREIRA

SEQ ID NO: 122777 - DNA, 1179 bp, Zea mays
  CDS (1)..(1179)
atggcgttgagggcgtcccccgtgtcgcatggcaccgcggcagcgccgctgccgcctttcgcgcggaggaggatggcccgtggggtggtggtggccatggcgtccaccatcaacagggtcaagactgtcaaagaaccctatactcctccacgtgaggtacatcgccaaattacccattcactaccacctcagaagcgggagattttcgattcacttcaaccttgggccaaggataacctattgaacctgctgaagccagttgaaaagtcatggcagccacaggacttcctaccagagccgtcttctgatggattttatgatgaggttaaagaactgagggaacgggcaaatgaaatacctgatgagtactttgtttgcttagttggtgatatggttactgaggaagccttaccaacctatcaaacaatgcttaacacccttgatggagtccgggatgaaactggtgcaagtccaaccacgtgggcagtttggacaagggcatggacagctgaagagaacagacatggtgacctccttaataagtacatgtaccttactggacgggttgacatgaaacaaattgagaagaccattcagtatctgattggttccggaatggatcctgggactgagaacaacccgtacttgggtttcctttacacatcatttcaagaaagagcaacatttgtatcacatggaaacactgcaagacatgccaaggagtatggtgatctcaagctggcacagatatgcggtacgatagcagctgacgaaaagcgccacgaaacagcctacaccaagatagtcgagaagctcttcgagactgatcctgactacacggtgcttgcattttctgacatgatgaggaagaagatcacaatgcctgctcatctcatgtacgatggcaaggacgacaacctgtttgagcacttcagtgcagtagcacagaggatgggtgtgtacactgctaaagattatgccgacatcctcgagttcttggtccagaggtggaaagtcgcagatctcaccgggctgtctggagaagggagaagggcgcaagatttcgtctgtaccttggcaccgagaatcaggcggttggatgaaagagctcgggcaagggcgaagcaagcaccggttattcctttcagttggatttatggccgcaaggtgcagctttaa

SEQ ID NO: 122778 - protein, 392 aa, Zea mays
MALRASPVSHGTAAAPLPPFARRRMARGVVVAMASTINRVKTVKEPYTPPREVHRQITHSLPPQKREIFDSLQPWAKDNLLNLLKPVEKSWQPQDFLPEPSSDGFYDEVKELRERANEIPDEYFVCLVGDMVTEEALPTYQTMLNTLDGVRDETGASPTTWAVWTRAWTAEENRHGDLLNKYMYLTGRVDMKQIEKTIQYLIGSGMDPGTENNPYLGFLYTSFQERATFVSHGNTARHAKEYGDLKLAQICGTIAADEKRHETAYTKIVEKLFETDPDYTVLAFSDMMRKKITMPAHLMYDGKDDNLFEHFSAVAQRMGVYTAKDYADILEFLVQRWKVADLTGLSGEGRRAQDFVCTLAPRIRRLDERARARAKQAPVIPFSWIYGRKVQL

SEQ ID NO: 122779 - DNA, 1197 bp, Brassica napus
  CDS (1)..(1197)
atggcattgaagcttaaccctttggcatctcagccttacaacttcccttcctcggctcgtccgccagtctctactttcagatctcccaagttcctctgcctcgcttcttcttctcccgctctcagctccaaggaggttgagagtttgaagaagccattcacaccacctaaggaagtgcacgttcaagtcctgcattccatgccaccccagaagatcgagatcttcaaatccatggaagactgggccgagcagaaccttctaactcagctcaaagacgtggagaagtcgtggcagccccaggacttcttacccgaccctgcatccgatgggtttgaagatcaggtaagagagttaagagaaagagcaagagaactccctgatgattacttcgttgttctggtgggagacatgatcacggaagaagcgcttccgacctatcaaaccatgctgaacactttggatggagtgagggatgaaactggcgctagccccacttcatgggctatttggacaagagcttggactgcggaagagaaccgacacggtgatcttctcaataagtatctttacttgtctggacgtgttgacatgaggcagattgaaaagaccattcagtacttgattggttctggaatggatcctagaacagagaacaatccttacctcggcttcatctacacatcattccaagaaagagccactttcatctctcacggaaacacagctcgccaagccaaagagcatggagacctcaagctagcccaaatctgcggcacaatagctgcagacgagaagcgtcatgagacagcatacaccaagatagttgagaagctctttgagattgatcctgatggtactgtgatggcgtttgcagacatgatgaggaagaaaatctcgatgcctgctcacttgatgtacgatgggcgggatgaaagcctctttgacaacttctcttctgttgctcagaggctcggtgtttacactgccaaagactatgcggacattcttgagtttttggttgggaggtggaagattgagagcttgaccgggctttcgggtgaaggaaacaaagcgcaagagtacttgtgtgggttgactccgagaatcaggaggttggatgagagagctcaagcgagagccaagaaaggacccaaggttcctttcagctggatacacgacagagaagtgcagctctaa

SEQ ID NO: 122780 - protein, 398 aa, Brassica napus
MALKLNPLASQPYNFPSSARPPVSTFRSPKFLCLASSSPALSSKEVESLKKPFTPPKEVHVQVLHSMPPQKIEIFKSMEDWAEQNLLTQLKDVEKSWQPQDFLPDPASDGFEDQVRELRERARELPDDYFVVLVGDMITEEALPTYQTMLNTLDGVRDETGASPTSWAIWTRAWTAEENRHGDLLNKYLYLSGRVDMRQIEKTIQYLIGSGMDPRTENNPYLGFIYTSFQERATFISHGNTARQAKEHGDLKLAQICGTIAADEKRHETAYTKIVEKLFEIDPDGTVMAFADMMRKKISMPAHLMYDGRDESLFDNFSSVAQRLGVYTAKDYADILEFLVGRWKIESLTGLSGEGNKAQEYLCGLTPRIRRLDERAQARAKKGPKVPFSWIHDREVQL

SEQ ID NO: 122781 - DNA, 1179 bp, Zea mays
  CDS (1)..(1179)
atggcgttgagggcgtcccccgtgtcgcatggcaccgcggcagcgccgctgccgcctttcgcgcggaggaggatggcccgtggggtggtggtggccatggcgtccaccatcaacagggtcaaaactgtcaaagaaccctatacccctccacgagaggtacatcgccaaattacccattcactaccacctcaaaagcgggagattttcgattcacttcaaccttgggccaaggataacctactgaacctactgaagccagttgaaaagtcatggcagccacaggacttcctaccagagccttcttctgatgggttttatgatgaagttaaagaactgagggagcgggcaaatgaaatacctgatgaatactttgtttgcttagttggtgatatggttactgaggaagccttacctacataccaaacaatgcttaacactcttgatggagtccgggatgaaactggtgcaagtccaaccacgtgggcggtttggacaagggcatggacagctgaagagaacagacatggtgacctccttaacaagtacatgtaccttactggacgggttgacatgaaacaaattgagaagaccatacaatatctgattggttccggaatggatcctggaactgagaacaacccctacttgggtttcctctacacatcattccaagaaagggcaacatttgtgtcgcatgggaatactgcaaggcatgccaaggagtatggtgatctcaagctggcccagatatgtggcacgatagcagccgatgagaagcgccacgaaacagcctacaccaagatagtcgagaagctcttcgagatggaccctgattacacagtgcttgcgtttgctgacatgatgaggaagaagatcacgatgccagcccatctcatgtacgacggtaaggacgacaacctgttcgagcacttcagcgcggtggcgcagaggctgggcgtctacaccgccaaagactacgccgacatcctcgagttcctggtccagaggtggaaagtcgcggagctcacagggctgtctggagaagggagaagcgcgcaggactttgtctgtaccttggcgccgaggatcaggcggctggatgatagagctcaagcgagggcgaagcaagcaccggttattcctttcagttgggtttatgaccgcaaggtgcagctttaa

SEQ ID NO: 122782 - protein, 392 aa, Zea mays
MALRASPVSHGTAAAPLPPFARRRMARGVVVAMASTINRVKTVKEPYTPPREVHRQITHSLPPQKREIFDSLQPWAKDNLLNLLKPVEKSWQPQDFLPEPSSDGFYDEVKELRERANEIPDEYFVCLVGDMVTEEALPTYQTMLNTLDGVRDETGASPTTWAVWTRAWTAEENRHGDLLNKYMYLTGRVDMKQIEKTIQYLIGSGMDPGTENNPYLGFLYTSFQERATFVSHGNTARHAKEYGDLKLAQICGTIAADEKRHETAYTKIVEKLFEMDPDYTVLAFADMMRKKITMPAHLMYDGKDDNLFEHFSAVAQRLGVYTAKDYADILEFLVQRWKVAELTGLSGEGRSAQDFVCTLAPRIRRLDDRAQARAKQAPVIPFSWVYDRKVQL

SEQ ID NO: 122783 - DNA, 1143 bp, Zea mays
  CDS (1)..(1143)
atgcaggcccacggcatcgccatccgcgcccgcgggccggtggcggcgacgcaggcccccgcgcgccgacggcaatgccgcgtgtctgcggcggcggtcggcgcgcccgccgcgcgagcccgcgtgacgcactcgatgccgccggagaaggcggaggtgttccgctcgctggagggctgggcggcgcggtcgctgctgccgctgctcaagcccgtggaggagtgctggcagccggcggacttcctcccggactcctcgtccgagatgttcgggcacgaggtccgcgagctgcgcgcccgcgccgcggggctccccgacgagtacttcgtcgtgctcgtgggcgacatggtcacggaagaggcgctgcccacgtaccagaccatgatcaacacgctcgacggcgtccgcgacgagaccggcgccagcaactgcccctgggcggtctggacgcgcgcctggaccgccgaggagaaccgccacggcgacatcctcggcaagtacatgtacctatccggccgcgtcgacatgcgcatggtcgagaagaccgtccagtacctcatcggctccggcatggatcccggaacggagaacaacccgtacctgggcttcgtgtacacgagcttccaggagcgcgcgacggccgtctcgcacggcaacaccgcgcggctcgccagggcgcacggggacgacgtcctggcgcgcgcctgcggcaccatcgccgccgacgagaagcggcacgagacggcgtacgggcgcatcgtcgagcagctgctgcagctggacccggagggcgccgtgctcgccgtcgcggacatgatgcgcaagcggatcaccatgcccgcgcacctcatgcacgacggccgcgacatggacctgttcgagcacttcgccgccgtcgcccagcgcctcggcgtgtacaccgcccgggactacgcggacatcgtcgagttccttgtcaagcggtggaagctggagacactggagagcgggctctccggcgagggccgcagggccagggacttcgtctgcgggctcgcgccgaggatgcgccgggccgcggagcgcgccgaggacagggccaagaaggacgagcccaggatggtcaagttcagctggatctttgatagggaagccgttgtttag

SEQ ID NO: 122784 - protein, 380 aa, Zea mays
MQAHGIAIRARGPVAATQAPARRRQCRVSAAAVGAPAARARVTHSMPPEKAEVFRSLEGWAARSLLPLLKPVEECWQPADFLPDSSSEMFGHEVRELRARAAGLPDEYFVVLVGDMVTEEALPTYQTMINTLDGVRDETGASNCPWAVWTRAWTAEENRHGDILGKYMYLSGRVDMRMVEKTVQYLIGSGMDPGTENNPYLGFVYTSFQERATAVSHGNTARLARAHGDDVLARACGTIAADEKRHETAYGRIVEQLLQLDPEGAVLAVADMMRKRITMPAHLMHDGRDMDLFEHFAAVAQRLGVYTARDYADIVEFLVKRWKLETLESGLSGEGRRARDFVCGLAPRMRRAAERAEDRAKKDEPRMVKFSWIFDREAVV

SEQ ID NO: 122785 - DNA, 1179 bp, Zea mays
  CDS (1)..(1179)
atggcgttgagggcgtcccccgtgtcgcatggcaccgcggcagcgccgctgccgcctttcgcgcggaggaggatggcccgtggggtggtggtggccatggcgtccaccatcaacagggtcaaaactgtcaaagaaccctatacccctccacgagaggtacatcgccaaattacccattcactaccacctcaaaagcgggagattttcgattcacttcaaccttgggccaaggataacctactgaacctactgaagccagttgaaaagtcatggcagccacaggacttcctaccagagccttcttctgatgggttttatgatgaagttaaagaactgagggagcgggcaaatgaaatacctgatgaatactttgtttgcttagttggtgatatggttactgaggaagccttacctacataccaaacaatgcttaacactcttgatggagtccgggatgaaactggtgcaagtccaaccacgtgggcggtttggacaagggcatggacagctgaagagaacagacatggtgacctccttaacaagtacatgtaccttactggacgggttgacatgaaacaaattgagaagaccatacaatatctgattggttccggaatggatcctggaactgagaacaacccctacttgggtttcctctacacatcattccaagaaagggcaacatttgtgtcgcatgggaatactgcaaggcatgccaaggagtatggtgatctcaagctggcccagatatgtggcacgatagcagccgatgagaagcgccacgaaacagcctacaccaagatagtcgagaagctcttcgagatggaccctgattacacagtgcttgcgtttgctgacatgatgaggaagaagatcacgatgccagcccatctcatgtacgacggtaaggacgacaacctgttcgagcacttcagcgcggtggcgcagaggctgggcgtctacaccgccaaagactacgccgacatcctcgagttcctggtccagaggtggaaagtcgcggagctcacagggctgtctggagaagggagaagggcgcaggactttgtctgtaccttggcgccgaggatcaggcggctggatgatagagctcaagcgagggcgaagcaagcaccggttattcctttcagttgggtttatgaccgcaaggtgcagctttaa

SEQ ID NO: 122786 - protein, 392 aa, Zea mays
MALRASPVSHGTAAAPLPPFARRRMARGVVVAMASTINRVKTVKEPYTPPREVHRQITHSLPPQKREIFDSLQPWAKDNLLNLLKPVEKSWQPQDFLPEPSSDGFYDEVKELRERANEIPDEYFVCLVGDMVTEEALPTYQTMLNTLDGVRDETGASPTTWAVWTRAWTAEENRHGDLLNKYMYLTGRVDMKQIEKTIQYLIGSGMDPGTENNPYLGFLYTSFQERATFVSHGNTARHAKEYGDLKLAQICGTIAADEKRHETAYTKIVEKLFEMDPDYTVLAFADMMRKKITMPAHLMYDGKDDNLFEHFSAVAQRLGVYTAKDYADILEFLVQRWKVAELTGLSGEGRRAQDFVCTLAPRIRRLDDRAQARAKQAPVIPFSWVYDRKVQL

SEQ ID NO: 122787 - DNA, 1179 bp, Zea mays
  CDS (1)..(1179)
atggcgttgagggtgtcccccgtgtcgcatggcgccgcggcagcgccgctgccgccgctcgcccggaggaggatggcccgtggggtggtggtggccatggcgtccaccatcaacagggtcaaaactgtcaaagaaccctatacccctccacgagaggtacatcgccaaattacccattcactaccacctcaaaagcgggagattttcgattcacttcaaccttgggccaaggataacctactgaacctactgaagccagttgaaaagtcatggcagccacaggacttcctaccagagccgtcttctgatggattttatgatgaagttaaagaactgagggaacgggcaaatgaaatacctgatgaatactttgtttgcttagttggtgatatggttactgaggaagccttaccaacataccaaacaatgcttaacacccttgatggagtccgggatgaaactggtgcaagtccaaccacgtgggcagtttggacaagggcatggacagctgaagagaacagacatggtgacctccttaacaagtacatgtaccttactggacgggttgacatgaaacaaattgagaagaccatacaatatctgattggttccggaatggatcctggaactgagaacaacccctacttgggtttcctctacacatcattccaagaaagagcaacatttgtatcacatggaaacactgcaagacatgccaaggagtatggtgatctcaagctggcacagatatgcggcacgatagcagccgacgaaaagcgccacgaaacagcctacaccaagatagtcgagaagctcttcgagacggaccctgattacacagtgcttgcgtttgctgacatgatgaggaagaagatcacgatgccagcccatctcatgtacgacggtaaggacgacaacctgttcgagcacttcagcgcggtggcgcagaggctgggcgtctacaccgccaaagactacgccgacatcctcgagttcctggtccagaggtggaaagtcgcggagctcacagggctgtctggagaagggagaagggcgcaggactttgtctgtaccttggcgccgaggatcaggcggctggatgatagagctcaagcgagggcgaagcaagcaccggttattcctttcagttgggtttatgaccgcaaggtgcagctttaa

SEQ ID NO: 122788 - protein, 392 aa, Zea mays
MALRVSPVSHGAAAAPLPPLARRRMARGVVVAMASTINRVKTVKEPYTPPREVHRQITHSLPPQKREIFDSLQPWAKDNLLNLLKPVEKSWQPQDFLPEPSSDGFYDEVKELRERANEIPDEYFVCLVGDMVTEEALPTYQTMLNTLDGVRDETGASPTTWAVWTRAWTAEENRHGDLLNKYMYLTGRVDMKQIEKTIQYLIGSGMDPGTENNPYLGFLYTSFQERATFVSHGNTARHAKEYGDLKLAQICGTIAADEKRHETAYTKIVEKLFETDPDYTVLAFADMMRKKITMPAHLMYDGKDDNLFEHFSAVAQRLGVYTAKDYADILEFLVQRWKVAELTGLSGEGRRAQDFVCTLAPRIRRLDDRAQARAKQAPVIPFSWVYDRKVQL

SEQ ID NO: 122789 - DNA, 1179 bp, Zea mays
  CDS (1)..(1179)
atggcgctccgcctccacgacgtcgcgctctgcctctccccgccgctcgccgcccgccgccgcagcggcggcagtttcgtcgccgtcgcctccatgacgtccgccgccgtctccaccagggtggagaacaagaagccatttgctcctccgagggaggtacatgtccaggttacacattcaatgccatctcacaagattgaaattttcaagtcacttgatgattgggctagagataatatcttgacacatctcaagccagtcgagaagtgttggcagccacaggatttcctccctgacccagcatctgaaggatttcatgatgaagttaaggagctcagagaacgtgccaaggagatccctgatgattattttgtttgtttggttggagacatgattactgaggaagctctaccaacataccagactatgcttaacaccctcgacggtgtcagagatgagacaggtgcaagccccactgcttgggctgtttggacgagggcatggactgctgaggagaacaggcatggtgatcttctcaacaagtacatgtacctcactgggagggtggatatgaggcaaattgagaagacaattcagtatcttattggctctggaatggatcctaggactgaaaataatccttatcttggtttcatctacacctccttccaagagcgggcgaccttcatctcgcatgggaacactgctcgtcatgccaaggactttggcgacttaaagctcgcacaaatctgtggcatcatcgcctcagatgagaagcgacatgaaactgcgtacaccaagatcgtggagaagttgtttgagatcgaccctgatggtacagtggttgctctggctgacatgatgaagaagaagatctcaatgcctgcccacctgatgtttgacggtcaggacgacaagctgtttgagcacttctccatggtcgcgcagaggcttggcgtttacactgccagggactacgccgacattcttgagttccttgttgacaggtggaaggtggcggacctgactggtctgtcgggtgaggggaacaaggcgcaggactacctctgcacccttgcttcaaggatccggaggctagacgagagggcccagagcagagccaagaaagcaggcacgctgcctttcagctgggtatatggtagggaagtccaactgtga

SEQ ID NO: 122790 - protein, 392 aa, Zea mays
MALRLHDVALCLSPPLAARRRSGGSFVAVASMTSAAVSTRVENKKPFAPPREVHVQVTHSMPSHKIEIFKSLDDWARDNILTHLKPVEKCWQPQDFLPDPASEGFHDEVKELRERAKEIPDDYFVCLVGDMITEEALPTYQTMLNTLDGVRDETGASPTAWAVWTRAWTAEENRHGDLLNKYMYLTGRVDMRQIEKTIQYLIGSGMDPRTENNPYLGFIYTSFQERATFISHGNTARHAKDFGDLKLAQICGIIASDEKRHETAYTKIVEKLFEIDPDGTVVALADMMKKKISMPAHLMFDGQDDKLFEHFSMVAQRLGVYTARDYADILEFLVDRWKVADLTGLSGEGNKAQDYLCTLASRIRRLDERAQSRAKKAGTLPFSWVYGREVQL

SEQ ID NO: 122791 - DNA, 21 bp, Artificial sequence
  primer
atgtcgatggctttgcttttg

SEQ ID NO: 122792 - DNA, 20 bp, Artificial sequence
  primer
ctatagtttcacatctctac

SEQ ID NO: 122793 - protein, 435 aa, Artificial sequence
  consensus sequence
  Variant (2)..(43): Xaa in position 2 to 43 is any amino acid
  Variant (44)..(75): Xaa in position 44 to 75 is any or no amino acid
  Variant (77)..(79): Xaa in position 77 to 79 is any amino acid
  Variant (81)..(81): Xaa in position 81 is any amino acid
  Variant (83)..(83): Xaa in position 83 is any amino acid
  Variant (87)..(87): Xaa in position 87 is any amino acid
  Variant (89)..(91): Xaa in position 89 to 91 is any amino acid
  Variant (93)..(93): Xaa in position 93 is any amino acid
  Variant (95)..(98): Xaa in position 95 to 98 is any amino acid
  Variant (100)..(101): Xaa in position 100 to 101 is any amino acid
  Variant (107)..(108): Xaa in position 107 to 108 is any amino acid
  Variant (112)..(112): Xaa in position 112 is any amino acid
  Variant (117)..(117): Xaa in position 117 is any amino acid
  Variant (119)..(122): Xaa in position 119 to 122 is any amino acid
  Variant (123)..(128): Xaa in position 123 to 128 is any or no amino acid
  Variant (130)..(132): Xaa in position 130 to 132 is any amino acid
  Variant (134)..(134): Xaa in position 134 is any amino acid
  Variant (138)..(138): Xaa in position 138 is any amino acid
  Variant (140)..(141): Xaa in position 140 to 141 is any amino acid
  Variant (143)..(143): Xaa in position 143 is any amino acid
  Variant (146)..(146): Xaa in position 146 is any amino acid
  Variant (150)..(150): Xaa in position 150 is any amino acid
  Variant (174)..(174): Xaa in position 174 is any amino acid
  Variant (176)..(176): Xaa in position 176 is any amino acid
  Variant (183)..(183): Xaa in position 183 is any amino acid
  Variant (185)..(185): Xaa in position 185 is any amino acid
  Variant (188)..(188): Xaa in position 188 is any amino acid
  Variant (208)..(208): Xaa in position 208 is any amino acid
  Variant (211)..(211): Xaa in position 211 is any amino acid
  Variant (217)..(219): Xaa in position 217 to 219 is any amino acid
  Variant (234)..(234): Xaa in position 234 is any amino acid
  Variant (237)..(237): Xaa in position 237 is any amino acid
  Variant (239)..(239): Xaa in position 239 is any amino acid
  Variant (245)..(245): Xaa in position 245 is any amino acid
  Variant (256)..(256): Xaa in position 256 is any amino acid
  Variant (264)..(264): Xaa in position 264 is any amino acid
  Variant (266)..(268): Xaa in position 266 to 268 is any amino acid
  Variant (269)..(270): Xaa in position 269 to 270 is any or no amino acid
  Variant (273)..(274): Xaa in position 273 to 274 is any amino acid
  Variant (277)..(277): Xaa in position 277 is any amino acid
  Variant (278)..(278): Xaa in position 278 is any or no amino acid
  Variant (282)..(282): Xaa in position 282 is any amino acid
  Variant (285)..(285): Xaa in position 285 is any amino acid
  Variant (292)..(292): Xaa in position 292 is any amino acid
  Variant (296)..(296): Xaa in position 296 is any amino acid
  Variant (302)..(302): Xaa in position 302 is any amino acid
  Variant (304)..(304): Xaa in position 304 is any amino acid
  Variant (308)..(308): Xaa in position 308 is any amino acid
  Variant (311)..(311): Xaa in position 311 is any amino acid
  Variant (313)..(313): Xaa in position 313 is any amino acid
  Variant (318)..(318): Xaa in position 318 is any amino acid
  Variant (322)..(322): Xaa in position 322 is any amino acid
  Variant (329)..(329): Xaa in position 329 is any amino acid
  Variant (332)..(332): Xaa in position 332 is any amino acid
  Variant (333)..(337): Xaa in position 333 to 337 is any or no amino acid
  Variant (339)..(340): Xaa in position 339 to 340 is any amino acid
  Variant (341)..(344): Xaa in position 341 to 344 is any or no amino acid
  Variant (347)..(349): Xaa in position 347 to 349 is any amino acid
  Variant (351)..(351): Xaa in position 351 is any amino acid
  Variant (356)..(356): Xaa in position 356 is any amino acid
  Variant (362)..(362): Xaa in position 362 is any amino acid
  Variant (373)..(373): Xaa in position 373 is any amino acid
  Variant (376)..(379): Xaa in position 376 to 379 is any amino acid
  Variant (381)..(381): Xaa in position 381 is any amino acid
  Variant (382)..(382): Xaa in position 382 is any or no amino acid
  Variant (386)..(386): Xaa in position 386 is any amino acid
  Variant (389)..(390): Xaa in position 389 to 390 is any amino acid
  Variant (393)..(395): Xaa in position 393 to 395 is any amino acid
  Variant (397)..(397): Xaa in position 397 is any amino acid
  Variant (399)..(400): Xaa in position 399 to 400 is any amino acid
  Variant (404)..(404): Xaa in position 404 is any amino acid
  Variant (405)..(407): Xaa in position 405 to 407 is any or no amino acid
  Variant (409)..(409): Xaa in position 409 is any amino acid
  Variant (413)..(414): Xaa in position 413 to 414 is any amino acid
  Variant (416)..(416): Xaa in position 416 is any amino acid
  Variant (418)..(420): Xaa in position 418 to 420 is any amino acid
  Variant (421)..(428): Xaa in position 421 to 428 is any or no amino acid
  Variant (432)..(434): Xaa in position 432 to 434 is any amino acid
MXXXXXXXXXXXXXXXXXXXXXXXXXXXXXXXXXXXXXXXXXXXXXXXXXXXXXXXXXXXXXXXXXXXXXXXXXXHXXXPXKXEIFXSXXXWXAXXXXLXXLKPVEXXWQPXDFLPXPXXXXXXXXXXFXXXVXELRXRXXEXPDXYFVXLVGDMITEEALPTYQTMLNTLDGXVXDETGASXTXWAXWTRAWTAEENRHGDLLNKYXYLXGRVDMXXXEKTIQYLIGSGMDPXTEXNXPYLGFXYTSFQERATFXSHGNTARXAXXXXXGDXXLAXXICGXIAXDEKRHEXAYTXIVEKLXEXDPDXTVXAXADMMXKKIXMPAHLMXDGXXXXXXDXXXXXXLFXXXSXVAQRXGVYTAXDYADILEFLVXRWXXXXLXXGLSXEGXXAQXXXCXLXXRIRXXXXLXERAXXRXKXXXXXXXXXXXFSWXXXR

SEQ ID NO: 122794 - protein, 43 aa, Artificial sequence
  protein pattern
  Variant (12)..(13): Xaa in position 12 to 13 is any amino acid
  Variant (15)..(15): Xaa in position 15 is Leu or Met
  Variant (18)..(18): Xaa in position 18 is Cys, Ser or Thr
  Variant (24)..(26): Xaa in position 24 to 26 is any amino acid
  Variant (27)..(27): Xaa in position 27 is Glu, Gly or Gln
  Variant (28)..(28): Xaa in position 28 is Lys or Arg
  Variant (30)..(30): Xaa in position 30 is Phe, Ile or Val
  Variant (31)..(31): Xaa in position 31 is any amino acid
  Variant (32)..(32): Xaa in position 32 is His or Tyr
  Variant (35)..(35): Xaa in position 35 is Gly or Ser
  Variant (36)..(36): Xaa in position 36 is any amino acid
  Variant (40)..(42): Xaa in position 40 to 42 is any amino acid
  Variant (43)..(43): Xaa in position 43 is Asp or Glu
TAEENRHGDLLXXYXYLXGRVDMXXXXXTXXXLIXXGMDXXXX

SEQ ID NO: 122795 - protein, 22 aa, Artificial sequence
  protein pattern
  Variant (2)..(2): Xaa in position 2 is Cys, Asn or Ser
  Variant (5)..(5): Xaa in position 5 is any amino acid
  Variant (8)..(8): Xaa in position 8 is Ile, Leu or Val
  Variant (19)..(19): Xaa in position 19 is Ile or Val
  Variant (21)..(21): Xaa in position 21 is His or Arg
  Variant (22)..(22): Xaa in position 22 is Ala or Gly
NXPYXGFXYTSFQERATFXSXX

SEQ ID NO: 122796 - protein, 60 aa, Artificial sequence
  protein pattern
  Variant (2)..(3): Xaa in position 2 to 3 is any amino acid
  Variant (4)..(4): Xaa in position 4 is Leu or Met
  Variant (6)..(7): Xaa in position 6 to 7 is any amino acid
  Variant (10)..(10): Xaa in position 10 is any or no amino acid
  Variant (12)..(12): Xaa in position 12 is any or no amino acid
  Variant (14)..(14): Xaa in position 14 is Ala or Ser
  Variant (21)..(21): Xaa in position 21 is any amino acid
  Variant (24)..(24): Xaa in position 24 is Gly, Ser, Thr or Val
  Variant (25)..(25): Xaa in position 25 is Lys or Arg
  Variant (26)..(26): Xaa in position 26 is Ile or Val
  Variant (27)..(27): Xaa in position 27 is Ala, Ile or Val
  Variant (28)..(28): Xaa in position 28 is Asp or Glu
  Variant (29)..(29): Xaa in position 29 is any amino acid
  Variant (31)..(31): Xaa in position 31 is Phe, Leu or Val
  Variant (32)..(32): Xaa in position 32 is Glu, Gln or Arg
  Variant (33)..(33): Xaa in position 33 is any amino acid
  Variant (34)..(34): Xaa in position 34 is Asp or Glu
  Variant (35)..(35): Xaa in position 35 is Ala or Pro
  Variant (36)..(36): Xaa in position 36 is Asp, Glu, Asn, Ser or Thr
  Variant (37)..(37): Xaa in position 37 is any amino acid
  Variant (38)..(38): Xaa in position 38 is Ala, Ser or Thr
  Variant (39)..(39): Xaa in position 39 is Ile, Met or Val
  Variant (40)..(40): Xaa in position 40 is any amino acid
  Variant (41)..(41): Xaa in position 41 is Ala, Cys or Gly
  Variant (42)..(42): Xaa in position 42 is Phe, Ile, Leu or Val
  Variant (43)..(43): Xaa in position 43 is Ala, Cys, Gly or Ser
  Variant (44)..(44): Xaa in position 44 is any amino acid
  Variant (47)..(49): Xaa in position 47 to 49 is any amino acid
  Variant (50)..(50): Xaa in position 50 is Ile or Val
  Variant (51)..(51): Xaa in position 51 is Ala, Ser or Thr
  Variant (54)..(54): Xaa in position 54 is Ala or Asp
  Variant (55)..(56): Xaa in position 55 to 56 is any amino acid
  Variant (57)..(57): Xaa in position 57 is Ile or Met
  Variant (58)..(58): Xaa in position 58 is any amino acid
  Variant (60)..(60): Xaa in position 60 is Ala or Gly
DXXXAXXCGXIXAXDEKRHEXAYXXXXXXLXXXXXXXXXXXXXXMMXXXXXMPXXXXXDX

SEQ ID NO: 122797 - protein, 40 aa, Artificial sequence
  protein pattern
  Variant (2)..(2): Xaa in position 2 is Ile, Leu or Met
  Variant (4)..(4): Xaa in position 4 is any amino acid
  Variant (6)..(7): Xaa in position 6 to 7 is any amino acid
  Variant (8)..(8): Xaa in position 8 is Asp, Glu, Gly or Ser
  Variant (9)..(9): Xaa in position 9 is Ile or Leu
  Variant (12)..(12): Xaa in position 12 is Asp or Glu
  Variant (15)..(15): Xaa in position 15 is any or no amino acid
  Variant (17)..(17): Xaa in position 17 is any or no amino acid
  Variant (19)..(19): Xaa in position 19 is Ile or Val
  Variant (23)..(23): Xaa in position 23 is Ile or Val
  Variant (26)..(26): Xaa in position 26 is Asp, Glu or Asn
  Variant (29)..(29): Xaa in position 29 is Pro or Ser
  Variant (32)..(32): Xaa in position 32 is any amino acid
  Variant (33)..(33): Xaa in position 33 is Ser or Thr
  Variant (34)..(34): Xaa in position 34 is any amino acid
  Variant (35)..(35): Xaa in position 35 is Ile, Leu or Met
  Variant (36)..(38): Xaa in position 36 to 38 is any amino acid
  Variant (40)..(40): Xaa in position 40 is Ala or Gly
EXRXRXXXXPDXYFXVXLXGDMXTEXALXTYXXXXXXXDX

SEQ ID NO: 122798 - protein, 16 aa, Artificial sequence
  protein pattern
  Variant (2)..(2): Xaa in position 2 is Asp or Gly
  Variant (6)..(6): Xaa in position 6 is Phe, His or Tyr
  Variant (8)..(8): Xaa in position 8 is Ala, Ile, Leu or Val
  Variant (9)..(10): Xaa in position 9 to 10 is any amino acid
  Variant (12)..(12): Xaa in position 12 is any amino acid
  Variant (13)..(13): Xaa in position 13 is Ile, Leu or Val
  Variant (14)..(15): Xaa in position 14 to 15 is any amino acid
  Variant (16)..(16): Xaa in position 16 is Phe, Ile, Leu or Val
AXILEXLXXXWXXXXX

SEQ ID NO: 122799 - protein, 17 aa, Artificial sequence
  protein pattern
  Variant (2)..(2): Xaa in position 2 is any or no amino acid
  Variant (4)..(4): Xaa in position 4 is Asp, Pro or Ser
  Variant (7)..(7): Xaa in position 7 is any amino acid
  Variant (8)..(8): Xaa in position 8 is Ala, Cys or Ser
  Variant (12)..(12): Xaa in position 12 is Ala, Asn, Gln, Ser or Thr
  Variant (13)..(13): Xaa in position 13 is Asp, Glu, Asn or Ser
  Variant (14)..(14): Xaa in position 14 is any amino acid
  Variant (17)..(17): Xaa in position 17 is Ala, Asp, Glu, Asn or Gln
LXKXVEXXWQPXXXLPX

SEQ ID NO: 122800 - protein, 28 aa, Artificial sequence
  protein pattern
  Variant (2)..(2): Xaa in position 2 is any amino acid
  Variant (3)..(4): Xaa in position 3 to 4 is any or no amino acid
  Variant (6)..(7): Xaa in position 6 to 7 is any amino acid
  Variant (8)..(9): Xaa in position 8 to 9 is any or no amino acid
  Variant (12)..(12): Xaa in position 12 is Asp or Glu
  Variant (13)..(13): Xaa in position 13 is Phe or Tyr
  Variant (14)..(14): Xaa in position 14 is Ile, Leu or Val
  Variant (16)..(16): Xaa in position 16 is any amino acid
  Variant (18)..(18): Xaa in position 18 is Ala, Pro or Thr
  Variant (19)..(19): Xaa in position 19 is any amino acid
  Variant (22)..(22): Xaa in position 22 is any amino acid
  Variant (23)..(23): Xaa in position 23 is Lys or Arg
  Variant (24)..(24): Xaa in position 24 is Ile or Leu
  Variant (25)..(25): Xaa in position 25 is Asp, Glu, Gly or Gln
  Variant (26)..(26): Xaa in position 26 is Asp or Glu
  Variant (28)..(28): Xaa in position 28 is Ala or Asn
LXXXGXXXXAQXXXCXLXXRIXXXXXRX

SEQ ID NO: 122801 - protein, 15 aa, Artificial sequence
  protein pattern
  Variant (3)..(3): Xaa in position 3 is Asp, Glu or Lys
  Variant (4)..(5): Xaa in position 4 to 5 is any amino acid
  Variant (6)..(6): Xaa in position 6 is Ala, Gly, Ser or Thr
  Variant (7)..(7): Xaa in position 7 is any amino acid
  Variant (12)..(12): Xaa in position 12 is any amino acid
LFXXXXXVAQRXGVY

SEQ ID NO: 122802 - protein, 11 aa, Artificial sequence
  protein pattern
  Variant (4)..(4): Xaa in position 4 is Ile or Val
  Variant (5)..(5): Xaa in position 5 is Phe, His or Tyr
  Variant (6)..(6): Xaa in position 6 is Asp, Gly or Asn
  Variant (7)..(7): Xaa in position 7 is Lys or Arg
  Variant (8)..(8): Xaa in position 8 is any amino acid
  Variant (9)..(9): Xaa in position 9 is Ile, Leu or Val
  Variant (10)..(10): Xaa in position 10 is any amino acid
  Variant (11)..(11): Xaa in position 11 is Ala, Ile, Leu or Val
FSWXXXXXXXX

SEQ ID NO: 122803 - DNA, 1218 bp, Arabidopsis thaliana
  CDS (1)..(1218)
atgagacctcgcgggtatcaacgagctccgtcaatgcagaaaccaacagattatccgacggataagacgcttcatccgaattacccatttctcatgtcctctcatggtctcaagtcctttgaatcggacgacgaagacgacgactccgactcctccaacgatcaattcgctttcactatcaacacagagttgcttgtcgatgtcaaagacatatctataggggacttcatcggcgaaggttcatcatctactgtctacagaggattgttcaggagagttgtccctgtgtctgtgaagatattccagcctaaaagaacatctgctttaagcattgagcagaggaagaagtttcagagagaggttttgctgctttccaagtttagacatgaaaacattgtgcggttcattggggcgtgcatagaaccaaagttgatgataattactgaactcatggaaggcaatactcttcagaagtttatgttgagtgttcgtccaaagcctcttgatctgaagctctccattagctttgcgttggatattgctcggggaatggagttcttgaatgcaaatggcattattcaccgagatttgaaaccaagtaatatgctcttaacaggtgatcagaaacatgtaaagttggctgactttggacttgctagagaggagactaaaggtttcatgacctttgaggctggtacatacagatggatggctccagagttattcagctatgacacgcttgaaattggcgaaaagaaacactacgatcataaggtggacgtttacagtttcgccattgttttctgggagttacttaccaacaaaaccccattcaaaggaaagaacaacatctttgtagcttatgctgccagcaaaaaccagagaccaagtgtggagaatcttccagaaggcgttgtttctatcctgcaatcatgctgggcagagaatcctgacgctcgtcctgagtttaaagaaattacatattcactaacaaacttgctcagaagcttaagctcagacactgatgctacttcatccaatagcaaagccaatatagctaccgaggattcaacaagcagtctggttcaagaacgtgttgtctgtgattgtcccggactaaagatgagcaagacgaagaagctgaagaagaagacgaataaactgatgaatatgatcgtcccttttctcaagatcttcaaaagttgtatgtccaagtga

SEQ ID NO: 122804 - protein, 405 aa, Arabidopsis thaliana
MRPRGYQRAPSMQKPTDYPTDKTLHPNYPFLMSSHGLKSFESDDEDDDSDSSNDQFAFTINTELLVDVKDISIGDFIGEGSSSTVYRGLFRRVVPVSVKIFQPKRTSALSIEQRKKFQREVLLLSKFRHENIVRFIGACIEPKLMIITELMEGNTLQKFMLSVRPKPLDLKLSISFALDIARGMEFLNANGIIHRDLKPSNMLLTGDQKHVKLADFGLAREETKGFMTFEAGTYRWMAPELFSYDTLEIGEKKHYDHKVDVYSFAIVFWELLTNKTPFKGKNNIFVAYAASKNQRPSVENLPEGVVSILQSCWAENPDARPEFKEITYSLTNLLRSLSSDTDATSSNSKANIATEDSTSSLVQERVVCDCPGLKMSKTKKLKKKTNKLMNMIVPFLKIFKSCMSK

SEQ ID NO: 122805 - DNA, 1059 bp, Glycine max
  CDS (1)..(1059)
atggaatctggagatatgttctactcagttgatgagttcagattggaccccaaatggctgattgatcctaagcatctctttgttgggccacagattggagagggagctcatgccaaagtctatgagggaaaatacaaaaaccaaactgttgctattaaaattgtacataaaggagaaactacagaagacattgccaagagagaagggcgcttcgcaagggaggtggcaatgttgtctagagtgcaacataagaatttggtgaagtttattggtgcgtgtaaggagccagtaatggtgatagtcactgagctgttattaggaggaacattgcgaaagtatttgtttagcatgcgccccaaatgcttggatagacatgttgcgattggttttgcgcttgatattgctcgggcaatggagtgcctgcattctcatgggatcatccaccgtgatcttaaacctgataacttgctattgactgaagaccagaaaacagtcaagctagcggattttggtttagcaagagaagagtcattaactgagatgatgactgctgagacgggaacttaccgttggatggctccagagttgtatagtactgtcacactaaggcaaggggagaagaagcattacaaccataaagttgatgcttatagttttgcaattgtgttgtgggagctcttacacaacaaagttccttttgaaggcatgtcaaaccttcaggcagcatatgctgcagcctttaagaatgtaaggccaagtgcagaaaatcttcctgaggagttggctgtaattcttacttcatgctggcaagaggatccaaatgcccgacccaacttcacccagataatccaaatgctcctaaattatctttacactgtcgcaccacctgaacccatgattccttcaagaatattcagttctgagaacactgtcttgccgccagagtcccccggtactagctccttaatggcgaaacgtgatgacacaggtgatacaccaagagcaaaggacgaaatcaagcctaatggttttctttgctgctttagtcagtgttattaa

SEQ ID NO: 122806 - protein, 352 aa, Glycine max
MESGDMFYSVDEFRLDPKWLIDPKHLFVGPQIGEGAHAKVYEGKYKNQTVAIKIVHKGETTEDIAKREGRFAREVAMLSRVQHKNLVKFIGACKEPVMVIVTELLLGGTLRKYLFSMRPKCLDRHVAIGFALDIARAMECLHSHGIIHRDLKPDNLLLTEDQKTVKLADFGLAREESLTEMMTAETGTYRWMAPELYSTVTLRQGEKKHYNHKVDAYSFAIVLWELLHNKVPFEGMSNLQAAYAAAFKNVRPSAENLPEELAVILTSCWQEDPNARPNFTQIIQMLLNYLYTVAPPEPMIPSRIFSSENTVLPPESPGTSSLMAKRDDTGDTPRAKDEIKPNGFLCCFSQCY

SEQ ID NO: 122807 - DNA, 1059 bp, Oryza sativa (japonica cultivar-group)
  CDS (1)..(1059)
atggaatctgggagtgagttctatgcgggcgaaggtctccagatcgaccccaagtggctcatcgacccaaagcttctctttgttgggccacggattggcgaaggtgcacatgcaaaggtctacgaggggaagtacaagaaccaaaatgttgccatcaagattgtgcacaagggggacacccctgaggagatggtcaagagggaggggaggttcttgagagaggtgactatgctgtcaagggtgcagcacaagaaccttgtcaagtttatcggggcttgccttgagcctgtcatggtggtggtaactgagctactagtggggggctctttgcgcaagtacttggttggccttcggcctaggagcctggagcctcgtgtagctgttggatttgcgttggatattgctcgagccatggaatgtttgcatgcgcacgcgatcattcatcgtgatcttaaacctgagaacttgctgttgaccgcagaccagagaacagtcaagcttgttgaccttggtttagcaagagaagagacattaacagagatgatgactgcagagacaggaacataccgttggatggctccagagttgtacagcacagtgacattgaggcatggagaaaagaagcattacaatcataaagtagacgtttatagctttgcaattgtgttatgggaactccttcacaatagactgccctttgagggcatgtctaacctgcaagctgcttatgctgctgctttcaagaacattagacctagtgcagataatttgcctgaggagctatcagaaatcctaacaacctgctggaaggaagaacccaatgagagaccgaacttcacgcagatcgtacaaatgcttctgcattacctttccaccctttcgccaccagaacctctggctccgcctcggacgttcagttcagagaatgcaatcttgcctcctgaatctcctgggacaagctccctaatggcttctcgaggcgacctcggcgacacaccgaagggcaagatggaagacaagccaagggggttctttttctgcttcagccagtgctattag

SEQ ID NO: 122808 - protein, 352 aa, Oryza sativa (japonica cultivar-group)
MESGSEFYAGEGLQIDPKWLIDPKLLFVGPRIGEGAHAKVYEGKYKNQNVAIKIVHKGDTPEEMVKREGRFLREVTMLSRVQHKNLVKFIGACLEPVMVVVTELLVGGSLRKYLVGLRPRSLEPRVAVGFALDIARAMECLHAHAIIHRDLKPENLLLTADQRTVKLVDLGLAREETLTEMMTAETGTYRWMAPELYSTVTLRHGEKKHYNHKVDVYSFAIVLWELLHNRLPFEGMSNLQAAYAAAFKNIRPSADNLPEELSEILTTCWKEEPNERPNFTQIVQMLLHYLSTLSPPEPLAPPRTFSSENAILPPESPGTSSLMASRGDLGDTPKGKMEDKPRGFFFCFSQCY

SEQ ID NO: 122809 - DNA, 1197 bp, Oryza sativa (japonica cultivar-group)
  CDS (1)..(1197)
atgctttcttgcttccggctgccgcggccgccgggcggggagacgaaccaggcggcggcggcgtcggcgtcgccgaggcggccgtcgctgccgttcgcgtcgagcctgttcgcggggtcgccgtcgacgtcggggaagcagccgtggctggcggacgcggacgacatggagaagaagcggtgggacagcatggagtcgtggtcgatgctgctggacacggccatggggccctccggcgagccgacgtcgagccgcgacagcgggcggcgggaggagtggatggccgacctctcccacctcttcatcggcaacaagttcgcctccggcgccaacagccgcatctaccgcggcatctacaagcagcgcgccgtcgccgtcaagatggtccgcatccccgagcgcgacgaggcccgccgcgccgtcctcgaggaccagttcaactccgaggtcgccttcctctcccgcctctaccaccccaacatcgtccagttcatcgcggcgtgcaagaagccgccggtgtactgcatcatcacggagtacatgtcgcaggggacgctgaggatgtacctgaacaagaaggacccatactcgctgtcgtcggagacgatactgaagctggcgctggacatctcgcgggggatggagtacctgcacgcgcagggggtgatccaccgggacctcaagtcgcagaacctcctcctcaacgacgagatgcgcgtcaaggtcgccgacttcggcacgtcctgcctggagacggcgtgccaggccaccaagggcaacaagggcacctaccgatggatggcgccggagatgaccaaggagaagccctacacccgcaaggtcgacgtctacagcttcggcatcgtcctctgggagctcaccacctgcctcctccccttccagggcatgacccccgtccaagccgcctacgccgcctccgagaagaatctgcggccgccgttgtcgacctcgtgctctccggtgctgaacaacctgatcaagaggtgctggtcggcgaacccggcgaggcggccggagttcagctacatcgtgtcggtgctggagaagtacgaccactgcgtgaaggaagggatgccgatcatggcgcaccaggagctcaggatctggagctccttcgccaagatcttcaggatgggctgcatcaccaacaacttgtccataccggtgcatgcttga

SEQ ID NO: 122810 - protein, 398 aa, Oryza sativa (japonica cultivar-group)
MLSCFRLPRPPGGETNQAAAASASPRRPSLPFASSLFAGSPSTSGKQPWLADADDMEKKRWDSMESWSMLLDTAMGPSGEPTSSRDSGRREEWMADLSHLFIGNKFASGANSRIYRGIYKQRAVAVKMVRIPERDEARRAVLEDQFNSEVAFLSRLYHPNIVQFIAACKKPPVYCIITEYMSQGTLRMYLNKKDPYSLSSETILKLALDISRGMEYLHAQGVIHRDLKSQNLLLNDEMRVKVADFGTSCLETACQATKGNKGTYRWMAPEMTKEKPYTRKVDVYSFGIVLWELTTCLLPFQGMTPVQAAYAASEKNLRPPLSTSCSPVLNNLIKRCWSANPARRPEFSYIVSVLEKYDHCVKEGMPIMAHQELRIWSSFAKIFRMGCITNNLSIPVHA

SEQ ID NO: 122811 - DNA, 1287 bp, Oryza sativa (japonica cultivar-group)
  CDS (1)..(1287)
atgattgaggggtcaaggtttcagaatatgttgggcggtgctggaattggaggtggtataggttgcagaggaaggcaagaaaacgagatgaatggcttccacaatatgccctactaccacaaggtcggggagagctcccacatgtccgtggataacgccgacaacctgaacatgatgaactttgttggtggttcggttgccatgtcggtggataacagcagcgtgggatcaaacgagtcccgcacggtcatgctcaaacaccctggcctccgtgatatgccggcgccgagttattcggttcacaatagcgtcatccatccgaaccgggctatggcgcctactctgaatgaggatgcattggctcgggtattgatggatccaagccatccgacggagatacttagtaattacgaggagtggaccattgatctgggtaagctcgacatgggagctccttttgctcaaggggcatttgggaagctttatcggggaacatacaatggagaagacgttgctattaagctgctggaaaagcctgagaatgacccagagagagctcaattgatggaacagcagtttgtgcaggaagttatgatgttgtctacgttgaggcacccaaatattgtaaggttcattggggcgtgccggaaatcaattgtttggtgtatcattactgaatatgcaaaaggtggatctgttcggcaattccttgcacgaaggcagaacaagtctgtgcctctggggctggctgtgaagcaggcacttgatgttgctcgggggatggcttatgtgcatgccttgcgatttatccatagggatctaaaatcagataaccttctaatttcagcagacaaatccatcaagatagctgactttggagttgctcgaattgaggtacaaactgagggaatgaccccagagacaggaacctaccgttggatggcaccggagatgatccagcacaggccttatgatcataaagtagatgtttacagctttgggattgtcttgtgggagcttataaccggcatgctccccttcacaaacatgacagccgttcaggctgcatttgctgtcgtaaacaggggctctcgtcctgcaatcccgcaggattgtgtggattctctgagcaagatcatgacttgctgttgggacgcaaaccctgaagttcgcccatcatttgccgagatcgttgtcatgcttgagaatgccgagatagaggttatgagaaatgtccgcagggcacgtttccgctgttgtattgcggggccaatgaccacagactga

SEQ ID NO: 122812 - protein, 428 aa, Oryza sativa (japonica cultivar-group)
MIEGSRFQNMLGGAGIGGGIGCRGRQENEMNGFHNMPYYHKVGESSHMSVDNADNLNMMNFVGGSVAMSVDNSSVGSNESRTVMLKHPGLRDMPAPSYSVHNSVIHPNRAMAPTLNEDALARVLMDPSHPTEILSNYEEWTIDLGKLDMGAPFAQGAFGKLYRGTYNGEDVAIKLLEKPENDPERAQLMEQQFVQEVMMLSTLRHPNIVRFIGACRKSIVWCIITEYAKGGSVRQFLARRQNKSVPLGLAVKQALDVARGMAYVHALRFIHRDLKSDNLLISADKSIKIADFGVARIEVQTEGMTPETGTYRWMAPEMIQHRPYDHKVDVYSFGIVLWELITGMLPFTNMTAVQAAFAVVNRGSRPAIPQDCVDSLSKIMTCCWDANPEVRPSFAEIVVMLENAEIEVMRNVRRARFRCCIAGPMTTD

SEQ ID NO: 122813 - DNA, 1071 bp, Arabidopsis thaliana
  CDS (1)..(1071)
atgggatctgcaagtgggttttactcgaacgaagagtttgaattggatcctaaatggcttgttgatcctcgtcatctctttgttggtcctaagatcggtgaaggtgctcatgccaaagtttatgagggaaagtatagaaaccaaacagtggcgattaagattattaaaagaggagagtcccctgaagagattgctaaacgagataaccggtttgcgagagagattgctatgttgtctaaagtccagcacaagaatttagtcaagttcattggagcgtgcaaagaacccatgatggttatagttactgagcttctactaggcggtacattgcgtaaatatctagtcagcttacggccaaagcgtttagacattcgtttggctgttggttttgctcttgacattgctcgtgcaatggaatgtttacattcccacggtatcattcaccgcgatcttaaaccagagaatttgatcttatcagcggatcataagacagtgaaactcgctgatttcggtttagctagagaagaatcattaaccgagatgatgaccgcagagactggtacataccgatggatggcccccgagctctacagtacggttacgttaaggcaaggagagaagaaacactataatcataaagtagatgcttacagctttgccattgtcttgtgggaacttattctcaacaagttaccatttgaaggcatgtcaaatctacaagcagcatatgctgctgcattcaagaacttgaggccaagtgcagaggatttaccaggagacttagagatgattgtaacttcatgctggaaagaagatcctaacgaacggccaaatttcacagagataattcaaatgctcctccgttacctcaccactgtttcggcaccacagatcattcctccaccgaatcgacgagtcttctcatcagaaaacatagttttatcaccggaatctcccggaacttgctctctgatgtctgtcagagacggagacgtttctcgtcagaccgttaacactgctgattcatcggagaaacaaacaaaaggaagcttcttctcctgctgctcatag

SEQ ID NO: 122814 - protein, 356 aa, Arabidopsis thaliana
MGSASGFYSNEEFELDPKWLVDPRHLFVGPKIGEGAHAKVYEGKYRNQTVAIKIIKRGESPEEIAKRDNRFAREIAMLSKVQHKNLVKFIGACKEPMMVIVTELLLGGTLRKYLVSLRPKRLDIRLAVGFALDIARAMECLHSHGIIHRDLKPENLILSADHKTVKLADFGLAREESLTEMMTAETGTYRWMAPELYSTVTLRQGEKKHYNHKVDAYSFAIVLWELILNKLPFEGMSNLQAAYAAAFKNLRPSAEDLPGDLEMIVTSCWKEDPNERPNFTEIIQMLLRYLTTVSAPQIIPPPNRRVFSSENIVLSPESPGTCSLMSVRDGDVSRQTVNTADSSEKQTKGSFFSCCS

SEQ ID NO: 122815 - DNA, 1134 bp, Arabidopsis thaliana
  CDS (1)..(1134)
atggccatttctccgacgatgatgcttaatgcgaactacccttttttcatgtcagcgtttggctcagatgacaataatgatgagtctgataaccagttcgatttcaatatcagcagagagttgcttctcaaccctaaagacatcatgaggggagagatgattggagaaggaggcaactccatcgtttacaaaggccgactcaaaaacattgttcctgtggcggtgaagatagtgcagccgggtaaaacatctgctgtaagcattcaggacaaacaacagtttcaaaaggaggttctggtactatcctcgatgaaacatgaaaacattgtcaggtttgttggagcttgcatagagccacaattgatgatagttaccgaactcgtaagaggtggtactcttcagaggttcatgttgaactctcgcccgagtcctcttgatctcaaggtgtcactaagctttgctttggacatttctcgagccatggagtatttgcactcaaaaggcatcattcaccgtgacctaaatccaaggaatgttttggtaactggtgatatgaaacatgtgaagttggctgattttggacttgcaagagaaaagactcttggtggcatgacttgtgaggcgggcacgtaccgttggatggctccagaggtatgcagccgtgagccactccgaattggggagaaaaaacactacgaccagaaaatcgatgtgtatagcttcgcactgattttctggtccttgctcacaaacaaaacacctttcagtgagatacctagcatttctattccctattttgtgaaccagggcaagagaccaagcctatcgaatattcctgatgaggtcgtccccatattagaatgttgttgggcagcggactcaaagactcgtctcgaattcaaagatattacaatctcactggaaagcttgctaaaaagattctgctcagagagaagtaataatgagataacgatcaccgaagatgaagcttatgatgatgagatagaggaattggagaccacttggctgcttccaaagcgctatatcaagctgaagaaacctaagaagatcaagcagaacgtgatgaagaagatacttcctttcttcaagaagttcatttcttcaaagtggtga

SEQ ID NO: 122816 - protein, 377 aa, Arabidopsis thaliana
MAISPTMMLNANYPFFMSAFGSDDNNDESDNQFDFNISRELLLNPKDIMRGEMIGEGGNSIVYKGRLKNIVPVAVKIVQPGKTSAVSIQDKQQFQKEVLVLSSMKHENIVRFVGACIEPQLMIVTELVRGGTLQRFMLNSRPSPLDLKVSLSFALDISRAMEYLHSKGIIHRDLNPRNVLVTGDMKHVKLADFGLAREKTLGGMTCEAGTYRWMAPEVCSREPLRIGEKKHYDQKIDVYSFALIFWSLLTNKTPFSEIPSISIPYFVNQGKRPSLSNIPDEVVPILECCWAADSKTRLEFKDITISLESLLKRFCSERSNNEITITEDEAYDDEIEELETTWLLPKRYIKLKKPKKIKQNVMKKILPFFKKFISSKW

SEQ ID NO: 122817 - DNA, 1113 bp, Arabidopsis thaliana
  CDS (1)..(1113)
atgatatctcgaatgattttcagaaactatccttctcacaatgagtccgacgacgagccattccatttcagtatcagcagagaattgcttctcgaccgaaacgatgtcgtagtgggagagatgattggagaaggagcttactccatcgtctacaaaggattgctaagaaaccaatttcccgtggcggtgaagatcatggatccgagtacaacttccgctgtaaccaaagcgcacaaaaaaacgtttcaaaaggaagttctgttactatccaagatgaaacatgacaacattgtgaagtttgttggagcttgcatagaaccacaattgattatagttaccgaactcgttgaaggcggcactctacagaggttcatgcactctcgtccgggtcctcttgacctaaagatgtcactaagctttgctttggatatttcacgagccatggagtttgtgcactcaaatggcatcattcaccgtgatttaaatccaaggaatttgttggtaaccggtgatctgaaacatgtgaaattggctgactttggaattgcaagagaagaaactagaggtggcatgacctgtgaggctggcacctctaaatggatggctcctgaggtgtatagccctgagccgctgagagttggggagaagaaggaatatgaccataaggctgatatttacagctttgccatagtattatggcagctggttacgaacgaagaaccattccctgacgtgcctaatagcctctttgttccctatcttgttagccaaggtcggagaccaatacttacgaagactcccgacgtgtttgtcccaatcgttgaatcatgttgggcacaagacccggatgcgcgtccggaatttaaagagatttcggttatgctgacaaacttgctaagaagaatgagctcagacagtagcattggcacaacactaccggatggggaagcttatgaaggtgagatggaggaatcagagaactctcctcttcttcaagagcatttttgcaaggtgaagaaacctaaggagaagaagaagaagaagaaactggtgaagatgagatttcctttctttaagaagttcaaggtttggttgtacaactacaagccatga

SEQ ID NO: 122818 - protein, 370 aa, Arabidopsis thaliana
MISRMIFRNYPSHNESDDEPFHFSISRELLLDRNDVVVGEMIGEGAYSIVYKGLLRNQFPVAVKIMDPSTTSAVTKAHKKTFQKEVLLLSKMKHDNIVKFVGACIEPQLIIVTELVEGGTLQRFMHSRPGPLDLKMSLSFALDISRAMEFVHSNGIIHRDLNPRNLLVTGDLKHVKLADFGIAREETRGGMTCEAGTSKWMAPEVYSPEPLRVGEKKEYDHKADIYSFAIVLWQLVTNEEPFPDVPNSLFVPYLVSQGRRPILTKTPDVFVPIVESCWAQDPDARPEFKEISVMLTNLLRRMSSDSSIGTTLPDGEAYEGEMEESENSPLLQEHFCKVKKPKEKKKKKKLVKMRFPFFKKFKVWLYNYKP

SEQ ID NO: 122819 - DNA, 1002 bp, Arabidopsis thaliana
  CDS (1)..(1002)
atgagtagcgatgatacgattgaggagagtttgcttgtggatcccaaattgttgttcatcggctccaagattggtgaaggcgctcacggcaaagtctaccaaggaaggtatggtcgtcagattgttgcaatcaaagttgtcaaccggggctccaaacctgaccagcaatcttctctcgagagccgtttcgtccgtgaggtcaatatgatgtcccgcgttcaacaccataaccttgtcaagtttattggagcgtgcaaagatcctttaatggtaatagtaacagagcttctcccagggatgtctctccgtaaatatctcaccagcatccgtcctcagttgctccatctccctcttgctctctcctttgcccttgacatcgcccgtgccttgcactgcttacacgccaatggtatcattcacagagacctcaaacctgacaacttattgctcacggagaatcacaaatccgtcaagcttgctgatttcgggcttgctagggaagaatccgtgactgagatgatgactgctgagactgggacttaccgttggatggctcctgagctctacagtacagtgaccctgcgtcaaggagagaagaagcattacaacaacaaagttgatgtctacagctttggaatcgtgctttgggagcttctcactaatcgtatgccattcgagggcatgtccaatctgcaagccgcctacgcagcagcattcaagcaggagaggcccgtaatgccagaggggatatctccgagtctggcgttcatagtgcagtcttgttgggtggaggacccaaacatgaggccaagcttcagtcaaattatcagactgctcaatgagttcctccttaccctgactcctccgcctcctcagcctctgcctgagactgccaccaacaggaccaatggccgagccatcactgagttctccatccgtccaaaagggaaatttgccttcattcgccagcttttcgctgccaagaggaacataaactcttag

SEQ ID NO: 122820 - protein, 333 aa, Arabidopsis thaliana
MSSDDTIEESLLVDPKLLFIGSKIGEGAHGKVYQGRYGRQIVAIKVVNRGSKPDQQSSLESRFVREVNMMSRVQHHNLVKFIGACKDPLMVIVTELLPGMSLRKYLTSIRPQLLHLPLALSFALDIARALHCLHANGIIHRDLKPDNLLLTENHKSVKLADFGLAREESVTEMMTAETGTYRWMAPELYSTVTLRQGEKKHYNNKVDVYSFGIVLWELLTNRMPFEGMSNLQAAYAAAFKQERPVMPEGISPSLAFIVQSCWVEDPNMRPSFSQIIRLLNEFLLTLTPPPPQPLPETATNRTNGRAITEFSIRPKGKFAFIRQLFAAKRNINS

SEQ ID NO: 122821 - DNA, 1062 bp, Arabidopsis thaliana
  CDS (1)..(1062)
atgggatctgttactgggttttactcaaatgaagtgtttgaattagatcctaaatgggttgttgatcctcaacatctctttgttggtcccaagattggtgaaggtgctcatgccaaaatctatgaaggaaagtataagaacaaaacagttgctattaagattgttaaaagaggagaatctcccgaagagattgcgaaaagagagagcagatttgcaagagaggtctctatgttgtctagagttcaacacaaaaatttggtcaagttcattggagcttgcaaagaaccaatcatggttatagtcaccgagcttttactcggtggtacattgcgtaaataccttgttagcttgcgtccagggagtttggacatacgtgtagctgttggatatgcccttgacattgctcgggcgatggaatgcttacactctcatggagtcatccatcgcgatctcaaaccagagagcttgatcttaactgcggattacaagactgttaaactagcagattttggtttagctagagaagaatcattaaccgagatgatgaccgcagaaactggtacatatcgttggatggctcccgagctttacagtacggtcacgttgaggcatggtgagaaaaaacactataaccataaggtagatgcatacagcttcgccattgtcttgtgggagcttatccacaacaaattaccttttgaaggcatgtcaaatctccaagccgcttacgctgctgcattcaagaacgtgaggccaagcgcagacgatttaccaaaggatttagcaatgattgtaacatcttgctggaaagaggatccaaacgatcgaccaaacttcacagagattattcaaatgcttctacgttgcctctccacaatctcatcaactgagcttgttcctccggccattaaacgtgttttctcgtcggaaaacacggtcttgccaccagaatcgccgggaacttgctcattgatgactgttagagacaaagatcagattcctaccgatgcaaactcggcgcagaatgaagttagaggaagcttcttcttcttctgctgctaa

SEQ ID NO: 122822 - protein, 353 aa, Arabidopsis thaliana
MGSVTGFYSNEVFELDPKWVVDPQHLFVGPKIGEGAHAKIYEGKYKNKTVAIKIVKRGESPEEIAKRESRFAREVSMLSRVQHKNLVKFIGACKEPIMVIVTELLLGGTLRKYLVSLRPGSLDIRVAVGYALDIARAMECLHSHGVIHRDLKPESLILTADYKTVKLADFGLAREESLTEMMTAETGTYRWMAPELYSTVTLRHGEKKHYNHKVDAYSFAIVLWELIHNKLPFEGMSNLQAAYAAAFKNVRPSADDLPKDLAMIVTSCWKEDPNDRPNFTEIIQMLLRCLSTISSTELVPPAIKRVFSSENTVLPPESPGTCSLMTVRDKDQIPTDANSAQNEVRGSFFFFCC

SEQ ID NO: 122823 - DNA, 1041 bp, Arabidopsis thaliana
  CDS (1)..(1041)
atggattctttgactggatttagaatggaacccaaatggcaaattgatcctcagcttctctttgttggtccaaagattggtgaaggagctcatgctaaagtctatgagggaaaatacaagaatcagacagttgctataaagatagttcacagaggagaaacaccagaagagattgctaaaagagattcaagattccttagagaagtagaaatgctctcacgtgttcaacacaagaatttggtcaagttcattggtgcttgcaaggagcctgtaatggtgatagttacagaacttcttcaaggcggtacattgcgtaaatatctattaaacttgagacccgcatgtttggagactcgtgtggctatcggttttgcgcttgatattgctcgtggtatggaatgcttgcattcccatgggatcattcaccgtgatctcaaacccgagaacttgcttttaactgcagaccataaaacagtaaaactagcagattttggattagcaagagaagagtcactgactgagatgatgacggctgagacaggaacataccgatggatggcacctgagttgtacagcacggtaactcttcgattgggagagaagaagcactacaatcataaagtcgacgcctatagctttgcaatagttctttgggagcttttacacaataaattgccttttgagggaatgtcaaatctccaagcagcatatgcagcagccttcaaaaatgtgagaccaagcgcggagagcttaccggaggagttgggcgacattgtaacatcatgttggaatgaggatccgaatgctcggcccaacttcacgcatatcattgagttacttcttaactatctctctaaagttggatctccgatatccgctattccacaacggattcttgcttcgaagaacacgctattgccaccggattctcctggaactagctctttgatggctaagcttgatgaatgtggggaaactccaaaggccaaaagtgaagacaaacgaaaaggtttgtttttctgcttcaatcaatgttattaa

SEQ ID NO: 122824 - protein, 346 aa, Arabidopsis thaliana
MDSLTGFRMEPKWQIDPQLLFVGPKIGEGAHAKVYEGKYKNQTVAIKIVHRGETPEEIAKRDSRFLREVEMLSRVQHKNLVKFIGACKEPVMVIVTELLQGGTLRKYLLNLRPACLETRVAIGFALDIARGMECLHSHGIIHRDLKPENLLLTADHKTVKLADFGLAREESLTEMMTAETGTYRWMAPELYSTVTLRLGEKKHYNHKVDAYSFAIVLWELLHNKLPFEGMSNLQAAYAAAFKNVRPSAESLPEELGDIVTSCWNEDPNARPNFTHIIELLLNYLSKVGSPISAIPQRILASKNTLLPPDSPGTSSLMAKLDECGETPKAKSEDKRKGLFFCFNQCY

SEQ ID NO: 122825 - DNA, 1152 bp, Oryza sativa subsp
  CDS (1)..(1152)
atgagctgcggcagcgatggcgggtgtagggatggtggtggcagcgaggagttcaggcggccgcggccgagcaaggtcgcggcgggggacttggtggagccggcgcgctgctcggacgccgccgcatcgccggcttcttggattgacaagaagctgcttgttgaccccaagaatttgtttatcggatccaaaatcggggagggagctcatggcaaggtctacaaggggaagtatggtgaccaaattgtagcaataaaggttcttaacaatggcaccactccggaggaaaaggcaacccttgaagctcgtttcattcgagaagtaaatatgatgtgtaaagtgaaacatgacaatcttgtgaagtttattggagcttgcaaggaaccattaatggttattgtcagcgagttattgccggggatgtcactgaaaaactacttgaacagccttcggcccagccagttagatatccatactgcaattggctatgcactggatatagctcatgcaatggaatgtttgcatgcgaatggaataatacacagagacctgaaacctgataatttgttgctcactgcaaatcgtaagaagctgaagcttactgattttggtcttgcacgagaagaaactgtgactgaaatgatgacagctgaaacagggacataccgctggatggccccagagctatatagcactgttactcttcaacgtggtgagaagaagcattacacaaataaagtggatgtgtacagctttggcattgttctgtgggaactgttgactaataaaatgccatttgaaggcatgtcaaatctacaagctgcatatgctgctgctttcaagcaagcgcgcccaccccttcctgaggagacccctcaggagcttgtgttcattgtgcagtcatgctgggtcgaggatcctgccatgaggcctagcttcagccagatcatccgcatgctggatgctttcctcatgacaatacctccaccacctccttcagaatcaaacgaagacgcggaattggaagaaacagcgtcatcgctgaatggcaagaactctgctgtctcttctatcgtttctcgcgcgacaagcaagctctcggtcgtccgccatctctttgcctcaaagaaggctgggaatgggaggacataa

SEQ ID NO: 122826 - protein, 383 aa, Oryza sativa subsp
MSCGSDGGCRDGGGSEEFRRPRPSKVAAGDLVEPARCSDAAASPASWIDKKLLVDPKNLFIGSKIGEGAHGKVYKGKYGDQIVAIKVLNNGTTPEEKATLEARFIREVNMMCKVKHDNLVKFIGACKEPLMVIVSELLPGMSLKNYLNSLRPSQLDIHTAIGYALDIAHAMECLHANGIIHRDLKPDNLLLTANRKKLKLTDFGLAREETVTEMMTAETGTYRWMAPELYSTVTLQRGEKKHYTNKVDVYSFGIVLWELLTNKMPFEGMSNLQAAYAAAFKQARPPLPEETPQELVFIVQSCWVEDPAMRPSFSQIIRMLDAFLMTIPPPPPSESNEDAELEETASSLNGKNSAVSSIVSRATSKLSVVRHLFASKKAGNGRT

SEQ ID NO: 122827 - DNA, 1071 bp, Arabidopsis thaliana
  CDS (1)..(1071)
atgggatctgcaagtgggttttactcaaacgaagagtttgaattggatcctaaatggcttgttgatcctcgtcatctctttgttggtcctaagatcggtgaaggtgctcatgccaaagtttatgagggaaagtatagaaaccaaacagtggcgattaagattattaaaagaggagagtcccctgaagagattgctaaacgagataaccggtttgcgagagagattgctatgttgtctaaagtccagcacaagaatttagtcaagttcattggagcgtgcaaagaacccatgatggttatagttactgagcttctactaggcggtacattgcgtaaatatcttgtcagcttacggccaaagcgtttagacattcgtttggctgttggttttgctcttgacattgctcgtgcaatggaatgtttacattcccacggtatcattcaccgcgatcttaaaccagagaatttgatcttatcagcggatcataagacagtgaaactcgctgatttcggtttagctagagaagaatcattaactgagatgatgaccgcagagactggtacataccgatggatggcccccgagctctacagtacggttacgttaaggcaaggagagaagaaacactataatcataaagtagatgcttacagctttgccattgtcttgtgggaactcattctcaacaagttaccatttgaaggcatgtcaaatctacaagcagcatatgctgctgcattcaagaacttgaggccaagtgcagaggatttaccaggggatttagagatgattgtaacttcatgctggaaagaagatcctaacgaacggccaaatttcacagagataattcaaatgctccttcgttacctgaccactgtttcggcaccacagatcattcctccactaaatagaagagtcttctcatcagaaaacatcgttttatcaccggaatctcctggaacatgctctctgatgtctgtcagagacggagacgtttctcgtcagaccgttaacactgctgattcgtcagagaaacaaacaaaaggaagcttcttctcctgctgctcatag

SEQ ID NO: 122828 - protein, 356 aa, Arabidopsis thaliana
MGSASGFYSNEEFELDPKWLVDPRHLFVGPKIGEGAHAKVYEGKYRNQTVAIKIIKRGESPEEIAKRDNRFAREIAMLSKVQHKNLVKFIGACKEPMMVIVTELLLGGTLRKYLVSLRPKRLDIRLAVGFALDIARAMECLHSHGIIHRDLKPENLILSADHKTVKLADFGLAREESLTEMMTAETGTYRWMAPELYSTVTLRQGEKKHYNHKVDAYSFAIVLWELILNKLPFEGMSNLQAAYAAAFKNLRPSAEDLPGDLEMIVTSCWKEDPNERPNFTEIIQMLLRYLTTVSAPQIIPPLNRRVFSSENIVLSPESPGTCSLMSVRDGDVSRQTVNTADSSEKQTKGSFFSCCS

SEQ ID NO: 122829 - DNA, 1389 bp, Glycine max
  CDS (1)..(1389)
atgggggaagatggtaattcttggattaggaggacaaatttttcacacacagtgtgccatcgtttggatcctgctagattaggctctattcctatcagtgttcagtcagagcagaaatcaaggccttcctcaaaggctcagagacaccctatgacatacaagcagagatctttgtcaccattgcctgagacttatctttctgaggccttcagggaagctagacttgaacagaaaaggttctccacaccgaatccccggagggaaaagaggattatggggaagttgttgaacaaggattctcgggagactaaggaatcaagttcaaagtcaccttcgcgtagtccaaataggcaagtgaagtcaaagaaccgcaaggattcagcatggactaagcttttggacaatggtggaggaaagattactgctgtggaaacagctgaagagtggaatgttgacatgtctcagttgttttttggcctaaagtttgctcatggtgcacatagtcgactttaccatggtgtatataaggatgaggctgttgctgttaaaatcattatggtacccgaggatgatggaaatggagctttggcttctcgattagagaaacagttcattagagaagtcacccttttatctcgtcttcaccatcaaaatgttataaagttctcagcagcatgtagaaagccaccggtttattgtattatcacagaatatctggcggaaggatccttgagggcatatttgcataaattggaacaccaaactatttctctacaaaagctaatagcttttgctctggatattgctcgtggaatggaatatatacattctcaaggtgtcattcatcgagaccttaaaccagagaatatccttatcaacgaagacaatcaccttaaaattgccgattttggcattgcatgtgaggaagcatcttgtgacttattggctgatgaccctggcacctaccgttggatggcacctgagatgatcaaaaggaaatcctacgggaaaaaggttgatgtctacagttttgggcttatcttatgggagatgttgactggaacaataccatatgaggatatgaatccaatacaggctgcttttgcagtagtaaataagaattcaagaccgattattccatcaaactgccctcctgcaatgcgagctctaattgagcaatgttggagcttgcaaccagacaagaggcctgagttctggcaggttgttaagatattagagcaatttgaatcttcacttgccagtgatggaaccctgagcctggtgccaaatccttgttgggatcataagaaagggcttcttcattggattcaaaagcttggtcccttgcaccaaaatagtggccccgtgcctaaacccaaattcacatga

SEQ ID NO: 122830 - protein, 462 aa, Glycine max
MGEDGNSWIRRTNFSHTVCHRLDPARLGSIPISVQSEQKSRPSSKAQRHPMTYKQRSLSPLPETYLSEAFREARLEQKRFSTPNPRREKRIMGKLLNKDSRETKESSSKSPSRSPNRQVKSKNRKDSAWTKLLDNGGGKITAVETAEEWNVDMSQLFFGLKFAHGAHSRLYHGVYKDEAVAVKIIMVPEDDGNGALASRLEKQFIREVTLLSRLHHQNVIKFSAACRKPPVYCIITEYLAEGSLRAYLHKLEHQTISLQKLIAFALDIARGMEYIHSQGVIHRDLKPENILINEDNHLKIADFGIACEEASCDLLADDPGTYRWMAPEMIKRKSYGKKVDVYSFGLILWEMLTGTIPYEDMNPIQAAFAVVNKNSRPIIPSNCPPAMRALIEQCWSLQPDKRPEFWQVVKILEQFESSLASDGTLSLVPNPCWDHKKGLLHWIQKLGPLHQNSGPVPKPKFT

SEQ ID NO: 122831 - DNA, 1368 bp, Cucumis sativus
  CDS (16)..(1074)
cggcacgaggaagagatgggttctggtaatggtttttattccactagtgaattcaatttggatgccaaatggttgattgatcctaagcatctttttgttgggccaaagattggggaaggtgcccatgccaaggtgtatgagggaaaatacaaaaatcagattgtggctatcaaaatggtgggtaaaggagatactcctgagaggatggccagaagagaagcccggtttgcaagagaggttgcaatgttgtccaaagtgcgacacaagaacttagtgaagtttattggcgcttgcaaggaacctatgatggttattgtgactgaattactcacaggtggcacattgcgcaaatttctcttgaatttgaggccaaggagcttggaacttgatgtggcaattgggtttgcgcttgatattgctcgcgcaatggagtgtttacactcccatggaattatacaccgtgaccttaaaccagaaaacttgatcttgactgcagaccataaaacaattaagcttgctgattttggtttggcaagagaagaatcagtaacagagatgatgactgcagaaacaggaacgtatagatggatggctccagagctctatagtacggtcactttaaagcatggagataagaagcattataatcacaaagttgatgcctacagctttgccattgtattgtgggagctcatccttaataggttaccttttgaaggcatgtcgaatttgcagcccgcgtatgcagctgcttttaagaacatgaggcccagtgctgaaaaccttccagaggacttagctttaatagtgacatcatgttggagagaagatccaaatacaagaccaaacttcagccagattatacagatgctattgcagtccctttctagaatatcaccacgatcacctgtgatcccacctcggatatgtgcttctgaaaacgttgtgatgccacccgaatctccctgtacaaattccttgatggctgttagacatggctcaggggaagccccacatggcatgatcgaagaaacaccaacaacctccttcttctgctttaacaaatgttactgatccaatgcaagaaaatcctaaaaggcacagttttaactttagttgtagttctataagaatacccaataagccaaaccaagaaatgtaacagaatttgggattgctgtcagctcagaagcttgagaatcttaagcttttttcaacagatgtgtaggatcattgagtgatggatggctcccacctttccaataatcaagaaaatcttggcatgtaatatttctgaattctgttgggaattagataatgagaaattcactgatcataacattgtaaataaaaaaaaaaaaaaaaaaa

SEQ ID NO: 122832 - protein, 352 aa, Cucumis sativus
MGSGNGFYSTSEFNLDAKWLIDPKHLFVGPKIGEGAHAKVYEGKYKNQIVAIKMVGKGDTPERMARREARFAREVAMLSKVRHKNLVKFIGACKEPMMVIVTELLTGGTLRKFLLNLRPRSLELDVAIGFALDIARAMECLHSHGIIHRDLKPENLILTADHKTIKLADFGLAREESVTEMMTAETGTYRWMAPELYSTVTLKHGDKKHYNHKVDAYSFAIVLWELILNRLPFEGMSNLQPAYAAAFKNMRPSAENLPEDLALIVTSCWREDPNTRPNFSQIIQMLLQSLSRISPRSPVIPPRICASENVVMPPESPCTNSLMAVRHGSGEAPHGMIEETPTTSFFCFNKCY

SEQ ID NO: 122833 - DNA, 1152 bp, Oryza sativa subsp
  CDS (1)..(1152)
atgagctgcggcagcgatggcgggtgtagggatggtggtggcagcgaggagttcaggcggccgcggccgagcaaggtcgcggcgggggacttggtggagccggcgcgctgctcggacgccgccgcatcgccggcttcttggattgacaagaagctgcttgttgaccccaagaatttgtttatcggatccaaaatcggggagggagctcatggcaaggtctacaaggggaagtatggtgaacaaattgtagcaataaaggttcttaacaatggcaccactccggaggaaaaggcaacccttgaagctcgtttcattcgagaagtaaatatgatgtgtaaagtgaaacatgacaatcttgtgaagtttattggagcttgcaaggaaccattaatggttattgtcagcgagttattgccggggatgtcactgaaaaactacttgaacagccttcggcccagccagttagatatccatactgcaattggctatgcactggatatagctcatgcaatggaatgtttgcatgcgaatggaataatacacagagacctgaaacctgataatttgttgctcactgcaaatcgtaagaagctgaagcttactgattttggtcttgcacgagaagaaactgtgactgaaatgatgacagctgaaacagggacataccgctggatggccccagagctatatagcactgttactcttcaacgtggtgagaagaagcattacacaaataaagtggatgtgtacagctttggcattgttctgtgggaactgttgactaataaaatgccatttgaaggcatgtcaaatctacaagctgcatatgctgctgctttcaagcaagcgcgcccaccccttcctgaggagacccctcaggagcttgtgttcattgtgcagtcatgctgggtcgaggatcctgccatgaggcctagcttcagccagatcatccgcatgctggatgctttcctcatgacaatacctccaccacctccttcagaatcaaacgaagacgtggaatcggaagaaacagcgtcatcgctgaatggcaagaactctgctgtctcttctatcgtttctcgcgcgacaagcaagctctcggtcgtccgccatctctttgcctcaaagaaggctgggaatgggaggacataa

SEQ ID NO: 122834 - protein, 383 aa, Oryza sativa subsp
MSCGSDGGCRDGGGSEEFRRPRPSKVAAGDLVEPARCSDAAASPASWIDKKLLVDPKNLFIGSKIGEGAHGKVYKGKYGEQIVAIKVLNNGTTPEEKATLEARFIREVNMMCKVKHDNLVKFIGACKEPLMVIVSELLPGMSLKNYLNSLRPSQLDIHTAIGYALDIAHAMECLHANGIIHRDLKPDNLLLTANRKKLKLTDFGLAREETVTEMMTAETGTYRWMAPELYSTVTLQRGEKKHYTNKVDVYSFGIVLWELLTNKMPFEGMSNLQAAYAAAFKQARPPLPEETPQELVFIVQSCWVEDPAMRPSFSQIIRMLDAFLMTIPPPPPSESNEDVESEETASSLNGKNSAVSSIVSRATSKLSVVRHLFASKKAGNGRT

SEQ ID NO: 122835 - DNA, 1173 bp, Arabidopsis thaliana
  CDS (1)..(1173)
atgtctggtttatgtttcaatccgtttcgtctacgttggtctctaagatccaaattacctttagagccgtccctcccgaatttaccctgtaacccatcttcctccaaaaccaaccggtatgcagaagcagagacgatggagaagaagagatttgacagtatggaatcttggtcgatgatcctcgagtccgagaacgtggagacatgggaagcttctaaaggcgaaagagaggaatggaccgcagatctttcgcagctatttatcggaaacaaatttgcttccggagcacactctagaatatacagagggatctacaaacaaagagccgttgccgtgaagatggtgaggatcccaacacacaaggaagagacaagggctaagcttgaacaacagtttaagtccgaggttgctctgctttctcgtctctttcaccctaacatcgttcagttcattgcggcgtgcaagaaaccgccggtgtactgcattataacagagtacatgtcacaaggaaacctccgaatgtacctaaacaagaaagagccttactcgctttcgatcgagaccgtactaaggctggctctagacatctcaagaggaatggagtatcttcactcgcaaggtgttatccacagagacctaaagtccaacaatttgcttttgaacgacgagatgagagttaaagttgcagactttgggacatcttgtcttgagacgcaatgcagagaggccaagggtaacatgggaacttatagatggatggctccagagatgatcaaggagaagccttataccagaaaagtcgatgtttatagctttggcatcgttctatgggaactcaccaccgcgttgcttccgttccaaggcatgactcctgtgcaagccgcattcgcagtcgctgaaaagaacgaaagaccaccattgccggcgagctgtcaaccagcgctagctcatctaatcaagaggtgttggtcagagaatccgtcgaagcggccagacttctcaaacatagtggcggtgctagagaagtacgacgagtgtgtcaaagaaggactgcctttgacgtcacacgcaagcctaacgaagacaaagaaagctattcttgatcaccttaaaggctgtgtcacatccattagctcaccattttcttcctcctctgttcctgtaaatgcctag

SEQ ID NO: 122836 - protein, 390 aa, Arabidopsis thaliana
MSGLCFNPFRLRWSLRSKLPLEPSLPNLPCNPSSSKTNRYAEAETMEKKRFDSMESWSMILESENVETWEASKGEREEWTADLSQLFIGNKFASGAHSRIYRGIYKQRAVAVKMVRIPTHKEETRAKLEQQFKSEVALLSRLFHPNIVQFIAACKKPPVYCIITEYMSQGNLRMYLNKKEPYSLSIETVLRLALDISRGMEYLHSQGVIHRDLKSNNLLLNDEMRVKVADFGTSCLETQCREAKGNMGTYRWMAPEMIKEKPYTRKVDVYSFGIVLWELTTALLPFQGMTPVQAAFAVAEKNERPPLPASCQPALAHLIKRCWSENPSKRPDFSNIVAVLEKYDECVKEGLPLTSHASLTKTKKAILDHLKGCVTSISSPFSSSSVPVNA

SEQ ID NO: 122837 - DNA, 1272 bp, Arabidopsis thaliana
  CDS (1)..(1272)
atgggttgtttcggatgcagtaagaaatcgagcaaacgatccgagactaacaaagatactgtcataaatagaaaaattgtcggtggtactacgagcgttgctaagagtgataagcgagacgatcagactcagcccagttcagattcaacaaaagtcagtccatatagagatgtaaacaatgaaggaggagttggtaaggaagatcagttatctttggatgtgaagggtttgaatctaaatgaccaagtcacagggaagaaagcacagacttttacttttcaagaacttgcagaagctacgggaaactttagatcggattgttttcttggtgaaggaggtttcggaaaagttttcaagggaactatagagaaattggatcaggttgttgcaatcaagcaacttgatcgtaatggggttcaaggaatcagggaatttgtggttgaggtattgactctaagtcttgctgaccatccgaatcttgtgaagcttattgggttttgtgctgagggtgatcagagactactggtgtacgagtatatgccgcaaggatcccttgaagatcatctacatgttctcccttctggtaaaaagcctcttgactggaacacccggatgaaaatagcagctggtgcagcaagaggtttagagtatctgcatgacagaatgacgccccctgtgatttaccgagatcttaaatgttcgaatattttgcttggtgaagactatcaaccgaaactatctgactttgggttggctaaagtaggaccaagcggggataaaacccatgtctcgacaagggttatgggaacgtacggatactgtgctcctgactacgctatgacgggtcagctcacatttaaatccgatatatacagttttggagtagtccttctcgagcttatcaccggaaggaaagcgattgacaatacaaaaacgcgtaaagatcagaatttggttggatgggcacgaccattgttcaaagacaggaggaacttcccaaaaatggttgatccattgcttcagggacaatacccagttagaggactgtaccaagcactagcaatatcagcaatgtgcgttcaagagcagcctaccatgagaccagtggtatctgatgtagtattggctctcaacttcttagcctcttctaaatatgatccgaatagccctagcagcagcagcgggaagaacccttcttttcacagagacagagatgatgaagagaaaagaccacacctcgtcaaggaaactgaatgtgaagggtcctcatag

SEQ ID NO: 122838 - protein, 423 aa, Arabidopsis thaliana
MGCFGCSKKSSKRSETNKDTVINRKIVGGTTSVAKSDKRDDQTQPSSDSTKVSPYRDVNNEGGVGKEDQLSLDVKGLNLNDQVTGKKAQTFTFQELAEATGNFRSDCFLGEGGFGKVFKGTIEKLDQVVAIKQLDRNGVQGIREFVVEVLTLSLADHPNLVKLIGFCAEGDQRLLVYEYMPQGSLEDHLHVLPSGKKPLDWNTRMKIAAGAARGLEYLHDRMTPPVIYRDLKCSNILLGEDYQPKLSDFGLAKVGPSGDKTHVSTRVMGTYGYCAPDYAMTGQLTFKSDIYSFGVVLLELITGRKAIDNTKTRKDQNLVGWARPLFKDRRNFPKMVDPLLQGQYPVRGLYQALAISAMCVQEQPTMRPVVSDVVLALNFLASSKYDPNSPSSSSGKNPSFHRDRDDEEKRPHLVKETECEGSS

SEQ ID NO: 122839 - DNA, 1008 bp, Brassica napus
  CDS (1)..(1008)
atgagtagtggggaagagaagggattgaggatagaggagagtttgttagtggatccaaagttgttgttcatcggctccaagattggcgaaggcgctcacggcaaagtctatcaaggaaggtatggttccctgattgttgcaatcaaagttctccaccgtggaagcaatcctgatgacaagtcttccctccatagccgtttcatccgtgaagtcaatatgatgtcccgagtcaaacaccacaatctcgttaagtttatcggagcgtgcaaagatcctttaatggtaatcgtaacagaattgctcccagggatgtcactcagcaaatatctcaccagcatccgccctcacctccttgatctccctgtcgctttgtcctttgcccttgacattgcccgcgccttggactgcttacacgccaatggcatcattcaccgtgacctcaaacctgacaacctattgctcacggaggatcacaaatccctcaagcttgctgattttggccttgctcgggaagaatctgtcactgagatgatgaccgctgagactggcacttaccgttggatggctcctgagctctacagtacggtgacgctgcgtcaaggagagaagaagcattacaacaacaaggtcgatgtctacagcttcggaatcgtcctatgggagcttcttactaatcgcatgccattcgagggcatgtccaacctccaagccgcctatgctgcagctttcaagcaggagaggcccggaattccagatggaatatctcccagtctcgccttcattgtgcaatcgtgctgggtggaggacccaaacatgaggcccagcttcagccagattatccgattgctcaacgagttcatccttaccctctctcctcctcctcctcgtcctctgcctgagggcgagggcgacagaatcagagctatcactgagttctccagccgcgcaaaagggaagtttgcattcattcgccagctttttgctgctaagaggaacagagactcttag

SEQ ID NO: 122840 - protein, 335 aa, Brassica napus
MSSGEEKGLRIEESLLVDPKLLFIGSKIGEGAHGKVYQGRYGSLIVAIKVLHRGSNPDDKSSLHSRFIREVNMMSRVKHHNLVKFIGACKDPLMVIVTELLPGMSLSKYLTSIRPHLLDLPVALSFALDIARALDCLHANGIIHRDLKPDNLLLTEDHKSLKLADFGLAREESVTEMMTAETGTYRWMAPELYSTVTLRQGEKKHYNNKVDVYSFGIVLWELLTNRMPFEGMSNLQAAYAAAFKQERPGIPDGISPSLAFIVQSCWVEDPNMRPSFSQIIRLLNEFILTLSPPPPRPLPEGEGDRIRAITEFSSRAKGKFAFIRQLFAAKRNRDS

SEQ ID NO: 122841 - DNA, 1230 bp, Brassica napus
  CDS (1)..(1230)
atgcttgagggaccaaagttcgatatgctcgctgttggcaatcaccacaattacgatgcattcacccaagacttttatcaaaagctcggtgaagaaggtacaaacatgtccacggacagtatgcaaacaagtaatgcaggaggctctgtgtcaatgtctgtggataacagtagcgttggttctagtgatgctctcattggccatcccgggttgaagcctatgcgtcatccctactctctctccgttggccaaagcgtgtttcgccccgggagagtcacgcatgcgctcaacgatgatgccttggcgcaagcgttgatggacagcagctacccaaccgggggacttgcgaactacgaagagtggactatagatctgaggaaactccacatgggtcctgcttttgctcagggggcgtttggtaagttatacagagggacttacaacggagaggatgtagccattaagctactagagaggccagagaacagccccgaaaaggcgcaagctctggagcagcagtttcagcaggaggtttctatgctctcgtttctgaagcaccccaacatcgttaggttcatcggcgcttgcattaaaccgatggtgtggtgcatcgtgactgaatatgctaaaggaggctcggtgagacagtttttgactaagagacagaaccgagctgtgcctttgaagttggctgttaagcaggcgttggatgttgccagaggtatggcttacgtccacgagcgaaactttatacacagggatctgaagtcggataacctcctcatatcagctgatcggtccatcaagattgctgactttggcgttgcaagaatcgaagttcaaactgaagggatgacacctgagaccgggacttacagatggatggccccagagatgatccagcatagaccctacactcaaaaagtggacgtctatagttttggaatcgtgctatgggagctgataacgggtcagttaccgttccagaacatgactgcggttcaagctgcatttgcggtggtgaacagaggagtccgtccaacggtcccagcggattgtctccctgtgcttggcgagatcatgacacgttgttgggatgcgaaccctgaagtccgtccttgttttgcagaggttgtcaatcttcttgaggcggctgaaaccgagataatgacgactgcgagaaaagcccggttcagatgttgcatgacgcaaccaatgacaatcgactaa

SEQ ID NO: 122842 - protein, 409 aa, Brassica napus
MLEGPKFDMLAVGNHHNYDAFTQDFYQKLGEEGTNMSTDSMQTSNAGGSVSMSVDNSSVGSSDALIGHPGLKPMRHPYSLSVGQSVFRPGRVTHALNDDALAQALMDSSYPTGGLANYEEWTIDLRKLHMGPAFAQGAFGKLYRGTYNGEDVAIKLLERPENSPEKAQALEQQFQQEVSMLSFLKHPNIVRFIGACIKPMVWCIVTEYAKGGSVRQFLTKRQNRAVPLKLAVKQALDVARGMAYVHERNFIHRDLKSDNLLISADRSIKIADFGVARIEVQTEGMTPETGTYRWMAPEMIQHRPYTQKVDVYSFGIVLWELITGQLPFQNMTAVQAAFAVVNRGVRPTVPADCLPVLGEIMTRCWDANPEVRPCFAEVVNLLEAAETEIMTTARKARFRCCMTQPMTID

SEQ ID NO: 122843 - DNA, 1062 bp, Zea mays
  CDS (1)..(1062)
atggaatctgggagcacgttctatggaggggaaggtctctccatcgaccccaagtggtttatcgacccgaagcttctctttgttgggccacgcatcggcgagggcgctcatgcaaaggtctatgaggggaagtataagaaccaaaatgttgctatcaagattgtgcacaaaggggacacccctgaggagatgaccaagagggaggggagattcttgagagaggtgaccatgctgtcaagggtgcagcacaagaacctcgtcaagtttattggggcctgcctagaacctgtcatggtggtcgtgacagagctactagtggggggttcgttgcgcaagtatttggtcagtctccgacctaggagccttgagcctcgtgtagcagtggggtttgcattggacattgcccgagctatggaatgcttacatgcacatgggatcattcatcgtgatcttaagcctgagaatctgttgctgactgcagaccagagaacagtaaaacttgttgatcttggtttggctagggaagagacactaacggagatgatgactgctgagacaggaacataccgttggatggctccagagttgtacagcacagtaacactgaggcatggagaaaagaagcattacaaccacaaagtagatgtctacagctttgcaattgtgttgtgggaactcctccacaataaactgcccttcgagggaatgtctaaccttcaagctgcctacgctgccgctttcaagaatatcagaccaagtgccgataacttgcccgaggagctgtcagaaatcctaacatcctgctggaaggaagacccaaacgacagaccaaacttcacacagataatacagatgctcctacactacctatccaccctttcgccacaagagaccttggcgggcccccgccgcacgttcagttcggagaacacaatcctgcccccagagtctcccgggacaagctcgctgatggcttcgcggggcgacctcggcgacacgcccaagggcaagaaggaagacaagccgaggggcttcttcttctgtttcagcgagtgctattag

SEQ ID NO: 122844 - protein, 353 aa, Zea mays
MESGSTFYGGEGLSIDPKWFIDPKLLFVGPRIGEGAHAKVYEGKYKNQNVAIKIVHKGDTPEEMTKREGRFLREVTMLSRVQHKNLVKFIGACLEPVMVVVTELLVGGSLRKYLVSLRPRSLEPRVAVGFALDIARAMECLHAHGIIHRDLKPENLLLTADQRTVKLVDLGLAREETLTEMMTAETGTYRWMAPELYSTVTLRHGEKKHYNHKVDVYSFAIVLWELLHNKLPFEGMSNLQAAYAAAFKNIRPSADNLPEELSEILTSCWKEDPNDRPNFTQIIQMLLHYLSTLSPQETLAGPRRTFSSENTILPPESPGTSSLMASRGDLGDTPKGKKEDKPRGFFFCFSECY

SEQ ID NO: 122845 - DNA, 1758 bp, Glycine max
  CDS (1)..(1758)
atggtgatgatggtgacggagggaaacgacagcagctgcggcagcggagtgcagcaccatacgatgtcgtcctcgtcctcgccggcgcagagccggcagcagcggcagaaggtggaagtgtacaatgagattctccgccgcttgaaggattccggccacgaagaagctatgcaacctggcttccacgatcagctttgggctcacttcaatcgcctccccacacggtatgcgctggatgtgaatgtggaaagggcggcagatgttctcatgcacaagagattgctgcatttggcgcatgatcctgctaataggccttcaattgaagttcgattagttcaggtttatcccataaccgatggaaactcagctgacacttttgaatcagatgatcctgggatagaatctggacaaagttcttcaaagtactcaagcagacagagtatacatccacctcctgcttttggttcttctcctaatcttgaagcactggctcttgaagcaaataattctgaagaagacatagaagaggaacaatctgtacatgccaatgttcaatattcacggcccatgcatgaaatcaccatctcaacagatgacaagcccaagcttctcagtcagttaactgctttgcttgctgagattggactgaacatccaagaagcacatgcattttctacaactgatggtttctcattagatgtgtttgttgttgaaggatggccctatgaggaaacagaaaagcttaaagcagctttggaaagtgaagtcttgaagaagattgagagacaggtgaggtctagtccacaatccgtatcttcagttgacgagcctgatcaagcaaagttgtacagtgaactggatcatttgacaataccaaatgatgggacagatgtttgggaaatagatcctaaacatttgaaatatggaactcaaattgcatctgggtcatatggtgaactatttaaaagtgtatattgtagccaggaagtggccatcaaagttctcaaggctgagcatgtagattcagaattgcagagagagttcgcacaggaagtctatatcatgagaaaggttcgacacaagaatgttgtacaattcataggagcttgcaccaagtccccacgcttatgcatagtaacagaatttatgtctggtggaagtgtgtatgactacctacataagcagaagggcttttttaaatttcctacactgctcaaagtagcaattgatgtttccaaaggaatgaactacttgcaccaacataatataatccatagagacttgaaggctgccaaccttttgatggatgaaaattgtactgtaaaggtcgctgattttggggttgctagagttaaagctcaatctggcgtcatgactgcagaaactggaacatatcgatggatggctcctgaggttatagaacacaagccgtatgatcacaaggctgatgtatttagttttggaattgttttatgggagttgctcaccggaaagcttccatacgaatatttaacccccctacaggcagctataggagtggttcaaaagggtttgcgacccaccatcccgaagaacactcatccaaagtttgtggagcttcttgagaggtcttggcagcaagatcctacattgagacctgatttctccgaaattatcgagatcctgcagcagttagcaaaggaggttggagatggagaggagcggcacaaggataaatctggaggactcctgtctgtcctcagaagaggacatcactaa

SEQ ID NO: 122846 - protein, 585 aa, Glycine max
MVMMVTEGNDSSCGSGVQHHTMSSSSSPAQSRQQRQKVEVYNEILRRLKDSGHEEAMQPGFHDQLWAHFNRLPTRYALDVNVERAADVLMHKRLLHLAHDPANRPSIEVRLVQVYPITDGNSADTFESDDPGIESGQSSSKYSSRQSIHPPPAFGSSPNLEALALEANNSEEDIEEEQSVHANVQYSRPMHEITISTDDKPKLLSQLTALLAEIGLNIQEAHAFSTTDGFSLDVFVVEGWPYEETEKLKAALESEVLKKIERQVRSSPQSVSSVDEPDQAKLYSELDHLTIPNDGTDVWEIDPKHLKYGTQIASGSYGELFKSVYCSQEVAIKVLKAEHVDSELQREFAQEVYIMRKVRHKNVVQFIGACTKSPRLCIVTEFMSGGSVYDYLHKQKGFFKFPTLLKVAIDVSKGMNYLHQHNIIHRDLKAANLLMDENCTVKVADFGVARVKAQSGVMTAETGTYRWMAPEVIEHKPYDHKADVFSFGIVLWELLTGKLPYEYLTPLQAAIGVVQKGLRPTIPKNTHPKFVELLERSWQQDPTLRPDFSEIIEILQQLAKEVGDGEERHKDKSGGLLSVLRRGHH

SEQ ID NO: 122847 - DNA, 1299 bp, Glycine max
  CDS (1)..(1299)
atgggcaattgcggaagcagagaggaatctgccgtagtttccaaggctcaagttgttcagcagcttcaccatgcgacgtcgttgggcgccagtgccaggaccgacaagaagcacgctcacaggcacaatctcagcgagtgcgcttcggatctcagcgagtcctgttccacaccgcgcggtaacaatagcagcaacacgctgctctacacgcacgtcatcgctttcacgctctacgagttggagaccataaccaagagctcccgcgccgactacatcctcggcgagggaggcttcggcaccgtttacaaaggctacattgatgagaacgtcagagtcggactcaaatcgctccctgtagctgtcaaagtcttaaacaaagagggtttacaaggacatcgagagtggcttacggaggtgaattttctcgggcagctgaggcatcctaatctggtgaagttgattgggtactgttgtgaagatgatcacaggctgcttgtgtatgagttcatgttccgagggagtttggaaaatcacttattccgaaaggcaactgtccctttatcatgggctacaagaatgatgattgctcttggagcagccaaaggacttgcctttctccacaatgctgaaaggcctgtaatctatcgcgacttcaaaacctctaatatattattggactccgactatacagccaaactttctgattttggactagctaaagcaggaccacaaggtgatgaaacccatgtatctacccgagtcatgggtacctatggttatgctgcccctgaatatgtaatgactggccacctgacggctaggagtgacgtctatagctttggcgttgttcttttggagcttttaacagggaggaaatctgttgacaagaccagacctggaaaggaacagagcttggtagattgggcacggccgaagctcaatgacaagagaaagctccttcaaataattgatcctagattggagaatcaatactcagtgagggcagcacaaaaagcatgtagcttggcttattactgtttgagtcaaaatcccaaagcaaggccactaatgagtgatgtagttgagacattggagcccttgcaaagttcaagtgttggtccaggtgaagtctcattatctggatcaaatagtgggagtgctgggccttttgccatgaacaaaatctctgactgccggatgcgccacaagttttcaaacaatgttggtcccggtgctacttgtcggtctccaaacccgaattgctcaccaggtggcccagctacattacgggtcagatga

SEQ ID NO: 122848 - protein, 432 aa, Glycine max
MGNCGSREESAVVSKAQVVQQLHHATSLGASARTDKKHAHRHNLSECASDLSESCSTPRGNNSSNTLLYTHVIAFTLYELETITKSSRADYILGEGGFGTVYKGYIDENVRVGLKSLPVAVKVLNKEGLQGHREWLTEVNFLGQLRHPNLVKLIGYCCEDDHRLLVYEFMFRGSLENHLFRKATVPLSWATRMMIALGAAKGLAFLHNAERPVIYRDFKTSNILLDSDYTAKLSDFGLAKAGPQGDETHVSTRVMGTYGYAAPEYVMTGHLTARSDVYSFGVVLLELLTGRKSVDKTRPGKEQSLVDWARPKLNDKRKLLQIIDPRLENQYSVRAAQKACSLAYYCLSQNPKARPLMSDVVETLEPLQSSSVGPGEVSLSGSNSGSAGPFAMNKISDCRMRHKFSNNVGPGATCRSPNPNCSPGGPATLRVR

SEQ ID NO: 122849 - DNA, 1197 bp, Linum usitatissimum
  CDS (1)..(1197)
atgggttcgtgcttcagttccagcatcgatggggggaagaaagaggggagtactgggtcaacaagcagggtatcagcatcaggggggactgttccatatactcctcggacagaaggggagatattgcagtcaagcaacttgaagagctttacgtttggtgatctaaaggcatctacaaggaacttccgtccggatagtttgataggggaaggtgggtttggttgtgttttcaaaggatgggttgatgagaattcactcactgctgtcaggcctggcactggcttggtcattgctgtcaaaagactcaaccaagagagcttccagggtcaccaggaatggctggcggaaatcaattacctggggcagctggaccatccaaaccttgtgaaattggtcggctactgcattgaggatgagcacaggcttctagtttacgagttcatgcctaagggcagcttggaaaatcatcttttcagaagggcttcttatttccaacctttatcttggaaccttcgtatgaaggttgcagttgatgctgccagaggtctagcattccttcacagcgacaaggccaaagttatctaccgcgatttcaagacttctaacatcctcctcgattcgaactacaatgcaaaactgtccgatttcgggttagcaaaggacggtccatcgggaagcaagagccacgtctcgacaagggtgatggggacatacgggtatgcagcaccggagtacatggcgacaggacatctaacatcaaagagcgatgtgtacagtttcggagtggtgctgctggagataatgtcgggaaggagagcgatagacaagaacaggccgtcgagggagaagagcttagtggattgggcaaggccgtaccttgggagcaaaaggaagatataccaagtgatggatgcaaggattgaagggcagtacacgggaagttgcgcgatgaaagtgtctacgttagcagtgagatgcctgtcaatggaggccaagtacagacctaacatggaggaagttgttagaattctggagcagatttaccacgagtacagcgagagtagtgaaggtatgaaagggaacaacaacaacaataatcatcaaaaggcaagaataaggaagaatgtgaatggagttgctgtggttgctagtggcaaagcttctcccagacctgcagcatctcctctccgagtatag

SEQ ID NO: 122850 - protein, 398 aa, Linum usitatissimum
MGSCFSSSIDGGKKEGSTGSTSRVSASGGTVPYTPRTEGEILQSSNLKSFTFGDLKASTRNFRPDSLIGEGGFGCVFKGWVDENSLTAVRPGTGLVIAVKRLNQESFQGHQEWLAEINYLGQLDHPNLVKLVGYCIEDEHRLLVYEFMPKGSLENHLFRRASYFQPLSWNLRMKVAVDAARGLAFLHSDKAKVIYRDFKTSNILLDSNYNAKLSDFGLAKDGPSGSKSHVSTRVMGTYGYAAPEYMATGHLTSKSDVYSFGVVLLEIMSGRRAIDKNRPSREKSLVDWARPYLGSKRKIYQVMDARIEGQYTGSCAMKVSTLAVRCLSMEAKYRPNMEEVVRILEQIYHEYSESSEGMKGNNNNNNHQKARIRKNVNGVAVVASGKASPRPAASPLRV

SEQ ID NO: 122851 - DNA, 1230 bp, Brassica napus
  CDS (1)..(1230)
atgcttgagggaccaaagttcgatatgctcgctgttggcaatcaccacaattacgatgcattcacccaagacttttatcaaaagctcggtgaagaaggtacaaacatgtccatggacagtatgcaaacaagtaatgcaggaggctctgtgtcaatgtctgtggataacagtagcgttggttctagcgacgctcttatcggccatcccggtttgaagcctatgcgtcatccctactctctctccgttggacaaagcgtgtttcgccccgggagagtcacgcatgcgctcaacgatgatgccttggcgcaagcactgatggatagcagctacccaacgcagggacttgcgaactacgaagagtggactatagatctgaggaagcttcacatgggtcccgcttttgcgcaaggggcgtttggtaagttatacagagggacttacaacggagaggatgtagccattaagctactagagaggccagagaacagccctgagaaggcgcaagctctggagcagcagtttcagcaggaggtttctatgctctcgtttctgaagcaccccaacatcgttaggttcatcggcgcttgcattaaaccgatggtgtggtgcatcgtgactgaatatgcgaaaggaggctcggtgagacagtttttgacgaagagacaaaaccgagctgtgcctttgaagttggctgttaagcaggcgttggatgttgctagaggtatggcttacgtccatgagcgcaactttatacacagggatctgaagtcagataacctcctcatatcagctgatcggtccatcaagattgctgactttggcgttgcgagaatcgaagttcaaactgaagggatgacaccagagacagggacttacagatggatggctccagagatgatccagcatagaccctacactcaaaaagtggacgtctacagttttggaatcgtgctgtgggagttgataacgggtctgttaccgttccagaacatgactgcggttcaagctgcatttgcggtggtgaacagaggagtgcgtccaacggtcccagcggattgtctccctgtgcttggtgagatcatgacacgttgctgggatgcgaaccctgaagtccgtccttgttttgcagaggttgtcaatcttcttgaggcggctgaaaccgagataatgacgactgcgagaaaagcccgtttcagatgttgcatgacgcaaccaatgacaatcgactaa

SEQ ID NO: 122852 - protein, 409 aa, Brassica napus
MLEGPKFDMLAVGNHHNYDAFTQDFYQKLGEEGTNMSMDSMQTSNAGGSVSMSVDNSSVGSSDALIGHPGLKPMRHPYSLSVGQSVFRPGRVTHALNDDALAQALMDSSYPTQGLANYEEWTIDLRKLHMGPAFAQGAFGKLYRGTYNGEDVAIKLLERPENSPEKAQALEQQFQQEVSMLSFLKHPNIVRFIGACIKPMVWCIVTEYAKGGSVRQFLTKRQNRAVPLKLAVKQALDVARGMAYVHERNFIHRDLKSDNLLISADRSIKIADFGVARIEVQTEGMTPETGTYRWMAPEMIQHRPYTQKVDVYSFGIVLWELITGLLPFQNMTAVQAAFAVVNRGVRPTVPADCLPVLGEIMTRCWDANPEVRPCFAEVVNLLEAAETEIMTTARKARFRCCMTQPMTID

SEQ ID NO: 122853 - DNA, 1131 bp, Brassica napus
  CDS (1)..(1131)
atgggttggatcccgtgctctgggaaatcgagtgggaagactaagaagaggagcgacagtgacgaaaacctcagcagaaattgttctgtctctgcttcagagagatctaaggccaaatcgtcggtgagtgaatccagaagcagagggtctgataacattgtggcacaaacgtttacattctctgagctagctactgccactagaaacttcaggaaagaatgtcttataggagaaggaggattcggtagagtttacaaaggctacctagcaagcactgaccagacagcggctatcaagcagcttgatcataatggtttacaaggaaacagagagttcctcgttgaggttctcatgttgcgtcttcttcatcacccaaatctagttaaccttattggttattgcgctgatggagatcaaaggcttctcgtctatgaatacatgcctctagggtcacttgaagatcatttgcacgacatttcacctggtaagcagccacttgactggaacactagaatgaaaatagcagcaggtgctgcaaaaggattagagtatctgcacgacaaaaccatgcctccagtgatctaccgtgatttgaaatgctccaacattttgctcggagatgactacttcccgaagctatctgacttcggtttggctaaactcggcccagtgggtgacaagtctcatgtctccactcgggttatgggaacatacggatactgtgctcccgagtacgcaatgacagggcagctaacactcaaatcagacgtttatagcttcggtgtggttcttttggagatcataacggggaggaaagccatagacaactcgagatgtactggagaacagaatctggttgcgtgggcaaggcctctgtttaaagacaggaggaaattctcacaaatggctgatccaatgattcaaggtcaataccctccgagaggattgtaccaagcccttgctgtggcggcaatgtgcgtgcaagagcagccaaatctaaggcctgttatcgctgatgttgtcactgcactcacttacctcgcttcccaaaggtttgatcctatggctcagccagtccaaggctcccttttcgctcctgggactccacctagatcaaaaagggtggtttga

SEQ ID NO: 122854 - protein, 376 aa, Brassica napus
MGWIPCSGKSSGKTKKRSDSDENLSRNCSVSASERSKAKSSVSESRSRGSDNIVAQTFTFSELATATRNFRKECLIGEGGFGRVYKGYLASTDQTAAIKQLDHNGLQGNREFLVEVLMLRLLHHPNLVNLIGYCADGDQRLLVYEYMPLGSLEDHLHDISPGKQPLDWNTRMKIAAGAAKGLEYLHDKTMPPVIYRDLKCSNILLGDDYFPKLSDFGLAKLGPVGDKSHVSTRVMGTYGYCAPEYAMTGQLTLKSDVYSFGVVLLEIITGRKAIDNSRCTGEQNLVAWARPLFKDRRKFSQMADPMIQGQYPPRGLYQALAVAAMCVQEQPNLRPVIADVVTALTYLASQRFDPMAQPVQGSLFAPGTPPRSKRVV

SEQ ID NO: 122855 - DNA, 1305 bp, Brassica napus
  CDS (1)..(1305)
atgagctccgaagcgtcggcggctggagacggcggcgaaacgagcggtgggccagcaccggcgtacgacaaacagaaggagaaggcgcgcgtgagcagaacgtctctgatcctgtggcacgcgcaccagaacgacgcctctgcagtccggaagctcctggaggaagatccgtctctggttcacgccagagactacgacaagcgaacgcctctccacgtggcgtctcttcatgggtggattgacgtcgtcaaatgtttgatcgagtttggtgctgatgtcaacgctcaggacaggtggaagaatacgcctctggctgatgcagaaggagctaggaagcagaaaatgatcgagctactcaaatctcatggcggtttatcttatggtcaaaacggaagtcactttgaaccaaagcctgtgccaccaccaattccaaagaagtgtgactgggagattgaacctgctgagctggatttctctaatgccgccatgattggaaagggttcatttggtgagattgtgaaagcctattggagaggaacaccagtagctgtcaaacgtattcttccttctctctcagatgatagacttgttattcaggacttcaggcatgaggttgatttgctagttaagcttcgccatcccaatatagtccaattcttaggagccgtaaccgaaagaaagccccttatgttaatcacagagtacttacgcgggggagatcttcaccagtacctcaaggagaagggcggtcttactccagcaactgctgtcaactttgccttggatatcgctagaggaatgacatatcttcacaatgagcctaatgttatcattcaccgagatcttaaaccaaggaacgttcttctggttaattcaagtgcagaccacttgaaagttggagactttgggcttagtaagctcataaaggttcaaaactctcatgatgtctacaaaatgactggcgaaacaggaagctaccggtatatggctcctgaagtgttcaagcataggaaatatgacaagaaagtcgatgtcttctcctttgctatgatactttacgagatgcttgaaggagagccaccgtttgcgaactacgagccgtacgaagcagcgaaacatgtatcagacggacacagacctactttccgttccaaaggatgcacacctgatttaagagacttaatagtgaaatgctgggacgctgacatgaaccagagaccatcgtttctggacatcctcaaaagacttgacaagatcaaggaaactctgccgtcggatcaccattggggcttattcacttcataa

SEQ ID NO: 122856 - protein, 434 aa, Brassica napus
MSSEASAAGDGGETSGGPAPAYDKQKEKARVSRTSLILWHAHQNDASAVRKLLEEDPSLVHARDYDKRTPLHVASLHGWIDVVKCLIEFGADVNAQDRWKNTPLADAEGARKQKMIELLKSHGGLSYGQNGSHFEPKPVPPPIPKKCDWEIEPAELDFSNAAMIGKGSFGEIVKAYWRGTPVAVKRILPSLSDDRLVIQDFRHEVDLLVKLRHPNIVQFLGAVTERKPLMLITEYLRGGDLHQYLKEKGGLTPATAVNFALDIARGMTYLHNEPNVIIHRDLKPRNVLLVNSSADHLKVGDFGLSKLIKVQNSHDVYKMTGETGSYRYMAPEVFKHRKYDKKVDVFSFAMILYEMLEGEPPFANYEPYEAAKHVSDGHRPTFRSKGCTPDLRDLIVKCWDADMNQRPSFLDILKRLDKIKETLPSDHHWGLFTS

SEQ ID NO: 122857 - DNA, 1944 bp, Brassica napus
  CDS (1)..(1944)
atgtcctcggcgccgtctccggggactggttcgcctccatctccaccatcaaactccacaaccaccactcctcctccagcttccgctcctcctcccaccacaccttcttctcctccgccgccatccactattccgacatctcctcctccttcttctcgctctacaccttctgctcctcctccatctccaccaactccatctacgccgggatctccacctcctcttcctcagccgtctccacccgctccaactacgcccggatctccacccgcacctgttactcctcctactcgaaaccctccaccttcagtcccaggaccaccgtccaatccttcacgcgaaggaggatctcctcgacctccatcttctccctcgccgccgtctccttcttccgacggtttatcaacaggagtggtggtgggaatcgccatcggaggagtcgctctgcttgtgatagtgactctgatttgtctcctctgtaagaagaaacgacggagagacgaagaagatgcttactatgttcctccgccacctcctcctggtcccaaagccggaggaccttacggtggacagcagcaacaatggcggcaacaaaacgcaacaccaccgtcagatcatgtcgtgacgtcactaccaccaccacctaaggctccatctccaccacggcaacctcctccacctccaccaccgcctttcatgagcagcagcggcggctccgactactcggaccgtccagttcttcctccaccgtctccagggcttgtgttaggcttctccaaaagcactttcacatacgaggagctagctagagccaccaatggtttctccgaggcgaacttgttaggacaaggcgggttcggttacgtgcacaaaggtgtgttgcctagtgggaaagaagttgctgtgaagcagctgaaagtagggagtggtcagggagagagggagtttcaggcagaggttgagatcatcagcagagttcaccacaggcatctggtgtctcttgttggttattgcatcgccggtgccaaaagattgcttgtctatgagtttgttcctaacaacaatctcgagcttcacctccatggcgagggacggcctacaatggaatggagcaccagattgaagattgctcttggatctgctaaaggactttcttatcttcatgaagattgcaatcctaaaatcattcaccgtgatatcaaggcttcaaacatattgatagatttcaagtttgaagctaaggttgctgattttggtcttgctaagattgcttctgatacaaacacgcatgtatcaacacgtgtgatgggaacctttgggtacttggctccggaatacgctgcaagcggaaagctcacggagaagtctgacgttttctcatttggcgttgtgcttttggagctcattactggacgtcgacccgttgatgccaacaatgtctatgtagatgacagcttagttgactgggcacgaccattgcttaaccgagcatctgagcaaggagactttgagggtttagctgatgcaaagatgaataatgggtatgacagagaggagatggctcgcatggttgcttgtgctgcggcttgtgttcgccattcagctcgccgcagacctcgcatgagccagattgtgcgtgcgttagaaggaaatgtatcactgtcagatcttaacgaagggatgagaccaggtcaaagcaatgtatacagctcatacggaggaagcaccgattatgactcgagccagtacaatgaagacatgaagaagtttaggaaaatggcacttggaactcaagagtacaacgccacgggtgagtacagtaatccgaccagtgactatggactgtacccgtctggttcaagcagcgagggccaaaccacacgcgagatggagatggggaagattaagagaaccggtcagggttatagtggaccttctctgtaa

SEQ ID NO: 122858 - protein, 647 aa, Brassica napus
MSSAPSPGTGSPPSPPSNSTTTTPPPASAPPPTTPSSPPPPSTIPTSPPPSSRSTPSAPPPSPPTPSTPGSPPPLPQPSPPAPTTPGSPPAPVTPPTRNPPPSVPGPPSNPSREGGSPRPPSSPSPPSPSSDGLSTGVVVGIAIGGVALLVIVTLICLLCKKKRRRDEEDAYYVPPPPPPGPKAGGPYGGQQQQWRQQNATPPSDHVVTSLPPPPKAPSPPRQPPPPPPPPFMSSSGGSDYSDRPVLPPPSPGLVLGFSKSTFTYEELARATNGFSEANLLGQGGFGYVHKGVLPSGKEVAVKQLKVGSGQGEREFQAEVEIISRVHHRHLVSLVGYCIAGAKRLLVYEFVPNNNLELHLHGEGRPTMEWSTRLKIALGSAKGLSYLHEDCNPKIIHRDIKASNILIDFKFEAKVADFGLAKIASDTNTHVSTRVMGTFGYLAPEYAASGKLTEKSDVFSFGVVLLELITGRRPVDANNVYVDDSLVDWARPLLNRASEQGDFEGLADAKMNNGYDREEMARMVACAAACVRHSARRRPRMSQIVRALEGNVSLSDLNEGMRPGQSNVYSSYGGSTDYDSSQYNEDMKKFRKMALGTQEYNATGEYSNPTSDYGLYPSGSSSEGQTTREMEMGKIKRTGQGYSGPSL

SEQ ID NO: 122859 - DNA, 1242 bp, Brassica napus
  CDS (1)..(1242)
atgcttgagggaccaagattcgatgtgctcgccgctggccatcacaacaacgaccacaactactacccattcacccaagacttttaccaaaagctaggcgaagaagaaggtacaaacatgtccacagacagtatgcaaacaagtaacgccggaggctccgtctccatgtctgtggataacagcagcgtcggttcaagcgacgctcttattggcaaccccggtttaaagcctatgcgccatccctactctctctccgttggacaaagcgtgttccgccccggaagagttacacacgcgctcaacgacgacgccttagcacaagggttgatggatagtagctacccaacccagggactcgcaaactacgaagagtggacgatagatctgaggaagcttcacatgggacccgctttcgctcaaggagcgtttggtaagctgtacagagggacttacaacggagaagacgtagccatcaagatactagagaggccagagaacagtcccgagaaggcacaagctctcgaacagcagtttcagcaggaggtctctatgctctcgtttctgaagcaccccaacatcgttaggttcatcggcgcttgcattaaaccgatggtgtggtgcatcgtgactgaatatgctaaaggaggctcggtgagacagtttttgactaagagacaaaaccgagctgtgcctttgaagttggctgttaagcaggcgtcggatgttgccagaggtatggcttacgtccacgagcgaaactttatacacagggatctgaagtcggataacctcctcatatcagctgatcggtccatcaagattgctgactttggcgttgcaagaatcgaagttcaaaccgaagggatgacaccagagacaggaacttacagatggatggccccagagatgatccagcatagaccatacactcaaaaagtagacgtctatagttttggaatcgtgctatgggagctgataacgggccagttaccgttccagaacatgacggcggttcaagctgcattcgcggtggtgaacagaggagtccgtccaacggtcccagcggattgtctccctgtgcttggagagatcatgacacgttgctgggatgcgaaccctgaagtgcgtccttgtttcgcagaggttgtcaatcttcttgagggagctgaaaccgaggtaatgacgactgtgaggaaagctcgtttcaggtggtgcatgaagcaaccaatgacaatcgaatga

SEQ ID NO: 122860 - protein, 413 aa, Brassica napus
MLEGPRFDVLAAGHHNNDHNYYPFTQDFYQKLGEEEGTNMSTDSMQTSNAGGSVSMSVDNSSVGSSDALIGNPGLKPMRHPYSLSVGQSVFRPGRVTHALNDDALAQGLMDSSYPTQGLANYEEWTIDLRKLHMGPAFAQGAFGKLYRGTYNGEDVAIKILERPENSPEKAQALEQQFQQEVSMLSFLKHPNIVRFIGACIKPMVWCIVTEYAKGGSVRQFLTKRQNRAVPLKLAVKQASDVARGMAYVHERNFIHRDLKSDNLLISADRSIKIADFGVARIEVQTEGMTPETGTYRWMAPEMIQHRPYTQKVDVYSFGIVLWELITGQLPFQNMTAVQAAFAVVNRGVRPTVPADCLPVLGEIMTRCWDANPEVRPCFAEVVNLLEGAETEVMTTVRKARFRWCMKQPMTIE

SEQ ID NO: 122861 - DNA, 1230 bp, Brassica napus
  CDS (1)..(1230)
atgcttgagggaccaaagttcgatatgctcgctgttggcaatcaccacaattacgatgcattcacccaagacttttatcaaaagctcggtgaagaaggtacaaacatgtccatggacagtatgcaaacaagtaatgcaggaggctctgtgtcaatgtctgtggataacagtagcgttggttctagcgacgctcttatcggccatcccggtttgaagcctatgcgtcatccctactctctctccgttggacaaagcgtgtttcgccccgggagagtcacgcatgcgctcaacgatgatgccttggcgcaagcactgatggatagcagctacccaacgcagggacttgcgaactacgaagagtggactatagatctgaggaagcttcacatgggtcccgcttttgcgcaaggggcgtttggtaagttatacagagggacttacaacggagaggatgtagccattaagctactagagaggccagagaacagtcctgagaaggcgcaagctctggagcagcagtttcagcaggaggtctctatgctctcgtttctgaagcaccccaacatcgttaggttcatcggcgcttgcattaaaccgatggtgtggtgcatcgtgactgaatatgctaaaggaggctcggtgagacagtttttgactaagagacaaaaccgagctgtgcctttaaagttggctgttaagcaggcgttggatgttgccagaggtatggcttacgtccacgagcgaaactttatacacagggatctgaagtcggataacctcctcatatcagctgatcggcccatcaagattgctgactttggcgttgcgagaatcgaagttcaaactgaagggatgacacctgagacagggacttacagatggatggctccagaaatgatccagcatagaccttacactcaaaaagtggacgtctacagttttggaatcgtgctgtgggagttgataacgggtctgttaccgttccagaacatgactgctgttcaagctgcatttgcggtggtgaacagaggagtgcgtccaacggtcccagctgattgtctccctgtgcttggtgagatcatgacacgttgctgggatgcgaaccctgaagtccgtccttgttttgcagaggttgtcaatcttcttgaggcggctgaaaccgagataatgacgactgcgaggaaagcccgtttcagatgttgcatgacgcaaccaatgacaatcgactaa

SEQ ID NO: 122862 - protein, 409 aa, Brassica napus
MLEGPKFDMLAVGNHHNYDAFTQDFYQKLGEEGTNMSMDSMQTSNAGGSVSMSVDNSSVGSSDALIGHPGLKPMRHPYSLSVGQSVFRPGRVTHALNDDALAQALMDSSYPTQGLANYEEWTIDLRKLHMGPAFAQGAFGKLYRGTYNGEDVAIKLLERPENSPEKAQALEQQFQQEVSMLSFLKHPNIVRFIGACIKPMVWCIVTEYAKGGSVRQFLTKRQNRAVPLKLAVKQALDVARGMAYVHERNFIHRDLKSDNLLISADRPIKIADFGVARIEVQTEGMTPETGTYRWMAPEMIQHRPYTQKVDVYSFGIVLWELITGLLPFQNMTAVQAAFAVVNRGVRPTVPADCLPVLGEIMTRCWDANPEVRPCFAEVVNLLEAAETEIMTTARKARFRCCMTQPMTID

SEQ ID NO: 122863 - DNA, 1239 bp, Brassica napus
  CDS (1)..(1239)
atgaagtgcttcttattccagagagacgaacagagaagccctaaacctctctcacccctctccgaccaccgttctggtttcaccaataacggttctactaacggctctggaaccagcacggtatcatcatccaccgggaggacctccttgcccgttagagaaaacaacctcagagagttcaccatcgccgatctcaaatccgctaccaagaacttcagccgctctgtcatgataggcgaaggcgggttcggctgcgtctactggggaaccatcaagagctcgcaagacccttccaagaaaatcgaagtcgccgtgaaacagctcggtaagagagggttgcagggtcataaggaatgggtgacggaagttaactttcttggggtggtggagcatccaaacttggtgaagctattgggtcattgcgccgaggacgacgaacgtgggatccagaggcttttggtttatgaatacatgccaaaccaaagcgttgagttccatttagctccaagttcacccactgtgcttacttgggacctcaggttgagaatagcgcaagacgcagcccggggtttaacatacctccacgaagaaatggacttccaaataatatttagagatttcaagtcatccaacattctactagacgaggattggaaagcaaagctttcagatttcgggttggctcggttaggtcctgaaccaggatcaactcatgtctctactggtgtagtaggaacaatgggctacgcagctccagaatacatccaaacaggtcgtctcacatcaaaaagcgacgtatggggttacggagttttcatctacgagctcattacaggaaggaggccactagacaagaacaggcctaaaggagagcagaagcttcttgaatgggtgagaccttacttaagcgacacaaagaagtttaggctcattatagacccgaggcttgaaggcaaatactcgatcaaacacgtccagaaactagcggtcgtagccaacctctgccttactaggaacccaaaggcacgtccaaagatgagtgaggtgttggagatggtgacaaagattgtggaagattcttcgtctagtaatggtggtaagaagaggcagctggttccgttgaggagtctaggagcttctagagctgaggaagagaagcagaagaaggtggttcttgatggtggcgaaggaggttggttagataaactatggaacccaaagaatgtgagagcttgttga

SEQ ID NO: 122864 - protein, 412 aa, Brassica napus
MKCFLFQRDEQRSPKPLSPLSDHRSGFTNNGSTNGSGTSTVSSSTGRTSLPVRENNLREFTIADLKSATKNFSRSVMIGEGGFGCVYWGTIKSSQDPSKKIEVAVKQLGKRGLQGHKEWVTEVNFLGVVEHPNLVKLLGHCAEDDERGIQRLLVYEYMPNQSVEFHLAPSSPTVLTWDLRLRIAQDAARGLTYLHEEMDFQIIFRDFKSSNILLDEDWKAKLSDFGLARLGPEPGSTHVSTGVVGTMGYAAPEYIQTGRLTSKSDVWGYGVFIYELITGRRPLDKNRPKGEQKLLEWVRPYLSDTKKFRLIIDPRLEGKYSIKHVQKLAVVANLCLTRNPKARPKMSEVLEMVTKIVEDSSSSNGGKKRQLVPLRSLGASRAEEEKQKKVVLDGGEGGWLDKLWNPKNVRAC

SEQ ID NO: 122865 - DNA, 1317 bp, Brassica napus
  CDS (1)..(1317)
atgagctccgattcgtcgtcggcggctggagacggcggcgaacaagccgtttccgcagcgggaacgagcgctgggtacgacaaacagaaggagaaggcgcgcgtgagcagaacgtctctgatcctgtggcacgcgcaccagaacgacgcggctgcagttcggaagttactggaggaggatccgtctctggttcacgctagagactacgacaagcggacgcctctccacgtggcgtcgcttcatgggtggatcgatgttgttaactgtctgattgagtttggtgctgatgtgaacgctcaggacaggtggaagaacactcctctggctgatgcagaaggtgctaggaagcagaaaatgatcgagctgctgaagtctcatggcggtttatcttatggtcaaaacggaagtcattttgaaccaaagcctgtgccaccaccaattccaaagaaatgtgactgggaaattgaacctgctgagctggatttctctaacgccgccatgattggaaagggttcatttggtgagattgtgaaagcttattggagaggaacaccagtagctgtcaaacgtattcttccttctctctcagatgatagacttgttattcaggacttcaggcatgaggttgatttgctagttaagcttcgccatccgaatatagtgcagttcttaggagctgtaaccgaaagaaagccccttatgttaataactgaatacttacgcgggggagatcttcatcaatacctcaaagagaagggtggtcttactccagctactgctgtcaactttgccttggatatcgctagaggaatgacatatcttcacaatgagcctaatgttatcattcaccgagatcttaaaccaaggaacgttcttctggttaattcaagtgcagaccacttgaaagttggagactttgggcttagtaagctcataaaggttcaaaactctcatgatgtctacaaaatgactggcgaaacaggaagctaccggtatatggctcctgaagtgttcaagcatagaaaatacgacaagaaagtcgatgtcttctcctttgcaatgatactttacgagatgcttgaaggagagccaccgtttgcgaactacgagccatacgaagcagcaaaacatgtatcagatggacacagacctactttccgttccaaaggatgcacacctgatttaagagagttaatagtgaaatgctgggacgctgacatgaaccagagaccatcgtttctggacatcctcaaaagacttgacaagatcaaggaaactctgccgtcggatcaccattggggcttattcacttcataa

SEQ ID NO: 122866 - protein, 438 aa, Brassica napus
MSSDSSSAAGDGGEQAVSAAGTSAGYDKQKEKARVSRTSLILWHAHQNDAAAVRKLLEEDPSLVHARDYDKRTPLHVASLHGWIDVVNCLIEFGADVNAQDRWKNTPLADAEGARKQKMIELLKSHGGLSYGQNGSHFEPKPVPPPIPKKCDWEIEPAELDFSNAAMIGKGSFGEIVKAYWRGTPVAVKRILPSLSDDRLVIQDFRHEVDLLVKLRHPNIVQFLGAVTERKPLMLITEYLRGGDLHQYLKEKGGLTPATAVNFALDIARGMTYLHNEPNVIIHRDLKPRNVLLVNSSADHLKVGDFGLSKLIKVQNSHDVYKMTGETGSYRYMAPEVFKHRKYDKKVDVFSFAMILYEMLEGEPPFANYEPYEAAKHVSDGHRPTFRSKGCTPDLRELIVKCWDADMNQRPSFLDILKRLDKIKETLPSDHHWGLFTS

SEQ ID NO: 122867 - DNA, 1128 bp, Brassica napus
  CDS (1)..(1128)
atgggttggatcccgtgctctgggaaatcgagtgggaagactaagaagaggagcaacagtgacgaaaacctcagcagaaattgttctgtctctgcttcagagagatctaaggccaaatcgtctttgagtgaatccaaaagcagagggtctgataacattgtggcacaaacgtttacattctctgagctagctaccgccactagaaacttcaggaaagaatgtcttataggagaaggaggatttggtagagtttacaaaggttacttagcaagcactgaccagacagcggctatcaagcagcttgatcataatggtttacaaggaaacagagagttcctcgttgaggttctcatgttgcgtcttcttcatcacccaaatctagttaaccttattggttattgcgctgatggagatcaaaggcttctcgtctatgaatacatgcctctagggtcacttgaagatcatttgcacgacatttcacctggtaagcagccacttgactggaacactagaatgaaaatagcagcaggtgctgcaaaaggattagagtatctgcacgacaaaaccatgcctccagtgatctaccgtgatttgaaatgctccaacattttgctcggagatgactacttcccgaagctatctgacttcggtttggctaaactcggcccagtgggtgacaagtctcatgtctccactcgggttatgggaacatacggatactgtgctcccgagtacgcaatgacagggcagctaacactcaaatcagacgtttatagcttcggtgtggttcttttggagatcataacggggaggaaagccatagacaactcgagatgtactggagaacagaatctggttgcgtgggcaaggcctctgtttaaagacaggaggaaattctcacaaatggctgatccaatgattcaaggtcaataccctccgagaggattgtaccaagcccttgctgtggcggcaatgtgcgtgcaagagcagccaaatctaaggcctgttatcgctgatgttgtcactgcactcacttacctcgcttcccagaggtttgatcctatggctcagccagtccaaggctcccttttcgctcctgggactccacctagatcaaaaagggcctga

SEQ ID NO: 122868 - protein, 375 aa, Brassica napus
MGWIPCSGKSSGKTKKRSNSDENLSRNCSVSASERSKAKSSLSESKSRGSDNIVAQTFTFSELATATRNFRKECLIGEGGFGRVYKGYLASTDQTAAIKQLDHNGLQGNREFLVEVLMLRLLHHPNLVNLIGYCADGDQRLLVYEYMPLGSLEDHLHDISPGKQPLDWNTRMKIAAGAAKGLEYLHDKTMPPVIYRDLKCSNILLGDDYFPKLSDFGLAKLGPVGDKSHVSTRVMGTYGYCAPEYAMTGQLTLKSDVYSFGVVLLEIITGRKAIDNSRCTGEQNLVAWARPLFKDRRKFSQMADPMIQGQYPPRGLYQALAVAAMCVQEQPNLRPVIADVVTALTYLASQRFDPMAQPVQGSLFAPGTPPRSKRA

SEQ ID NO: 122869 - DNA, 1242 bp, Brassica napus
  CDS (1)..(1242)
atgcttgagggaccaagattcgatgtcctcgctgctggccatcacaacaacgaccacaactactacccattcacccaagacttttaccaaaagctcggtgaagaagaaggtacaaacatgtccacagacagtatgcaaacaagtaacgccggagggtctgtctccatgtctgtggacaacagtagcgttggttcaagcgacgctctcatcggccatcccggtttaaagcctatgcgccatccctactctctctccgttggacaaagcgtgttccgccccggaagagtcacacacgcgctcaacgacgacgccttagcacaagggttgatggatagtagctacccaactcagggactcgcaaactacgaagagtggacgatagatctgaggaagcttcacatgggacccgcttttgctcaaggagcgtttggtaagctgtacagagggacttacaacggggaagacgtagccatcaagatactcgagaggccagagaatagtcccgagaaggcacaagctctcgaacagcagtttcagcaggaggtttctatgctctcgtttctgaagcaccccaacatcgttaggttcatcggcgcttgcattaaaccgatggtgtggtgcatcgtgactgaatatgctaaaggaggttcggtgagacagtttttgactaagaggcaaaaccgagctgtgcctttgaagttggctgttaagcaggcgttggatgttgctagaggtatggcttacgtccatgagcggaactttatacacagggatctgaagtcggataacctcctcatatcagctgatcggtccatcaagattgctgactttggcgttgcgagaatcgaagttcaaaccgaagggatgactccagagacaggaacttacagatggatggccccagagatgattcagcatagaccatacactcagaaagtagacgtctatagttttggaatcgtgctgtgggagttgataacgggccttttaccgtttcagaacatgacggctgttcaagctgctttcgcggtggtgaaccgaggagtgcgtccaacggtgccagcggattgtctccctgtgcttggagagatcatgacacgttgctgggatgcggaccctgaagtgcgtccttgttttgcagaggttgtcaatcttcttgagggggctgaaaccgaggtaatgacgactgtgcggaaagctcgtttcaggtgttgcatgacgcaaccaatgacaatcgactga

SEQ ID NO: 122870 - protein, 413 aa, Brassica napus
MLEGPRFDVLAAGHHNNDHNYYPFTQDFYQKLGEEEGTNMSTDSMQTSNAGGSVSMSVDNSSVGSSDALIGHPGLKPMRHPYSLSVGQSVFRPGRVTHALNDDALAQGLMDSSYPTQGLANYEEWTIDLRKLHMGPAFAQGAFGKLYRGTYNGEDVAIKILERPENSPEKAQALEQQFQQEVSMLSFLKHPNIVRFIGACIKPMVWCIVTEYAKGGSVRQFLTKRQNRAVPLKLAVKQALDVARGMAYVHERNFIHRDLKSDNLLISADRSIKIADFGVARIEVQTEGMTPETGTYRWMAPEMIQHRPYTQKVDVYSFGIVLWELITGLLPFQNMTAVQAAFAVVNRGVRPTVPADCLPVLGEIMTRCWDADPEVRPCFAEVVNLLEGAETEVMTTVRKARFRCCMTQPMTID

SEQ ID NO: 122871 - DNA, 1230 bp, Brassica napus
  CDS (1)..(1230)
atgcttgagggaccaaagttcgatatgctcgctgttggcaatcaccacaattacgatgcattcacccaagacttttatcaaaagctcggtgaagaaggtacaaacatgtccatggacagtatgcaaacaagtaatgcaggaggctctgtgtcaatgtctgtggataacagtagcgttggttctagcgacgctcttatcggccatcccggtttgaagcctatgcgtcatccctactctctctccgttggacaaagcgtgtttcgccccgggagagtcacgcatgcgctcaacgatgatgccttggcgcaagcactgatggatagcagctacccaacgcagggacttgcgaactacgaagagtggactatagatctgaggaagcttcacatgggtcccgcttttgcgcaaggggcgtttggtaagttatacagagggacttacaacggagaggatgtagccattaagctactagagaggccagagaacagccccgagaaggcgcaagctctggagcagcagtttcagcaggaggtttctatgctctcgtttctgaagcaccccaacatcgttaggttcatcggcgcttgcattaaaccgatggtgtggtgcatcgtgactgaatatgcgaaaggaggctcggtgagacagtttttgactaagagacagaaccgagctgtgcctttgaagttggctgttaagcaggcgttggatgttgctagaggtatggcttacgtccatgagcgcaactttatacacagggatctgaagtcggataacctcctcatatcagctgatcggtccatcaagattgctgattttggcgttgcgagaatcgaagttcaaaccgaagggatgactccagagacaggaacttacagatggatggccccagagatgattcagcatagaccatacactcagaaagtagacgtctatagttttggaatcgtgctgtgggagttgataacgggccttttaccgtttcagaacatgacggctgttcaagctgctttcgcggtggtgaaccgaggagtgcgtccaacggtgccagcggattgtctccctgtgcttggagagatcatgacacgttgctgggatgcggaccctgaagtccgtccttgttttgcagaggttgtcaatcttcttgagggagctgaaaccgaggtaatgacgactgtgcggaaagcccgtttcaggtgttgcatgacgcaaccaatgacaatcgactga

SEQ ID NO: 122872 - protein, 409 aa, Brassica napus
MLEGPKFDMLAVGNHHNYDAFTQDFYQKLGEEGTNMSMDSMQTSNAGGSVSMSVDNSSVGSSDALIGHPGLKPMRHPYSLSVGQSVFRPGRVTHALNDDALAQALMDSSYPTQGLANYEEWTIDLRKLHMGPAFAQGAFGKLYRGTYNGEDVAIKLLERPENSPEKAQALEQQFQQEVSMLSFLKHPNIVRFIGACIKPMVWCIVTEYAKGGSVRQFLTKRQNRAVPLKLAVKQALDVARGMAYVHERNFIHRDLKSDNLLISADRSIKIADFGVARIEVQTEGMTPETGTYRWMAPEMIQHRPYTQKVDVYSFGIVLWELITGLLPFQNMTAVQAAFAVVNRGVRPTVPADCLPVLGEIMTRCWDADPEVRPCFAEVVNLLEGAETEVMTTVRKARFRCCMTQPMTID

SEQ ID NO: 122873 - DNA, 1239 bp, Zea mays
  CDS (1)..(1239)
atgcctcggttgtcctgcaagttcgcggaccccgacagcgccgtttcctccgctccggtggcgcgccgcgtgcggtcagacacgatgagctgcggcagcgacgtgtgccgggacggcggcagcagcagcggcagcgaggagttcaggcggccgcggcccagcaaggtcgccgctgatgattcggtggcgcccgcccggagctcggatgccgcggcgccggcgtcgtggatcgacaggaagctgcttgttgatccaaagatgctgttcgttggggacaagattggggagggagctcatggcaaggtctacaaggggaagtacggtgatcaaattgtagcgataaaggttcttaaccgtggcagcacccctgaagaaaaagcaacacttgaagcccgtttcatccgagaagtaaatatgatgtgtaaagtgaaacatgagaatcttgtcaagtttattggagcttgcaaagaaccattgatggtgatcgttagtgagctactaccagggatgtcactgaaaagttacctgcatagcatacggcctagccaattagatacacacactgcaataagctatgcactggacatagctcatgcaatggactgtttacatgccaatggcataatacatagagacctgaaacctgataatttattgcttacagcaaatcgcaagaagctaaaacttactgattttggacttgcacgtgaagaaactgtgactgaaatgatgactgctgaaactgggacttaccgatggatggccccagagctatacagcacagtcacacttcgacgtggtgagaaaaagcattacacaaataaagtggatgtgtacagctttggcattgttttgtgggaattattgaccaatagaatgccatttgaaggcatgtcgaatctacaagctgcatatgctgctgcttttcagcaaaagcgcccagctctccctgaggagaccccccaggagcttgtgttcatagtacaatcatgctgggttgaggatcctgccatgcgacccagtttcagccagatcatccgaatgcttgaaactttcattatgacaatacatccacctccgctttcagagccaaacgaaggcgaggaatcggaagaaacgaggtcgtcactgagcagtaggagctcctctggctcctcgctcgtttctcgcgcgacaagcaagctctcggtcgtccgccacctcttcgtctcaaagaagacaggcaatgggaaggcgtga

SEQ ID NO: 122874 - protein, 412 aa, Zea mays
MPRLSCKFADPDSAVSSAPVARRVRSDTMSCGSDVCRDGGSSSGSEEFRRPRPSKVAADDSVAPARSSDAAAPASWIDRKLLVDPKMLFVGDKIGEGAHGKVYKGKYGDQIVAIKVLNRGSTPEEKATLEARFIREVNMMCKVKHENLVKFIGACKEPLMVIVSELLPGMSLKSYLHSIRPSQLDTHTAISYALDIAHAMDCLHANGIIHRDLKPDNLLLTANRKKLKLTDFGLAREETVTEMMTAETGTYRWMAPELYSTVTLRRGEKKHYTNKVDVYSFGIVLWELLTNRMPFEGMSNLQAAYAAAFQQKRPALPEETPQELVFIVQSCWVEDPAMRPSFSQIIRMLETFIMTIHPPPLSEPNEGEESEETRSSLSSRSSSGSSLVSRATSKLSVVRHLFVSKKTGNGKA

SEQ ID NO: 122875 - DNA, 1233 bp, Zea mays
  CDS (1)..(1233)
atgggcaactgcggcacacgggaggagaatgccgtcgtcgctgcgcacgcgcaagttcagcaactccacttgttacaacagccttccaagaacgccaatgcagataggaagcacacctgcatgtcatcagatataagtgacccttccacacctaggaaagttgaagatgccaagaacatttccatatacaacgatgtgattgccttcacattgtttgagctagagacaatcacaaagagcttccgtgttgattatgttcttggcgaaggaggatttgggaccgtttacaagggttacatagatgaaaatgtcagggttgggctgaagtcactgcctgttgcagtcaaggtgctcaacaaagatggacatcaagggcacagagaatggcttaccgaggttaactgcctggggcagttgaggcatccaaatttggtgaagttgatcggatattgctgcgaagatgaccatcggctgcttgtctacgagttcatgtttcgaggaagtctagaaaaccacttattccgaaagacagctacgccattgccctggggtactaggatgtcaatcgcgctgggagccgctaaagggctcgcttgcctccacaacgctcaaaggcccgtcatctacagagatttcaagacatcaaacattctgctggactccgattatactgccaaactgtctgactttggcctcgcaaaagatggccctgaaggtgatcagacgcatgtgtcgacacgggtgatgggaacctacggttatgctgcccctgaatatgtgatgaccggtcacttgactgctcggagtgacgtgtacagcttcggcgtggtcctgctggagctcctgacggggcgcaagtcgatcgacaagtcgcggcccagcagggagcagagcctggtggactgggcgctcccgaagctcaacgacaagaggaggctcctccagatcatcgacccgaggctggaggggcagtactcggccagagccgctcacaagtcctgcagcctcgcgttctactgcctgagccagaaccccaaggccaggccgctcatgagcgacgtcgtcgagaccctcgcgccgttgcagcagggcggcggcggcggcagcgacgcgtcctccggccttcctgactgcagaggccgccgcaggctgaccggcaacagcgtcgtccacttcagggccatccccaaccccaagtgcacgcctgttgtcccggcttgcagagtgcggtga

SEQ ID NO: 122876 - protein, 410 aa, Zea mays
MGNCGTREENAVVAAHAQVQQLHLLQQPSKNANADRKHTCMSSDISDPSTPRKVEDAKNISIYNDVIAFTLFELETITKSFRVDYVLGEGGFGTVYKGYIDENVRVGLKSLPVAVKVLNKDGHQGHREWLTEVNCLGQLRHPNLVKLIGYCCEDDHRLLVYEFMFRGSLENHLFRKTATPLPWGTRMSIALGAAKGLACLHNAQRPVIYRDFKTSNILLDSDYTAKLSDFGLAKDGPEGDQTHVSTRVMGTYGYAAPEYVMTGHLTARSDVYSFGVVLLELLTGRKSIDKSRPSREQSLVDWALPKLNDKRRLLQIIDPRLEGQYSARAAHKSCSLAFYCLSQNPKARPLMSDVVETLAPLQQGGGGGSDASSGLPDCRGRRRLTGNSVVHFRAIPNPKCTPVVPACRVR

SEQ ID NO: 122877 - DNA, 1299 bp, Glycine max
  CDS (1)..(1299)
atgggcaattgcggaagcagagaggaatctgccgtagtttccaaggctcaagttgttcagcagcttcaccatgcgacgtcgttgggcgccagtgccaggaccgacaagaagcacgctcacaggcacaatctcagcgagtgcgcttcggatctcagcgagtcctgttccacaccgcgcggtaacaatagcagcaacacgctgctctacacgcacgtcatcgctttcacgctctacgagttggagaccataaccaagagcttccgcgccgactacatcctcggcgagggaggcttcggcaccgtttacaaaggctacattgatgagaacgtcagagtcggactcaaatcgctccctgtagctgtcaaagtcttaaacaaagagggtttacaaggacatcgagagtggcttacggaggtgaattttctcgggcagctgaggcatcctaatctggtgaagttgattgggtactgttgtgaagatgatcacaggctgcctgggtatgagttcatgttccgagggagtttggaaaatcacttattccgaaaggcaactgtccctttatcatgggctacaagaatgatgattgctcttggagcagccaaaggacttgcctttctccacaatgctgaaaggcctgtaatctatcgcgacttcaaaacctctaatatattattggactccgactatacagccaaactttctgattttggactagctaaagcaggaccacaaggtgatgaaacccatgtatctacccgagtcatgggtacctatggttatgctgcccctgaatatgtaatgactggccacctgacggctaggagtgacgtctatagctttggcgttgttcttttggagcttttaacagggaggaaatctgttgacaagaccagacctggaaaggaacagagcttggtagattgggcacggccgaagctcaatgacaagagaaagctccttcaaataattgatcctagattggagaatcaatactcagtgagggcagcacaaaaagcatgtagcttggcttattactgtttgagtcaaaatcccaaagcaaggccactaatgagtgatgtagttgagacattggagcccttgcaaagttcaagtgttggtccaggtgaagtctcattatctggatcaaatagtgggagtgctgggccttttgccatgaacaaaatctctgactgccggatgcgccacaagttttcaaacaatgttggtcccggtgctacttgtcggtctccaaacccgaattgctcaccaggtggcccagctacattacgggtcagatga

SEQ ID NO: 122878 - protein, 432 aa, Glycine max
MGNCGSREESAVVSKAQVVQQLHHATSLGASARTDKKHAHRHNLSECASDLSESCSTPRGNNSSNTLLYTHVIAFTLYELETITKSFRADYILGEGGFGTVYKGYIDENVRVGLKSLPVAVKVLNKEGLQGHREWLTEVNFLGQLRHPNLVKLIGYCCEDDHRLPGYEFMFRGSLENHLFRKATVPLSWATRMMIALGAAKGLAFLHNAERPVIYRDFKTSNILLDSDYTAKLSDFGLAKAGPQGDETHVSTRVMGTYGYAAPEYVMTGHLTARSDVYSFGVVLLELLTGRKSVDKTRPGKEQSLVDWARPKLNDKRKLLQIIDPRLENQYSVRAAQKACSLAYYCLSQNPKARPLMSDVVETLEPLQSSSVGPGEVSLSGSNSGSAGPFAMNKISDCRMRHKFSNNVGPGATCRSPNPNCSPGGPATLRVR

SEQ ID NO: 122879 - DNA, 1272 bp, Glycine max
  CDS (1)..(1272)
atgagttcgggtagtagcagcagccacagcagtgagaaggagaaggagaagcagagagtgagtcgcacgtcgctgatactctggcacgcgcaccaaaacgacgccgcagctgtgcggaagctcctccaggaggatccctcgctcgtcaaggccagagactacgacaaccgcacgccgctccacgtggcgtcgctccacggctggatcgacgtcgccacctgtctcatcgagttcggcgccgacgtcaacgcgcaagatcgctggaaaaacacccctctggcggatgcggagggagctaagaagagtaatgtgatcgagcttttgcaatcgcatggtggcttgtcttttgggcaaaatggaagccatttcgagccgaagccggtggcgccgccgttgccaaacaagtgtgattgggaagtcgagccgaccgagcttgacttctccaactcggtgcgaatcgggaaggggtcttttggtgagattttaaaagcccattggcgtggaacaccagttgctgttaaacgtattcttccatctctttccgaagatagattggtgattcaggacttcaggcatgaggttaatttgttggtgaagcttcggcaccccaatattgttcagtttcttggagctgttactgacaggaaaccccttatgctaattactgagtatctaagagggggtgatcttcatcagtacctcaaagaaaaaggcgcgcttagtcctgcaactgctatcagcttttccatggatattgtcagaggaatggcctatcttcacaatgaaccaaatgttataattcatcgagacttaaagccaaggaatgttcttttagtcaattctagtgccgaccatttaaaagttggagattttggattgagtaagcttatcacggtccagagttctcatgatgtatacaagatgactggtgaaactgggagctaccgctacatggctcctgaagttttcaaacatcggagatatgataagaaggttgatgtgtactcctttgcaatgattttatatgagatgcttgaaggtgaaccaccttttgcaagtcgtgaaccttatgaaggagcaaaatacgctgcagagggacacaggcctcattttcgggcaaagggttatacccctgaattgcaagagttaacagagcagtgttgggctcatgacatgagtcagagaccatccttcatagagatccttaaacggcttgaaaagatcaaggagaatttacctacagagcatcactggcacttgtttacctcataa

SEQ ID NO: 122880 - protein, 423 aa, Glycine max
MSSGSSSSHSSEKEKEKQRVSRTSLILWHAHQNDAAAVRKLLQEDPSLVKARDYDNRTPLHVASLHGWIDVATCLIEFGADVNAQDRWKNTPLADAEGAKKSNVIELLQSHGGLSFGQNGSHFEPKPVAPPLPNKCDWEVEPTELDFSNSVRIGKGSFGEILKAHWRGTPVAVKRILPSLSEDRLVIQDFRHEVNLLVKLRHPNIVQFLGAVTDRKPLMLITEYLRGGDLHQYLKEKGALSPATAISFSMDIVRGMAYLHNEPNVIIHRDLKPRNVLLVNSSADHLKVGDFGLSKLITVQSSHDVYKMTGETGSYRYMAPEVFKHRRYDKKVDVYSFAMILYEMLEGEPPFASREPYEGAKYAAEGHRPHFRAKGYTPELQELTEQCWAHDMSQRPSFIEILKRLEKIKENLPTEHHWHLFTS

SEQ ID NO: 122881 - DNA, 1323 bp, Glycine max
  CDS (1)..(1323)
atgcccacagcaatgacagagtcagggccaagtgtgagtttgaagcttcttgctttagtagctattctagtcgtcttctcgctggtgattctgcttctgatcttcttcctctgcttccgaggtagccgtagctgcaagaagcggaacctggccaccaagcacagctcaggtagcatccctctggtttcgaaggagatcaccatggtcagggcctcggatctcacccctgccaccacggccattgccgttgacgtggacggtgatgatccgaagaagaaggagtcggagatcaaggttgaaattggtggtgggggccaccagcgcagcaaccaagtgtcggtggaggatcctgatatagggtggggccgctggtacagtattagggaagtggagctcgccacgcgcgggttctcggaagggaatgttattggggaaggaggctatggcgttgtctacagaggtgttctgcacgatgcttccgtcgtggctgtcaagaatcttctcaacaacaagggtcaagctgagaaggagtttaagggggaagttgaagctattggaaaagtaaggcataagaatttggttcgtttggtaggatattgtgcagaaggtgctcgaaggatgcttgtttatgagtatgttgacaacggaaacttggaacaatggctgcatggtgatgtaggaccagttagccccttgacatgggatattcgaatgagaattgctattgggactgcaaaagggctagcctatctgcatgaaggtttagaacccaaagttgtgcaccgggatataaaatccagtaacattcttttggataaaaactggaatgccaaagtatcagattttggactagccaagctcttaggatctgagaaaacacacgtgactacgcgtgtaatgggaacatttggatacgttgcacctgagtatgcaagctcgggtatgcttaatgagcgcagtgatgtatatagctttggagttcttctcatggagataatcacaggaagaagccccattgattattcaagaccacctggagagatgaatttggtagattggtttaaggcaatggtagcaagtcgtcgcagtgaggagctagttgatcctttaattgagattcctccccctccaagatctttgaagagagttttattgatttgtctgcgctgtatagacatggatgtcgtaaagcgaccaaagatgggtcaaattattcatatgcttgagacagatgatttcccctttcgttctgtaagtactacacttcatccactccttctcagtttctcacaaaataccatttcatcttccttaaatgactga

SEQ ID NO: 122882 - protein, 440 aa, Glycine max
MPTAMTESGPSVSLKLLALVAILVVFSLVILLLIFFLCFRGSRSCKKRNLATKHSSGSIPLVSKEITMVRASDLTPATTAIAVDVDGDDPKKKESEIKVEIGGGGHQRSNQVSVEDPDIGWGRWYSIREVELATRGFSEGNVIGEGGYGVVYRGVLHDASVVAVKNLLNNKGQAEKEFKGEVEAIGKVRHKNLVRLVGYCAEGARRMLVYEYVDNGNLEQWLHGDVGPVSPLTWDIRMRIAIGTAKGLAYLHEGLEPKVVHRDIKSSNILLDKNWNAKVSDFGLAKLLGSEKTHVTTRVMGTFGYVAPEYASSGMLNERSDVYSFGVLLMEIITGRSPIDYSRPPGEMNLVDWFKAMVASRRSEELVDPLIEIPPPPRSLKRVLLICLRCIDMDVVKRPKMGQIIHMLETDDFPFRSVSTTLHPLLLSFSQNTISSSLND

SEQ ID NO: 122883 - DNA, 1080 bp, Glycine max; identical to SEQ ID NO: 14287
  CDS (1)..(1080)

SEQ ID NO: 122884 - protein, 359 aa, Glycine max; identical to SEQ ID NO: 14288

SEQ ID NO: 122885 - DNA, 1464 bp, Glycine max
  CDS (1)..(1464)
atggggtttgggagtaatgcagttcaagcagggagtttggatgtggacaagtcaaatgaaaggaagaagaaggtagaaggtgctggaaaggagagaaaatgggggtttagatttagcttctttgggagctgcataccctcaggatcaaaagttgatagcaccataagtggcactaaggcccataatggtgaaaatgtcaaatcagtggcagttggatcagaggaaaacaaatctgcatctgataaaatcacaaaggaaactgttgctactgaagagtcctctacaacagctagcgatgcggaaagtaacccttccacaccaaaattcagtgaggagttgaagtttgcttcttgtatgagaaaattcacattcaatggacttaaggtggcaactaggaatttcagaccagagagtcttcttggtgagggagggtttggttgtgtcttcaagggttggatcgaggaaaatggaactgcacctgtgaaaccaggtactggactcacggttgcggtcaagactcttaaccacaatggacatcagggtcacaaagagtggcttgctgaattaaattatcttggtgatcttgtccatcctaatcttgttaagttgattggtttctgtattgaagatgaccaaagattactggtttatgagtttatgccccgaggcagtttggagaaccacctctttagaaggcccctgcctcttccttggtctatcagaatgaaaattgcacttggtgcagccaaaggtcttgcttttctccatgaagaggctcagaggcccataatatatcgtgatttcaaaacatctaatatactattagatgcggaatacaatgccaagctttctgattttggacttgccaaagatggtcctgagggggagaagacacatgtatctacaagagttatgggaacatatggttatgctgctcctgagtatgtgatgactggacatttgacatcaaaaagtgatgtatacagctttggagtagtgctacttgaaatgctcacaggccggcgatccattgataagaaaagaccaaatggggaacacaatctggtagagtgggctagacctgtactgggagaccggaggatgttctaccggataatcgatccccgccttgaaggccacttctcggtcaaaggggcgcagaaagctgccctgctggctgctcaatgccttagccgtgatccaaaatctagacccttgatgagtgaagttgttcgagctttaaagcctctgccaagcctcaaggacatggcaatctcatcttatcacttccagattgcgcgcgtagatcgaaccatgtccatgccgaatcataaaaacggtattagaacacagttagtatctgtgccaaggaagggtcaacctgtaaggacattgtctagtccaaatgttccacatggttctccataccttcatcataccaagtctccaaaacctattgggtaa

SEQ ID NO: 122886 - protein, 487 aa, Glycine max
MGFGSNAVQAGSLDVDKSNERKKKVEGAGKERKWGFRFSFFGSCIPSGSKVDSTISGTKAHNGENVKSVAVGSEENKSASDKITKETVATEESSTTASDAESNPSTPKFSEELKFASCMRKFTFNGLKVATRNFRPESLLGEGGFGCVFKGWIEENGTAPVKPGTGLTVAVKTLNHNGHQGHKEWLAELNYLGDLVHPNLVKLIGFCIEDDQRLLVYEFMPRGSLENHLFRRPLPLPWSIRMKIALGAAKGLAFLHEEAQRPIIYRDFKTSNILLDAEYNAKLSDFGLAKDGPEGEKTHVSTRVMGTYGYAAPEYVMTGHLTSKSDVYSFGVVLLEMLTGRRSIDKKRPNGEHNLVEWARPVLGDRRMFYRIIDPRLEGHFSVKGAQKAALLAAQCLSRDPKSRPLMSEVVRALKPLPSLKDMAISSYHFQIARVDRTMSMPNHKNGIRTQLVSVPRKGQPVRTLSSPNVPHGSPYLHHTKSPKPIG

SEQ ID NO: 122887 - DNA, 1299 bp, Glycine max
  CDS (1)..(1299)
atgggcaattgcggaagcagagaggaatctgccgtagtttccaaggctcaagttgttcagcagcttcaccatgcgacgtcgttgggcgccagtgccaggaccgacaagaagcacgctcacaggcacaatctcagcgagtgcgcttcggatctcagcgagtcctgttccacaccgcgcggtaacaatagcagcaacacgctgctctacacgcacgtcatcgctttcacgctctacgagttggagaccataaccaagagcttccgcgccgactacatcctcggcgagggaggcttcggcaccgtttacaaaggctacattgatgagaacgtcagagtcggactcaaatcgctccctgtagctgtcaaagtcttaaacaaagagggtttacaaggacatcgagagtggcttacggaggtgaattttctcgggcagctgaggcatcctaatctggtgaagttgattgggtactgttgtgaagatgatcacaggctgcttgtgtatgagttcatgttccgagggagtttggaaaatcacttattccgaaaggcaactgtccctttatcatgggctacaagaatgatgattgctcttggagcagccaaaggacttgcctttctccacaatgctgaaaggcctgtaatctatcgcgacttcaaaacctctaatatattattggactccgactatacagccaaactttctgattttggactagctaaagcaggaccacaaggtgatgaaacccatgtatctacccgagtcatgggtacctatggttatgctgcccctgaatatgtaatgactggccacctgacggctaggagtgacgtctatagctttggcgttgttcttttggagcttttaacagggaggaaatctgttgacaagaccagacctggaaaggaacagagcttggtagattgggcacggccgaagctcaatgacaagagaaagctccttcaaataattgatcctagattggagaatcaatactcagtgagggcagcacaaaaagcatgtagcttggcttattactgtttgagtcaaaatcccaaagcaaggccactaatgagtgatgtagttgagacattggagcccttgcaaagttcaagtgttggtccaggtgaagtctcattatctggatcaaatagtgggagtgctgggccttttgccatgaacaaaatctctgactgccggatgcgccacaagttttcaaacaatgttggtcccggtgctacttgtcggtctccaaacccgaattgctcaccaggtggcccagctacattacgggtcagatga

SEQ ID NO: 122888 - protein, 432 aa, Glycine max
MGNCGSREESAVVSKAQVVQQLHHATSLGASARTDKKHAHRHNLSECASDLSESCSTPRGNNSSNTLLYTHVIAFTLYELETITKSFRADYILGEGGFGTVYKGYIDENVRVGLKSLPVAVKVLNKEGLQGHREWLTEVNFLGQLRHPNLVKLIGYCCEDDHRLLVYEFMFRGSLENHLFRKATVPLSWATRMMIALGAAKGLAFLHNAERPVIYRDFKTSNILLDSDYTAKLSDFGLAKAGPQGDETHVSTRVMGTYGYAAPEYVMTGHLTARSDVYSFGVVLLELLTGRKSVDKTRPGKEQSLVDWARPKLNDKRKLLQIIDPRLENQYSVRAAQKACSLAYYCLSQNPKARPLMSDVVETLEPLQSSSVGPGEVSLSGSNSGSAGPFAMNKISDCRMRHKFSNNVGPGATCRSPNPNCSPGGPATLRVR

SEQ ID NO: 122889 - DNA, 1431 bp, Glycine max
  CDS (1)..(1431)
atgggttgctttcgttgcaccggcaaatcaagcaaaaaaaccaacaacattaatcacgccgagaagcacactcctgctgataaggtcaaagttaattcgaatttgaatggtaaaaaagaagataataatcctaagcctgatcagctatctctggacgtgaagtatttgaatttaaaagaggtttccaatgaaggaaaagttaatggttaccgggcacagacatttacttttgctgagcttgcagctgcaacagggaatttcaggttagattgctttctgggtgaaggagggtttggcaaggtttataaggggcgcatagacaaaataaaccaggttgtagcaataaagcaactagaccctcatgggcttcaaggaattagagaatttgttgttgaagtgttgacattgagtttggcagaccaccctaatttggtcaagttaattggtttttgtgctgagggagagcagaagctattggtttacgaatacatgccattgggatctttggagaatcatttgcacgatcttccgcgtggtagaaaaccgattgactggaatacaagaatgaaaatagcagctggtgcagctagaggcttagagtatttgcataataaaatgaaacctcctgtcatatatcgggacctgaaatgctccaatatcctgttaggcgaaggatatcattccaagttatctgattttggcttggcgaaagtaggaccaagtggtgataaaacccatgtttcaaccagagttatgggaacatatggatattgtgccccagattatgcaatgacgggtcaattgacgttcaagtctgatatttatagctttggagttgttcttttggagatcatcacaggcaggaaggcgatcgacaatacaaaacctgctaaagaacaaaatctagttgcatgggcaaagcctttattcaaaaaccgtaaaagattctgtgagatggttgatccattgcttgaaggtcagtatccaataagaggtttgtaccaagctcttgctattgctgccatgtgtgttcaagaacagcctaatatgcggcccgaaacaactgatgtggttacagctctaaattaccttgcatcccagaaatacgatccccaagttcattcaatacaaagctgtagaaaaggtttatcttctccaagagaaagaagcaatggtcatagacgcactgtcagtaacgattctgatccaagagcaagaagccatgatcatagacgaattgtttgtaatggttctgagacaagagcaagaagcgaaggtcgtcatagacgaactgttagtattggtaatggtcatagtagtggttctgagacagaaagctctcgaaaaggtgtagcttctccaagggtgagaagtgatggtcatagacattttgttagtaatggttctgagacagacagttctggagattag

SEQ ID NO: 122890 - protein, 476 aa, Glycine max
MGCFRCTGKSSKKTNNINHAEKHTPADKVKVNSNLNGKKEDNNPKPDQLSLDVKYLNLKEVSNEGKVNGYRAQTFTFAELAAATGNFRLDCFLGEGGFGKVYKGRIDKINQVVAIKQLDPHGLQGIREFVVEVLTLSLADHPNLVKLIGFCAEGEQKLLVYEYMPLGSLENHLHDLPRGRKPIDWNTRMKIAAGAARGLEYLHNKMKPPVIYRDLKCSNILLGEGYHSKLSDFGLAKVGPSGDKTHVSTRVMGTYGYCAPDYAMTGQLTFKSDIYSFGVVLLEIITGRKAIDNTKPAKEQNLVAWAKPLFKNRKRFCEMVDPLLEGQYPIRGLYQALAIAAMCVQEQPNMRPETTDVVTALNYLASQKYDPQVHSIQSCRKGLSSPRERSNGHRRTVSNDSDPRARSHDHRRIVCNGSETRARSEGRHRRTVSIGNGHSSGSETESSRKGVASPRVRSDGHRHFVSNGSETDSSGD

SEQ ID NO: 122891 - DNA, 1425 bp, Glycine max
  CDS (1)..(1425)
atggggtttaggaataatgcaattcaggctgggagtttggatgtgggaaagtcaaagggaaggatgcaaaaggatggtgctgagaaggaaattgggtgctgtgttaaattctgtttcattggaggctgtataccttcaagatcaaaggtggataactccataagtggcactagtgctaacagtgtggaaaaaacatctgcatctgagaaaagcaagaaggaaacaaatgctcctccagggtcctctacaacaaccagtaatgcagaaagtgtcccttcgactccaaaattcagtgaggagttgaaggtttcttctcgtttgagaaaatttacattcaatgagcttaagttggccactaggaatttcagaccggagagtcttcttggcgagggagggtttggttgtgtgttcaagggttggattgaggaaaatggaactgcacctgtgaaacctggcactgggcttactgttgcagtcaagacccttaaccatgatggactgcagggtcacaaagagtggcttgcagagttagacattctcggtgaccttgtccatccaaatctggtcaaattggttggtttctgtattgaagatgaccaaagattattggtttatgaatgtatgccccgtggaagtttggagaaccacctcttcagaaaagggtcgttgcctcttccttggtctatcagaatgaaaattgcacttggtgctgcaaaaggtcttgcttttctccatgaagaagctcaaagacctgtaatctatcgtgattttaagacgtctaatattctattagatgcggaatacaatgccaagctctctgattttggactcgccaaagatggtcctgaaggggaaaagacacacatatctaccagagtcatgggaacatatggttatgctgctcctgagtatgtcatgactggacatttgacatcaaaaagtgatgtctatagttttggagtagtgctacttgaaatgctcactggccggcgatctatcgataagaatagaccaaacggggaacacaatcttgtggagtgggcaaggcctgtacttggggaccggaggatgttattacggataattgatcctcgccttgaaggtcacttctctgttaaagggtcacagaaggctgcgcagcttgctgctcaatgccttaaccgtgatccaaaatccagacctatgatgagtgaagttgttcaagctctgaagcctttgcaaaaccttaaagatatggctatctcatcttaccacttccaggttgcgcgagtagatcgtactatgtccatgcctaaaaatggtatgcaagcacagttagcatctttatcaaggaagggtcaaccagtgaggatcttgtcaagtccaaaaggtcctcatggttctccatatcatcactatatcaagtcaccgaaacctaatggataa

SEQ ID NO: 122892 - protein, 474 aa, Glycine max
MGFRNNAIQAGSLDVGKSKGRMQKDGAEKEIGCCVKFCFIGGCIPSRSKVDNSISGTSANSVEKTSASEKSKKETNAPPGSSTTTSNAESVPSTPKFSEELKVSSRLRKFTFNELKLATRNFRPESLLGEGGFGCVFKGWIEENGTAPVKPGTGLTVAVKTLNHDGLQGHKEWLAELDILGDLVHPNLVKLVGFCIEDDQRLLVYECMPRGSLENHLFRKGSLPLPWSIRMKIALGAAKGLAFLHEEAQRPVIYRDFKTSNILLDAEYNAKLSDFGLAKDGPEGEKTHISTRVMGTYGYAAPEYVMTGHLTSKSDVYSFGVVLLEMLTGRRSIDKNRPNGEHNLVEWARPVLGDRRMLLRIIDPRLEGHFSVKGSQKAAQLAAQCLNRDPKSRPMMSEVVQALKPLQNLKDMAISSYHFQVARVDRTMSMPKNGMQAQLASLSRKGQPVRILSSPKGPHGSPYHHYIKSPKPNG

SEQ ID NO: 122893 - DNA, 1431 bp, Glycine max
  CDS (1)..(1431)
atgggttgctttcgttgcaccggcaaatcaagcaaaaaaaccaacaacattaatcacgccgagaagcacactcctgctgataaggtcaaagttaattcgaatttgaatggtaaaaaagaagataataatcctaagcctgatcagctatctctggacgtgaagtatttgaatttaaaagaggtttccaatgaaggaaaagttaatggttaccgggcacagacatttacttttgctgagcttgcagctgcaacagggaatttcaggttagattgctttctgggtgaaggagggtttggcaaggtttataaggggcgcatagacaaaataaaccaggttgtagcaataaagcaactagatcctcatgggcttcaaggaattagggaatttgttgttgaagtgttgacattgagtttggcagaccaccctaatttggtcaagttaattggtttttgtgctgagggagagcagaggctattggtttacgaatatatgccattgggatctttggagaatcatttgcacgatcttccgcgtggtagaaaaccgattgactggaatacaagaatgaaaatagcagctggtgcagctagaggcttagagtatttgcataataaaatgaaacctcctgtcatatatcgggacctgaaatgctccaatatcctgttaggcgaaggatatcattccaagttatctgattttggcttggcgaaagtaggaccaagtggtgataaaacccatgtttcaaccagagttatgggaacatatggatattgtgccccagattatgcaatgacgggtcaattgacgttcaagtctgatatttatagctttggagttgttcttttggagatcatcacaggcaggaaggcgatcgacaatacaaaacctgctaaagaacaaaatctagttgcatgggcaaagcctttattcaaaaaccgtaaaagattctgtgagatggttgatccattgcttgaaggtcagtatccaataagaggtttgtaccaagctcttgctattgctgccatgtgtgttcaagaacagcctaatatgcggcccgaaacaactgatgtggttacagctctaaattaccttgcatcccagaaatacgatccccaagttcattcaatacaaagctgtagaaaaggtttatcttctccaagagaaagaagcaatggtcatagacgcactgtcagtaacgattctgatccaagagcaagaagccatgatcatagacgaattgtttgtaatggttctgagacaagagcaagaagcgaaggtcgtcatagacgaactgttagtattggtaatggtcatagtagtggttctgagacagaaagctctcgaaaaggtgtagcttctccaagggtgagaagtgatggtcatagacattttgttagtaatggttctgagacagacagttctggagattag

SEQ ID NO: 122894 - protein, 476 aa, Glycine max
MGCFRCTGKSSKKTNNINHAEKHTPADKVKVNSNLNGKKEDNNPKPDQLSLDVKYLNLKEVSNEGKVNGYRAQTFTFAELAAATGNFRLDCFLGEGGFGKVYKGRIDKINQVVAIKQLDPHGLQGIREFVVEVLTLSLADHPNLVKLIGFCAEGEQRLLVYEYMPLGSLENHLHDLPRGRKPIDWNTRMKIAAGAARGLEYLHNKMKPPVIYRDLKCSNILLGEGYHSKLSDFGLAKVGPSGDKTHVSTRVMGTYGYCAPDYAMTGQLTFKSDIYSFGVVLLEIITGRKAIDNTKPAKEQNLVAWAKPLFKNRKRFCEMVDPLLEGQYPIRGLYQALAIAAMCVQEQPNMRPETTDVVTALNYLASQKYDPQVHSIQSCRKGLSSPRERSNGHRRTVSNDSDPRARSHDHRRIVCNGSETRARSEGRHRRTVSIGNGHSSGSETESSRKGVASPRVRSDGHRHFVSNGSETDSSGD

SEQ ID NO: 122895 - DNA, 1104 bp, Glycine max
  CDS (1)..(1104)
atgaagaagagtgagagtggggggtatgtgagagcggatcagatagatctgaaaagcttggatgagcagcttcagaggcatctgagtagagcatggactatggtgaagaacaaggagaaggaggaagaagaagaggttgaaggaaggtccacaagaagcagacaagaatgggagattgacccctctaagcttgtcatcaagactgtcattgctcgtggcacttttggcactgtccgtcgtgggatttatgatggccaagatgttgcagttaagctccttgactggggggaagaaggccatcggtcagatgctgaaatagcttctttgagagcggcttttacacaagaagttgctgtttggcacaagcttgaacatcctaatgtaaccaagtttattggggcaacaatgggaacatcagagctacagatacaaacagaaaatggtcatataggcatgcccagtaacgtttgttgtgttgttgttgaatattgtcctgggggtgcactgaagtcttatctcattaaaaaccgaagaaggaagctggcttttaaagtggttgttcaactggctcttgaccttgcaagagggttgagctatctccacacaaagaagattgtccacagagatgttaaaacagaaaatatgcttctggacaagacacgaaccttgaaaatagctgattttggagtagctcgtattgaggcctccaatcctcatgacatgacaggtgaaactggaacccttggttacatggctcctgaggttctaaatggtaatccatacaatagaaagtgtgatgtgtacagttttggcatatgcttatgggagatatactgctgtgacatgccatatcctgaccttagtttctcagaagtgacatcagctgttgtacgacagaatttgaggccagagattccgcgatgttgtcctagcgctctggcaaatgtgatgaaaagatgctgggatgcgaatcctgacaagaggccggagatggatgaagtggtgaccatgttggaagctattgatacttcaaagggtggaggtatgatccctcatgatcagcctcagggttgtttatgttttcgcagttatcgaggaccttga

SEQ ID NO: 122896 - protein, 367 aa, Glycine max
MKKSESGGYVRADQIDLKSLDEQLQRHLSRAWTMVKNKEKEEEEEVEGRSTRSRQEWEIDPSKLVIKTVIARGTFGTVRRGIYDGQDVAVKLLDWGEEGHRSDAEIASLRAAFTQEVAVWHKLEHPNVTKFIGATMGTSELQIQTENGHIGMPSNVCCVVVEYCPGGALKSYLIKNRRRKLAFKVVVQLALDLARGLSYLHTKKIVHRDVKTENMLLDKTRTLKIADFGVARIEASNPHDMTGETGTLGYMAPEVLNGNPYNRKCDVYSFGICLWEIYCCDMPYPDLSFSEVTSAVVRQNLRPEIPRCCPSALANVMKRCWDANPDKRPEMDEVVTMLEAIDTSKGGGMIPHDQPQGCLCFRSYRGP

SEQ ID NO: 122897 - DNA, 1101 bp, Glycine max
  CDS (1)..(1101)
atgaagaagagtgagagtggggggtatgtgagagcggatcagatagatctgaagagcttggatgagcagcttcagaggcatctgaatagagcatggactatggagaagaacaaggagaaggaggaagaagaggttgaaggaaggtccacaagaagcagacaagaatgggagattgacccctccaagcttgtcatcaagactgtcattgctcgtggcacttttggcactgtccatcgtgggatttatgatggccaagatgttgcagttaagctccttgactggggggaagaaggccatcggtcagatgctgaaatagcttctttgagagcggcttttacacaggaagttgctgtttggcacaagcttgaacatcctaatgtaaccaagtttattggggcaacaatgggaacatcagagctacagatacaaacagaaaatggtcatataggcatgcccagtaacgtttgttgtgttgttgttgaatattgtcctgggggtgcactgaagtcttatctcattaaaaaccgaagaaggaagctggcttttaaagtggttgttcaactggctcttgaccttgcaagagggttgagctatcttcacacaaagaagattgtccacagagatgttaaaacagaaaatatgcttctggacaagacacgaaccttgaaaatagctgattttggagtagctcgtattgaggcctccaatcctcatgacatgacaggtgaaactggaacccttggttacatggctcctgaggttctaaatggcaatccatacaatagaaagtgtgatgtgtacagtttcggaatatgcttatgggagatatactgctgtgacatgccatatcctgaccttagcttctcagaagtgacatcagctgtcgtacgacagaatttgaggccagagattccgcgatgttgtcctagcgctctggccaatgtgatgaaaagatgctgggatgcgaatcctgacaagaggccagagatggatgaagtggtgaccatgttggaagctattgacacttcaaagggtggaggtatgatccctcatgatcagcctcagggttgtttatgttttcgcagttatcgaggaccttga

SEQ ID NO: 122898 - protein, 366 aa, Glycine max
MKKSESGGYVRADQIDLKSLDEQLQRHLNRAWTMEKNKEKEEEEVEGRSTRSRQEWEIDPSKLVIKTVIARGTFGTVHRGIYDGQDVAVKLLDWGEEGHRSDAEIASLRAAFTQEVAVWHKLEHPNVTKFIGATMGTSELQIQTENGHIGMPSNVCCVVVEYCPGGALKSYLIKNRRRKLAFKVVVQLALDLARGLSYLHTKKIVHRDVKTENMLLDKTRTLKIADFGVARIEASNPHDMTGETGTLGYMAPEVLNGNPYNRKCDVYSFGICLWEIYCCDMPYPDLSFSEVTSAVVRQNLRPEIPRCCPSALANVMKRCWDANPDKRPEMDEVVTMLEAIDTSKGGGMIPHDQPQGCLCFRSYRGP

SEQ ID NO: 122899 - DNA, 1104 bp, Glycine max
  CDS (1)..(1104)
atgaagaagagtgagagtggggggtatgtgagagcggatcagatagatctgaaaagcttggatgagcagcttcagaggcatctgagtagagcatggactatggagaagaacaaggagaaggaggaagaagaagaggttgaaggaaggtccacaagaagcagacaagaatgggagattgacccctctaagcttgtcatcaagactgtcattgctcgtggcacttttggcactgtccatcgtgggatttatgatggccaagatgttgcagttaagctccttgactggggggaagaaggccatcggtcagatgctgaaatagcttctttgcgagcggcttttacacaagaagttgctgtttggcacaagcttgaacatcctaatgtaaccaagtttattggggcaacaatgggaacatcagagctacagatacaaacagaaaatggtcatataggcatgccgagtaatgtttgttgtgttgttgttgaatattgtcctgggggtgcactgaagtcttatctcattaaaaaccgaagaaggaagctggcttttaaagtggttgttcaactggctcttgaccttgcaagagggttgagctatctccacacaaagaagattgtccacagagatgttaaaacagaaaatatgcttctggacaagacacgaaccttgaaaatagctgattttggagtagctcgtattgaggcctccaatcctcatgacatgacaggtgaaactggaacccttggttacatggctcctgaggttctaaatggtaatccatacaatagaaagtgtgatgtgtacagttttggcatatgcttatgggagatatactgctgtgacatgccatatcctgaccttagtttctcagaagtgacatcagctgttgtacgacagaatttgaggccagagattccgcgatgttgtcctagcgctctggcaaatgtgatgaaaagatgctgggatgcgaatcctgacaagaggccggagatggatgaagtggtgaccatgttggaagctattgatacttcaaagggtggaggtatgatccctcatgatcagcctcagggttgtttatgttttcgcagttatcgaggaccttga

SEQ ID NO: 122900 - protein, 367 aa, Glycine max
MKKSESGGYVRADQIDLKSLDEQLQRHLSRAWTMEKNKEKEEEEEVEGRSTRSRQEWEIDPSKLVIKTVIARGTFGTVHRGIYDGQDVAVKLLDWGEEGHRSDAEIASLRAAFTQEVAVWHKLEHPNVTKFIGATMGTSELQIQTENGHIGMPSNVCCVVVEYCPGGALKSYLIKNRRRKLAFKVVVQLALDLARGLSYLHTKKIVHRDVKTENMLLDKTRTLKIADFGVARIEASNPHDMTGETGTLGYMAPEVLNGNPYNRKCDVYSFGICLWEIYCCDMPYPDLSFSEVTSAVVRQNLRPEIPRCCPSALANVMKRCWDANPDKRPEMDEVVTMLEAIDTSKGGGMIPHDQPQGCLCFRSYRGP

SEQ ID NO: 122901 - DNA, 1311 bp, Hordeum vulgare
  CDS (1)..(1311)
atggggaacatctgcggcggcgcggggaaggccgacgtggcggcggactaccggccgtccagcccaggaacgtccaactacaagacgagcggcagcgtcaccaccagcaacagcaccacggggaagctctcctcggggggcagcagcaccttcatggcctccgcgggcagcggcggcaccagcggtggcttcgacgaggccgcggcggggtttctcgagggccagatactggaggcgcccaacctccgcaccttcaccttcctcgagctcaagacggccaccaagaacttcaggcccgacagcgtgttaggggagggagggtttgggagggtgtacaaggggtgggtggacgagaagacgatgaaccccaccaagagcggcaccggcatggtcgtcgcggtcaagaagctcaactcggagagcatgcaggggtacgaggaatggcagtcagagataaactttttgggaaggctctcgcacccgaacctcgtcaagctgttgggctactgctgggaggacaaggaactgttgctcgtctacgagttcatggccaaggggagcttggaaaaccatcttttcagaaaaggatgtgctccactgtcctgggagctgaggctgaagatagccattggcgcagctcggggacttgcattcttgcatgcatcagagaagcaagttatctacagggacttcaaggcttccaatattcttctggatgcaagttataatgcgaagctctctgactttgggcttgctaagcttggaccaacgggtagcaactctcatatcacgaccagggtgatgggcacctacggatatgcggccccggaatacgtggccaccggccatttgtatgtcaagagcgacgtttacggtttcggagttgtgatgctggagatgctgtccggcaagcgagcgctggaccccaaccgtcccaacggacaacagagcctcgctgactgggcgaagccctacttggctgaccggagaaagctcgcccgccttatggatcctcagttcgagggccagtacaactctaaacaatcctaccaggcggcccagctgacgctgaactgccttgccggtgagcccaggagcaggccctcgatgaaggaggtcctcgagacgctcgagcagatcgaggcactgaagagccggacaagggaggcgagaggaggaagcgggacgtcgtcgagggaccgagctcatggtcgctctgctgcagtgcaccagcggtcgtcgccacgtggaggcagcgatgggcgccgtggttcgaggcccaccaacggccacgcaacgaaggcacggtga

SEQ ID NO: 122902 - protein, 436 aa, Hordeum vulgare
MGNICGGAGKADVAADYRPSSPGTSNYKTSGSVTTSNSTTGKLSSGGSSTFMASAGSGGTSGGFDEAAAGFLEGQILEAPNLRTFTFLELKTATKNFRPDSVLGEGGFGRVYKGWVDEKTMNPTKSGTGMVVAVKKLNSESMQGYEEWQSEINFLGRLSHPNLVKLLGYCWEDKELLLVYEFMAKGSLENHLFRKGCAPLSWELRLKIAIGAARGLAFLHASEKQVIYRDFKASNILLDASYNAKLSDFGLAKLGPTGSNSHITTRVMGTYGYAAPEYVATGHLYVKSDVYGFGVVMLEMLSGKRALDPNRPNGQQSLADWAKPYLADRRKLARLMDPQFEGQYNSKQSYQAAQLTLNCLAGEPRSRPSMKEVLETLEQIEALKSRTREARGGSGTSSRDRAHGRSAAVHQRSSPRGGSDGRRGSRPTNGHATKAR

SEQ ID NO: 122903 - DNA, 1230 bp, Brassica napus
  CDS (1)..(1230)
atgcttgagggacctaagttcgatatgctcgctcctggcaatcaccacaattacgatgcctttacgcaagacttttaccaaaagctcggcgaagaaggtactaacatgtccaccgacagtatgcagacaagtaacgccggaggctctgtgtctatgtctgtggataacagtagcgttggctctagcgatgctcttattggccatcccggtttgaagcctatgcgtcatccttactctctctccgttggacaaagcgtgtttcgccctgggagagtcacacatgcacttaacggtgatgccttggcacaagcgttgatggatagtaaccatccaactcagggactggctaactatgaagagtggactatagatttgaggaaactccacatgggtcctgcttttgctcagggagcatttggtaagttatacagagggacttacaaaggagaggatgtagcgattaagctactcgagaggccagagaacagccctgagaaggcgcaagccctggagcagcagtttcagcaggaggtttctatgcttgcgtttttgaagcaccccaacatcgttaggtttatcggcgcatgcgttaaaccgatggtgtggtgcatcgtgactgaatatgcgaaaggaggctctgtcagacagtttttgacgaagagacagaaccgagctgtgcctttgaagctggctgttaagcaggcgttggatgtcgctagaggtatggcttacgtccacgagcgcaactttatacacagggatctgaagtcggataacctcctcatatcagctgatcggtccatcaagattgctgactttggcgttgcaagaatcgaagttcaaactgaagggatgacacctgagaccgggacttacagatggatggctccagagatgatccagcatagaccctacactcaaaaagtggacgtctatagttttggaatcgtgctatgggagttgataacgggtctgttaccgttccagaacatgactgcggttcaagctgcatttgcggtggtgaacagaggagtgcgtccaacggtcccagcggattgtctccctgtgcttggggagatcatgacacgttgctgggatgcgaaccctgaagtccgtccttgttttgcagagattgtcaatcttcttgagggagctgaaaccgaggtaatgacgactgtgagaaaagcccgtttcagatgttgcatgacgcaaccaatgacaatcgactaa

SEQ ID NO: 122904 - protein, 409 aa, Brassica napus
MLEGPKFDMLAPGNHHNYDAFTQDFYQKLGEEGTNMSTDSMQTSNAGGSVSMSVDNSSVGSSDALIGHPGLKPMRHPYSLSVGQSVFRPGRVTHALNGDALAQALMDSNHPTQGLANYEEWTIDLRKLHMGPAFAQGAFGKLYRGTYKGEDVAIKLLERPENSPEKAQALEQQFQQEVSMLAFLKHPNIVRFIGACVKPMVWCIVTEYAKGGSVRQFLTKRQNRAVPLKLAVKQALDVARGMAYVHERNFIHRDLKSDNLLISADRSIKIADFGVARIEVQTEGMTPETGTYRWMAPEMIQHRPYTQKVDVYSFGIVLWELITGLLPFQNMTAVQAAFAVVNRGVRPTVPADCLPVLGEIMTRCWDANPEVRPCFAEIVNLLEGAETEVMTTVRKARFRCCMTQPMTID

SEQ ID NO: 122905 - DNA, 1062 bp, Zea mays
  CDS (1)..(1062)
atggaatctgggagcacgttctatggaggggaaggtctctccatcgaccccaagtggtttatcgacccgaagcttctctttgttgggccacgcatcggcgagggcgctcatgcaaaggtctatgaggggaagtataagaaccaaaatgttgctatcaagattgtgcacaaaggggacacccctgaggagatgaccaagagggaggggagattcttgagagaggtgaccatgctgtcaagggtgcagcacaagaacctcgtcaagtttattggggcctgcctagaacctgtcatggtggtcgtgacagagctactagtggggggttcgttgcgcaagtatttggtcagtctccgacctaggagccttgagcctcgtgtagcagtggggtttgcattggacattgcccgagctatggaatgcttacatgcacatgggatcattcatcgtgatcttaagcctgagaatctgttgctgactgcagaccagagaacagtaaaacttgttgatcttggtttggctagggaagagacactaacggagatgatgactgctgagacaggaacataccgttggatggctccagagttgtacggcacagtaacactgaggcatggagaaaagaagcattacaaccacaaagtagatgtctacagctttgcaattgtgttgtgggaactcctccacaataaactgcccttcgagggaatgtctaaccttcaagctgcctacgctgccgctttcaagaatatcagaccaagtgccgataacttgcccgaggagctgtcagaaatcctaacatcctgctggaaggaagacccaaacgacagaccaaacttcacacagataatacagatgctcctacactacctatccaccctttcgccacaagagaccttggcgggcccccgccgcacgttcagttcggagaacacaatcctgcccccagagtctcccgggacaagctcgctgatggcttcgcggggcgacctcggcgacacgcccaagggcaagaaggaagacaagccgaggggcttcttcttctgtttcagcgagtgctattag

SEQ ID NO: 122906 - protein, 353 aa, Zea mays
MESGSTFYGGEGLSIDPKWFIDPKLLFVGPRIGEGAHAKVYEGKYKNQNVAIKIVHKGDTPEEMTKREGRFLREVTMLSRVQHKNLVKFIGACLEPVMVVVTELLVGGSLRKYLVSLRPRSLEPRVAVGFALDIARAMECLHAHGIIHRDLKPENLLLTADQRTVKLVDLGLAREETLTEMMTAETGTYRWMAPELYGTVTLRHGEKKHYNHKVDVYSFAIVLWELLHNKLPFEGMSNLQAAYAAAFKNIRPSADNLPEELSEILTSCWKEDPNDRPNFTQIIQMLLHYLSTLSPQETLAGPRRTFSSENTILPPESPGTSSLMASRGDLGDTPKGKKEDKPRGFFFCFSECY

SEQ ID NO: 122907 - DNA, 1776 bp, Triticum aestivum
  CDS (1)..(1776)
atgggccggccgtcccatgacaccgcgacgtccacctcgccgtccggctcgtgccgctcgtccaagcgcggcccgcggctggaccgccgcaacgcgtacaagagcatcggctacgagtacgaccccgccaagctcttctgcagctacccgccgtccccgtcgcgggcctcctcggcctcggcctccgccgcgccctcggtcgccagctccgtcgacctcagcagcttccgcatcggcggcaccggcgatggcggcggcgacgtccagctcctctgccgcaacctcggcctctccggccccgaggacttcgccatctccctcaccgactgggaggcgcacaaggccttccgctcctccgcctcctcctccgcctccagctccccttccgcgcgctcgcagcccgaccgccccgtgcgggagtccccgctccgccacgaggccgtcgaggagccgaccttgcccgcggacgctgatttcgagctcccggccaaggaaactgccagggacccgccggttgaggcgccagtgcggccggcatggttggatccgccggagccagcccgtccggatgtgaagaaaccaggctgcgagggagggatcaagggcgtgcgcccgccgccggtgatgctcaagccaccgccgtcgatggcgctgccgcccgcctcccaggcgggctccacgtgggatatcctgctgtctttcgcgccagaggaacaagggcaaccacaggcgatcagatctgtccccgactttggagacccggatgccgaggacgaggatgcggcggaagtgttgacgttggaagatctcaggctgggggagagctccgaggaattcacaggcacatcctcgatatccaccacaaacgacgatgagacaaccgagtctatgttctacatctcgcccaacgggaggtttaagaagaagatccggtcgtggagtcgaggcgtgctcttggggagtggctcctttgggaccgtctatgaggggatcagcgacgagggtgtcttttttgctgtcaaagaagtgtccttacatgatcaaggaagcaacgcacagcagtgtattttccaacttgagcaggaaattgcactcttgagtcagtttgaacatgagaatatagtacactacttcggaactgacaaagaggactcgaaactttacatcttccttgaactagtgacccaaggatctcttgtatctttgtatcagaagtaccgcctacgagatactcatgtttcggcatacacaagacaaatacttaatggattgaattacctccatgagaggaatattgttcatagagatattaaatgtgccaacatactggtgcatgcgaatggatccgtgaagcttgcggactttggacttgctaagcagacctccaaactcaatgtgctaaaatcatgcaaaggaactgtatattggatggcacctgaggtcgtcaatcccaagaagacatatggacctgcagctgatatatggagtttgggttgcacggtcctagagatgttgacacgtcaacttccctatcctgatctggagtggacacaagccctatacaggattggcaagggggaaccaccagcaattccaagtggcctttcgaaggaagctcgtgatttcattagccagtgtgtaaaaccgaatccagaagacagaccatccgcagccaaacttttggaccatccttttgtgaatagatctatgcgatctatacggtcgatgaggacatatacacgcccaaattcttctacacgtggcacgagcggatag

SEQ ID NO: 122908 - protein, 591 aa, Triticum aestivum
MGRPSHDTATSTSPSGSCRSSKRGPRLDRRNAYKSIGYEYDPAKLFCSYPPSPSRASSASASAAPSVASSVDLSSFRIGGTGDGGGDVQLLCRNLGLSGPEDFAISLTDWEAHKAFRSSASSSASSSPSARSQPDRPVRESPLRHEAVEEPTLPADADFELPAKETARDPPVEAPVRPAWLDPPEPARPDVKKPGCEGGIKGVRPPPVMLKPPPSMALPPASQAGSTWDILLSFAPEEQGQPQAIRSVPDFGDPDAEDEDAAEVLTLEDLRLGESSEEFTGTSSISTTNDDETTESMFYISPNGRFKKKIRSWSRGVLLGSGSFGTVYEGISDEGVFFAVKEVSLHDQGSNAQQCIFQLEQEIALLSQFEHENIVHYFGTDKEDSKLYIFLELVTQGSLVSLYQKYRLRDTHVSAYTRQILNGLNYLHERNIVHRDIKCANILVHANGSVKLADFGLAKQTSKLNVLKSCKGTVYWMAPEVVNPKKTYGPAADIWSLGCTVLEMLTRQLPYPDLEWTQALYRIGKGEPPAIPSGLSKEARDFISQCVKPNPEDRPSAAKLLDHPFVNRSMRSIRSMRTYTRPNSSTRGTSG

SEQ ID NO: 122909 - DNA, 1293 bp, Zea mays
  CDS (1)..(1293)
atggggaacatctgcggtggctccgggaaggatcgggtggccgaggatttcaggccgtctagcccagggacaacaatgacctccaagacgagcggcagcataaccaccagcctgagcaccacggggaagctctcctccgtgggcagcagcttcatggcgtccgccagcagccgcagcaccagcggcgggttcgacgagggggccaagtactccgacggccagatcctcgaggcgcccaacctccgcaccttcacattcgtagagctcaagacggccaccaagaacttccggccggacagcgtccttggcgaaggagggttcgggagagtctacaaagggtgggtggatgagaagaccatggcgccgaccaggaacagcaccggcatggttgttgcggtcaagaagctcaactcggagagcatgcaggggtttgaggaatggcagtcggagataaattttctaggaaggctctcccatccgaacctagtgaagctcttgggctactgttgggaggacaaggaacttcttctcgtgtacgaattcatggccaaagggagcttggaaaaccacctattcaggagaggatgtgcccccctgtcctgggagctgaggctgaagatagccattggtgcagctcgaggactcgcgttcttgcatgcatcggaaaaacaagtaatctaccgtgatttcaaggcgtctaacatccttttagacgcgaactataacgcaaagctctctgatttcggccttgctaagctggggccaactggtagcaactcgcacatcacaaccagggtgatggggacatatgggtatgcagctccagagtacgtagccaccgggcatctgtacgtgaagagcgacgtgtacggtttcggcgtggtgatgctggagatgctgtcggggcagcgagcgctggacccgaaccggccgagcgggcagctgagcctggccgactgggcgaagccgtacctggcggaccgccggaggctggcgcggctcatggacccgcggttcgagggccagtacaactccaggcaggcgttccaggcggcgcagctgacgctcggctgcctggccggcgacccccgcagccggccctcgatgaaggaggtggtggagacgctggagcgggtggaggcggtgaagagccgggcgcgcggcggcgggtccgggtccgggtctggccgcgccggtgccgcggcgcaccaccggtcgccgcgcgtcggtggcggtgcccgtgccgcgtccaggcccgccgccaacggccacaacgccaggcccgcgcgatga

SEQ ID NO: 122910 - protein, 430 aa, Zea mays
MGNICGGSGKDRVAEDFRPSSPGTTMTSKTSGSITTSLSTTGKLSSVGSSFMASASSRSTSGGFDEGAKYSDGQILEAPNLRTFTFVELKTATKNFRPDSVLGEGGFGRVYKGWVDEKTMAPTRNSTGMVVAVKKLNSESMQGFEEWQSEINFLGRLSHPNLVKLLGYCWEDKELLLVYEFMAKGSLENHLFRRGCAPLSWELRLKIAIGAARGLAFLHASEKQVIYRDFKASNILLDANYNAKLSDFGLAKLGPTGSNSHITTRVMGTYGYAAPEYVATGHLYVKSDVYGFGVVMLEMLSGQRALDPNRPSGQLSLADWAKPYLADRRRLARLMDPRFEGQYNSRQAFQAAQLTLGCLAGDPRSRPSMKEVVETLERVEAVKSRARGGGSGSGSGRAGAAAHHRSPRVGGGARAASRPAANGHNARPAR

SEQ ID NO: 122911 - DNA, 1743 bp, Zea mays
  CDS (1)..(1743)
atggccatcgtcgtcgtcgtcttccacaatccaatcggccggccggctgcacgcacgcatcctccgcctgccgcacccgccaccgcaagaagagggttcaaaatactcaagatggctccgccggcacggccgccacgtgttggggaggacttggaggagggcacaggcgagagctccccacctcctcggtcgccacgtgcgtccaaccccgactgccacgaggtgcagaggaagatctgcgagcgcctccgccagacggggcggcacgaccgtacgctcgccgaccccaccttcaacgcccgcttcgcccgccacctcgagaggttgccgcggaggtacctactcgacctcgacctggacgacaagctcgaggatgtcttgctgcactgggggattctcgacgagtgcgccgaccccaataagcgacccgtctttcgcgcgcggttcataaagtataagacagttcctagggaggatgacggcattggtcatgatcaagatcacgaggagccgtgtcaaaagttgttggaggacctcagtttggaaagaagaaagatcgcggacagaaatgattccctgtctatctcctctaggggcgatttgaaaactgtcctccttcatgagatcattttctcctccatcgacaagcccaagctcctaagtcggctaactgcgttgctctctgaggttggactgaatatccaggaagctcatgtgtactccacgaaggatggtttttgtttggatgtttttgttgttgatggctggaagacagaggagactgatgagctgatcgcggcgattaaggagacattaacacaaaaaaatgcatcaccatctaattcaacaaattcttcgacgccggagaaaatagttgacctacaacaacaggttggagattatgaaattgacttaagcatgctaactaggggggacaagatcgcatctggatcatccgcagacttatatcgaggaacttataaaggccatgatgttgctatcaagtgtctcagatctctatatctcaacaatccttcagaagttgagtttctgcaggaagtacttattctaagtggtgttaatcatgaaaatattctgcaattttatggggcatgcacaaaacatccaaactattgcattgtaacagaatacatgcctggagggaatatatatgactttcttcacaagcaaaataacttcttggacctccataaaattctaagatttgctatcgatatctcaaaaggaatggattatctgcaccagaataacattatacacagagatttgaagtctgcaaatcttctgctaggccatgaccaagttgttaagatcgcagactttggtgtggcgcgacatggaagtcagcaggggcagatgactgctgaaactggaacctaccgatggatggcaccagagataattaatcataagccgtatgaccacaaagcggatgtattcagctttgccattgttctttgggagctggcaacttcaatggtcccatatgacaacatgacacccttgcaagctgcattaggagtaagacagggattgcgcttggacattccgggcagcgtgcacccaagattgaccaagctgattcgacagtgctggaacgaagatcctgatgcgcgtctgacttttgcagagattactaaagaactccaagatagtctacaccatatcgaggcacccaagggagccagccgtcgatctagagcaaagatgcagaagaaataa

SEQ ID NO: 122912 - protein, 580 aa, Zea mays
MAIVVVVFHNPIGRPAARTHPPPAAPATARRGFKILKMAPPARPPRVGEDLEEGTGESSPPPRSPRASNPDCHEVQRKICERLRQTGRHDRTLADPTFNARFARHLERLPRRYLLDLDLDDKLEDVLLHWGILDECADPNKRPVFRARFIKYKTVPREDDGIGHDQDHEEPCQKLLEDLSLERRKIADRNDSLSISSRGDLKTVLLHEIIFSSIDKPKLLSRLTALLSEVGLNIQEAHVYSTKDGFCLDVFVVDGWKTEETDELIAAIKETLTQKNASPSNSTNSSTPEKIVDLQQQVGDYEIDLSMLTRGDKIASGSSADLYRGTYKGHDVAIKCLRSLYLNNPSEVEFLQEVLILSGVNHENILQFYGACTKHPNYCIVTEYMPGGNIYDFLHKQNNFLDLHKILRFAIDISKGMDYLHQNNIIHRDLKSANLLLGHDQVVKIADFGVARHGSQQGQMTAETGTYRWMAPEIINHKPYDHKADVFSFAIVLWELATSMVPYDNMTPLQAALGVRQGLRLDIPGSVHPRLTKLIRQCWNEDPDARLTFAEITKELQDSLHHIEAPKGASRRSRAKMQKK

SEQ ID NO: 122913 - DNA, 1476 bp, Zea mays
  CDS (1)..(1476)
atgagctgcttcgtctgcttcgggtcggcggcgcaggacgaggagcctaggaagcccgctgccgcgggcgccggcaaggacgccgcgccggatcgcgcagtggctcgcgtcggatcagataaatcaagatcacagggtggaccagactctaagaaggatctaattatccataaggatgggaatagtcaaaatattgcagcacagactttcacttttcgtgagctcgctgcagccactaagaacttcaggcaagattgccttttaggagagggaggttttggtcgtgtatataaaggacgcttggagaatgggcaggctgttgctgtgaaacaacttgatcgtaatggtctccaaggaaacagggaatttctggttgaggttctcatgctcagtctcttacatcacactaacctggtcaatctaattggctactgtgctgatggtgaccaacgccttcttgtttatgagtttatgccattggggtcactagaagatcatctgcatgatctgccaccagataaagagcctcttgattggaacacacggatgaagatagctgcaggtgcagctaagggcttagaacaccttcatgacaaggcgagtcctcctgtgatttaccgggattttaagtcatcaaacattcttcttggagaaggatttcatccgaagctatcggactttggccttgcaaaacttggtccggttggtgacaagacccatgtttcaacacgtgtgatgggtacatatggctactgtgccccagaatatgcaatgactgggcagctgacggttaaatccgatgtgtatagctttggtgttgtgttccttgaacttatcacggggcgtaaagcaattgacaatactaagacccaaggggagcaaaatttagtggcatgggctcgtccactgttcaaggaccgaaggaaattccctaaaatggctgatccaatgcttcagggccgcttccctatgaggggtctataccaggccttagccgttgctgccatgtgcttgcaagagcaagctgctacacgtcctcacatcggggatgtcgtcactgctctctcatatcttgcttctcaggcatatgacccaaatgcccctgttcaacacgtccggagcaattcatccacccccagggccagaaaccctgctgggtggaacggcgaccagcgcagcgtgcgctcgcctaaccatcattctccagacccgcggcgcagagacgctgcgggggcatccaagtatggagcagaggttagcaggactagctctaccagcgactctggccggcgatcaggcctggatgacatggacctgaccgggtcgcaagtgggaagcccagcgcagaccggaagaagaagagaagctccaaggggcaccgacagacagcgtgctgtcgcagaggccaggacatggggggagaattcaagggagcgaacaaatggccatggcagcttcgacagcacccatgagtga

SEQ ID NO: 122914 - protein, 491 aa, Zea mays
MSCFVCFGSAAQDEEPRKPAAAGAGKDAAPDRAVARVGSDKSRSQGGPDSKKDLIIHKDGNSQNIAAQTFTFRELAAATKNFRQDCLLGEGGFGRVYKGRLENGQAVAVKQLDRNGLQGNREFLVEVLMLSLLHHTNLVNLIGYCADGDQRLLVYEFMPLGSLEDHLHDLPPDKEPLDWNTRMKIAAGAAKGLEHLHDKASPPVIYRDFKSSNILLGEGFHPKLSDFGLAKLGPVGDKTHVSTRVMGTYGYCAPEYAMTGQLTVKSDVYSFGVVFLELITGRKAIDNTKTQGEQNLVAWARPLFKDRRKFPKMADPMLQGRFPMRGLYQALAVAAMCLQEQAATRPHIGDVVTALSYLASQAYDPNAPVQHVRSNSSTPRARNPAGWNGDQRSVRSPNHHSPDPRRRDAAGASKYGAEVSRTSSTSDSGRRSGLDDMDLTGSQVGSPAQTGRRREAPRGTDRQRAVAEARTWGENSRERTNGHGSFDSTHE

SEQ ID NO: 122915 - DNA, 1479 bp, Zea mays
  CDS (1)..(1479)
atgagctgcttcgtctgcttcgggtcggcggcgcacgacggggagtccaggaagccccccgccgcgggcgccggcaaagacgtcccgccggatcgcgcggtggtccgcgtcggatcagacaaatcaagatcacagggtggaccagaatctaagaaggacctgattatacatagggatgggaatagtcaaaatattgcagcacatactttcacttttcgtgaacttgctgcagccactaagaatttcaggcaagattgccttttaggggagggaggttttggtcgtgtatataaaggacgcttggagaatggacaggctgttgctgtgaagcaacttgatcgtaatggcctccaaggaaatagggaatttctggttgaggttctcatgctcagtctcttacatcacactaacctggtcaatctaattggctactgtgctgacggtgaccaacgccttcttgtttatgagtttatgccattggggtcactagaagaacatctgcatgatctgccaccagataaagaacctctagactggaacacacggatgaagatagctgcaggtgcagctaagggcttagagtaccttcacgacaagacgagtcctcctgttatttaccgggattttaagtcgtcaaacattcttcttggagaaggatttcatccgaagctatcagactttggccttgcaaaacttggcccggttggtgacaagacccatgtttcaacacgtgtgatgggtacatatggctactgtgccccagaatatgcaatgactgggcagctcacagttaaatccgatgtgtatagctttggagtcgtgttccttgaacttatcacagggcgcaaagcaattgacaacaccaagacccaaggggagcaaaacctagtggcatgggctcgtccactgttcaaggaccgcaggaaattccctaaaatggctgatccaatgcttcagggccgcttccctatgaggggtctatatcaggccttagctgttgctgccatgtgcttgcaagagcaagctgctacacgccctcacatcggggatgttgtcactgctctctcatatctcgcttctcaggcttatgacccaaacgcccctgttcaacacagccggagcaacgcatctacccccaggtccagaaaccctgctgcatggaacggtgatcagcgcagtgtgcgctcgcctaatcatcaccattctccagacccgcggcggagggaccctgccagggcatccaagtatggagcagaggttagcaggactagctctgccagcgattctggccggcggtcaggtctggatgacatggacccgaccgggtcgcaagtgggaagcccagctcaaaccggaagaagaagagaagctccaagggccaccgacagacagcgcgctgtcggagaggccaggatgtggggggagaactcaagggagcgaacgaatggccatggtagcttcgacagcacgcatgagtga

SEQ ID NO: 122916 - protein, 492 aa, Zea mays
MSCFVCFGSAAHDGESRKPPAAGAGKDVPPDRAVVRVGSDKSRSQGGPESKKDLIIHRDGNSQNIAAHTFTFRELAAATKNFRQDCLLGEGGFGRVYKGRLENGQAVAVKQLDRNGLQGNREFLVEVLMLSLLHHTNLVNLIGYCADGDQRLLVYEFMPLGSLEEHLHDLPPDKEPLDWNTRMKIAAGAAKGLEYLHDKTSPPVIYRDFKSSNILLGEGFHPKLSDFGLAKLGPVGDKTHVSTRVMGTYGYCAPEYAMTGQLTVKSDVYSFGVVFLELITGRKAIDNTKTQGEQNLVAWARPLFKDRRKFPKMADPMLQGRFPMRGLYQALAVAAMCLQEQAATRPHIGDVVTALSYLASQAYDPNAPVQHSRSNASTPRSRNPAAWNGDQRSVRSPNHHHSPDPRRRDPARASKYGAEVSRTSSASDSGRRSGLDDMDPTGSQVGSPAQTGRRREAPRATDRQRAVGEARMWGENSRERTNGHGSFDSTHE

SEQ ID NO: 122917 - DNA, 1260 bp, Zea mays
  CDS (1)..(1260)
atgttgagcgagcctaccgtagcgacgagcgcggatatgaattggtgttgtgttcctagggccaagagagaagagaacccttactccaacagcatcggcggtaaggaaaaatatgtattatttgcctacaagttttgtatttgcaattgcatgctacaagatggcagcactatgcaatattgcattatttcaggcatctactccgagaagaacataaggctcttctcctatgccgagttaagatctgctaccgacaacttcaaccgcaccaacaaagtgggacgaggcggattcgggacagtctataagggaaccatccgaagcgggcgagaggtcgcggtgaaggtcctctccgccgagtccaggcagggcatcagggagttcctgacggagatcgacgtcatcagcaacgtcaagcaccccaacctcgtcgaactcatcggctgctgcgtcgagggaagcaaccggattctggtgtatgagtacctcaagaacagcagccttgaccgtgcgctgctggcttctaacagtgagcctgccgacttcacctggagcgtcaggtctgctatatgcctcggagtcgctcggggccttgcgtacctgcacgaggagatcgcggcgccgatcgtgcacagagacatcaaggccagcaacatactgctcgacaggaactacgtccccaagatcggggatttcggtctggccaagctgtttcctgacaatgtcacccacatcagcacccgcgtcgcgggaacaacaggctaccttgcgcctgagtacgcctggcatggccagctcaccaagaaagcggacatctacagctttggtgtccttgtcctggagatagtgagcggcactagtagctccaggagcatactcatggatgacaagattctcctagagaaggcatgggagctgtacgaagcgaagaggctcaaggaactggtggatccagcccttgtagactgccctgaggaagaagccatcaggtacatcatggtggccctcttctgcctacaggcggccgccgcgcgccggccgacgatgccccaggtcgtcaccatgctgtccaagcccgtccggatcaacgagagcgagctgacggcgccggggtacctccaggagtacagcaggcggagccccttgtccaaggccaccacttccaccgactccaggttcaagaacctggcgtccgaggaggactccaacatgttcagcacggtggtgccacccacggtgacagagatgagccccaggtga

SEQ ID NO: 122918 - protein, 419 aa, Zea mays
MLSEPTVATSADMNWCCVPRAKREENPYSNSIGGKEKYVLFAYKFCICNCMLQDGSTMQYCIISGIYSEKNIRLFSYAELRSATDNFNRTNKVGRGGFGTVYKGTIRSGREVAVKVLSAESRQGIREFLTEIDVISNVKHPNLVELIGCCVEGSNRILVYEYLKNSSLDRALLASNSEPADFTWSVRSAICLGVARGLAYLHEEIAAPIVHRDIKASNILLDRNYVPKIGDFGLAKLFPDNVTHISTRVAGTTGYLAPEYAWHGQLTKKADIYSFGVLVLEIVSGTSSSRSILMDDKILLEKAWELYEAKRLKELVDPALVDCPEEEAIRYIMVALFCLQAAAARRPTMPQVVTMLSKPVRINESELTAPGYLQEYSRRSPLSKATTSTDSRFKNLASEEDSNMFSTVVPPTVTEMSPR

SEQ ID NO: 122919 - DNA, 1476 bp, Zea mays
  CDS (1)..(1476)
atgagctgcttcgtctgcttcgggtcggcggcgcaggacgaggagcctaggaagcccgctgccgcgggcgccggcaaggacgccgcgccggatcgcgcagtggctcgcgtcggatcagataaatcaagatcacagggtggaccagactctaagaaggatctaattatccataaggatgggaatagtcaaaatattgcagcacagactttcacttttcgtgagctcgctgcagccactaagaacttcaggcaagattgccttttaggagagggaggttttggtcgtgtatataaaggacgcttggagaatgggcaggctgttgctgtgaaacaacttgatcgtaatggtctccaaggaaacagggaatttctggttgaggttctcatgctcagtctcttacatcacactaacctggtcaatctaattggctactgtgctgatggtgaccaacgccttcttgtttatgagtttatgccattggggtcactagaagatcatctgcatgatctgccaccagataaagagcctcttgattggaacacacggatgaagatagctgcaggtgcagctaagggcttagaacaccttcatgacaaggcgagtcctcctgtgatttaccgggattttaagtcatcaaacattcttcttggagaaggatttcatccgaagctaccggactttggccttgcaaaacttggtccggttggtgacaagacccatgtttcaacacgtgtgatgggtacatatggctactgtgccccagaatatgcaatgactgggcagctgacggttaaatccgatgtgtatagctttggtgttgtgttccttgaacttatcacggggcgtaaagcaattgacaatactaagacccaaggggagcaaaatttagtggcatgggctcgtccactgttcaaggaccgaaggaaattccctaaaatggctgatccaatgcttcagggccgcttccctatgaggggtctataccaggccttagccgttgctgccatgtgcttgcaagagcaagctgctacacgtcctcacatcggggatgtcgtcactgctctctcatatcttgcttctcaggcatatgacccaaatgcccctgttcaacacgtccggagcaattcatccacccccagggccagaaaccctgctgggtggaacggcgaccagcgcagcgtgcgctcgcctaaccatcattctccagacccgcggcgcagagacgctgcgggggcatccaagtatggagcagaggttagcaggactagctctaccagcgactctggccggcgatcaggcctggatgacatggacctgaccgggtcgcaagtgggaagcccagcgcagaccggaagaagaagagaagctccaaggggcaccgacagacagcgtgctgtcgcagaggccaggacatggggggagaattcaagggagcgaacaaatggccatggcagcttcgacagcacccatgagtga

SEQ ID NO: 122920 - protein, 491 aa, Zea mays
MSCFVCFGSAAQDEEPRKPAAAGAGKDAAPDRAVARVGSDKSRSQGGPDSKKDLIIHKDGNSQNIAAQTFTFRELAAATKNFRQDCLLGEGGFGRVYKGRLENGQAVAVKQLDRNGLQGNREFLVEVLMLSLLHHTNLVNLIGYCADGDQRLLVYEFMPLGSLEDHLHDLPPDKEPLDWNTRMKIAAGAAKGLEHLHDKASPPVIYRDFKSSNILLGEGFHPKLPDFGLAKLGPVGDKTHVSTRVMGTYGYCAPEYAMTGQLTVKSDVYSFGVVFLELITGRKAIDNTKTQGEQNLVAWARPLFKDRRKFPKMADPMLQGRFPMRGLYQALAVAAMCLQEQAATRPHIGDVVTALSYLASQAYDPNAPVQHVRSNSSTPRARNPAGWNGDQRSVRSPNHHSPDPRRRDAAGASKYGAEVSRTSSTSDSGRRSGLDDMDLTGSQVGSPAQTGRRREAPRGTDRQRAVAEARTWGENSRERTNGHGSFDSTHE

SEQ ID NO: 122921 - DNA, 1590 bp, Zea mays
  CDS (1)..(1590)
atggtggcggcggagggtgggcccggcggggccgtcgaggagggcgtcggggagagctcgtccccgccgcgcgaggacgccgtcccagcgcccgccggctccggcgggagcgggggcagcggaggcgcccgcgaaatctgtgcccaggtgctcgaccgcctcgtcgccgacggctacgcggaggcgtccgacctcgagttccgcgacaggctcgccgcccatttcggccggctcccgcacagctatcagctggatatcaatgttgacaaagcatccgatgtcttggtccaccagaacgtcttagcggaagcaaaggatcctgataggcgccctgcattctatgtccgtttcttgaggattgaagatatggattcagcatacgactccgatgcatctgaagaaggggatgatgatggtgatgatctctctgtaaggcaggacacaccatatactcacattcatgagatagttttctccacaatcgataagccaaagctccttagtcagctatctgcattgctatctgacattggattgaacatcagagaagcacatgttttctctacccatgatggctattctcttgatgtttttgttgttgatggctggcctgttcaggatgctgatggtttgcacaaagcactggaagcatccattctaagaaatgagggttcatggtctggttcatctcattcctcagccgctgaaagaacactgcccttccaagttaaaggtggtgagtgggaaatcgacaaacgacttctgaagatgggagggatggttgcttctggttcttgtggggacttgtatcacgggacttaccttggtgaggatgtagctgttaaagttataagagctgagcatttgaataagaatgtttggaacgagtttacgcaagaagtatatatactaagagaagttcaacataaaaatgttgtgcgattcattggtgcatgcacaaaaccaccccaattttgcataattacagaatacatgtctggaggaagcctatatgactttgtgcacaagcagcataatgttctaaacctcaggactttattaaagtttgcagttgatgtatgccgagggatgtgctacttgcatgaaaggggtatcatccatagagacttgaagactgcaaaccttctaatggacaaagatcatgttgtgaaagtggctgattttggtgtagctcggttccaggatcaaggaggtgtcatgacagctgaaactggaacatacagatggatggcacctgaggttataaaccatcaaccctatgataacaaagcagatgttttcagctttgctattgtcatctgggagctgataacgtctaagatcccgtatgaaagcatgacccctctccaagcggctgtaggtgtgagacagggattgcgcccaggacttccaaagaagacgcatccaaaggtattggacttgatgcagagatgctgggaagcagacccatctgcccggcctgctttcccagacattttagccgaactggaggatcttttggcacaggttcagggaacaccgggaaagacggcccatgctccatcaaataactcgaacacgaaagattaa

SEQ ID NO: 122922 - protein, 529 aa, Zea mays
MVAAEGGPGGAVEEGVGESSSPPREDAVPAPAGSGGSGGSGGAREICAQVLDRLVADGYAEASDLEFRDRLAAHFGRLPHSYQLDINVDKASDVLVHQNVLAEAKDPDRRPAFYVRFLRIEDMDSAYDSDASEEGDDDGDDLSVRQDTPYTHIHEIVFSTIDKPKLLSQLSALLSDIGLNIREAHVFSTHDGYSLDVFVVDGWPVQDADGLHKALEASILRNEGSWSGSSHSSAAERTLPFQVKGGEWEIDKRLLKMGGMVASGSCGDLYHGTYLGEDVAVKVIRAEHLNKNVWNEFTQEVYILREVQHKNVVRFIGACTKPPQFCIITEYMSGGSLYDFVHKQHNVLNLRTLLKFAVDVCRGMCYLHERGIIHRDLKTANLLMDKDHVVKVADFGVARFQDQGGVMTAETGTYRWMAPEVINHQPYDNKADVFSFAIVIWELITSKIPYESMTPLQAAVGVRQGLRPGLPKKTHPKVLDLMQRCWEADPSARPAFPDILAELEDLLAQVQGTPGKTAHAPSNNSNTKD

SEQ ID NO: 122923 - DNA, 1806 bp, Zea mays
  CDS (1)..(1806)
atgggcccgccccccggcgcgcaggacccggcgccgtcgccgtcgggcggctccggctcttccaggcgccgcttccgccgcctcgaccgccgcaacgcatccaagcacatcgcctacgacgccaccaacttctgccagtacccgccgtccccgcaggccgcatccgcgccggggtcagggcgggcttcgctcgccagctccgctgcctgctccatcgatctcgtcaacagcttccgcatcggcggcagcggagacgggggcggggacctccgcttcctgtgcgagaacctcggcctctccggccccgacgacttcgccatcccgcgggccgactgggaggcacacaaggccgctcgatcatccgcctccgcttcgagctcccccaaccccgcacgcaccaaccacgactcccctcagcggaactcaccgctctctcaggtgggtgccgaggagcaggagcccgcccaggctgcggacgccgacacggagctaccggccgcaacgggaagggacggcccaatcgaagccccggagcggccggcacgcctggatccaccgcccgagtccacctgtcccgatgccaggagggcacctgggcagggaggaatcaagggcgtgcgcccgccaccggtgctcaagccgccgccttcgatggccctaccagctgtctgcggcgtgggatccacgtgggatatcttgcggtcgttggcgccggatgagaaagatgacgcccccgctagcagatctggccgtcgttttggacaccaggatgcagtggagaaggatgacgacgagcgtgcggcggttctgttaatgttggatgatcttaggctggaggagtcgtccgagagctttactggtacttcttcgctatcaacgaccaacgatgacgacacctcaagcaccaccacagaatccatgttctatatttcaccgaacgggaggtttaggaggaggatcaagtcatggagccgaggggtgctcctgggtagtggctcgtttgggacagtctatgagggcatcagcgatgagggtgtcttctttgctgtcaaagaagtgaacttatttgataaagggagcaatgcgaagcagtgtatctttcagcttgagcaggaaattgcacttctgagccagtttgagcatgagaatatagtgcagtactatgggacagacaaagaagattcgaaactttacatcttccttgaattagtgacccaaggatcccttgcattactatatcagaagtatcgcctgcgtgatactcaagtctctgcatatacaagacagattcttaatggattgatttacctccatgaaagaaatattgttcacagagacattaaatgcgcaaatattctggtgcatgcaaatggatctgtgaagcttgcagattttggactcgctaaggagattaccaaattcaatgaacttaaatcatgcaaaggaactgtttattggatggcaccggaggttgtcaatccaaagcagacatatggacctgcagctgatatatggagtcttggttgcactgtcctagagatgttgacacgccagataccctatcctgaccttgaatgggcacaagctctatacaggatcggtaagggggaatcgccagcaattccaaacactctttcgagggatgctcgcgattttataagccggtgtgtaaaaccgaatccggaagacagaccgtcagcatccaaactgttggagcatccattcgtaaacaagccaataagatcagtacggtctatgaggacgacatcttcacgctcgaattcatctacacgtggcatcaattaa

SEQ ID NO: 122924 - protein, 601 aa, Zea mays
MGPPPGAQDPAPSPSGGSGSSRRRFRRLDRRNASKHIAYDATNFCQYPPSPQAASAPGSGRASLASSAACSIDLVNSFRIGGSGDGGGDLRFLCENLGLSGPDDFAIPRADWEAHKAARSSASASSSPNPARTNHDSPQRNSPLSQVGAEEQEPAQAADADTELPAATGRDGPIEAPERPARLDPPPESTCPDARRAPGQGGIKGVRPPPVLKPPPSMALPAVCGVGSTWDILRSLAPDEKDDAPASRSGRRFGHQDAVEKDDDERAAVLLMLDDLRLEESSESFTGTSSLSTTNDDDTSSTTTESMFYISPNGRFRRRIKSWSRGVLLGSGSFGTVYEGISDEGVFFAVKEVNLFDKGSNAKQCIFQLEQEIALLSQFEHENIVQYYGTDKEDSKLYIFLELVTQGSLALLYQKYRLRDTQVSAYTRQILNGLIYLHERNIVHRDIKCANILVHANGSVKLADFGLAKEITKFNELKSCKGTVYWMAPEVVNPKQTYGPAADIWSLGCTVLEMLTRQIPYPDLEWAQALYRIGKGESPAIPNTLSRDARDFISRCVKPNPEDRPSASKLLEHPFVNKPIRSVRSMRTTSSRSNSSTRGIN

SEQ ID NO: 122925 - DNA, 1389 bp, Zea mays
  CDS (1)..(1389)
atgggctgcctgccgtgcttcgggtcggctggtgagggggcggccaaggagggcggtgcgcgcaaggacgataaatcaaaaccacagggtggactagactctaagaaggatgcagtcattttgagggaggggaataatcaacatattgcagcacacactttcacttttcgtgaacttgcagctgccactaagaacttcagacaagattgcttattgggtgagggaggttttggtcgtgtttataaaggacgtttggagaatggacaggttgttgcagtgaagcaacttgatcgcaatggccttcaaggaaacagggagtttctggttgaggttctaatgcttagtctgttgcaccatgacaatctagtaaacttaattggatactgcgctgatggagaccaacgtcttcttgtatacgagtttatgccattgggatcacttgaggatcatttgcatgatattccacctgataaggaacctctggactggaatacacgtatgaagattgctgctggtgccgccaagggcttagagtacttgcatgataaggcaagtcctcctgttatttacagggatttcaagtcctcaaacattctactcggtgaagggtttcatccgaagctatcagacttcggccttgccaaacttggccctgttggtgacaagactcacgtttcaacacgtgtcatgggaacttatggctactgtgctccagagtatgcaatgacagggcagcttacagctaaatctgatgtatatagttttggtgttgtgttccttgaactgattactggccgcaaagcaattgacaacacaaaaccccatggagagcaaaacctagttgcatgggctcgtcctctattcaaggaccgcagaaaattccctaaaatggctgatccgtcacttcagggctgtttccccatgaggggactgtatcaagctctagctgttgctgcaatgtgtttgcaagagcaggctgctacccgcccctttataggtgacgtggtcactgctctttcatacctagcttctcacacatatgatccaaatgcgcctgctcaacataatcggagtaattcatctactccgagggttagccgaggtggtgggagcaatgaccaacgccgtctccgctcatcaaaccaccactctccagatttgagaagggaagtcaccacagcatcaagatacgacgatgaggttagcagggcaaactctggtactggttctggtcgccggtctggcttggatgatgcggatatgtcaggctcacaattgggtagccctgctcacactggaaggaagaggggatctcctaggacttctgaaagccagcatgctatagcagaggccaaaacatatggggaaaattcaagaggcagaaagtga

SEQ ID NO: 122926 - protein, 462 aa, Zea mays
MGCLPCFGSAGEGAAKEGGARKDDKSKPQGGLDSKKDAVILREGNNQHIAAHTFTFRELAAATKNFRQDCLLGEGGFGRVYKGRLENGQVVAVKQLDRNGLQGNREFLVEVLMLSLLHHDNLVNLIGYCADGDQRLLVYEFMPLGSLEDHLHDIPPDKEPLDWNTRMKIAAGAAKGLEYLHDKASPPVIYRDFKSSNILLGEGFHPKLSDFGLAKLGPVGDKTHVSTRVMGTYGYCAPEYAMTGQLTAKSDVYSFGVVFLELITGRKAIDNTKPHGEQNLVAWARPLFKDRRKFPKMADPSLQGCFPMRGLYQALAVAAMCLQEQAATRPFIGDVVTALSYLASHTYDPNAPAQHNRSNSSTPRVSRGGGSNDQRRLRSSNHHSPDLRREVTTASRYDDEVSRANSGTGSGRRSGLDDADMSGSQLGSPAHTGRKRGSPRTSESQHAIAEAKTYGENSRGRK

SEQ ID NO: 122927 - DNA, 1239 bp, Zea mays
  CDS (1)..(1239)
atgggcaactgcggcacgcgggaggagaatgccgtcgtcgctgcgcacgcacaagttcaacagctccacttgttacaaaatcctgccaagaatgccattggagataggaagcacaaccgcacctcatcagatataagtgatccttccacacctaggaaagctgaagatgccaagaacatttccatatacaacgatgtgattgtcttcacattgtttgagctagagacaatcacaaagagcttccgtgccgattatgttctcggcgaaggaggatttgggaccgtttacaagggctacatagatgaaaatgtcagggtggggctgaagtcactgcctgttgcagtcaaggtgctcaacaaagatggacaccaagggcacagagaatggcttaccgaagttaactgcctggggcagttaaggcatccaaacttggtgaagttgatcggatattgctgcgaagatgaccatcggctgcttgtctacgagttcatgtttcgaggaagcctagaaaaccacctattccgaaagacagctacaccattaccctggggtactaggatgtcaatcgcactgggagctgctaaagggcttgcttgcctccacaatgctcaaaggcctgtcatctacagagatttcaagacatcaaatattctactggactctgattatactgctaagctgtctgactttggcctggcaaaagctggccctgaaggtgatcagacccatgtatcaacacgggtgatgggaacctacggttatgctgcccctgaatatgtgatgactggccacttgactgctagaagtgatgtctacagcttcggtgtggtccttctggagctcttgacagggcgcaagtcaatcgacaagtcgcggcccagcagggagcagagcctggttgactgggccctccccaagctgaacgacaagaggcggcttctccagatcatcgacccgagactggaggggcagtactcggccagagccgcccacaaagcctgcagccttgcgttctactgcctgagccagaaccccaaggccaggccactcatgagcgacgtcgtcgagaccctcgaaccgttgcagggcagcggtggaggcgatggacgcggccagccttctggccttcctgactataggggtcgccgcaggataaccgggaacagcgtccacttcagggccatcccgaaccccaagtgctcccctgccgtcccggccacggcttgccgagtgcggtga

SEQ ID NO: 122928 - protein, 412 aa, Zea mays
MGNCGTREENAVVAAHAQVQQLHLLQNPAKNAIGDRKHNRTSSDISDPSTPRKAEDAKNISIYNDVIVFTLFELETITKSFRADYVLGEGGFGTVYKGYIDENVRVGLKSLPVAVKVLNKDGHQGHREWLTEVNCLGQLRHPNLVKLIGYCCEDDHRLLVYEFMFRGSLENHLFRKTATPLPWGTRMSIALGAAKGLACLHNAQRPVIYRDFKTSNILLDSDYTAKLSDFGLAKAGPEGDQTHVSTRVMGTYGYAAPEYVMTGHLTARSDVYSFGVVLLELLTGRKSIDKSRPSREQSLVDWALPKLNDKRRLLQIIDPRLEGQYSARAAHKACSLAFYCLSQNPKARPLMSDVVETLEPLQGSGGGDGRGQPSGLPDYRGRRRITGNSVHFRAIPNPKCSPAVPATACRVR

SEQ ID NO: 122929 - DNA, 1578 bp, Zea mays
  CDS (1)..(1578)
atggtggcggcggagggtgggcccgtcgaggagggcgtcggggagagctcgtccccgccgcgcgtagacgcagccccagcgccctctggctccgttgggagcgggggcagaggaggcgccagcgacatctgcgccgaggtgctcgagcgcctcgtcgccgacggccacgcggaggcgtccgaccccgagttccgcgacaggctcgccgcacatttcgggcggctcccgcacagctatcagctggatatcaatgttgacaaagcaaccgatgtcttggtccaccagaatgtcttagcggaagcaaaggaccctgataggcgccctgcattctatgttcgtttcttgaggattgaagatattgatcctgcaaacgactccgatgcatctgaagaaggggatggtgatggtgatgatctctctgtaaggcaggacacaccatatactcacattcatgaggtagtattctccacaatcgacaagccaaagctccttagtcagctatctgcattgctatctgacattggattgaacatcagagaagcacatgttttctctactcatgatggctattctcttgatgttttcgttgttgatggctggcccattaaggatactgatggtttgcacaaagcactggaagcatccattttaagaaatgagggttcatggtctggttcatctcattcgtcagcagctgaaagaacactgcccttccaagttaaaggtggtgaatgggaaatcgataaacgacttctgaagatgggagggttgattgcttctggttcttgtggggacttgtatcacgggacttacctcggtgaggatgtagctgttaaagttctaagagctgagcatttgaataagaatgtttggaacgaatttactcaagaagtatatatactaagagaagttcaacatacaaatgttgtgcgattcattggtgcttgcacaaaaccaccacaattttgcataattacagaatacatgtctggaggaagcttatatgactttgtgcacaagcagcataacgttctaaacctcacgactctattgaagtttgcagttgatgtatgccgagggatgtgctacttgcatgaaaggggtatcatccatagagacttaaagactgccaaccttctaatggacaacgatcatgctgtgaaagtggctgattttggcgtagctcggttccaggatcaaggaggtatcatgacagctgaaactggaacatacagatggatggcgcctgaggttataaaccaccaaccctatgatagcaaagcagatgtgttcagctttgccattgttctctgggagctgataacgtccaagatcccatatgataccatgacccctctccaagcggctgtaggtgtgagacaggggttgcgcccaggacttccgaagaagacgcacccaaagctgttggacttgatgcagagatgttggggagcagatccatccgaccggcctgctttctcggacattttagccgaactggaggatcttttggcacaagctcagggaacatcgggaaagacggtccaagatccatcaaactcgaacgcgaaagattaa

SEQ ID NO: 122930 - protein, 525 aa, Zea mays
MVAAEGGPVEEGVGESSSPPRVDAAPAPSGSVGSGGRGGASDICAEVLERLVADGHAEASDPEFRDRLAAHFGRLPHSYQLDINVDKATDVLVHQNVLAEAKDPDRRPAFYVRFLRIEDIDPANDSDASEEGDGDGDDLSVRQDTPYTHIHEVVFSTIDKPKLLSQLSALLSDIGLNIREAHVFSTHDGYSLDVFVVDGWPIKDTDGLHKALEASILRNEGSWSGSSHSSAAERTLPFQVKGGEWEIDKRLLKMGGLIASGSCGDLYHGTYLGEDVAVKVLRAEHLNKNVWNEFTQEVYILREVQHTNVVRFIGACTKPPQFCIITEYMSGGSLYDFVHKQHNVLNLTTLLKFAVDVCRGMCYLHERGIIHRDLKTANLLMDNDHAVKVADFGVARFQDQGGIMTAETGTYRWMAPEVINHQPYDSKADVFSFAIVLWELITSKIPYDTMTPLQAAVGVRQGLRPGLPKKTHPKLLDLMQRCWGADPSDRPAFSDILAELEDLLAQAQGTSGKTVQDPSNSNAKD

SEQ ID NO: 122931 - DNA, 1806 bp, Zea mays
  CDS (1)..(1806)
atgggcccgccccccggcgcgcaggacccggcgccgtcgccgtcgggcggctccggctcttccaggcgccgcttccgccgcctcgaccgccgcaacgcatccaagcacatcgcctacgacgccaccaacttctgccagtacccgccgtccccgcaggccgcatccgcgccggggtcagggcgggcttcgctcgccagctccgctgcctgctccatcgatctcgtcaacagcttccgcatcggcggcagcggagacgggggcggggacctccgcttcctgtgcgagaacctcggcctctccggccccgacgacttcgccatcccgcgggccgactgggaggcacacaaggccgctcgatcatccgcctccgcttcgagctcccccaaccccgcacgcaccaaccacgactcccctcagcggaactcaccgctctctcaggtgggtgccgaggagcaggagcccgcccaggctgcggacgccgacacggagctaccggccgcaacgggaagggacggcccaatcgaagccccggagcggccggcacgcctggatccaccgcccgagtccacctgtcccgatgccaggagggcacctgggcagggaggaatcaagggcgtgcgcccgccaccggtgctcaagccgccgccttcgatggccctaccagctgtctgcggcgtgggatccacgtgggatatcttgcggtcgttggcgccggatgagaaagatgacgcccccgctagcagatctggccgtcgttttggacacctggatgcagtggagaaggatgacgacgagcgtgcggcggttctgttaatgttggatgatcttaggctggaggagtcgtccgagagctttactggtacttcttcgctatcaacgaccaacgatgacgacacctcaagcaccaccacagaatccatgttctatatttcaccgaacgggaggtttaggaggaggatcaagtcatggagccgaggggtgctcctgggtagtggctcgtttgggacagtctatgagggcatcagcgatgagggtgtcttctttgctgtcaaagaagtgaacttatttgataaagggagcaatgcgaagcagtgtatctttcagcttgagcaggaaattgcacttctgagccagtttgagcatgagaatatagtgcagtactatgggacagacaaagaagattcgaaactttacatcttccttgaattagtgacccaaggatcccttgcattactatatcagaagtatcgcctgcgtgatactcaagtctctgcatatacaagacagattcttaatggattgatttacctccatgaaagaaatattgttcacagagacattaaatgcgcaaatattctggtgcatgcaaatggatctgtgaagcttgcagattttggactcgctaaggagattaccaaattcaatgaacttaaatcatgcaaaggaactgtttattggatggcaccggaggttgttaatccgcagcagacatatggacctgcagctgatatatggagtcttggttgcactgtcctggagatgttgacacgccagataccctatcctgaccttgaatgggcacaagctctatacaggatcggtaaaggggaatcaccagcaattccaaacactctttcgagggatgctcgcgattttataagccggtgtgtaaaaccgaatccggaagacagaccatcagcatccaaactgttggagcatccattcgtaaacaagtccataagatcagtacggtctatgaggacgacaccttcacgctcgaattcatctactcgtggcatcaattaa

SEQ ID NO: 122932 - protein, 601 aa, Zea mays
MGPPPGAQDPAPSPSGGSGSSRRRFRRLDRRNASKHIAYDATNFCQYPPSPQAASAPGSGRASLASSAACSIDLVNSFRIGGSGDGGGDLRFLCENLGLSGPDDFAIPRADWEAHKAARSSASASSSPNPARTNHDSPQRNSPLSQVGAEEQEPAQAADADTELPAATGRDGPIEAPERPARLDPPPESTCPDARRAPGQGGIKGVRPPPVLKPPPSMALPAVCGVGSTWDILRSLAPDEKDDAPASRSGRRFGHLDAVEKDDDERAAVLLMLDDLRLEESSESFTGTSSLSTTNDDDTSSTTTESMFYISPNGRFRRRIKSWSRGVLLGSGSFGTVYEGISDEGVFFAVKEVNLFDKGSNAKQCIFQLEQEIALLSQFEHENIVQYYGTDKEDSKLYIFLELVTQGSLALLYQKYRLRDTQVSAYTRQILNGLIYLHERNIVHRDIKCANILVHANGSVKLADFGLAKEITKFNELKSCKGTVYWMAPEVVNPQQTYGPAADIWSLGCTVLEMLTRQIPYPDLEWAQALYRIGKGESPAIPNTLSRDARDFISRCVKPNPEDRPSASKLLEHPFVNKSIRSVRSMRTTPSRSNSSTRGIN

SEQ ID NO: 122933 - DNA, 1797 bp, Zea mays
  CDS (1)..(1797)
atgggcccgccccccggcgcgcaggacccggcgccgtcgccgtcgggcggctccggctcttccaggcgccgcttccgccgcctcgaccgccgcaacgcatccaagcacatcgcctacgacgccaccaacttctgccagtacccgccgtccccgcaggccgcatccgcgccggggtcagggcgggcttcgctcgccagctccgctgcctgctccatcgatctcgtcaacagcttccgcatcggcggcagcggagacgggggcggggacctccgcttcctgtgcgagaacctcggcctctccggccccgacgacttcgccatcccgcgggccgactgggaggcacacaaggccgctcgatcatccgcctccgcttcgagctcccccaaccccgcacgcaccaaccacgactcccctcagcgggactcgcctttctgtcaggtgggtgccgaggagcccgcccaggctgcggacgccgacccggagctactggccggaacgggaagggacggcccaatcgaagctccggagcggccggcacgcctggatccgccgcccgagtccacctttcccgatgtgaggagggcagttggggagggaggaatcaagggggtgcgcccgccgccggtgctcaagccgccgccttcgatggcgctaccagctgtctgcggcgtgggatccacgtgggatatcttgctgtccttcgcgccggatgagaaagaggacgctcccgcgagcagaactgtccgtcgttttggacaccgggctgcagaggagaaggatgacgacgaggatggggcggtattgttaatgttggacgatctcaggctggaggagtcgtccgagggctttactggcacttcttcactatcaacaaccaacgatgacgagacctcaagcaccaccactgaatccatgttctatatctcaccgaacgggaggtttaggaggaggatccggtcatggaaccgagggatgctcctgggtagtggctcgtttgggacagtctacgagggcatcagcgatgagggtgtcttctttgctgtcaaagaagtgaacttatttgataaagggagcaatgcgaagcagtgtatctttcagcttgagcaggaaattgcacttctgagccagtttgagcatgagaatatagtgcagtactatggaacagacaaagaagattcaaaactttacatcttccttgaattactgacccaaggatcccttgcattactgtatcagaggtatcgcctgcgagatactcatgtctctgcatatacaagacagatccttaatgggttgatttacctccatgaaaagaacattgttcatagagacattaaatgcgcaaatattctggtgcatgccaatggatccgtgaaacttgcagattttggactcgctaaggagatcaccaaattcaatgcagttaaatcatgcaaaggaactgtttattggatggcacctgaggttgtcaatccaaagaagacgtatggacctgcagctgacatatggagttttggttgcactgtcctagagatgttgacgcgccaaataccctatcctggcctcgaatggacacaagctctatacaggattggtaagggggaatcgccagcaattccaagttctctttcgaaggatgctcgtgattttataagtcagtgcgtaaaacccaatccagaagacagaccatcagcaatcaaactgttggagcatccatttgtaaacaagccaataagatcagtatggtctttgaggacatcttcacgctcgaattcatctacacgtggcatcaattaa

SEQ ID NO: 122934 - protein, 598 aa, Zea mays
MGPPPGAQDPAPSPSGGSGSSRRRFRRLDRRNASKHIAYDATNFCQYPPSPQAASAPGSGRASLASSAACSIDLVNSFRIGGSGDGGGDLRFLCENLGLSGPDDFAIPRADWEAHKAARSSASASSSPNPARTNHDSPQRDSPFCQVGAEEPAQAADADPELLAGTGRDGPIEAPERPARLDPPPESTFPDVRRAVGEGGIKGVRPPPVLKPPPSMALPAVCGVGSTWDILLSFAPDEKEDAPASRTVRRFGHRAAEEKDDDEDGAVLLMLDDLRLEESSEGFTGTSSLSTTNDDETSSTTTESMFYISPNGRFRRRIRSWNRGMLLGSGSFGTVYEGISDEGVFFAVKEVNLFDKGSNAKQCIFQLEQEIALLSQFEHENIVQYYGTDKEDSKLYIFLELLTQGSLALLYQRYRLRDTHVSAYTRQILNGLIYLHEKNIVHRDIKCANILVHANGSVKLADFGLAKEITKFNAVKSCKGTVYWMAPEVVNPKKTYGPAADIWSFGCTVLEMLTRQIPYPGLEWTQALYRIGKGESPAIPSSLSKDARDFISQCVKPNPEDRPSAIKLLEHPFVNKPIRSVWSLRTSSRSNSSTRGIN

SEQ ID NO: 122935 - DNA, 1800 bp, Zea mays
  CDS (1)..(1800)
atgggcccgccccccggtgcgcaggacccggcgccgtcgccgtcgggcggctccggctcttccaggcgccgcttccgccgcctcgaccgccgcaacgcatccaagcacatcgcctacgacgccaccaacttctgccagtacccgccgtccccgcaggccgcatccgcgccggggtcagggcgggcttcgctcgccagctccgctgcctgctccatcgatctcgtcaacagcttccgcatcggcggcagcggagacgggggcggggacctccgcttcctgtgcgagaacctcggcctctccgggcctgacgacttcgccgtcccgcgggccgactgggaggcacacaaggccgcccgatcatctgcctccgcttcgagctcccccaactccgcacgccccaactacgactcccctcagcggaactcaccgctctctcaggtgggtgccgaggagcccgcccaggcttcggacgccgagacggagctaccggccgcaacgggaagggacggcccaatcgaagccccggagcggccggcacgcttggatctaccgctcgagtccacctgtccggatgccaggagggcgcctgggcagggaggaatcaagggcgtgcgcccgccaccggtgctcaagccgccgccttcgatggccctaccagctgtctgcggcgtgggatccacgtgggatatcttgcggtcgttggcgccggatgagaaagatgacgcccccgctagcagatctggccgtcgttttggacacctggatgcagtggagaaggatgacgacgagcgtgcggcggttctgttaatgttggatgatcttaggctggaggagtcgtccgagagctttactggtacttcttcgctatcaacgaccaacgatgacgacacctcaagcaccaccacagaatccatgttctatatttcaccgaacgggaggtttaggaggaggatcaagtcatggagccgaggggtgctcctgggtagtggctcgtttgggacagtctatgagggcatcagcgatgagggtgtcttctttgctgtcaaagaagtgaacttatttgataaagggagcaatgcgaagcagtgtatctttcagcttgagcaggaaattgcacttctgagccagtttgagcatgagaatatagtgcagtactatgggacagacaaagaagattcgaaactttacatcttccttgaattagtgacccaaggatcccttgcattactatatcagaagtatcgcctgcgtgatactcaagtctctgcatatacaagacagattcttaatggattgatttacctccatgaaagaaatattgttcacagagacattaaatgcgcaaatattctggtgcatgcaaatggatctgtgaagcttgcagattttggactcgctaaggagattaccaaattcaatgaacttaaatcatgcaaaggaactgtttattggatggcaccggaggttgttaatccgcagcagacatatggacctgcagctgatatatggagtcttggttgcactgtcctggagatgttgacacgccagataccctatcctgaccttgaatgggcacaagctctatacaggatcggtaagggggaatcaccagcaattccaaacactctttcgagggatgctcgcgattttataagccggtgtgtaaaaccgaatccggaagacagaccatcagcatccaaactgttggagcatccattcgtaaacaagtccataagatcagtacggtctatgaggacgacaccttcacgctcgaattcatctactcgtggcatcaattaa

SEQ ID NO: 122936 - protein, 599 aa, Zea mays
MGPPPGAQDPAPSPSGGSGSSRRRFRRLDRRNASKHIAYDATNFCQYPPSPQAASAPGSGRASLASSAACSIDLVNSFRIGGSGDGGGDLRFLCENLGLSGPDDFAVPRADWEAHKAARSSASASSSPNSARPNYDSPQRNSPLSQVGAEEPAQASDAETELPAATGRDGPIEAPERPARLDLPLESTCPDARRAPGQGGIKGVRPPPVLKPPPSMALPAVCGVGSTWDILRSLAPDEKDDAPASRSGRRFGHLDAVEKDDDERAAVLLMLDDLRLEESSESFTGTSSLSTTNDDDTSSTTTESMFYISPNGRFRRRIKSWSRGVLLGSGSFGTVYEGISDEGVFFAVKEVNLFDKGSNAKQCIFQLEQEIALLSQFEHENIVQYYGTDKEDSKLYIFLELVTQGSLALLYQKYRLRDTQVSAYTRQILNGLIYLHERNIVHRDIKCANILVHANGSVKLADFGLAKEITKFNELKSCKGTVYWMAPEVVNPQQTYGPAADIWSLGCTVLEMLTRQIPYPDLEWAQALYRIGKGESPAIPNTLSRDARDFISRCVKPNPEDRPSASKLLEHPFVNKSIRSVRSMRTTPSRSNSSTRGIN

SEQ ID NO: 122937 - DNA, 1803 bp, Zea mays
  CDS (1)..(1803)
atgggcccgcccttctcagcgcaggaccccgcgccgtcgccgtcgggcggctccggctccggatcatccaggcgccgcctccgccggctcgaccgccgcaacgcgtccaagaacatcagctacaacgccaccaactactgccagtacccgccgtccccgcaggtcgcctccgcgccggggtccgggcgggcctcgctcgccggctcccttgcctgctccatcgacgtcgtcaacagctttcgcatcggcggcaacggcgacgggggcagggaccttcgcttcctgtgcgaaagtctcggcctctccggacccgacgacttcgccatcccgctggccgactgggaggcgcacaaggccgttcgatcctccacctccgcttcgggctcccccaactccgcacgcaccaaccacgactcccctcagcgggactcgcctttctgtcaggtgggtgccgaggagcccgcccaggctgcggacgccgacccggagctactggccggaacgggaagggacggcccaatcgaagctccggagcggccggcacgcctggatccgccgcccgagtccacctttcccgatgtgaggagggcagttggggagggaggaatcaagggggtgcgcccgccgccggtgctcaagccgccgccttcgatggcgctaccagctgtctgcggcgtgggatccacgtgggatatcttgctgtccttcgcgccggatgagaaagaggacgctcccgcgagcagaactgtccgtcgttttggacaccgggctgcagaggagaaggatgacgacgaggatggggcggtattgttaatgttggacgatctcaggctggaggagtcgtccgagggctttactggcacttcttcactatcaacaaccaacgatgacgagacctcaagcaccaccactgaatccatgttctatatctcaccgaacgggaggtttaggaggaggatccggtcatggaaccgagggatgctcctgggtagtggctcgtttgggacagtctacgagggcatcagcgatgagggtgtcttctttgctgtcaaagaagtgaacttatttgataaagggagcaatgcgaagcagtgtatctttcagcttgagcaggaaattgcacttctgagccagtttgagcatgagaatatagtgcagtactatggaacagacaaagaagattcaaaactttacatcttccttgaattactgacccaaggatcccttgcattactgtatcagaggtatcgcctgcgagatactcatgtctctgcatatacaagacagatccttaatgggttgatttacctccatgaaaagaacattgttcatagagacattaaatgcgcaaatattctggtgcatgccaatggatccgtgaaacttgcagattttggactcgctaaggagatcaccaaattcaatgcagttaaatcatgcaaaggaactgtttattggatggcacctgaggttgtcaatccaaagaagacgtatggacctgcagctgacatatggagttttggttgcactgtcctagagatgttgacgcgccaaataccctatcctggcctcgaatggacacaagctctatacaggattggtaagggggaatcgccagcaattccaagttctctttcgaaggatgctcgtgattttataagtcagtgcgtaaaacccaatccagaagacagaccatcagcaatcaaactgttggagcatccatttgtaaacaagccaataagatcagtatggtctttgaggacatcttcacgctcgaattcatctacacgtggcatcaattaa

SEQ ID NO: 122938 - protein, 600 aa, Zea mays
MGPPFSAQDPAPSPSGGSGSGSSRRRLRRLDRRNASKNISYNATNYCQYPPSPQVASAPGSGRASLAGSLACSIDVVNSFRIGGNGDGGRDLRFLCESLGLSGPDDFAIPLADWEAHKAVRSSTSASGSPNSARTNHDSPQRDSPFCQVGAEEPAQAADADPELLAGTGRDGPIEAPERPARLDPPPESTFPDVRRAVGEGGIKGVRPPPVLKPPPSMALPAVCGVGSTWDILLSFAPDEKEDAPASRTVRRFGHRAAEEKDDDEDGAVLLMLDDLRLEESSEGFTGTSSLSTTNDDETSSTTTESMFYISPNGRFRRRIRSWNRGMLLGSGSFGTVYEGISDEGVFFAVKEVNLFDKGSNAKQCIFQLEQEIALLSQFEHENIVQYYGTDKEDSKLYIFLELLTQGSLALLYQRYRLRDTHVSAYTRQILNGLIYLHEKNIVHRDIKCANILVHANGSVKLADFGLAKEITKFNAVKSCKGTVYWMAPEVVNPKKTYGPAADIWSFGCTVLEMLTRQIPYPGLEWTQALYRIGKGESPAIPSSLSKDARDFISQCVKPNPEDRPSAIKLLEHPFVNKPIRSVWSLRTSSRSNSSTRGIN

SEQ ID NO: 122939 - DNA, 1743 bp, Zea mays
  CDS (1)..(1743)
atggccatcgtcgtcgtcgtcttccacaacccacgaggccggccggctgcacgcacgcatcctccgcctgccgcacccgccaccgcaagaagagggttcaaaatactcaagatggctccgccggcacggccgccacgtgttggggaggacttggaggagggcacaggcgagagctccccacctcctcggtcgccacgtgcgtccaaccccgactgccacgaggtgcagaggaagatctgcgagcgcctccgccagacggggcggcacgaccgtacgctcgccgaccccaccttcaacgcccgcttcgcccgccacctcgagaggttgccgcggaggtacctactcgacctcgacctggacgacaagctcgaggatgtcttgctgcactgggggattctcgacgagtgcgccgaccccaataagcgacccgtctttcgcgcgcggttcataaagtataagacagttcctagggaggatgacggcattggtcatgatcaagatcacgaggagccgtgtcaaaagttgttggaggacctcagtttggaaagaagaaagatcgcggacagaaatgattccctgtctatctcctctaggggcgatttgaaaactgtcctccttcatgagatcattttctcctccatcgacaagcccaagctcctaagtcggctaactgcgttgctctctgaggttggactgaatatccaggaagctcatgtgtactccacgaaggatggtttttgtttggatgtttttgttgttgatggctggaagacagaggagactgatgagctgatcgcggcgattaaggagacattaacacaaaaaaatgcatcaccatctaattcaacaaattcttcgacgccggagaaaatagttgacctacaacaacaggttggagattatgaaattgacttaagcatgctaactaggggggacaagatcgcatctggatcatccgcagacttatatcgaggaacttataaaggccatgatgttgctatcaagtgtctcagatctctatatctcaacaatccttcagaagttgagtttctgcaggaagtacttattctaagtggtgttaatcatgaaaatattctgcaattttatggggcatgcacaaaacatccaaactattgcattgtaacagaatacatgcctggagggaatatatatgactttcttcacaagcaaaataacttcttggacctccataaaattctaagatttgctatcgatatctcaaaaggaatggattatctgcaccagaataacattatacacagagatttgaagtctgcaaatcttctgctaggccatgaccaagttgttaagatcgcagactttggtgtggcgcgacatggaagtcagcaggggcagatgactgctgaaactggaacctaccgatggatggcaccagagataattaatcataagccgtatgaccacaaagcggatgtattcagctttgccattgttctttgggagctggcaacttcaatggtcccatatgacaacatgacacccttgcaagctgcattaggagtaagacagggattgcgcttggacattccgggcagcgtgcacccaagattgaccaagctgattcgacagtgctggaacgaagatcctgatgcgcgtctgacttttgcagagattactaaagaactccaagatagtctacaccatatcgaggcacccaagggagccagccgtcgatctagagcaaagatgcagaagaaataa

SEQ ID NO: 122940 - protein, 580 aa, Zea mays
MAIVVVVFHNPRGRPAARTHPPPAAPATARRGFKILKMAPPARPPRVGEDLEEGTGESSPPPRSPRASNPDCHEVQRKICERLRQTGRHDRTLADPTFNARFARHLERLPRRYLLDLDLDDKLEDVLLHWGILDECADPNKRPVFRARFIKYKTVPREDDGIGHDQDHEEPCQKLLEDLSLERRKIADRNDSLSISSRGDLKTVLLHEIIFSSIDKPKLLSRLTALLSEVGLNIQEAHVYSTKDGFCLDVFVVDGWKTEETDELIAAIKETLTQKNASPSNSTNSSTPEKIVDLQQQVGDYEIDLSMLTRGDKIASGSSADLYRGTYKGHDVAIKCLRSLYLNNPSEVEFLQEVLILSGVNHENILQFYGACTKHPNYCIVTEYMPGGNIYDFLHKQNNFLDLHKILRFAIDISKGMDYLHQNNIIHRDLKSANLLLGHDQVVKIADFGVARHGSQQGQMTAETGTYRWMAPEIINHKPYDHKADVFSFAIVLWELATSMVPYDNMTPLQAALGVRQGLRLDIPGSVHPRLTKLIRQCWNEDPDARLTFAEITKELQDSLHHIEAPKGASRRSRAKMQKK

SEQ ID NO: 122941 - DNA, 22 bp, Artificial sequence
  primer
atgagacctcgcgggtatcaac

SEQ ID NO: 122942 - DNA, 25 bp, Artificial sequence
  primer
tcacttggacatacaacttttgaag

SEQ ID NO: 122943 - protein, 306 aa, Artificial sequence
  consensus sequence
  Variant (2)..(6): Xaa in position 2 to 6 is any amino acid
  Variant (8)..(8): Xaa in position 8 is any amino acid
  Variant (10)..(35): Xaa in position 10 to 35 is any amino acid
  Variant (36)..(45): Xaa in position 36 to 45 is any or no amino acid
  Variant (47)..(49): Xaa in position 47 to 49 is any amino acid
  Variant (51)..(54): Xaa in position 51 to 54 is any amino acid
  Variant (56)..(56): Xaa in position 56 is any amino acid
  Variant (58)..(58): Xaa in position 58 is any amino acid
  Variant (60)..(62): Xaa in position 60 to 62 is any amino acid
  Variant (64)..(64): Xaa in position 64 is any amino acid
  Variant (66)..(74): Xaa in position 66 to 74 is any amino acid
  Variant (75)..(91): Xaa in position 75 to 91 is any or no amino acid
  Variant (93)..(96): Xaa in position 93 to 96 is any amino acid
  Variant (98)..(98): Xaa in position 98 is any amino acid
  Variant (100)..(102): Xaa in position 100 to 102 is any amino acid
  Variant (104)..(116): Xaa in position 104 to 116 is any amino acid
  Variant (117)..(121): Xaa in position 117 to 121 is any or no amino acid
  Variant (123)..(131): Xaa in position 123 to 131 is any amino acid
  Variant (134)..(137): Xaa in position 134 to 137 is any amino acid
  Variant (138)..(140): Xaa in position 138 to 140 is any or no amino acid
  Variant (142)..(142): Xaa in position 142 is any amino acid
  Variant (145)..(145): Xaa in position 145 is any amino acid
  Variant (147)..(148): Xaa in position 147 to 148 is any amino acid
  Variant (149)..(149): Xaa in position 149 is any or no amino acid
  Variant (151)..(151): Xaa in position 151 is any amino acid
  Variant (153)..(159): Xaa in position 153 to 159 is any amino acid
  Variant (160)..(160): Xaa in position 160 is any or no amino acid
  Variant (162)..(163): Xaa in position 162 to 163 is any amino acid
  Variant (167)..(167): Xaa in position 167 is any amino acid
  Variant (169)..(176): Xaa in position 169 to 176 is any amino acid
  Variant (177)..(182): Xaa in position 177 to 182 is any or no amino acid
  Variant (184)..(186): Xaa in position 184 to 186 is any amino acid
  Variant (189)..(192): Xaa in position 189 to 192 is any amino acid
  Variant (196)..(204): Xaa in position 196 to 204 is any amino acid
  Variant (205)..(212): Xaa in position 205 to 212 is any or no amino acid
  Variant (214)..(214): Xaa in position 214 is any amino acid
  Variant (216)..(217): Xaa in position 216 to 217 is any amino acid
  Variant (220)..(224): Xaa in position 220 to 224 is any amino acid
  Variant (226)..(240): Xaa in position 226 to 240 is any amino acid
  Variant (241)..(247): Xaa in position 241 to 247 is any or no amino acid
  Variant (249)..(272): Xaa in position 249 to 272 is any amino acid
  Variant (273)..(287): Xaa in position 273 to 287 is any or no amino acid
  Variant (289)..(292): Xaa in position 289 to 292 is any amino acid
  Variant (294)..(295): Xaa in position 294 to 295 is any amino acid
  Variant (298)..(305): Xaa in position 298 to 305 is any amino acid
GXXXXXYXGXXXXXXXXXXXXXXXXXXXXXXXXXXXXXXXXXXXXEXXXLXXXXHXNXVXXXGXCXXXXXXXXXXXXXXXXXXXXXXXXXXEXXXXGXLXXXLXXXXXXXXXXXXXXXXXXAXXXXXXXXXLHXXXXXXXIXRDXKXXXNXLXXXXXXXXKXXDFGXAXXXXXXXXXXXXXXTXXXGTXXXXAPEXXXXXXXXXXXXXXXXXKXDXXSFXXXXXEXXXXXXXXXXXXXXXXXXXXXXAXXXXXXXXXXXXXXXXXXXXXXXXXXXXXXXXXXXXXXXCXXXXPXXRPXXXXXXXXL

SEQ ID NO: 122944 - protein, 20 aa, Artificial sequence
  protein pattern
  Variant (2)..(2): Xaa in position 2 is Ile or Val
  Variant (3)..(4): Xaa in position 3 to 4 is any amino acid
  Variant (5)..(5): Xaa in position 5 is Ile, Leu or Met
  Variant (6)..(9): Xaa in position 6 to 9 is any amino acid
  Variant (11)..(11): Xaa in position 11 is any amino acid
  Variant (13)..(13): Xaa in position 13 is Ile, Leu or Val
  Variant (15)..(17): Xaa in position 15 to 17 is any amino acid
  Variant (19)..(19): Xaa in position 19 is any amino acid
  Variant (20)..(20): Xaa in position 20 is Cys, Asp or Val
EXXXXXXXXHXNXVXXXGXX

SEQ ID NO: 122945 - protein, 13 aa, Artificial sequence
  protein pattern
  Variant (2)..(4): Xaa in position 2 to 4 is any amino acid
  Variant (7)..(8): Xaa in position 7 to 8 is any amino acid
  Variant (9)..(9): Xaa in position 9 is Trp or Tyr
  Variant (10)..(10): Xaa in position 10 is any amino acid
  Variant (13)..(13): Xaa in position 13 is Asp or Glu
TXXXGTXXXXAPX

SEQ ID NO: 122946 - protein, 13 aa, Artificial sequence
  protein pattern
  Variant (2)..(2): Xaa in position 2 is any amino acid
  Variant (3)..(3): Xaa in position 3 is any or no amino acid
  Variant (6)..(6): Xaa in position 6 is Phe, Ile or Leu
  Variant (8)..(8): Xaa in position 8 is any amino acid
  Variant (9)..(9): Xaa in position 9 is Ala, Asp, Glu, Asn, Gln or Ser
  Variant (11)..(11): Xaa in position 11 is Ile, Leu or Met
  Variant (13)..(13): Xaa in position 13 is Ile, Leu, Met or Val
IXXRDXKXXNXLX

SEQ ID NO: 122947 - protein, 9 aa, Artificial sequence
  protein pattern
  Variant (2)..(2): Xaa in position 2 is Ile, Leu or Val
  Variant (3)..(3): Xaa in position 3 is Ala, Ser or Thr
  Variant (7)..(7): Xaa in position 7 is Leu or Val
  Variant (9)..(9): Xaa in position 9 is Lys or Arg
KXXDFGXAX

SEQ ID NO: 122948 - DNA, 534 bp, Azotobacter vinelandii
  CDS (1)..(534): transl_table=11
atgatcgacatcgataaacaaggctccacgggcagcccccgggacgccaggcatcctctggaacactggcacccgctggatcgcctgcgccggcaggtcgatcacctgttctccgacctcggccgcaaggcgctgcgcaaccccttcggccacggcccgttcgacagcgagccgcaatggtcgcgggaactgtccggccagggcatgccggcggtggacatcgacgacaagggcacggcctacgagatctccgccgaactgcccggcatgcacgagcgggacatcgaggtcaaactgtccagcggctgcctgaccatccggggggagaagaaggaagaatacgaggaccggaagaagaacgcctacgtcgccgaacgctactacggctccttccagcgcagcttcgccctgcctccggaagtcgatgccgggcgcatcgaggcgcgcttcgacaagggcgtgctgaccttgagcctgccgaagaaagccgaggcgctcggtgccgagaagagcatcccgatcaaggccggctga

SEQ ID NO: 122949 - protein, 177 aa, Azotobacter vinelandii
MIDIDKQGSTGSPRDARHPLEHWHPLDRLRRQVDHLFSDLGRKALRNPFGHGPFDSEPQWSRELSGQGMPAVDIDDKGTAYEISAELPGMHERDIEVKLSSGCLTIRGEKKEEYEDRKKNAYVAERYYGSFQRSFALPPEVDAGRIEARFDKGVLTLSLPKKAEALGAEKSIPIKAG

SEQ ID NO: 122950 - DNA, 570 bp, Klebsiella pneumoniae subsp. pneumoniae MGH 78578
  CDS (1)..(570): transl_table=11
atggacatcgatttcaagaagttggctccctggaactggttcaagaacgagcagcaagagcagcagaccgtctcttccctgccggtgcagcgcaatgacctgccagcggcgagcgggccagtcagcccgatcctgcaactgcatcgggaaatcgaccggctgttcgatgacgcattccggggcttcggttttccggcgttgaacatgccgcagtggccatccgattggtcgggcatgctgaagccggccctggacatccaggaaaccgacaagcagtacaagattgccctggaagtgcccggtgtcgaggagaaggacatccagatcactctcgacaacgacgtgctgatggtgcgtggcgagaagcgccaggaacaggagaagaaggaaggtggcttccaccgtgtggagcgctcctacggcagctttcagcgtgccttgaacctgcctgacgacgccaaccaggattcgatcaaagcatcgttcaagaacggggtgctcacggtcacgatcgacaagcgcgaggtcagcgcgccgaagcagggacgctcgatcccgatcaacggctga

SEQ ID NO: 122951 - protein, 189 aa, Klebsiella pneumoniae subsp. pneumoniae MGH 78578
MDIDFKKLAPWNWFKNEQQEQQTVSSLPVQRNDLPAASGPVSPILQLHREIDRLFDDAFRGFGFPALNMPQWPSDWSGMLKPALDIQETDKQYKIALEVPGVEEKDIQITLDNDVLMVRGEKRQEQEKKEGGFHRVERSYGSFQRALNLPDDANQDSIKASFKNGVLTVTIDKREVSAPKQGRSIPING

SEQ ID NO: 122952 - DNA, 522 bp, Mesorhizobium loti MAFF303099
  CDS (1)..(522): transl_table=11
atgaccattcgtgatctcatgccatggggccgcgacaccagccagtctccgaccctctttcgcgaaggcgatcgggacccgttcatgggcctgcatcgcgagatgagccgcctggtcgacgacatgttccgcggcttcgagtcgcggcttccgtccatgggcaggttctctttggccggcaccggttggcccagcgtggaaatctccgaaacggacaaggatatccgcgtcacagccgagatacccggcatggaggagaaggacatcgaggtgttgctcgatgacggcgtcctgacgttgcgcggcgaaaaacactccgaaaccgacgacaaggagcgtcagttctccgagcggttctatggccgcttcgaacgtcgcatcccgatcggcttcgaagtcgcggaggacaaggtcgccgccgatttccgcaacggcgtactgtccgtgagcttgccgaagtccgagaaggcgcagagcaaggcaaagcgcatccccatcggtggcaagagcaccaagcattag

SEQ ID NO: 122953 - protein, 173 aa, Mesorhizobium loti MAFF303099
MTIRDLMPWGRDTSQSPTLFREGDRDPFMGLHREMSRLVDDMFRGFESRLPSMGRFSLAGTGWPSVEISETDKDIRVTAEIPGMEEKDIEVLLDDGVLTLRGEKHSETDDKERQFSERFYGRFERRIPIGFEVAEDKVAADFRNGVLSVSLPKSEKAQSKAKRIPIGGKSTKH

SEQ ID NO: 122954 - DNA, 510 bp, Mesorhizobium loti MAFF303099
  CDS (1)..(510): transl_table=11
atgagcgtacgtgacttgattccctggagccgtggcggcggcccggcaccgagcatttatcgcggtgacgacatggatccgttcctgtcgttgcaccgcaatgtcaaccggctattcgacgaggtgttccgcggttttgacacgccttcggtgctgggccgcatggcccctctcaacggcacttggccaggcgtggagttctcggaaaccgatgaggaaatccggctgacggccgaaatccctggcctcgatgaaaacgacgtcgaggtcatgctggatgatggtgttctgacgcttcgcggcgagaagaaggctgagaccgaggacaaggaccgccagttcagcgaacgctattatgggcgttttgagcggcgctttggtctcggtcgtgaggttgaagacgacaaggtggcggcgacgttcaagaacggcgtgctcaccgtgacgctgccgaagaccaaaagggcgcaggcaaacgccaagcgcattgcaatcaacggcaacaaatga

SEQ ID NO: 122955 - protein, 169 aa, Mesorhizobium loti MAFF303099
MSVRDLIPWSRGGGPAPSIYRGDDMDPFLSLHRNVNRLFDEVFRGFDTPSVLGRMAPLNGTWPGVEFSETDEEIRLTAEIPGLDENDVEVMLDDGVLTLRGEKKAETEDKDRQFSERYYGRFERRFGLGREVEDDKVAATFKNGVLTVTLPKTKRAQANAKRIAINGNK

SEQ ID NO: 122956 - DNA, 528 bp, Sinorhizobium meliloti 1021
  CDS (1)..(528): transl_table=11
atggctgaacctgcaaccaaactgcccatcaagtcggaagaaaaaggcgtcgagcgtcgtgcggaatcgtggctcccctttgagagcctcagatccgaaatcgaccggctgttcgacgatttcgctccaagcctgtggcatcgccccttggcttctgccctcatgcgtcgggtgccgcgtctgtcagagctggacgtggcgccggccgttgatctggcggagacagaaaagacctacgagatcacctgtgagctgccggggatggaagaaaaggacattgaggtggccatctccaacggaaccctgacgatcagaggcgagaagcaggaggagaaaaaagagaataagaaagaatatgtcctctctgagcgtcgctacggctcgttccagcggacgttccggatgccagatggggtcgatacagaaaagatcgctgcaaaattctcgaagagcgttctgtcgataaccctgccgaagaccccggaagcgcagcagaacgagcgcaagatccagatcaaagtcacttga

SEQ ID NO: 122957 - protein, 175 aa, Sinorhizobium meliloti 1021
MAEPATKLPIKSEEKGVERRAESWLPFESLRSEIDRLFDDFAPSLWHRPLASALMRRVPRLSELDVAPAVDLAETEKTYEITCELPGMEEKDIEVAISNGTLTIRGEKQEEKKENKKEYVLSERRYGSFQRTFRMPDGVDTEKIAAKFSKSVLSITLPKTPEAQQNERKIQIKVT

SEQ ID NO: 122958 - DNA, 507 bp, Sinorhizobium meliloti 1021
  CDS (1)..(507): transl_table=11
atgaatgtacgtgatctcatcccatggggccgtgcgcagggccaggtgccggcttcctatcgtgacaacgaccgaaatcccttcctggccctccacagggaaatgaaccgcctgttcgacgacgccttccgcagcttcgaaacccgcctgcccatcagcggcttttcgggttttgcaggtggctggccgagcgtcgaggtctccgaccgggataaggaaatcaaggtgaccgcggaactgccgggtctcgatgaaaaggtcgtcgaactgtccttgtccgacggcgtgttgtcgctgcgaggcgaaaaacgggcagagaccgaggaccaggaaaaccagttctcggagcgatattacgggcgcttcgagcggcgcattgcgctcggatacgaggtggacgaaagcaaggtgaatgcgaccttccgcaatggcgtcctgaccgttactctgccgaagaccgagcaggcccagtcgaaagccaagcgcattgcgatcaacgggcggtag

SEQ ID NO: 122959 - protein, 168 aa, Sinorhizobium meliloti 1021
MNVRDLIPWGRAQGQVPASYRDNDRNPFLALHREMNRLFDDAFRSFETRLPISGFSGFAGGWPSVEVSDRDKEIKVTAELPGLDEKVVELSLSDGVLSLRGEKRAETEDQENQFSERYYGRFERRIALGYEVDESKVNATFRNGVLTVTLPKTEQAQSKAKRIAINGR

SEQ ID NO: 122960 - DNA, 477 bp, Xanthomonas axonopodis pv. citri str. 306
  CDS (1)..(477): transl_table=11
atgaacatcgttcgttatccccaatttcccacccacgcgctgcagaacgagatcaagcatgtgttcgatcgcttcttcgagcagaacggcgacaccgacgaatcggccgtggtgaccgcgcagtgggtgccgcgcgttgacatcaaggaagaggtgaatcacttcgtgctgtacgccgatttgccgggcatcgatccgagccagatcgaggtgcagatggacaagggcatcctgtcgatccggggggagcgcaagagcgaatccagcaccgaaaccgaacgcttctcgcgcatcgagcgccgctacggcagcttccatcgccgcttcgcgctgcccgacagcgccgacgccgatggcatcacggctgcaggccgtaacggcgtgctggaaatccgcattcccaagcgcccggccgccacgccgcgccgtatccaggttggcaacggtcagaacaccagcggcagcacggtgcagtaa

SEQ ID NO: 122961 - protein, 158 aa, Xanthomonas axonopodis pv. citri str. 306
MNIVRYPQFPTHALQNEIKHVFDRFFEQNGDTDESAVVTAQWVPRVDIKEEVNHFVLYADLPGIDPSQIEVQMDKGILSIRGERKSESSTETERFSRIERRYGSFHRRFALPDSADADGITAAGRNGVLEIRIPKRPAATPRRIQVGNGQNTSGSTVQ

SEQ ID NO: 122962 - DNA, 696 bp, Pseudomonas putida KT2440
  CDS (1)..(696): transl_table=11
ttgaccaggatcaaaccagcgggcggcagggacttcaccttgttgataaagatcaaatggggtgctgcccctcggcgcatgatcgaggcgtctccctgggaggcattactcattcactcattcgaggagggcgccatgtcagacgttgccaagaaagtgcctgttacccccgtcgccagccagccaaccgaaggttcgccacccagcgtcgaaccttcagagctgtggcggcccttccagcaattgcgccgccagatcgacagcctgttcgaggattttggacggcggccgatgcgcatgccgttcagccacacaccgttcgatgtcgaaccgttctggcggcgtgacctgttcacccacggcatgccggccatggacatcagcgagctggccgaggaataccgcatcagcgccgagttgcctggcgtggatgccaaggatatcgagatcaagctcgtcaatggcaacctgttgatccggggcgagaaaaaggaggaagtggacgaaaaacgcaaggaatatcacctgtccgagcgccattacggcagcttcgaacgggttttccagctgccccgtggggtcgacgccgagaaaatcgacgcccagttcgacaagggcgtgctgctggtgcacctgcccaagcgtgccgaagccatccatccggaaaaggtgattccgatcaagagcggtaaatga

SEQ ID NO: 122963 - protein, 231 aa, Pseudomonas putida KT2440
MTRIKPAGGRDFTLLIKIKWGAAPRRMIEASPWEALLIHSFEEGAMSDVAKKVPVTPVASQPTEGSPPSVEPSELWRPFQQLRRQIDSLFEDFGRRPMRMPFSHTPFDVEPFWRRDLFTHGMPAMDISELAEEYRISAELPGVDAKDIEIKLVNGNLLIRGEKKEEVDEKRKEYHLSERHYGSFERVFQLPRGVDAEKIDAQFDKGVLLVHLPKRAEAIHPEKVIPIKSGK

SEQ ID NO: 122964 - DNA, 522 bp, Bradyrhizobium japonicum USDA 110
  CDS (1)..(522): transl_table=11
atggcaaccgaaaccaagctgcccgtcacaaaatcccccacagcccccgctgtcgccggagagacttggcgaccctttcaggcattgagaaacgaaatcgaccagatctttgacgatttcggtaacggcttctggaaccgaccgttccgttcgctggcacggctcgagcgcgacttctcgaagtcgatctctgcgccggccgtagacgtcgccgagagtgacaaagcgtatgagattacggccgagcttccgggtctcgacgagaagaacatcgacatcaaggtcgccaacggcggtcttacgatcaagggcgagaagcgcgaggagaccgaggaaaagaataaggactactacgtctccgagcgccgctacggcaccttcgagcgctatttcaccctgccggagagcgtcaacgccgacaagatcgaggctaccttcaagaacggcgtgctgaaggtcgtgcttccgaaaaccgaggaggcgcagaaaccggccaagacgatcaacgtgaaggcggcttga

SEQ ID NO: 122965 - protein, 173 aa, Bradyrhizobium japonicum USDA 110
MATETKLPVTKSPTAPAVAGETWRPFQALRNEIDQIFDDFGNGFWNRPFRSLARLERDFSKSISAPAVDVAESDKAYEITAELPGLDEKNIDIKVANGGLTIKGEKREETEEKNKDYYVSERRYGTFERYFTLPESVNADKIEATFKNGVLKVVLPKTEEAQKPAKTINVKAA

SEQ ID NO: 122966 - DNA, 492 bp, Bradyrhizobium japonicum USDA 110
  CDS (1)..(492): transl_table=11
atggcactacgcgaactcattccgtggaacaacggctcccgcaatctgcctgcgcgacgcaccgaggtagacaacccgtttctctcgctgcatcgcgagatgaatcggctgttcgacgacgtgtttcgcggcgtcgatatcggccagttcgccccgccggcgacaatggggtggccgagcgtcgagttcaacgagaccgacaaggaagtgaaagttatcgccgagcttcccggcatcgaacagaaagacgtcgaggtcgaacttgccgacggcgtgctgacgatcagcggcgagaagaagagcgaaacgaaagacaaggagcgtcgcttcagcgagcgctactacggacgtttcgagcggcgcattcccgtcgacgacgtcgaccaggataaagtcgccgcgtccttcaaggacgggatcctcaccgtcacgctgccgaagtcgcctacggaacagcggaaggtgaaaaggatcgcaatcaacggaaagtaa

SEQ ID NO: 122967 - protein, 163 aa, Bradyrhizobium japonicum USDA 110
MALRELIPWNNGSRNLPARRTEVDNPFLSLHREMNRLFDDVFRGVDIGQFAPPATMGWPSVEFNETDKEVKVIAELPGIEQKDVEVELADGVLTISGEKKSETKDKERRFSERYYGRFERRIPVDDVDQDKVAASFKDGILTVTLPKSPTEQRKVKRIAINGK

SEQ ID NO: 122968 - DNA, 501 bp, Bradyrhizobium japonicum USDA 110
  CDS (1)..(501): transl_table=11
atgggtatcaaggacctcattccgtggaataacggcggacgagaggtcggcattcaccgcggagccgatgtgaatccgtttcttacattgcatcgcgagatgaaccggatgttcgacgaggtattccgcggctttgatcttgcgccgttcggatcgagccggggactgagcgggctcggctggccccagatcgacatcgatgaaacggacaaggaggtgcgcatcaccgctgagctgcccggcctggaggagaaggacgtcagtctcgaaatcgcgaatggagttctttcgatctccggcgagaaaaaatccgaatcggaagacaaggcacgtcgtttcagcgaacgatactacggccgattcgaacggcgtatcccgctggagggcatcgacgaggacaaagtctcggccgcgttcaagaacggcgtcctgaccataaccgtgccgaaatccgccgaagccaaaaatgtccgccgcatcgcgatcaatcgcaatggctga

SEQ ID NO: 122969 - protein, 166 aa, Bradyrhizobium japonicum USDA 110
MGIKDLIPWNNGGREVGIHRGADVNPFLTLHREMNRMFDEVFRGFDLAPFGSSRGLSGLGWPQIDIDETDKEVRITAELPGLEEKDVSLEIANGVLSISGEKKSESEDKARRFSERYYGRFERRIPLEGIDEDKVSAAFKNGVLTITVPKSAEAKNVRRIAINRNG

SEQ ID NO: 122970 - DNA, 528 bp, Bradyrhizobium japonicum USDA 110
  CDS (1)..(528): transl_table=11
atggcaaacgaaaccaagctccccgtcaccaagaaaaccaacgaacccgcatttggcggcgaaacgtggcgaccgttcgaggcgctccgcaaggaagtcgatcggctgttcgaggatttcggcactgacgatttctggcgccgcccgttccgttcgctcgccggcttcgagcgcaatttggcacagaagctcgtgagcacaccggccgtcgatgtcaccgaaagcgacaaggcctatgagatcacggccgaattgcccggaatggacgagaaggacatcgaggtgaacgtcgccaatgacgggctcaccatcaagggcgagaagaaattcgagagggaggagaagcagaaggactattacgtctccgagcgacgctatggttcctttgaacgccacttcggcctccccaaggatgtcgaagccgacaagatcgaagcgtcgttcagaaacggcgtgcttaaagtgacgctgccgaagacggcggaagcgcagaagcccgccaagaagatcgaggtcaaggcggcctga

SEQ ID NO: 122971 - protein, 175 aa, Bradyrhizobium japonicum USDA 110
MANETKLPVTKKTNEPAFGGETWRPFEALRKEVDRLFEDFGTDDFWRRPFRSLAGFERNLAQKLVSTPAVDVTESDKAYEITAELPGMDEKDIEVNVANDGLTIKGEKKFEREEKQKDYYVSERRYGSFERHFGLPKDVEADKIEASFRNGVLKVTLPKTAEAQKPAKKIEVKAA

SEQ ID NO: 122972 - DNA, 456 bp, Rhodopirellula baltica SH 1
  CDS (1)..(456): transl_table=11
ttgcacattcgtgtagacggaggatcaaaaatgttagcgactcgttgggaaccctggaacgaattgagccaactttcgcgtgagatggatcgtttgttctctcgcggtggttcatcccccacatccgttgtgacctttcccgcgctgaatgtttgggaagacgagggcacggtttacgtcgaggccgagttgcccggattcaactccgagcagttggagatttatgtcgatgcgaatcagctcactctcaaaggcgagcgatccgctccggaaatggaaggcgggacttggcatcgtcaggagcgtggtttcggaagcttccatcgaacgatggagttgcctgctgacgtggacgccgaccaagtctcggcggaatttcagcacggcattctgaagatcacgttgccaaagagcgaaaccgccaaaccacgtcgaattgaagttcggtcgaactga

SEQ ID NO: 122973 - protein, 151 aa, Rhodopirellula baltica SH 1
MHIRVDGGSKMLATRWEPWNELSQLSREMDRLFSRGGSSPTSVVTFPALNVWEDEGTVYVEAELPGFNSEQLEIYVDANQLTLKGERSAPEMEGGTWHRQERGFGSFHRTMELPADVDADQVSAEFQHGILKITLPKSETAKPRRIEVRSN

SEQ ID NO: 122974 - DNA, 501 bp, Rhodopseudomonas palustris CGA009
  CDS (1)..(501): transl_table=11
atgaacatgcgcgacatcatcccctggggccggaccaatcaacccgcaacccgctcgttcgagggcgacccgttcctgtcgctgcaccgcgagatgaatcggctgttcgacgacgtatttcgaggcttcgatctgccggcccgtgccggcactctggcgccgttcagcaccggctggccgaagctcgaaatcaccgatggcgacaaggaactgaaaatcgccgccgcagtgccgggcctcgaagagaaggacatcgaggtcctgctcgacgacggtacactgacgatccgtggcgagaagacgtcgtcgaccgaagccaaggacaagcagttcagcgagcacttctacggcaagttcgaacgccggattccgctggatgtcgcggtcgcggccgatcaggtcagtgccagcttcaagaacggcgtcctgacggtcacgctgccgaaggcggaaccgtcaccctcgacggcgaaacgcatcgagatccagaagacgaactaa

SEQ ID NO: 122975 - protein, 166 aa, Rhodopseudomonas palustris CGA009
MNMRDIIPWGRTNQPATRSFEGDPFLSLHREMNRLFDDVFRGFDLPARAGTLAPFSTGWPKLEITDGDKELKIAAAVPGLEEKDIEVLLDDGTLTIRGEKTSSTEAKDKQFSEHFYGKFERRIPLDVAVAADQVSASFKNGVLTVTLPKAEPSPSTAKRIEIQKTN

SEQ ID NO: 122976 - DNA, 444 bp, Geobacter sulfurreducens PCA
  CDS (1)..(444): transl_table=11
atggcaatcgtcaagtacagcccgtttcgcgacatgatgaatatgcaggagcagatgaaccggcttctggatctggcctggagcaagcagggcggggaagagttgcgggaaggggcctggcagccccccgtggacatcttcgaggatgaaaacgcggtgatcatcaaggccgagctgcccggcatcgaccagaaggacatcgaggtgcggatcgaggacaacaccctcaccatccggggcgaacgcaagcacgaggaagaggtccgcaaggagaactaccatcgggtggaacgctactacggcagcttccagcggagcttctcgatccccgccaccatcgaccaggagaaggtcagggccagctccgacaaaggggtcctcaccatcacccttcccaagcgggaggaggtgaagcccaagcagattacggttgaagtgacctga

SEQ ID NO: 122977 - protein, 147 aa, Geobacter sulfurreducens PCA
MAIVKYSPFRDMMNMQEQMNRLLDLAWSKQGGEELREGAWQPPVDIFEDENAVIIKAELPGIDQKDIEVRIEDNTLTIRGERKHEEEVRKENYHRVERYYGSFQRSFSIPATIDQEKVRASSDKGVLTITLPKREEVKPKQITVEVT

SEQ ID NO: 122978 - DNA, 522 bp, Bradyrhizobium sp. ORS278
  CDS (1)..(522): transl_table=11
atggctgaaccgaccaagctgcctgtcaacaccgagaaagccaatgccccgtctctgcagggatggcggccgttcgacaatctgcgtcgcgagatcgatcgtgtgttcgaggacttccacggcggtctctttcggacaccgtcgctgttcgatcagctgccgggccttgcgcgcgcgcgatcgttcgccctggcgcccgcggtcgatgtcgccgagcacgacaaggcctatgaggtcaccgcggagctgcccgggctcgacgagaagaacgtcgaggtgaaggtcgcgagcggcgtgctgtcgatcaagggcgagaagcaggaggacaaggaggagacgaagaaggactattatgtccgcgagcgcagcttcggctcgttcgaacgctccttccagatcccggacggtgtcgatagcgacaagatcgaggcggtgttcaagcagggcgtgctgaaggtgaccctgccgaagaaacccgaggtgcagaaggccgccaagaccatcgacatcaaggcggcgtga

SEQ ID NO: 122979 - protein, 173 aa, Bradyrhizobium sp. ORS278
MAEPTKLPVNTEKANAPSLQGWRPFDNLRREIDRVFEDFHGGLFRTPSLFDQLPGLARARSFALAPAVDVAEHDKAYEVTAELPGLDEKNVEVKVASGVLSIKGEKQEDKEETKKDYYVRERSFGSFERSFQIPDGVDSDKIEAVFKQGVLKVTLPKKPEVQKAAKTIDIKAA

SEQ ID NO: 122980 - DNA, 465 bp, Thermus thermophilus HB27
  CDS (1)..(465): transl_table=11
atgaccctggtgcggagggacgctcgccccatggagctcacgcccttccggacctggagccccttcaccctggtggacgaggtcaaccgcctctttgaggaggccttctccgacctcgtccggcctgccgcggcctacgtggccccggccgacctctacgagacggacgaggccctgatcctggagatggccgtgcccgggatgacccctgaggacctggaggtgagcctcgagggcaacaagctcaccatccggggccaggtgaagcccgtggccgacgagcgggtgcggcggtactacctccaggagatggcccacggctccttcgtccgcaccttcaccctgccggtggaggtggacgcctccggggtgaaggcggagttccggaacgggatcctccggctcaccctgcccaaggtggccgaggcgcgcgccaggcggatccccattgaggtggtccagtaa

SEQ ID NO: 122981 - protein, 154 aa, Thermus thermophilus HB27
MTLVRRDARPMELTPFRTWSPFTLVDEVNRLFEEAFSDLVRPAAAYVAPADLYETDEALILEMAVPGMTPEDLEVSLEGNKLTIRGQVKPVADERVRRYYLQEMAHGSFVRTFTLPVEVDASGVKAEFRNGILRLTLPKVAEARARRIPIEVVQ

SEQ ID NO: 122982 - DNA, 471 bp, Desulfotalea psychrophila LSv54
  CDS (1)..(471): transl_table=11
atgactatatttccgcggagtaggaggaacattatgtcgcttgtgaaatggaatccttggcgagagattgaagatgtttttgaccgcaatattaagagagtgccgtccaggctaagtgatctgggatttgctacaagcgaagactggactcccaaggtggacatcagtgagaccgataaagagtttattatcaaggcagagcttcctgaggtaaaacgggaagatgttaaggtgacggtagataagggtgttcttacaatttgtggagagagaaagcaggaaagagaagaagagggcaagacgttccatcgagttgagagatattacggtagttttacccggagcttcaccctgcctgaaaatgtcgatgagtctaaggttgatgccagctataaggacgggatgctcaatttgaaaattgaaaaaactgaagaggcaaaaccgacaagtattgaggtggagattaagtag

SEQ ID NO: 122983 - protein, 156 aa, Desulfotalea psychrophila LSv54
MTIFPRSRRNIMSLVKWNPWREIEDVFDRNIKRVPSRLSDLGFATSEDWTPKVDISETDKEFIIKAELPEVKREDVKVTVDKGVLTICGERKQEREEEGKTFHRVERYYGSFTRSFTLPENVDESKVDASYKDGMLNLKIEKTEEAKPTSIEVEIK

SEQ ID NO: 122984 - DNA, 567 bp, Legionella pneumophila subsp. pneumophila str. Philadelphia 1
  CDS (1)..(567): transl_table=11
atggaggttacgactatggacattaaaaaacttgctccctggaattggtttaaagaggaagaagctcaaaataagagcgtaccgcttagtaccactggacaaagctgcatttctcctctgagccaactgcatcaagaaatagatagaatatttgataatgtcttaagaagcgttgggatttctaatctggatatagaaaaaacaccctctaactcagcccaaaatctgttgcttaaaccctgtatcgatattgcagcaactgataaggaatataccatcacagtagaagtgcctggcgtggaagaagatcatattaagttggaattaagcgataacacattgatcatcaagggcgaaaaaaaacatgagtcagaaaaaaaagacaaagacatctatagaatcgaacgcgcttatggctcatttcaacgcgtgttatcacttccagaagacgctaatcaagaagacatcaaagctcagataaaaaatggggttctcaccattacaatgccacgtaaggaggtatccaaacccaaaggtaaattaatagacattaaaaaagcaagctga

SEQ ID NO: 122985 - protein, 188 aa, Legionella pneumophila subsp. pneumophila str. Philadelphia 1
MEVTTMDIKKLAPWNWFKEEEAQNKSVPLSTTGQSCISPLSQLHQEIDRIFDNVLRSVGISNLDIEKTPSNSAQNLLLKPCIDIAATDKEYTITVEVPGVEEDHIKLELSDNTLIIKGEKKHESEKKDKDIYRIERAYGSFQRVLSLPEDANQEDIKAQIKNGVLTITMPRKEVSKPKGKLIDIKKAS

SEQ ID NO: 122986 - DNA, 495 bp, Legionella pneumophila subsp. pneumophila str. Philadelphia 1
  CDS (1)..(495): transl_table=11
atgggcagcttaagaaaacatcaaccaggtaaaacaactgatcttctgatgagtccgtttttaagacttcagcaagaggtcaatcatgctatgagtgatttttataatttatttgaccctcaaagaagtgccaatcttgagcaattcgagcatatttctcttactccgtctttggatatcgttgaagataaagataatttcaaaattgaagtagaaatgcctggtatgggtgaagaagatattaaagtatctttttgtgaaaacagattaaccattgaaggagagaaaaccacttctaaaaaagatgaaaataaaaattatatcagtcgtgaaattagttatgggcgatatgaacgcaccatttccttacctctatctgcggatgtggataaagcgactgcctcttttaaaaagggtatgttatggatcacaatacctaaaaaaactgaagccaaggaaaatgtaaaaacaattaaaattgaaaaagcaaaataa

SEQ ID NO: 122987 - protein, 164 aa, Legionella pneumophila subsp. pneumophila str. Philadelphia 1
MGSLRKHQPGKTTDLLMSPFLRLQQEVNHAMSDFYNLFDPQRSANLEQFEHISLTPSLDIVEDKDNFKIEVEMPGMGEEDIKVSFCENRLTIEGEKTTSKKDENKNYISREISYGRYERTISLPLSADVDKATASFKKGMLWITIPKKTEAKENVKTIKIEKAK

SEQ ID NO: 122988 - DNA, 450 bp, Methylococcus capsulatus str. Bath
  CDS (1)..(450): transl_table=11
atgtacgaatccttgttacggtttccaaccgatctcttttcagaattcgaccggatgcaacaggagatggaacggatgttcggggcattgggcatgcccaccagcatccgcgcggtggcgcgaggctttcccgccgtcaacatcggcaccacgcccaagtccatcgaggtttacgctttcgcgccgggcatcgatgcttcccgactggaagtcagtgtggaccgcggactgctgaccatcgcaggagaacggccgagcgaattgtccgaagtggctgaaaaggtgagtgtctacgccgatgagcgtttttccggcagtttcaagcgagtggtgagtctgccggaagacgtggacccctcgggcatccaggcccgttaccgggacggggtgctgcgtatatcggtgcctcgcagcgaagccgcacaacccaagcgtatcgaaatcaaatga

SEQ ID NO: 122989 - protein, 149 aa, Methylococcus capsulatus str. Bath
MYESLLRFPTDLFSEFDRMQQEMERMFGALGMPTSIRAVARGFPAVNIGTTPKSIEVYAFAPGIDASRLEVSVDRGLLTIAGERPSELSEVAEKVSVYADERFSGSFKRVVSLPEDVDPSGIQARYRDGVLRISVPRSEAAQPKRIEIK

SEQ ID NO: 122990 - DNA, 507 bp, Azoarcus sp. EbN1
  CDS (1)..(507): transl_table=11
atgaacaggatgactgagctgaaacacggtctcgaagaggcctggcattcggtcgccgaggggtggcggcagctgcgtgaccgggccaccggcgcgctgacccacttcagcccggggaagtcgccgtcggtccgcgatacgggcacgtccgaagggggacagtttccggcagcgacatgggcgttgctcgccggcgacgtcctggaggacgacgacaaggtcgtcgtgcgcctcgaagccccggggctcgagaaagaggacttcgacctcgaagtccgcagcgacgtgctgatcgtgcgcggcgaaaagcgctacgaccgcgaaacgacgcaagggcgttatcgcgtgcggcaatgcgcgtacggcagcttccatcgcgcgatcccgctgccggtgccggtcgaagcggacaaggcggcagcgagctaccgcaacggcgtgctgcggatcgagctgcccaaatccgaacacgcgcgggcgcggcgcatcgagatccgcagcgcgtga

SEQ ID NO: 122991 - protein, 168 aa, Azoarcus sp. EbN1
MNRMTELKHGLEEAWHSVAEGWRQLRDRATGALTHFSPGKSPSVRDTGTSEGGQFPAATWALLAGDVLEDDDKVVVRLEAPGLEKEDFDLEVRSDVLIVRGEKRYDRETTQGRYRVRQCAYGSFHRAIPLPVPVEADKAAASYRNGVLRIELPKSEHARARRIEIRSA

SEQ ID NO: 122992 - DNA, 444 bp, Geobacter metallireducens GS-15
  CDS (1)..(444): transl_table=11
atggcaatcgtcaagtacaccccgtttggggacctcaggaatctgcaggagcagatgaaccggcttctggacatggcgtggagcagggagagcggcgaagaactccgcgaaggggtatggcagccgccggtggacatcttcgaggatgaaaacggcgtcgtcatcaaggccgaactccccggcatcgaccagaaggacatcgaggtaaaaatcgaggacaacaccctcaccatccggggcgagcgcaagcacgaccaggaagtgaagaaggagaactaccatcgggttgagcggtactacggctccttcatgcggagcttctcgctccccaccaccatcgaccgcgataccgtcaaggcggtctgcgacaagggaatcctgactataacccttccccggcgcgaggaaaccaagccgaagcagatcaacgtggaagtgaaataa

SEQ ID NO: 122993 - protein, 147 aa, Geobacter metallireducens GS-15
MAIVKYTPFGDLRNLQEQMNRLLDMAWSRESGEELREGVWQPPVDIFEDENGVVIKAELPGIDQKDIEVKIEDNTLTIRGERKHDQEVKKENYHRVERYYGSFMRSFSLPTTIDRDTVKAVCDKGILTITLPRREETKPKQINVEVK

SEQ ID NO: 122994 - DNA, 570 bp, Desulfovibrio desulfuricans G20
  CDS (1)..(570): transl_table=11
atgatggtttctaagctgaatccatggaactggtttaagaaggaaagcgaacaggaaaagacccttccggttaagcagacggaacggggagcaagggaatacgcttctccgcttgaccacttccacgcagaattcgaccgtatggttgattcgatgttctctggctttggaatgccttcgcctcgccgcttgttcgacgccgccagcccgatgcttggcaagtctgtcatcaagccgaaagtcgatatttacggcactgacaaagagtatgttgttgaagtggatcttcccggcatcgaagagaaagacctgtctgttgaactgaaagacgacgtgctgattctctctgcggaaaagaagcatgaagagaaaacagaagaaaagggctactaccgcgttgaacgctcttacggttccttccgccgggtgctcaatgtccctgatgatgcggacaaggaaggcataaacgccaagttgaacaagggcgtgttgcgaatcaccatgccgcgaaacaaggccattgaaacagaatcccgcaagattgcgattgaaagttcgaaagaggactaa

SEQ ID NO: 122995 - protein, 189 aa, Desulfovibrio desulfuricans G20
MMVSKLNPWNWFKKESEQEKTLPVKQTERGAREYASPLDHFHAEFDRMVDSMFSGFGMPSPRRLFDAASPMLGKSVIKPKVDIYGTDKEYVVEVDLPGIEEKDLSVELKDDVLILSAEKKHEEKTEEKGYYRVERSYGSFRRVLNVPDDADKEGINAKLNKGVLRITMPRNKAIETESRKIAIESSKED

SEQ ID NO: 122996 - DNA, 570 bp, Desulfovibrio desulfuricans G20
  CDS (1)..(570): transl_table=11
atggacattgatttcaagaaattggctccctggaactggttcaagaaggagcaggaagaacaacagagcactgcctcgctgccgatgcagcgcaatgacctgccggtggcgggtgggcccgtcagtcccatcctgcaattgcatcgcgagatcgaccgcctctttgacgatgcatttcgaggcttcggctttccggcgctggccatgccgcgatggccgtcggactggccgggcctgctgaagccggcacttgacatccaggaaaccgacaagctgtataagatttctttggaggttcccggcgtcgaggaaaaggatatccagatcacgctcgacaacgacgtgctgctggtgcgcggtgaaaagcgtcaggagcaggaaacgaaagacggcggtttccaccgggtggagcgctcctacggcagctttcagcgcgctctgaacctgccggccgatgccaaccaagacacgatcaaggccgctttcaagaacggcgtgctcacgatcacgatggaaaagcgcgaggcctgcgcgcccaagcagggccgctcgatccccatcaacggctga

SEQ ID NO: 122997 - protein, 189 aa, Desulfovibrio desulfuricans G20
MDIDFKKLAPWNWFKKEQEEQQSTASLPMQRNDLPVAGGPVSPILQLHREIDRLFDDAFRGFGFPALAMPRWPSDWPGLLKPALDIQETDKLYKISLEVPGVEEKDIQITLDNDVLLVRGEKRQEQETKDGGFHRVERSYGSFQRALNLPADANQDTIKAAFKNGVLTITMEKREACAPKQGRSIPING

SEQ ID NO: 122998 - DNA, 543 bp, Burkholderia thailandensis E264
  CDS (1)..(543): transl_table=11
atgagcgagccaaccaccaagctgccggtcaagaaaccgcaggccggcgcggagccttcgtcgaccgcgccgttctggcacccaatcgagacgctgcggcgcgagatcgatcgcctgctcgacgatttcgatcacggcgtgcgcttgtcgtcgatgcgccggtcgatcttcgacatcgagccgttctggcgccgcgaacgtgaatggacggccgagcccgcggtcgatttcaccgaaaccgacaagtcctacgaaatcaccgcggaattgccggggctgagcgaaaaggatgtcgaggtcaagctcgcgaacggcggcctgtcgatccgcggcgagaaacatgaagagaaggaggaaaagcacaaggactactacgttcacgagcgccggttcggcgctttcgagcgaagcttccggatgccggacggcgtcgaccgcgacaagatcgaggcgtcgttcgacaagggcgtgctgaaggtgacgctgccgaagacgccggaagcgtccaaggccgagaaaaagatcgaagtcaaggcgggctga

SEQ ID NO: 122999 - protein, 180 aa, Burkholderia thailandensis E264
MSEPTTKLPVKKPQAGAEPSSTAPFWHPIETLRREIDRLLDDFDHGVRLSSMRRSIFDIEPFWRREREWTAEPAVDFTETDKSYEITAELPGLSEKDVEVKLANGGLSIRGEKHEEKEEKHKDYYVHERRFGAFERSFRMPDGVDRDKIEASFDKGVLKVTLPKTPEASKAEKKIEVKAG

SEQ ID NO: 123000 - DNA, 507 bp, Syntrophus aciditrophicus SB
  CDS (1)..(507): transl_table=11
atggcaatgaaaagtcttttgccctcgctctggaagaagggggaaacaccttcaaagcgagaagaggagcatcccttttactctctgcagagggaaatgaaccggctttttgatgatttcttccgtggctttgacctcgagccttttgcgacgatggaagatcgatatgccggttttaccccttccatcgatgtgcgggaaaatgatgacgccttaaccatcaaggccgaaattcccggaatcgatgaaaaagatgtggaagtgcttgtttccgatgacagcgttaccattaaaggggagaagaaggaggaacaggaggataaaggaaaggactattaccgcctggagaggacttacggttccttccaccgggtgattcctctgcccaagggcattaacctggaaaaggtggaggcgacctttaaaaatggtcttctttccataaaacttcccaagaccgaggaagcccagaccaaaagcaagaagatccccatctccacggaatga

SEQ ID NO: 123001 - protein, 168 aa, Syntrophus aciditrophicus SB
MAMKSLLPSLWKKGETPSKREEEHPFYSLQREMNRLFDDFFRGFDLEPFATMEDRYAGFTPSIDVRENDDALTIKAEIPGIDEKDVEVLVSDDSVTIKGEKKEEQEDKGKDYYRLERTYGSFHRVIPLPKGINLEKVEATFKNGLLSIKLPKTEEAQTKSKKIPISTE

SEQ ID NO: 123002 - DNA, 492 bp, Syntrophus aciditrophicus SB
  CDS (1)..(492): transl_table=11
atgattagaaacctgttgcccaccgtatggcggagaagcgaaacgcccctgcgacgcgcagaggaaagccccttcttggccctgcatcgggaaatgaaccggatgttcgacgacttttcccgaggctttgacttgtcgccctttgatggcggatggagttggggcttttcgcccccggtcgacgttcgggaggacgaaaaagaggtcaccgtgaaggccgagctgccgggcatggaggagaaggacattgaggtgaatcttgccgacaatggcctcacgatcaagggggagaagaaggccgagaaggaagagaaggggaaggacaattggtatcgggagacgagctacggtgccttccataggttcatcccgcttcccgaaggactcgacaaggagaaagttgatgctcgcttcaagaacggcgtcttgaccgttacccttcgccggttggaagaggccaaggggaagaagatcgctatcaaagcggaatag

SEQ ID NO: 123003 - protein, 163 aa, Syntrophus aciditrophicus SB
MIRNLLPTVWRRSETPLRRAEESPFLALHREMNRMFDDFSRGFDLSPFDGGWSWGFSPPVDVREDEKEVTVKAELPGMEEKDIEVNLADNGLTIKGEKKAEKEEKGKDNWYRETSYGAFHRFIPLPEGLDKEKVDARFKNGVLTVTLRRLEEAKGKKIAIKAE

SEQ ID NO: 123004 - DNA, 588 bp, Frankia sp. CcI3
  CDS (1)..(588): transl_table=11
gtgagcacctacctgtgggacccgtttgcctcgctggggcgtatggaccgggagttcgacgagatcgttcggcgtgtctggggcccgcggcgtccggtgcttaccggacggtcgtcggtcaccgagttcgccgtcccgtcggctgatgtggttactgagggagcggatgtactgatcaacctcgagctgcccggggtcgatgtcgagcgggacgtcgcggtcgagatcgaccggggccgcctggtcgtccgcgggaagcgtgcggccggcagcgagagtgagcacgccggtcgcgtacaccgcgagcgctggcacggttccttccgccgggagttcaggcttcccgagggcgtggaggcgcagcggatctcggccacttacgaccggggcatcctgacggtccgtctcgtcggcgcggcggcggagcccaaggcgacccggatcgagatcaccccagtcgtcggcgacgcccggccggccgaggtcgtcgaggggggctccccggggctgccggcggaatcagcggagtccgcgacgccgcggtccgccgagccggccacgccggccgcagccggttccaccgcctga

SEQ ID NO: 123005 - protein, 195 aa, Frankia sp. CcI3
MSTYLWDPFASLGRMDREFDEIVRRVWGPRRPVLTGRSSVTEFAVPSADVVTEGADVLINLELPGVDVERDVAVEIDRGRLVVRGKRAAGSESEHAGRVHRERWHGSFRREFRLPEGVEAQRISATYDRGILTVRLVGAAAEPKATRIEITPVVGDARPAEVVEGGSPGLPAESAESATPRSAEPATPAAAGSTA

SEQ ID NO: 123006 - DNA, 510 bp, Frankia sp. CcI3
  CDS (1)..(510): transl_table=11
atgacactacccgtacgacgcggagaaggcctgggaacgctggcacggtgggatccgttccgggagatcgaggacgcctggacccgcatgggcaatctgctcggcgacgtcataggcggcgtcgagggccgtccggcgcggttgctgggcggcatggtgcagccggtcgacattgaggagaccgaggacgcgttcgtgatcgatctcgatcttcccggggtgcgccgggaggacatctccgtggacctgcgtgacaacgagctgttcgtcaccggtgaaatcaaggagcgggaacgcacgggagtactgcgccgccgtagccgcccggtgggccggttcgagcaccgcatcgccgtgccgggtgacattgatccggaatcggtgcacgccaccctggccgacggagtactcaccatccggctggcgaaggccaagcggagccagcccaagcacatcgagatcagcaccggccccgagggccaaggcaccggccccgagggccaaagctga

SEQ ID NO: 123007 - protein, 169 aa, Frankia sp. CcI3
MTLPVRRGEGLGTLARWDPFREIEDAWTRMGNLLGDVIGGVEGRPARLLGGMVQPVDIEETEDAFVIDLDLPGVRREDISVDLRDNELFVTGEIKERERTGVLRRRSRPVGRFEHRIAVPGDIDPESVHATLADGVLTIRLAKAKRSQPKHIEISTGPEGQGTGPEGQS

SEQ ID NO: 123008 - DNA, 594 bp, Saccharophagus degradans 2-40
  CDS (1)..(594): transl_table=11
atgaacttacaaactcttaacccttggaattggtttaaacacgaagaggcggcaaaacaacacgctgcagcaccagctatacacagtgcggaaaacagcgagacaagcgcgccgcaattgaatagtttaatccaattgcatcaacaaatggataagctgtttgacgatgtatttagttcattcggttttccgtcgttgggcgcgcgcttcgcagatgcgaatttacttactaaccgcgctaatagtttgcttggcggttaccgccccactgtggatgtgagtggcgataaaactcactaccatattagtttggatgtgcccggcctgagcgaatcggatatatcgatagatgtaagtaacgatgtattgactattcgcggtagtaaagaggaaaaggctgagcaaaacgagaagcatgtatatcgtatggaacgtcgctatggttcttttcagcgtactctttcgctgcctagtgatgccaacacagacgatataaccgcccagttaaaagatggtgtattaaatttggttatcgccaaaaaagacgtgccaccggaagacgtgaaacgtattccaattaatagtgtgcactaa

SEQ ID NO: 123009 - protein, 197 aa, Saccharophagus degradans 2-40
MNLQTLNPWNWFKHEEAAKQHAAAPAIHSAENSETSAPQLNSLIQLHQQMDKLFDDVFSSFGFPSLGARFADANLLTNRANSLLGGYRPTVDVSGDKTHYHISLDVPGLSESDISIDVSNDVLTIRGSKEEKAEQNEKHVYRMERRYGSFQRTLSLPSDANTDDITAQLKDGVLNLVIAKKDVPPEDVKRIPINSVH

SEQ ID NO: 123010 - DNA, 570 bp, Methylobacillus flagellatus KT
  CDS (1)..(570): transl_table=11
atggacattgatttcaagaaattggctccctggaactggttcaaaaaggagcaggaagaacaacagagcactgtctcgctgccggtgcagcgcaatgacctgccggtggcgggtgggcccgtcagtcccatcctgcaattgcatcgcgagatcgatcgcctgttcgacgacgcgtttcgaggcttcggtttcccgacgctggccatgccacgctggccgtcggagtggccgggcctgctgaaaccggcgctggacatccaggaaaccgacaagcagtacaagatttctttggaggttcccggcgtagaggaaaaggacatccagatcacgctcgacaacgacgtgctgctggtgcgcggtgaaaagcgtcaggagcaggaaagcaaagacggtggtttccaccgggtggagcgctcctacggcagctttcagcgcgctctgaacctgccggccgatgccaaccaggacacgatcaaggccgctttcaagaacggcgtgctcacgatcacgatggaaaagcgcgaggccagtacgcccaagcaggggcgctcgatcccgatcaacggctga

SEQ ID NO: 123011 - protein, 189 aa, Methylobacillus flagellatus KT
MDIDFKKLAPWNWFKKEQEEQQSTVSLPVQRNDLPVAGGPVSPILQLHREIDRLFDDAFRGFGFPTLAMPRWPSEWPGLLKPALDIQETDKQYKISLEVPGVEEKDIQITLDNDVLLVRGEKRQEQESKDGGFHRVERSYGSFQRALNLPADANQDTIKAAFKNGVLTITMEKREASTPKQGRSIPING

SEQ ID NO: 123012 - DNA, 564 bp, Burkholderia xenovorans LB400
  CDS (1)..(564): transl_table=11
atgaacaccgacctgaaaaagtggaaccctttcaaatttcttcgtggatcagcgcgcaagtccgacacggacaacccgcaaagtcagccagccagcgaacagtggcgtgccgcgtggcctgacattcctcgacttttctcgcgcgattcctggcgtgcgatggaggacttcgttcacgatccgtttgcagcgcgcggagcgctcgaacgatggtttggtgacttcagttcctcgcgtttccagccgcgcatcgacgtggtcgacgaagggaagatactgcgcgtgaccatcgaactgccaggtatggagcgggaggatctgagcgttagcgtcgaggacggagcactggtgttgcgcggtgagaaaaagcaggacgtgcacagtgaggaagacggctgctatcggcttgagcgcgcatatggggtcttcacgcgtacgatcccgatgccggacaacgctgatccggaccacgctctcgcaaagtttgacaagggcgtgcttacgttgacggtgccaaaacgggagcagttgcgatccgcgagccgcacgattgatatcggctag

SEQ ID NO: 123013 - protein, 187 aa, Burkholderia xenovorans LB400
MNTDLKKWNPFKFLRGSARKSDTDNPQSQPASEQWRAAWPDIPRLFSRDSWRAMEDFVHDPFAARGALERWFGDFSSSRFQPRIDVVDEGKILRVTIELPGMEREDLSVSVEDGALVLRGEKKQDVHSEEDGCYRLERAYGVFTRTIPMPDNADPDHALAKFDKGVLTLTVPKREQLRSASRTIDIG

SEQ ID NO: 123014 - DNA, 438 bp, Burkholderia xenovorans LB400
  CDS (1)..(438): transl_table=11
atgagtgatctctacttcgggaacgatctcttcagcgagttcgaccgccttcagcggcagatcgacgaactcttcggggacttcccgtccagcatccgctccgtcaggcgtggtgcgttcccgcaggtcaacatcggcgccaccgacgacaccatcgagatcgtcgcattcgcaccaggcatgacggccgctgacctcgaggtttcgatcgacaagggcttgctgacgatcagcggcgaacgcaaacccccggtgtccgacgacatcgaccggaagatctacgctcaggagcgcttcgctggcgcgttccggcgggtcatcgaactccctcagaacgtgaatcctgacaaggtgcaggcgcggtatgtcgacggctgtctgtgtgtgacggtcggcaagcgtgagtcgtccacgccccggtcgattacggtccaatga

SEQ ID NO: 123015 - protein, 145 aa, Burkholderia xenovorans LB400
MSDLYFGNDLFSEFDRLQRQIDELFGDFPSSIRSVRRGAFPQVNIGATDDTIEIVAFAPGMTAADLEVSIDKGLLTISGERKPPVSDDIDRKIYAQERFAGAFRRVIELPQNVNPDKVQARYVDGCLCVTVGKRESSTPRSITVQ

SEQ ID NO: 123016 - DNA, 558 bp, Burkholderia xenovorans LB400
  CDS (1)..(558): transl_table=11
atgaacattgagctgagtaaatggaatccgttcaaattcctgcgcaaagcgcaaaacgggcgcgagaaaccttcgtcgaatccacccacaacgaagaactggctgaccgagtggcccgacgcctcccggctcttttcgtcggacccgtggcgggtgatgcgcgagttgctgcacgatccattcgcaggaggcgcgcttgagcgatggttcggcgacttcagttcgtcgtggttccagccacgcatcgatgtcgtcgacgacggcgatgtgctgcgcattaccgccgagttaccgggaatggatcgcggagatctgcagacatcgatcgaagagggcgtattggtgctgcgtggcgagaagaaacaggacacgagaagcgaggaaaacggctgctaccggctggaacggtcgtatggtgccttcactcgcacgattccgctgcccgatggggtggacgtcgacaaggtagatgcgaagttcgacaagggcgtcctgacggtgcgtttgccgaagacggattctgcgcgccccacgatcaggaaggttgagatcaaatga

SEQ ID NO: 123017 - protein, 185 aa, Burkholderia xenovorans LB400
MNIELSKWNPFKFLRKAQNGREKPSSNPPTTKNWLTEWPDASRLFSSDPWRVMRELLHDPFAGGALERWFGDFSSSWFQPRIDVVDDGDVLRITAELPGMDRGDLQTSIEEGVLVLRGEKKQDTRSEENGCYRLERSYGAFTRTIPLPDGVDVDKVDAKFDKGVLTVRLPKTDSARPTIRKVEIK

SEQ ID NO: 123018 - DNA, 462 bp, Methanococcoides burtonii DSM 6242
  CDS (1)..(462): transl_table=11
atgaaatttggattagtacgtaggggttcctctgatgtttcacgctgggatccgtttgatgagatcaggcagactcaggaacacctcaatcagttattaagggaagtctctcctttcgggggattgttcgaaggtaaatcaagggcacctttgatggacatcaaggaagaggataataacgttatcgttacgactgatcttcctggaattgataaagaggatgttgagatcagtgtgaataataatattcttgagatccatgcagagttcaagaaggaaagtgagtctgaaaaggaaggttacgtacaaaaagagcgcacctatagtagcttctcaagatctgctgttcttccctccgtggtttcggatgaaggtgtaaaagcaaagttggaagccggtgtattgaccataacgcttccaaagacaaaagctgaagaaaaaacaaagatcaagatcgagtga

SEQ ID NO: 123019 - protein, 153 aa, Methanococcoides burtonii DSM 6242
MKFGLVRRGSSDVSRWDPFDEIRQTQEHLNQLLREVSPFGGLFEGKSRAPLMDIKEEDNNVIVTTDLPGIDKEDVEISVNNNILEIHAEFKKESESEKEGYVQKERTYSSFSRSAVLPSVVSDEGVKAKLEAGVLTITLPKTKAEEKTKIKIE

SEQ ID NO: 123020 - DNA, 444 bp, Myxococcus xanthus DK 1622
  CDS (1)..(444): transl_table=11
atgcagactcgcaatccgttcaactccgccgtcgtggtgaacccgctgatgcgcgatgtcgacgcgctcttccgcgagctgacgcagcccatgtggcgccaggccccgcgtgagcgcacgccggccgcggacatcaccgaatccgagagcggcctcaccctccatctggacatgcccgggctggaagcgaaggccatccaggtgacggtggagaaggacatcctcaccgtgcagtccgagcgcaaggccgagccgcgtgcggagggcgtcaacgtgcgccgccaggaacgcgccttcgggacgttcgcccgctccttcgcgctgcctgacacggtggacgcaagccgggtggaggctcgctacgagcagggtgtgctgacgctgaccctgcctcggcgcgaggagtccaagccccgcgtcatcgaagtcaaggtccagggctga

SEQ ID NO: 123021 - protein, 147 aa, Myxococcus xanthus DK 1622
MQTRNPFNSAVVVNPLMRDVDALFRELTQPMWRQAPRERTPAADITESESGLTLHLDMPGLEAKAIQVTVEKDILTVQSERKAEPRAEGVNVRRQERAFGTFARSFALPDTVDASRVEARYEQGVLTLTLPRREESKPRVIEVKVQG

SEQ ID NO: 123022 - DNA, 489 bp, Myxococcus xanthus DK 1622
  CDS (1)..(489): transl_table=11
atggcggacctacctgcccgcagaggcggaagcatgctgggagccccacgcggctgggaccccttcgagcgcatgcaggagctcttgggattcgacctcggccggatgctcggcccccagggcacacgggaaggcggcttcgtgcccgacttcgaggtgaaggagacccaggatgccttcatcttcaaggccgatgtccccggcgtggaggagaaggacctggaaatcaccctcgcggagaaccggctgaccatcagcggcaagcgggaagaagagcgccgcgacgaaggcgaccgctactacgcctacgagcgcaactatggctcgttcagccgcaccttcacgctcccccggggtgtgaatgccgacaacgtccaggcggacttcaagagtggcgtcctcaacgtgcgcatccccaagaagtccgaggagcagcccaagcgcatcaaggtcggcggtagcgaacgcagtgagaaggcgaaagcctga

SEQ ID NO: 123023 - protein, 162 aa, Myxococcus xanthus DK 1622
MADLPARRGGSMLGAPRGWDPFERMQELLGFDLGRMLGPQGTREGGFVPDFEVKETQDAFIFKADVPGVEEKDLEITLAENRLTISGKREEERRDEGDRYYAYERNYGSFSRTFTLPRGVNADNVQADFKSGVLNVRIPKKSEEQPKRIKVGGSERSEKAKA

SEQ ID NO: 123024 - DNA, 462 bp, Rubrobacter xylanophilus DSM 9941
  CDS (1)..(462): transl_table=11
atgctgagcccgttcagaggcttctgggatgtccgcagcgagctggaccggatgttcgatgatgtggtgcgggatgcgttccggctgtggcgcggcgaggggcgcgcggcgaggacggccgagtgggctcctgcgatagacgtctacagcaaggacggcgacctggtgataaaggccgagcttcccgggatgaagccggaggacgtggacataaccctgcaggagggggttctgaccatctctggggagcgcaaggccgaggaggagcgcgagggcgccggctactttgtgagggagcggcgctacggctcgttccgcaggagcatgcgtctgcctgagggggtggacgagagcaagatccacgctcgctttgaggatggggtgcttgaggttgtggttgagggggctggtgcggtgaccgagccccgcaggatccagatagaggccccgaagggctcctag

SEQ ID NO: 123025 - protein, 153 aa, Rubrobacter xylanophilus DSM 9941
MLSPFRGFWDVRSELDRMFDDVVRDAFRLWRGEGRAARTAEWAPAIDVYSKDGDLVIKAELPGMKPEDVDITLQEGVLTISGERKAEEEREGAGYFVRERRYGSFRRSMRLPEGVDESKIHARFEDGVLEVVVEGAGAVTEPRRIQIEAPKGS

SEQ ID NO: 123026 - DNA, 435 bp, Rubrobacter xylanophilus DSM 9941
  CDS (1)..(435): transl_table=11
atgctgagcccgttcagaggattcagggacctgcagagcgagatggatcgcctgttcggagaggccttcgggcggccgccgcgggctgatgcggagggcggatggaccccggcggtagacgtgctcacccggggcgacgacctcatcatccgggccgagctgccgggggtcaggcgcgaggacgtcgaggttacggtctcgaacggcgtgctcacgctcgccggagagcgcagggaagaagaggagcgtgagcgggcggggtacctgatccgggaacgccggcagggctccttccggaggagcatgaccctgcccgaaggggtgaacgaggacgagatcaaagccaccttccgggacggcgtgctggaggtgagcgtgcctggtgcctccgctgccgtggaggcgccgccgcggaggatagagatcgaagggtag

SEQ ID NO: 123027 - protein, 144 aa, Rubrobacter xylanophilus DSM 9941
MLSPFRGFRDLQSEMDRLFGEAFGRPPRADAEGGWTPAVDVLTRGDDLIIRAELPGVRREDVEVTVSNGVLTLAGERREEEERERAGYLIRERRQGSFRRSMTLPEGVNEDEIKATFRDGVLEVSVPGASAAVEAPPRRIEIEG

SEQ ID NO: 123028 - DNA, 528 bp, Mesorhizobium sp. BNC1
  CDS (1)..(528): transl_table=11
atggccgaaactgccacaaaactgccggtgaaatccgaaaaatccgttgcgtctcctgagggatgggcgccgtttgagagcctgcggcgggagatcgatcgtctcttcgacgatttccatccattcggctggcgcctgccgtcccgtaccgccttcgaccttgagataccgaagttcagccgcgccgcctggcaggtcgcaccggcaatggatctcgtcgaaaaggagaaggaatacgaaatcacggccgagcttcccggcatcgacgagaagaacgtcgagatcaagctttccaaccacacgctgacgatcaagggcgagaagaaggaagagaaggaggaaaaggacaaggactattacctgtccgagcgccgctacggctccttccagcgctccttccgagtccccgacggagtggacgcggacaagatcgaggctaccttcaccaaaggtgtcctgactgtgaggctgccaaagacagctcaggcgcagaaggctgacaagaagatcgaagtcaaggccgcgtga

SEQ ID NO: 123029 - protein, 175 aa, Mesorhizobium sp. BNC1
MAETATKLPVKSEKSVASPEGWAPFESLRREIDRLFDDFHPFGWRLPSRTAFDLEIPKFSRAAWQVAPAMDLVEKEKEYEITAELPGIDEKNVEIKLSNHTLTIKGEKKEEKEEKDKDYYLSERRYGSFQRSFRVPDGVDADKIEATFTKGVLTVRLPKTAQAQKADKKIEVKAA

SEQ ID NO: 123030 - DNA, 453 bp, Alkalilimnicola ehrlichei MLHE-1
  CDS (1)..(453): transl_table=11
atggccatcatgcgctatgacccgtggtccaccctgcgccagatccagaccgacctggaccggatgttcggacaacgcgggatgattaccgccggcgagggcgagaatgccgagtcggccggccagtggctgccggcggtggatatctccgaggacgacaaggcgtaccacatccatgccgatctgcccggggtggccccggaggatatcgagatcagcatggatcagggggtgctttccattaagggctcccgcgagtccgagagcaccgagagcgaagaggggtggaaacgtgtcgagcgggcccgcggcaccttctaccgccggttcgcactccccgagtcggtggacgcggacaacatcgcggcgcgctcgcgcaacggggtgctggagatcaccgtccccaagaaggtggcaccaccggcgcagcgcattgaagtcaagtcggagtaa

SEQ ID NO: 123031 - protein, 150 aa, Alkalilimnicola ehrlichei MLHE-1
MAIMRYDPWSTLRQIQTDLDRMFGQRGMITAGEGENAESAGQWLPAVDISEDDKAYHIHADLPGVAPEDIEISMDQGVLSIKGSRESESTESEEGWKRVERARGTFYRRFALPESVDADNIAARSRNGVLEITVPKKVAPPAQRIEVKSE

SEQ ID NO: 123032 - DNA, 576 bp, Rhizobium leguminosarum bv. viciae 3841
  CDS (1)..(576): transl_table=11
atggactgttctatgtgcgcgtcgccgcctgtgaacgacggcattcttgagagaaggagaatgacaatggcagactctccaacgaaactttccgtagagacagaagcaaagccggcggcgccagtcgaccgctggcggcccctcgacagccttcggtccgagatcgaccgcgtgctcaacgacttcggcagtccgtcgattttcgaccgggccttcggcaggatgccggccgcgttctcgcgcggcatgctcgccgtcgatctcgtagaatccgaaaaagccttcgagctgtcggccgagcttccgggcgtcgacgccaaggatcttgacgtcacgctcgccgacggtgtgctcaccatcaagggtgagaagaacgagaccaaggaggaaaaggaaaaggactattacctttccgaacggcgctacggatcgttccatcgaagcctggaattgccgcgcggcgtggacagcgagaagatcgaggcgaacttttccaacggggttctcaaggtctcgctgccgaagacgcccgagcggcagcagaacggcaagaagattacggtcaaggcggcctga

SEQ ID NO: 123033 - protein, 191 aa, Rhizobium leguminosarum bv. viciae 3841
MDCSMCASPPVNDGILERRRMTMADSPTKLSVETEAKPAAPVDRWRPLDSLRSEIDRVLNDFGSPSIFDRAFGRMPAAFSRGMLAVDLVESEKAFELSAELPGVDAKDLDVTLADGVLTIKGEKNETKEEKEKDYYLSERRYGSFHRSLELPRGVDSEKIEANFSNGVLKVSLPKTPERQQNGKKITVKAA

SEQ ID NO: 123034 - DNA, 495 bp, Magnetospirillum magnetotacticum MS-1
  CDS (1)..(495): transl_table=11
ttgatcccctggggccgcagcaacggcaatcaggttcccagtgtcttgcgcgatggcgatcgtgatccgttcctctcactgcatcgcgaggtgaataggctgttcgacgacgtcttccgcggcttcggttcgaacctgccttctctcgtgggagcttccgccttcagcggcggttggccgaacgtggagatctccgacggcgagaaagaaatcaaggtgaccgccgaagtgcccggcctggaggagaaggacattgaagtcctgctcgacgatggggtgctgacgttgaagggcgagaagcgctccgaaacggaggacaaggaccgtcaattctccgagcgcttctatggccgcttcgagcgccgcatcccgctcggctacgaggtcaaggacgacaaggtcgacgcgcggtttaggaacggcgtgctgaccgtgaccttgcccaagagcgagaaggcgcagtcgcaggtcaagcgtatcgccatcaagagctga

SEQ ID NO: 123035 - protein, 164 aa, Magnetospirillum magnetotacticum MS-1
MIPWGRSNGNQVPSVLRDGDRDPFLSLHREVNRLFDDVFRGFGSNLPSLVGASAFSGGWPNVEISDGEKEIKVTAEVPGLEEKDIEVLLDDGVLTLKGEKRSETEDKDRQFSERFYGRFERRIPLGYEVKDDKVDARFRNGVLTVTLPKSEKAQSQVKRIAIKS

SEQ ID NO: 123036 - DNA, 522 bp, Magnetospirillum gryphiswaldense
  CDS (1)..(522): transl_table=11
atggctgacaaagcctcgcggcatgtgctgatgcacgggccggcctccgccgagtcgggttcccaccctctggtgggtctgcgcgacgaggtcgaccgtctttttcacagcttcttccccgccgccttcggtcggtcgatgttcgaccttgatccgttgcgccttggtgcgttgcgtctcatggatgacatgacgccgcaggtggacgtaaaggaactggccgatcattacgagatcgacgcagaactgccaggggtcgaagtcaaggatgtcaaggtcaccatcgacaacggcatgttggatattcgcggtgaaaagcacggcgaacatatggacgatcagggtgcggtgcatgtttctgaacgcagcttcggctcgttcgcccgcgcattccgtctgcccgaggacgccgacgcggataccgccgatgctgagttcgtcaacggcgtgctgaaggtcaaggtgcccaagcaggaaggcaaggggccaaaggtcaaagatatcgagatcaaggcccattga

SEQ ID NO: 123037 - protein, 173 aa, Magnetospirillum gryphiswaldense
MADKASRHVLMHGPASAESGSHPLVGLRDEVDRLFHSFFPAAFGRSMFDLDPLRLGALRLMDDMTPQVDVKELADHYEIDAELPGVEVKDVKVTIDNGMLDIRGEKHGEHMDDQGAVHVSERSFGSFARAFRLPEDADADTADAEFVNGVLKVKVPKQEGKGPKVKDIEIKAH

SEQ ID NO: 123038 - DNA, 507 bp, Candidatus Kuenenia stuttgartiensis
  CDS (1)..(507): transl_table=11
atggccttgaaagatttaataacctggaatagaagaaaacagcagcctgcactatcaggactgcaacaccctgtagcgacccttcagagagaagtggaccgattatttgacgatttcttcagagggtttgacagattcccgtccctcccattaaaggaagagcgattcgccgagttttcaccgaagatagatgtaagtgaaaatgacaaagaaattgagattatcgcagaagtgccgggaatggatcaaaatgatgttgaaattactttaagagacgatgtgctcactattaaaggggagaagaaacaggaaaaggaagaaaaggacaaagagtactatcatgtagagcgaagttacggatccttttaccgttctctgcaacttccctgtgaagttgaccaggaaaaagtgaaggcttcgttcaaaaaaggggtgttgaaaatcaatctgcctaagagtggaaaagcgcaggaaaatgtgcgtaagattgaaataaagggagaatga

SEQ ID NO: 123039 - protein, 168 aa, Candidatus Kuenenia stuttgartiensis
MALKDLITWNRRKQQPALSGLQHPVATLQREVDRLFDDFFRGFDRFPSLPLKEERFAEFSPKIDVSENDKEIEIIAEVPGMDQNDVEITLRDDVLTIKGEKKQEKEEKDKEYYHVERSYGSFYRSLQLPCEVDQEKVKASFKKGVLKINLPKSGKAQENVRKIEIKGE

SEQ ID NO: 123040 - DNA, 507 bp, Candidatus Kuenenia stuttgartiensis
  CDS (1)..(507): transl_table=11
atggcctggaaagacttaattacctggaacaggaagaagcaacagcaattacaacctgagatgcggcatcccgttgccacactccatcgggaagtggatcggttatttgatgatttcttcagaggttttgacagatttccatccatttcctttaaagaagaacgattcgcagaattttcgccgagaatagatgtaagtgaaaatgacagagagattgaaattactgcagaagtaccgggtatggatcaaaatgatgttgaaattactttgagggatgatgtgcttacgattaagggagagaagaaacaggaaaaagaagaaaaaggcaaagagtactatcatgtagagcggagttatgggtcattttaccgctctctgcaacttccatgtgaagttgaccaggaaaaagtgaaggcatcattcaataaaggagtgttgaagatacatctacccaaaagcgtaaaagcgcatgaaaatgtgcgaaagattgaagtaaaaagcgagtga

SEQ ID NO: 123041 - protein, 168 aa, Candidatus Kuenenia stuttgartiensis
MAWKDLITWNRKKQQQLQPEMRHPVATLHREVDRLFDDFFRGFDRFPSISFKEERFAEFSPRIDVSENDREIEITAEVPGMDQNDVEITLRDDVLTIKGEKKQEKEEKGKEYYHVERSYGSFYRSLQLPCEVDQEKVKASFNKGVLKIHLPKSVKAHENVRKIEVKSE

SEQ ID NO: 123042 - DNA, 459 bp, Pennisetum americanum
  CDS (1)..(459)
atgtcgctggtgagtcgcagcagcgtgttcgaccctttctccatggacctctgggaccccttcgatagcatgttccgctccatcgtccagtcggcggggagccccgactccgacaccgccgccttcgccgccgcgcgcatcgactggaaggagacccccgaagcgcacgtcttcaaggctgacctcccaggcgtcaagaaggaggaggtcaaggtcgaggtggaggatggcaacgtcctcgtcatcagcggccagcgcagcaaggagaaggaggacaagaacgacaggtggcaccgcgtcgagcgcagcagcggccagttcatgaggaggtttcgcctgccggggaacgccaaggtggaccaggtgaaggctgggctcgagaacggcgtgctcacggtcaccgtgcccaaggccgaggagaagaagcccgaggtgaaggccattgagatctctggttaa

SEQ ID NO: 123043 - protein, 152 aa, Pennisetum americanum
MSLVSRSSVFDPFSMDLWDPFDSMFRSIVQSAGSPDSDTAAFAAARIDWKETPEAHVFKADLPGVKKEEVKVEVEDGNVLVISGQRSKEKEDKNDRWHRVERSSGQFMRRFRLPGNAKVDQVKAGLENGVLTVTVPKAEEKKPEVKAIEISG

SEQ ID NO: 123044 - DNA, 570 bp, uncultured bacterium
  CDS (1)..(570): transl_table=11
atggacattgatttcaagaaattggctccctggaactggttcaaaaaggagcaggaagaacaacagagcactgcctcgctgccggtgcagcgcaatgacctgcctgtggcgggtgggcccgtcagtcccatcctgcaattgcatcgcgagatcgaccgcctgttcgacgacgcgtttcgaggcttcggtttcccgacgctggccatgccacgctggccgtcggactggccgggcatgctgaagccggcgctggacatccaggagaccgacaagcagtacaagatcgccctggaagtacccggcatcgaggaaaaagacatccagatcacgctcgacaacgacgtgctgctggtgcgcggtgaaaagcgtcaggagcaggaaacgaaagacggcggtttccaccgggtggagcgctcctacggcagctttcagcgcgctctgaacctgccggccgatgccaaccaggacacgatcaaggccgctttcaagaacggcgtgctcacgatcacgatggacaagcgcgaggccagtacgcccaagcaggggcgctcgatcccgatcaacggctga

SEQ ID NO: 123045 - protein, 189 aa, uncultured bacterium
MDIDFKKLAPWNWFKKEQEEQQSTASLPVQRNDLPVAGGPVSPILQLHREIDRLFDDAFRGFGFPTLAMPRWPSDWPGMLKPALDIQETDKQYKIALEVPGIEEKDIQITLDNDVLLVRGEKRQEQETKDGGFHRVERSYGSFQRALNLPADANQDTIKAAFKNGVLTITMDKREASTPKQGRSIPING

SEQ ID NO: 123046 - DNA, 429 bp, Thermotoga maritima
  CDS (1)..(429): transl_table=11
atgcttcttggaagaagagaagacatcttcaggccgttcagggaactccagagggagatcgacaggctcttcgatgacttcttcaggacggaggtcagacccgctccagacatggatgtgttcgaaacagacgatgaagtagtgatagaagtagaaatcccaggcatagacagaaaagacgtccaaataacggttgaagagaacattttgaagatctctggtgaaaagaaactcgaaagagaacagaaaggtaaaaactattactacgttgagagaagcgctggaaaattcgaaagggcaatcagactcccagactacgttgacgtagaaaagatcaaagcagagtacaagaacggtgttctcacgataagggttcccaagaaagaagaaaggaagaagaaagtgatcgaggtggaggttcaggagtaa

SEQ ID NO: 123047 - protein, 142 aa, Thermotoga maritima
MLLGRREDIFRPFRELQREIDRLFDDFFRTEVRPAPDMDVFETDDEVVIEVEIPGIDRKDVQITVEENILKISGEKKLEREQKGKNYYYVERSAGKFERAIRLPDYVDVEKIKAEYKNGVLTIRVPKKEERKKKVIEVEVQE

SEQ ID NO: 123048 - DNA, 486 bp, Funaria hygrometrica
  CDS (1)..(486)
atggattttgtggtgtttgacacggatccgtttcttacgacgttgcatcagctggtccatgagccagggagcgatttagaaaggaaaatcaagcgccagcgtcgaaatcaccacgatgagccgaggcatgtgacgatagcgactcccgtagatgtgaaggagataaaagacgcgtatctcttcgttgcggacgttcctggccttcagaagactgacattgaggtgcaagtcgagaatgaaaatgttttaacgatgcggggcaagaggaaactcgacgagaaagtcaatgagaaagaggaggacacgaagttcatacgcatggagcggagtccagtgaaactattgcgaaaattcactcttccgtcggatgcaaatgctgatgccattactgccaactgtgtggatggcgtgttgacggtcactgtgcccaaaattccacctcctgaaccagcgaagtcaaagaccgtccaaattgcagtggattga

SEQ ID NO: 123049 - protein, 161 aa, Funaria hygrometrica
MDFVVFDTDPFLTTLHQLVHEPGSDLERKIKRQRRNHHDEPRHVTIATPVDVKEIKDAYLFVADVPGLQKTDIEVQVENENVLTMRGKRKLDEKVNEKEEDTKFIRMERSPVKLLRKFTLPSDANADAITANCVDGVLTVTVPKIPPPEPAKSKTVQIAVD

SEQ ID NO: 123050 - DNA, 486 bp, Oryza sativa
  CDS (1)..(486)
atgtcgctgatccgccgcagcaacgtgttcgaccccttctccctcgacctctgggaccccttcgacggcttccccttcggctccggcggcagcagcagcggcagcatcttcccgtccttcccgcgcggcgcctcctccgagaccgcggccttcgccggcgcgcggatcgactggaaggagacgcccgaggcgcacgtgttcaaggcggacgtgccggggctgaagaaggaggaggtcaaggtggaggtggacgacggcaacatcctgcagatcagcggcgagcgcaacaaggagcaggaggagaagacggaccagtggcaccgcgtggagcgcagcagcggcaagttcctccgcaggttccgcctccccgacaacgccaagccggagcagatcaaggcgtccatggagaacggcgtgctcaccgtcacggttcccaaggaggaggccaagaagcccgacgtcaagtccatccagatctccggctag

SEQ ID NO: 123051 - protein, 161 aa, Oryza sativa
MSLIRRSNVFDPFSLDLWDPFDGFPFGSGGSSSGSIFPSFPRGASSETAAFAGARIDWKETPEAHVFKADVPGLKKEEVKVEVDDGNILQISGERNKEQEEKTDQWHRVERSSGKFLRRFRLPDNAKPEQIKASMENGVLTVTVPKEEAKKPDVKSIQISG

SEQ ID NO: 123052 - DNA, 648 bp, Oryza sativa
  CDS (1)..(648)
atggcgtcgatgagaactgcggcggcggcggcgatgctggcctgcatcgccgtcgttctggcgagcacggcggcggacggcgcgctgctcccgtggttcggcggcggcggcgcgcgggacgaggcggtgccggagttggggctcctggcggcggccgacccgttccggatcctggagcacgtgccgttcgggttcgaccgcgacgacgtggcgatgctgtcgatggcgcgggtggactggcgggagaccggcgacgcgcacgaggtcgtggtggacgtgccggggatgaggaaggaggacctgcgggtggaggtggaggacaaccgggtgctgcggatcagcggcgagcggcggcgggaggagacgacggagcagaagggcggcggcgaccactggcaccgggaggagcggtcctacggcaggttctggcggcagctccgcctccccgacaacgccgacctcgactccatcgccgcctccctcgacaacggcgtgctcaccgtccggttccggaagctggcgcccgaccagatcaagggcccgcgcgtcgtcggcatcgcctccgccggcggtgacgacggtggcaagaagagcatcggcggcgccggcgaggggcagaaccagcaggccaagaaggtggagctctga

SEQ ID NO: 123053 - protein, 215 aa, Oryza sativa
MASMRTAAAAAMLACIAVVLASTAADGALLPWFGGGGARDEAVPELGLLAAADPFRILEHVPFGFDRDDVAMLSMARVDWRETGDAHEVVVDVPGMRKEDLRVEVEDNRVLRISGERRREETTEQKGGGDHWHREERSYGRFWRQLRLPDNADLDSIAASLDNGVLTVRFRKLAPDQIKGPRVVGIASAGGDDGGKKSIGGAGEGQNQQAKKVEL

SEQ ID NO: 123054 - DNA, 465 bp, Oryza sativa
  CDS (1)..(465)
atgtcgatgatccgccgcagcaacgtgttcgaccccttctccctcgacctctgggaccccttcgacggcttccccttcggctccggcagcggcagcctcttccctcgcgccaactccgacgcggcggccttcgccggcgcgcggatcgactggaaggagacgcccgaggcgcacgtgttcaaggcggacgtgccggggctgaagaaggaggaggtcaaggtggaggttgaggacggcaacgtcctccagatcagcggcgagcgcatcaaggagcaggaggagaagacggacaagtggcaccgcgtggagcgcagcagcggcaagttcctccgcaggttccggctgccggagaacaccaagccggagcagatcaaggcgtccatggagaacggcgtgctcaccgtcaccgtgcccaaggaggagcccaagaagcccgacgtcaagtccatccagatcaccggctag

SEQ ID NO: 123055 - protein, 154 aa, Oryza sativa
MSMIRRSNVFDPFSLDLWDPFDGFPFGSGSGSLFPRANSDAAAFAGARIDWKETPEAHVFKADVPGLKKEEVKVEVEDGNVLQISGERIKEQEEKTDKWHRVERSSGKFLRRFRLPENTKPEQIKASMENGVLTVTVPKEEPKKPDVKSIQITG

SEQ ID NO: 123056 - DNA, 462 bp, Brassica napus
  CDS (1)..(462)
atgtcgttgattccaagcttcttcggtaacaacaggcgtggcagcaacagcttcttcgatcctttctccctcgacgtttgggatccactcagggagttctcttccctttcccgagacaactccgcgatcgtgaacgcgcgtgtggactggagggagacgcccgaggcgcacgtgttcaaggcggacttgcctggactcaaaaaggaggaagtgaaggtggagatcgaggaagacagcgtgctgaagatcagtggagagagacacgtggagaaggaggataagaacgacacgtggcaccgtgtggagagatcgagcgggcagttcacgaggaagtttaggcttcctgagaacgtgaagatggatcaggtgaaggctgcgatggagaatggtgtgctgactgtgacggtgcctaaggcggagaccaagaaggctgatgtcaagtctatccagatctctggctga

SEQ ID NO: 123057 - protein, 153 aa, Brassica napus
MSLIPSFFGNNRRGSNSFFDPFSLDVWDPLREFSSLSRDNSAIVNARVDWRETPEAHVFKADLPGLKKEEVKVEIEEDSVLKISGERHVEKEDKNDTWHRVERSSGQFTRKFRLPENVKMDQVKAAMENGVLTVTVPKAETKKADVKSIQISG

SEQ ID NO: 123058 - DNA, 477 bp, Triticum aestivum
  CDS (1)..(477)
atgtcgctgattccccgcggcaaagctttcgaccccttctcccttgacctctcggaccccttcgatggcttccccttcggctccggcggcatcagcagcttcttcccctcgttcccgcgcgcatcctccgagaccgcggccttcgccggcgcgcggatcgactggaaggagactcccgaggcgcacgtgttcaaggcggacgtgccggggctgaaaaaggaggaagtgaaggtggaggtcgaggacggcaacgtgctccagatcagcggcgagcgcaacaaagagcaggaggagaagacgggcacgtggcacagggtggagcgcagcagcggcaagttcctgcgcaggttccgcctcccggacaacgccaaggcggaccagatcaaggcggccatggagaacggcgtgctcacagtcaccgtgcccaagaaggaggtcaaggagccggaggtcaagtccatccagatttctggctag

SEQ ID NO: 123059 - protein, 158 aa, Triticum aestivum
MSLIPRGKAFDPFSLDLSDPFDGFPFGSGGISSFFPSFPRASSETAAFAGARIDWKETPEAHVFKADVPGLKKEEVKVEVEDGNVLQISGERNKEQEEKTGTWHRVERSSGKFLRRFRLPDNAKADQIKAAMENGVLTVTVPKKEVKEPEVKSIQISG

SEQ ID NO: 123060 - DNA, 474 bp, Triticum aestivum
  CDS (1)..(474)
atgtcgctgatccgccgcagcaacgtgttcgaccccttctccctcgacttcttcgacccattcgaaggcttccccttcggctccggcaacagcagcagcggcagtctcgtcccgcgcacctcctccgacacagcggccttcgcgggcgcgcgcatcgactggaaggagacgtccgaggcgcacgtgttcaaggcggacgtgccggggctgaagaaggaggaggtgaaggtggaggtggaggacggcaacatcctccagatcagcggcgagcggaagaaggagcaggaggagaagaccgacacctggcaccgcgtggagcgcagcagcggcaagttcctgcgcaggttctgcctcccggacaacgccaaggcggagcaggtgaaggcgtccatggagaacggcgtgctcaccgtcaccgtgcccaaggaggaggccaagaagcccgaggtcaagtccatccagatctcaggctag

SEQ ID NO: 123061 - protein, 157 aa, Triticum aestivum
MSLIRRSNVFDPFSLDFFDPFEGFPFGSGNSSSGSLVPRTSSDTAAFAGARIDWKETSEAHVFKADVPGLKKEEVKVEVEDGNILQISGERKKEQEEKTDTWHRVERSSGKFLRRFCLPDNAKAEQVKASMENGVLTVTVPKEEAKKPEVKSIQISG

SEQ ID NO: 123062 - DNA, 477 bp, Zea mays
  CDS (1)..(477)
atgtcgctgatccgccgcagcaacgtgttcgatcccttctccctcgacctctgggacccctttgagggcttccccttcggctccggcagcagcagcagtctcttcccctcgttcccgcggaccagctcggagaccgcggccttcgctggcgcgcggatcgactggaaggagactccagaggcgcacgtgttcaaggccgacgtaccggggctgaagaaggaggaggtcaaggtggaggtcgaggacggcaacgtccttcagatcagcggcgaacgcaacaaggagcaggaggagaagacggacacctggcaccgcgtggagcggagcagcgggaggttcctgcgcaggttccgactgcccgagaacgctaagacggagcagatcacggccgccatggagaacggcgtgcttacagtcactgtgccgaaggaggacgccaagaagcctgaagtgaagtccattcagatctccggctag

SEQ ID NO: 123063 - protein, 158 aa, Zea mays
MSLIRRSNVFDPFSLDLWDPFEGFPFGSGSSSSLFPSFPRTSSETAAFAGARIDWKETPEAHVFKADVPGLKKEEVKVEVEDGNVLQISGERNKEQEEKTDTWHRVERSSGRFLRRFRLPENAKTEQITAAMENGVLTVTVPKEDAKKPEVKSIQISG

SEQ ID NO: 123064 - DNA, 477 bp, Hordeum vulgare
  CDS (1)..(477)
atgtcgctgatccgtcgcagcaacgtgttcgaccccttctccctcgacttcttcgaccccttcgacggcttccccttcggctccggcagcagcaacagcggcggcagcctcgtcccgcgcacctcctctgacacggcggccttcgcgggggcgcgcatcgactggaaggagacccccgaggcgcacgtgttcaaggcggacgtgccggggctgaagaaggaggaggtgaaggtggaggtggaggacggcaacatcctccagatcagcggcgagaggaacaaggagcaggaggagaagacggacacctggcacagggtggagcgcagcagcggcaagttcctgcgcaggttcaggctcccggagaacgccaaggcggagcaggtgaaggcgtccatggagaacggcgtgctcaccgtcaccgtgcccaaagaggaggccaagaagcccgaggtcaagtccatccagatctccggctag

SEQ ID NO: 123065 - protein, 158 aa, Hordeum vulgare
MSLIRRSNVFDPFSLDFFDPFDGFPFGSGSSNSGGSLVPRTSSDTAAFAGARIDWKETPEAHVFKADVPGLKKEEVKVEVEDGNILQISGERNKEQEEKTDTWHRVERSSGKFLRRFRLPENAKAEQVKASMENGVLTVTVPKEEAKKPEVKSIQISG

SEQ ID NO: 123066 - DNA, 462 bp, Helianthus annuus
  CDS (1)..(462)
atgtcaatcattccaagctttttcaccagcaaaagaagcaacatattcgacccattctccctagacacatgggacccgttccaagggatcatctccaccgaacccgcgcgggaaaccgcagcgatcgtgaacgcgagaatcgactggaaagagacgcccgaggcgcacgtgttaaaagccgacttacccgggatgaagaaggaagaggtgaaggtggaagtggaagacgggagggtgttgcagataagtggagagaggtgtagagagcaggaggagaaggatgacacgtggcatagggttgagaggagtagtgggaagtttattaggcggtttcggttgccggagaatgcgaagatggatgaggtgaaggcgatgatggagaacggtgtgttgacggtggttgtgcctaaggaggaggaggagaagaagccgatggtgaaggctattgatatttctgggtag

SEQ ID NO: 123067 - protein, 153 aa, Helianthus annuus
MSIIPSFFTSKRSNIFDPFSLDTWDPFQGIISTEPARETAAIVNARIDWKETPEAHVLKADLPGMKKEEVKVEVEDGRVLQISGERCREQEEKDDTWHRVERSSGKFIRRFRLPENAKMDEVKAMMENGVLTVVVPKEEEEKKPMVKAIDISG

SEQ ID NO: 123068 - DNA, 594 bp, Brassica napus
  CDS (1)..(594)
atgaagcacttgccatacttccctctgttaagcctcttagtaggagctctgatacttggaaacatcaaaccaagtgaagggtctctgtcttctgcagtagacactccaggaagcttgctatccgatctctggctagacaggtttcctgatccgttcaagatcttggagagaatcccactaggactcgagagggaccagagtgtggctctgtctccagcgagagttgactggaaagagacagcagaaggacatgagatcatgctggatgtgcccggtctgaaaaaggatgaagtgaagatagaggtggaggagaatcgagtcctctcagtcagtggagagaggaaaagagaggaagagaagaaaggagatcagtggcacagagttgagagatcgtatggaaagttttggagacagttcaagctacctgataatgttgatatggaatctgtcaaggccaagcttgagaatggtgtgctcactattaatcttacaaagcttgctcctgaaaaggtcaagggtcctagagttgttaacattgcagctgaagaagaccaaactgcaaagatcagctcctctgaatccaaagagctgtga

SEQ ID NO: 123069 - protein, 197 aa, Brassica napus
MKHLPYFPLLSLLVGALILGNIKPSEGSLSSAVDTPGSLLSDLWLDRFPDPFKILERIPLGLERDQSVALSPARVDWKETAEGHEIMLDVPGLKKDEVKIEVEENRVLSVSGERKREEEKKGDQWHRVERSYGKFWRQFKLPDNVDMESVKAKLENGVLTINLTKLAPEKVKGPRVVNIAAEEDQTAKISSSESKEL

SEQ ID NO: 123070 - DNA, 594 bp, Brassica napus
  CDS (1)..(594)
atgaagcacttgccttacttccctctgttaagcctcttcgtaggagctctgatacttggaaacaccaaaccaagtgaagggtctctgtcttccgcaatagacactccgggaagcttgctatccgatctctggctagacaggtttcctgatccgttcaagattttggagagaatcccactagaactcgagagggaccagagcgtggctctgtctccagctagagttgactggaaagaaacagcagaaggacatgagatcatgctggatgtgcctggtctaaagaaggatgaagtgaagatagaggtggaggagaatcgagtcctttcagtcagtggagagaggaaaagagaggaagagaagaaaggagatcagtggcatagagttgagagatcatatggaaagttctggagacagttcaagctacctgataatgttgatatggaatctgtcaaggccaagcttgagaatggtgttctcactattaacctcacaaagctggctcctgaaaaggtcaagggtcctagagttgttaacattgcagctgaagaagaccaaaccgcaaagatcagctcctctgaatccaaagagctgtga

SEQ ID NO: 123071 - protein, 197 aa, Brassica napus
MKHLPYFPLLSLFVGALILGNTKPSEGSLSSAIDTPGSLLSDLWLDRFPDPFKILERIPLELERDQSVALSPARVDWKETAEGHEIMLDVPGLKKDEVKIEVEENRVLSVSGERKREEEKKGDQWHRVERSYGKFWRQFKLPDNVDMESVKAKLENGVLTINLTKLAPEKVKGPRVVNIAAEEDQTAKISSSESKEL

SEQ ID NO: 123072 - DNA, 474 bp, Brassica napus
  CDS (1)..(474)
atgtcgatgattccgaccttcttcggcaacaacaggcgcgggggcaacagcttcttcgatccgttttgtctagatgtttgggacccgttcaaggactttccctcatcttcctcttcgttttcccgagaaaactctgtgatcgtgaacgcgcgtgtggactggagggagacgccggaggcgcacgtgttcaaggcggacttacctggactgaagaaggaggaagtgaaggtcgaggtcgaggacaacaacgtgttgaagatcagtggtcagaggcacgtggagaaggaggacaagagcgacacgtggcaccgcgtggagaggtcgagcggacagttcacgaggaagtttaggctgccggagaacgtgaagatggaccaggtgaaggctgcattggagaacggagtcctgactgtgacggtgcctaaggtagagacggaggaggctagtgtcagatctgttcagatatctggctga

SEQ ID NO: 123073 - protein, 157 aa, Brassica napus
MSMIPTFFGNNRRGGNSFFDPFCLDVWDPFKDFPSSSSSFSRENSVIVNARVDWRETPEAHVFKADLPGLKKEEVKVEVEDNNVLKISGQRHVEKEDKSDTWHRVERSSGQFTRKFRLPENVKMDQVKAALENGVLTVTVPKVETEEASVRSVQISG

SEQ ID NO: 123074 - DNA, 474 bp, Glycine max
  CDS (1)..(474)
atgtctatcatcccaaacttgttcggtggtagacgaagcaacgtcttcgacccattctctctggacgtatgggaccctttcgaggggtttcctttttccacaggtcacgtgccttcctctggtggggaaagcagtgccatagccaacactcgcgtggactggaaggagactccggcggctcacgtgttcaacgttgatcttcccgggttgaagaaggaggaagtgaaggttgaagttgaagatgggagggtgctgcagattagtggtgagaggaccaaagaacaagaacagaaagatgataggtggcaccgcgttgaaagaagcactgggaagttcatgaggaggttcaggcttcccgagaatgccaaaatggatcaggtcaaggctgctatggagaatggagtgctaactgttactgtgcccaaggaggaagacaagaaacctcaagtcaagtcaattcaaatatctgcctag

SEQ ID NO: 123075 - protein, 157 aa, Glycine max
MSIIPNLFGGRRSNVFDPFSLDVWDPFEGFPFSTGHVPSSGGESSAIANTRVDWKETPAAHVFNVDLPGLKKEEVKVEVEDGRVLQISGERTKEQEQKDDRWHRVERSTGKFMRRFRLPENAKMDQVKAAMENGVLTVTVPKEEDKKPQVKSIQISA

SEQ ID NO: 123076 - DNA, 486 bp, Glycine max
  CDS (1)..(486)
atgtctctaatcccaaacttcttcggtggccggagaaacaatgtgttcgatcctttctcactggacgtgtgggatcccttcaaggattttcctttcccaaatacgctttcttcagcttccttccctgaattttctcgggaaaattcagcatttgtgagcacccgtgtggactggaaggagaccccagaggcgcacgtgttcaaggcagatattccaggactgaagaaggaggaagtgaaggtgcagattgaagacgataaggttcttcagataagcggagagaggaacgttgagaaggaagataagaacgacacgtggcatcgagtggagcgtagcagtggcaagttcatgagaaggttcagattgccggagaacgctaaagtggagcaagtgaaggcttctatggaaaatggggttcttactgtcactgtccccaaggaagaggttaagaagcctgatgttaaggccatagaaatctctggttaa

SEQ ID NO: 123077 - protein, 161 aa, Glycine max
MSLIPNFFGGRRNNVFDPFSLDVWDPFKDFPFPNTLSSASFPEFSRENSAFVSTRVDWKETPEAHVFKADIPGLKKEEVKVQIEDDKVLQISGERNVEKEDKNDTWHRVERSSGKFMRRFRLPENAKVEQVKASMENGVLTVTVPKEEVKKPDVKAIEISG

SEQ ID NO: 123078 - DNA, 486 bp, Glycine max
  CDS (1)..(486)
atgtctctaatcccaaatttcttcggtggcagaaggagcaacgttttcgatcctttttccctcgacgtctgggaccccttcaaggattttcctttcccaaacactctttcttcagcttcctttcctgaattttctcgggaaaattctgcattcgtgagcactcgtgtggattggaaggagaccccagaagcacacgtattcaaggctgatattccagggctgaagaaggaggaagtgaaggttcagattgaagatgataaggttcttcagataagcggagagaggaacgttgagaaggaagataggaataacacgtggcatcgcgtggagcgtagcagcggcaagttcatgaggaggttcagattgccggagaatgcaaaagtggataaagtgaaggcttctatggaaaatggggttctcactgtcactgttcccaaggaagaggttaagaaggctgatgtgaagaacattcaaatctctggttaa

SEQ ID NO: 123079 - protein, 161 aa, Glycine max
MSLIPNFFGGRRSNVFDPFSLDVWDPFKDFPFPNTLSSASFPEFSRENSAFVSTRVDWKETPEAHVFKADIPGLKKEEVKVQIEDDKVLQISGERNVEKEDRNNTWHRVERSSGKFMRRFRLPENAKVDKVKASMENGVLTVTVPKEEVKKADVKNIQISG

SEQ ID NO: 123080 - DNA, 486 bp, Glycine max
  CDS (1)..(486)
atgtctctaatcccaaacttcttcggtggccggagaaacaatgtgttcgatcctttctcactggacgtgtgggatcccttcaaggattttcctttcccaaatacgctttcttcagcttccttccctgaattttctcgggaaaattcagcatttgtgagcacccgtgtggactggaaggagaccccagaggcgcacgtgttcaaggcagatattccaggactgaagaaggaggaagtgaaggtgcagattgaagacgataaggttcttcagataagcggagagaggaacgttgagaaggaagataagaacgacacgtggcatcgagtggagcgtagcagtggcaagttcatgagaaggttcagattgccggagaacgctaaagtggagcaagtgaaggcttctatggaaaatggggttcttactgtcactgttcccaaggaagaggttaagaagcctgatgttaaggccatagacatctctggttaa

SEQ ID NO: 123081 - protein, 161 aa, Glycine max
MSLIPNFFGGRRNNVFDPFSLDVWDPFKDFPFPNTLSSASFPEFSRENSAFVSTRVDWKETPEAHVFKADIPGLKKEEVKVQIEDDKVLQISGERNVEKEDKNDTWHRVERSSGKFMRRFRLPENAKVEQVKASMENGVLTVTVPKEEVKKPDVKAIDISG

SEQ ID NO: 123082 - DNA, 477 bp, Zea mays
  CDS (1)..(477)
atgtcgctgatccgccgcagcaacgtgttcgatcccttctccctcgacctctgggacccctttgagggcttccccttcggctccggcaacagcagcagtctcttcccctcgttcccgcggaccagctcggagaccgcggccttcgctggcgcgcggatcgactggaaggagactccagaggcgcacgtgttcaaggccgacgtaccggggctgaagaaggaggaggtcaaggtggaggtcgaggacggcaacgtccttcagatcagcggcgagcgcaacaaggagcaggaggagaagacggacacctggcaccgcgtggagcggagcagcgggaggttcctgcgcaggttccgactgcccgagaacgccaagacggagcagatcacggccgccatggagaacggcgtgcttacagtcactgtgccgaaggaggacgccaagaagcctgaagtgaagtccattcagatctccggctag

SEQ ID NO: 123083 - protein, 158 aa, Zea mays
MSLIRRSNVFDPFSLDLWDPFEGFPFGSGNSSSLFPSFPRTSSETAAFAGARIDWKETPEAHVFKADVPGLKKEEVKVEVEDGNVLQISGERNKEQEEKTDTWHRVERSSGRFLRRFRLPENAKTEQITAAMENGVLTVTVPKEDAKKPEVKSIQISG

SEQ ID NO: 123084 - DNA, 22 bp, Artificial sequence
  primer
atgatcgacatcgataaacaag

SEQ ID NO: 123085 - DNA, 22 bp, Artificial sequence
  primer
tcagccggccttgatcgggatg

SEQ ID NO: 123086 - protein, 94 aa, Artificial sequence
  consensus sequence
  Variant (2)..(15): Xaa in position 2 to 15 is any amino acid
  Variant (18)..(31): Xaa in position 18 to 31 is any amino acid
  Variant (32)..(32): Xaa in position 32 is any or no amino acid
  Variant (34)..(36): Xaa in position 34 to 36 is any amino acid
  Variant (39)..(51): Xaa in position 39 to 51 is any amino acid
  Variant (52)..(57): Xaa in position 52 to 57 is any or no amino acid
  Variant (60)..(61): Xaa in position 60 to 61 is any amino acid
  Variant (63)..(63): Xaa in position 63 is any amino acid
  Variant (65)..(65): Xaa in position 65 is any amino acid
  Variant (67)..(69): Xaa in position 67 to 69 is any amino acid
  Variant (72)..(79): Xaa in position 72 to 79 is any amino acid
  Variant (80)..(80): Xaa in position 80 is any or no amino acid
  Variant (82)..(85): Xaa in position 82 to 85 is any amino acid
  Variant (89)..(93): Xaa in position 89 to 93 is any amino acid
DXXXXXXXXXXXXXXPGXXXXXXXXXXXXXXXLXXXGEXXXXXXXXXXXXXXXXXXXERXXGXFXRXXXLPXXXXXXXXXAXXXXGVLXXXXXK

SEQ ID NO: 123087 - DNA, 1035 bp, Azotobacter vinelandii
  CDS (1)..(1035): transl_table=11
atgctcaaggtcggtatcgttggcggtacgggctacaccggggtcgaactgctgcgtttgctggcgcagcatccgcaggtggaggtggcggtgatcacctcgcgctcggaggcgggggtgaaggttgccgatatgtacccgaatctgcgcggccattacgacgggctggccttcagtgtgccggacagcgccgtcctggggagctgcgatgtggtgttcttcgccacgccgcatggcgtcgcccatgccctggccggcgagttgctggccgccggcacccgggtgatcgatctgtccgccgacttccgcctgcaggatgccgaggagtgggctcgctggtacggccagccgcacggcgctccggagttgttgccggaggcggtctatggtctgccggaagtaaaccgcgaacggattcgcagcgcgcgtctgatcgccgttcccggttgctatccgacagcgacccaactgggtttcctgccgctgctggagagcggcctggccgataacgcgcggctgattgccgactgcaagtccggggtcagcggcgccgggcgcggagccaaggtcggttcgctgttctgcgaggccagcgaaagcatgatggcctacgcggtgaaggggcaccgtcacctgccggagatcagccagggcctgcgccgcgcggccgggggagaggtcgggctgaccttcgtgccgcatctgacgccaatgatccgtggcattcatgccaccctgtacgcgagcgtcgccgaccgttccgtggatctgcaggcgctctacgagaaacgctatgccagcgagcccttcgtcgatgtcatgccggccggcagccacccggaaacccgcagcgtgcggggtgccaacgtttgccgcatcgccgtgcaccgaccgcaaggcggcgatctggtggtggtgctgtcggtaatcgacaatctggtcaagggagcttccggtcaggccgtacagaatatgaacatcctcttcggtctggatgagcggctcggcctggcccacgcagctctgctgccctaa

SEQ ID NO: 123088 - protein, 344 aa, Azotobacter vinelandii
MLKVGIVGGTGYTGVELLRLLAQHPQVEVAVITSRSEAGVKVADMYPNLRGHYDGLAFSVPDSAVLGSCDVVFFATPHGVAHALAGELLAAGTRVIDLSADFRLQDAEEWARWYGQPHGAPELLPEAVYGLPEVNRERIRSARLIAVPGCYPTATQLGFLPLLESGLADNARLIADCKSGVSGAGRGAKVGSLFCEASESMMAYAVKGHRHLPEISQGLRRAAGGEVGLTFVPHLTPMIRGIHATLYASVADRSVDLQALYEKRYASEPFVDVMPAGSHPETRSVRGANVCRIAVHRPQGGDLVVVLSVIDNLVKGASGQAVQNMNILFGLDERLGLAHAALLP

SEQ ID NO: 123089 - DNA, 1542 bp, Arabidopsis thaliana; identical to SEQ ID NO: 47568
  CDS (123)..(1328)
  misc_feature (1069)..(1069): m is a or c

SEQ ID NO: 123090 - protein, 401 aa, Arabidopsis thaliana
  misc_feature (316)..(316): The Xaa at location 316 stands for Gln, or Pro.
MSTASAFSSIQGCWFKGERKIRVADKRAKRLTLGSHVASPSSMSFRVSASSSVKPEKDIRIGLLGASGYTGAEIVRLLANHPHFQVTLMTADRKAGQSMESVFPHLRAQKLPTLVSVKDADFSTVDAVFCCLPHGTTQEIIKELPTALKIVDLSADFRLRNIAEYEEWYGQPHKAVELQKEVVYGLTEILREDIKKARLVANPGCYPTTIQLPLVPLLKANLIKHENIIIDAKSGVSGAGRGAKEANLYSEIAEGISSYGVTRHRHVPEIEQGLSDVAQSKVTVSFTPHLMPMIRGMQSTIYVEMAPGVRTEDLHXQLKTSYEDEEFVKVLDEGVVPRTHNVRGSNYCHMSVFPDRIPGRAIIISVIDNLVKGASGQALQNLNIMLGYPETTGLLHQPLFP

SEQ ID NO: 123091 - DNA, 1507 bp, Glycine max; identical to SEQ ID NO: 47570
  CDS (107)..(1282)

SEQ ID NO: 123092 - protein, 391 aa, Glycine max; identical to SEQ ID NO: 47571

SEQ ID NO: 123093 - DNA, 1711 bp, Triticum aestivum; identical to SEQ ID NO: 47572
  CDS (102)..(1349)

SEQ ID NO: 123094 - protein, 415 aa, Triticum aestivum; identical to SEQ ID NO: 47573

SEQ ID NO: 123095 - DNA, 1776 bp, Zea mays subsp. mays; identical to SEQ ID NO: 47574
  CDS (216)..(1466)

SEQ ID NO: 123096 - protein, 416 aa, Zea mays subsp. mays; identical to SEQ ID NO: 47575

SEQ ID NO: 123097 - DNA, 1005 bp, Klebsiella pneumoniae subsp. pneumoniae MGH 78578; identical to SEQ ID NO: 47654
  CDS (1)..(1005): transl_table=11

SEQ ID NO: 123098 - protein, 334 aa, Klebsiella pneumoniae subsp. pneumoniae MGH 78578; identical to SEQ ID NO: 47655

SEQ ID NO: 123099 - DNA, 1053 bp, Xanthobacter autotrophicus Py2; identical to SEQ ID NO: 47658
  CDS (1)..(1053): transl_table=11

SEQ ID NO: 123100 - protein, 350 aa, Xanthobacter autotrophicus Py2; identical to SEQ ID NO: 47659

SEQ ID NO: 123101 - DNA, 1041 bp, Vibrio cholerae O1 biovar eltor str. N16961; identical to SEQ ID NO: 47576
  CDS (1)..(1041): transl_table=11

SEQ ID NO: 123102 - protein, 346 aa, Vibrio cholerae O1 biovar eltor str. N16961; identical to SEQ ID NO: 47577

SEQ ID NO: 123103 - DNA, 1149 bp, Methanothermobacter thermautotrophicus str. Delta H; identical to SEQ ID NO: 47580
  CDS (1)..(1149): transl_table=11

SEQ ID NO: 123104 - protein, 382 aa, Methanothermobacter thermautotrophicus str. Delta H; identical to SEQ ID NO: 47581

SEQ ID NO: 123105 - DNA, 1251 bp, Deinococcus radiodurans R1; identical to SEQ ID NO: 47582
  CDS (1)..(1251): transl_table=11

SEQ ID NO: 123106 - protein, 416 aa, Deinococcus radiodurans R1; identical to SEQ ID NO: 47583

SEQ ID NO: 123107 - DNA, 954 bp, Agrobacterium tumefaciens str. C58; identical to SEQ ID NO: 47584
  CDS (1)..(954): transl_table=11

SEQ ID NO: 123108 - protein, 317 aa, Agrobacterium tumefaciens str. C58; identical to SEQ ID NO: 47585

SEQ ID NO: 123109 - DNA, 1041 bp, Bacillus subtilis subsp. subtilis str. 168; identical to SEQ ID NO: 47590
  CDS (1)..(1041): transl_table=11

SEQ ID NO: 123110 - protein, 346 aa, Bacillus subtilis subsp. subtilis str. 168; identical to SEQ ID NO: 47591

SEQ ID NO: 123111 - DNA, 1080 bp, Arabidopsis thaliana; identical to SEQ ID NO: 47592
  CDS (1)..(1080)

SEQ ID NO: 123112 - protein, 359 aa, Arabidopsis thaliana; identical to SEQ ID NO: 47593

SEQ ID NO: 123113 - DNA, 1074 bp, Corynebacterium glutamicum ATCC 13032; identical to SEQ ID NO: 47594
  CDS (1)..(1074): transl_table=11

SEQ ID NO: 123114 - protein, 357 aa, Corynebacterium glutamicum ATCC 13032; identical to SEQ ID NO: 47595

SEQ ID NO: 123115 - DNA, 2703 bp, Magnaporthe grisea 70-15; identical to SEQ ID NO: 47604
  CDS (1)..(2703)

SEQ ID NO: 123116 - protein, 900 aa, Magnaporthe grisea 70-15; identical to SEQ ID NO: 47605

SEQ ID NO: 123117 - DNA, 1227 bp, Gibberella zeae PH-1; identical to SEQ ID NO: 47606
  CDS (1)..(1227)

SEQ ID NO: 123118 - protein, 408 aa, Gibberella zeae PH-1; identical to SEQ ID NO: 47607

SEQ ID NO: 123119 - DNA, 2622 bp, Candida glabrata CBS 138; identical to SEQ ID NO: 47608
  CDS (1)..(2622)

SEQ ID NO: 123120 - protein, 873 aa, Candida glabrata CBS 138; identical to SEQ ID NO: 47609

SEQ ID NO: 123121 - DNA, 2571 bp, Kluyveromyces lactis NRRL Y-1140; identical to SEQ ID NO: 47610
  CDS (1)..(2571)

SEQ ID NO: 123122 - protein, 856 aa, Kluyveromyces lactis NRRL Y-1140; identical to SEQ ID NO: 47611

SEQ ID NO: 123123 - DNA, 2550 bp, Debaryomyces hansenii CBS767; identical to SEQ ID NO: 47612
  CDS (1)..(2550)

SEQ ID NO: 123124 - protein, 849 aa, Debaryomyces hansenii CBS767; identical to SEQ ID NO: 47613

SEQ ID NO: 123125 - DNA, 2568 bp, Yarrowia lipolytica CLIB122; identical to SEQ ID NO: 47614
  CDS (1)..(2568)

SEQ ID NO: 123126 - protein, 855 aa, Yarrowia lipolytica CLIB122; identical to SEQ ID NO: 47615

SEQ ID NO: 123127 - DNA, 2703 bp, Aspergillus nidulans FGSC A4; identical to SEQ ID NO: 47616
  CDS (1)..(2703)

SEQ ID NO: 123128 - protein, 900 aa, Aspergillus nidulans FGSC A4; identical to SEQ ID NO: 47617

SEQ ID NO: 123129 - DNA, 2574 bp, Candida albicans SC5314; identical to SEQ ID NO: 47618
  CDS (1)..(2574): transl_table=12

SEQ ID NO: 123130 - protein, 857 aa, Candida albicans SC5314; identical to SEQ ID NO: 47619

SEQ ID NO: 123131 - DNA, 2727 bp, Ustilago maydis 521; identical to SEQ ID NO: 47620
  CDS (1)..(2727)

SEQ ID NO: 123132 - protein, 908 aa, Ustilago maydis 521; identical to SEQ ID NO: 47621

SEQ ID NO: 123133 - DNA, 2775 bp, Cryptococcus neoformans var. neoformans B-3501A; identical to SEQ ID NO: 47622
  CDS (1)..(2775)

SEQ ID NO: 123134 - protein, 924 aa, Cryptococcus neoformans var. neoformans B-3501A; identical to SEQ ID NO: 47623

SEQ ID NO: 123135 - DNA, 1116 bp, Prochlorococcus marinus str. MIT 9303
  CDS (1)..(1116): transl_table=11
atgaaggcaatggaaagtacccatcgctctccagcctctgacatttctcaggttcgaggcagccgagtagcggttatcggcgctacgggctacggcggtcttcaaaccatcagattgcttgaggaccatcctcagctccatgtcacctacctgggcggcgaacgaagtgccggcaggcgatggagtgagctttgcccttttttacccatccctgatgatcctgaagttcaatctcccgatcctgacaagatcgctgaatacgccgattacgcagtcctcagccttcccaatggacttgccagccagttagcaccgcaactgctgaagcgcaatgttcgggttgtagacctctctgctgactttcgctatcgctcactggaacaatggaaacaagtttatgtccatgaagctcaaaacctcaatcgagatgatgttcagctttgtagagaggctgtttatgggttacctgaatggaagggacctgaaattgcagttgcaaatcttgtagctgcaccaggctgcttcccaaccgcaagtctgttgcccttactgccttttctaaaacagggattgatcgaaaacgatggtttgattatcgatgcaaagactggcacctctggtggagggcgggtggccaaagaacaatttcttctgtcagaggcctcggagtcgatcatgccttatggcgtggttgggcatcgacatacatcagaaatcgaacaacttgctagtgaggttgccggacaaccgatagagcttcagttcacaccccatctcgtaccgatggtgcgtggactgctagcgacggtttatggacgcttgagagatcctggattgacagctgaggactgcacaactgtgcttaaagcggtctatcgacatcatccctgcatcgatgttcttcctgtgggaacgtatccagcgactaagtgggtgaagtactccaacaaagctgttctttctgttcaggtcgacaaccgcaacagccggcttatcttgatgagcgctgtcgacaacctaattaaaggacaagctggtcaaggggttcaatgtctaaacctgatggctggactgccaccaaccacagggatgtctttactaactttctacccttaa

SEQ ID NO: 123136 - protein, 371 aa, Prochlorococcus marinus str. MIT 9303
MKAMESTHRSPASDISQVRGSRVAVIGATGYGGLQTIRLLEDHPQLHVTYLGGERSAGRRWSELCPFLPIPDDPEVQSPDPDKIAEYADYAVLSLPNGLASQLAPQLLKRNVRVVDLSADFRYRSLEQWKQVYVHEAQNLNRDDVQLCREAVYGLPEWKGPEIAVANLVAAPGCFPTASLLPLLPFLKQGLIENDGLIIDAKTGTSGGGRVAKEQFLLSEASESIMPYGVVGHRHTSEIEQLASEVAGQPIELQFTPHLVPMVRGLLATVYGRLRDPGLTAEDCTTVLKAVYRHHPCIDVLPVGTYPATKWVKYSNKAVLSVQVDNRNSRLILMSAVDNLIKGQAGQGVQCLNLMAGLPPTTGMSLLTFYP

SEQ ID NO: 123137 - DNA, 1041 bp, Clostridium thermocellum ATCC 27405; identical to SEQ ID NO: 47630
  CDS (1)..(1041): transl_table=11

SEQ ID NO: 123138 - protein, 346 aa, Clostridium thermocellum ATCC 27405; identical to SEQ ID NO: 47631

SEQ ID NO: 123139 - DNA, 1038 bp, Herminiimonas arsenicoxydans; identical to SEQ ID NO: 47638
  CDS (1)..(1038): transl_table=11

SEQ ID NO: 123140 - protein, 345 aa, Herminiimonas arsenicoxydans; identical to SEQ ID NO: 47639

SEQ ID NO: 123141 - DNA, 951 bp, Burkholderia vietnamiensis G4; identical to SEQ ID NO: 47644
  CDS (1)..(951): transl_table=11

SEQ ID NO: 123142 - protein, 316 aa, Burkholderia vietnamiensis G4; identical to SEQ ID NO: 47645

SEQ ID NO: 123143 - DNA, 975 bp, Bradyrhizobium sp. ORS278; identical to SEQ ID NO: 47648
  CDS (1)..(975): transl_table=11

SEQ ID NO: 123144 - protein, 324 aa, Bradyrhizobium sp. ORS278; identical to SEQ ID NO: 47649

SEQ ID NO: 123145 - DNA, 1026 bp, Dehalococcoides sp. BAV1; identical to SEQ ID NO: 47650
  CDS (1)..(1026): transl_table=11

SEQ ID NO: 123146 - protein, 341 aa, Dehalococcoides sp. BAV1; identical to SEQ ID NO: 47651

SEQ ID NO: 123147 - DNA, 936 bp, Bartonella henselae str. Houston-1; identical to SEQ ID NO: 47662
  CDS (1)..(936): transl_table=11

SEQ ID NO: 123148 - protein, 311 aa, Bartonella henselae str. Houston-1; identical to SEQ ID NO: 47663

SEQ ID NO: 123149 - DNA, 1035 bp, Staphylococcus aureus subsp. aureus MRSA252; identical to SEQ ID NO: 47664
  CDS (1)..(1035): transl_table=11

SEQ ID NO: 123150 - protein, 344 aa, Staphylococcus aureus subsp. aureus MRSA252; identical to SEQ ID NO: 47665

SEQ ID NO: 123151 - DNA, 1041 bp, Desulfotalea psychrophila LSv54; identical to SEQ ID NO: 47668
  CDS (1)..(1041): transl_table=11

SEQ ID NO: 123152 - protein, 346 aa, Desulfotalea psychrophila LSv54; identical to SEQ ID NO: 47669

SEQ ID NO: 123153 - DNA, 1047 bp, Symbiobacterium thermophilum IAM 14863; identical to SEQ ID NO: 47670
  CDS (1)..(1047): transl_table=11

SEQ ID NO: 123154 - protein, 348 aa, Symbiobacterium thermophilum IAM 14863; identical to SEQ ID NO: 47671

SEQ ID NO: 123155 - DNA, 1011 bp, Mannheimia succiniciproducens MBEL55E; identical to SEQ ID NO: 47674
  CDS (1)..(1011): transl_table=11

SEQ ID NO: 123156 - protein, 336 aa, Mannheimia succiniciproducens MBEL55E; identical to SEQ ID NO: 47675

SEQ ID NO: 123157 - DNA, 945 bp, Burkholderia pseudomallei K96243; identical to SEQ ID NO: 47678
  CDS (1)..(945): transl_table=11

SEQ ID NO: 123158 - protein, 314 aa, Burkholderia pseudomallei K96243; identical to SEQ ID NO: 47679

SEQ ID NO: 123159 - DNA, 1047 bp, Methylococcus capsulatus str. Bath; identical to SEQ ID NO: 47680
  CDS (1)..(1047): transl_table=11

SEQ ID NO: 123160 - protein, 348 aa, Methylococcus capsulatus str. Bath; identical to SEQ ID NO: 47681

SEQ ID NO: 123161 - DNA, 1026 bp, Dehalococcoides ethenogenes 195; identical to SEQ ID NO: 47684
  CDS (1)..(1026): transl_table=11

SEQ ID NO: 123162 - protein, 341 aa, Dehalococcoides ethenogenes 195; identical to SEQ ID NO: 47685

SEQ ID NO: 123163 - DNA, 969 bp, Bacteroides fragilis NCTC 9343; identical to SEQ ID NO: 47686
  CDS (1)..(969): transl_table=11

SEQ ID NO: 123164 - protein, 322 aa, Bacteroides fragilis NCTC 9343; identical to SEQ ID NO: 47687

SEQ ID NO: 123165 - DNA, 1035 bp, Pseudomonas syringae pv. syringae B728a; identical to SEQ ID NO: 47688
  CDS (1)..(1035): transl_table=11

SEQ ID NO: 123166 - protein, 344 aa, Pseudomonas syringae pv. syringae B728a; identical to SEQ ID NO: 47689

SEQ ID NO: 123167 - DNA, 1107 bp, Pseudomonas fluorescens Pf-5; identical to SEQ ID NO: 47690
  CDS (1)..(1107): transl_table=11

SEQ ID NO: 123168 - protein, 368 aa, Pseudomonas fluorescens Pf-5; identical to SEQ ID NO: 47691

SEQ ID NO: 123169 - DNA, 1068 bp, Psychrobacter arcticus 273-4; identical to SEQ ID NO: 47692
  CDS (1)..(1068): transl_table=11

SEQ ID NO: 123170 - protein, 355 aa, Psychrobacter arcticus 273-4; identical to SEQ ID NO: 47693

SEQ ID NO: 123171 - DNA, 1056 bp, Colwellia psychrerythraea 34H; identical to SEQ ID NO: 47694
  CDS (1)..(1056): transl_table=11

SEQ ID NO: 123172 - protein, 351 aa, Colwellia psychrerythraea 34H; identical to SEQ ID NO: 47695

SEQ ID NO: 123173 - DNA, 1035 bp, Pseudomonas syringae pv. phaseolicola 1448A; identical to SEQ ID NO: 47696
  CDS (1)..(1035): transl_table=11

SEQ ID NO: 123174 - protein, 344 aa, Pseudomonas syringae pv. phaseolicola 1448A; identical to SEQ ID NO: 47697

SEQ ID NO: 123175 - DNA, 1029 bp, Thermobifida fusca YX; identical to SEQ ID NO: 47700
  CDS (1)..(1029): transl_table=11

SEQ ID NO: 123176 - protein, 342 aa, Thermobifida fusca YX; identical to SEQ ID NO: 47701

SEQ ID NO: 123177 - DNA, 948 bp, Ralstonia eutropha JMP134; identical to SEQ ID NO: 47704
  CDS (1)..(948): transl_table=11

SEQ ID NO: 123178 - protein, 315 aa, Ralstonia eutropha JMP134; identical to SEQ ID NO: 47705

SEQ ID NO: 123179 - DNA, 1041 bp, Ehrlichia canis str. Jake; identical to SEQ ID NO: 47708
  CDS (1)..(1041): transl_table=11

SEQ ID NO: 123180 - protein, 346 aa, Ehrlichia canis str. Jake; identical to SEQ ID NO: 47709

SEQ ID NO: 123181 - DNA, 1014 bp, Methanosarcina barkeri str. Fusaro; identical to SEQ ID NO: 47710
  CDS (1)..(1014): transl_table=11

SEQ ID NO: 123182 - protein, 337 aa, Methanosarcina barkeri str. Fusaro; identical to SEQ ID NO: 47711

SEQ ID NO: 123183 - DNA, 1029 bp, Thiobacillus denitrificans ATCC 25259; identical to SEQ ID NO: 47714
  CDS (1)..(1029): transl_table=11

SEQ ID NO: 123184 - protein, 342 aa, Thiobacillus denitrificans ATCC 25259; identical to SEQ ID NO: 47715

SEQ ID NO: 123185 - DNA, 969 bp, Anabaena variabilis ATCC 29413; identical to SEQ ID NO: 47716
  CDS (1)..(969): transl_table=11

SEQ ID NO: 123186 - protein, 322 aa, Anabaena variabilis ATCC 29413; identical to SEQ ID NO: 47717

SEQ ID NO: 123187 - DNA, 1059 bp, Anabaena variabilis ATCC 29413; identical to SEQ ID NO: 47718
  CDS (1)..(1059): transl_table=11

SEQ ID NO: 123188 - protein, 352 aa, Anabaena variabilis ATCC 29413; identical to SEQ ID NO: 47719

SEQ ID NO: 123189 - DNA, 1035 bp, Pseudomonas fluorescens PfO-1; identical to SEQ ID NO: 47720
  CDS (1)..(1035): transl_table=11

SEQ ID NO: 123190 - protein, 344 aa, Pseudomonas fluorescens PfO-1; identical to SEQ ID NO: 47721

SEQ ID NO: 123191 - DNA, 1029 bp, Rhodobacter sphaeroides 2.4.1; identical to SEQ ID NO: 47722
  CDS (1)..(1029): transl_table=11

SEQ ID NO: 123192 - protein, 342 aa, Rhodobacter sphaeroides 2.4.1; identical to SEQ ID NO: 47723

SEQ ID NO: 123193 - DNA, 1014 bp, Carboxydothermus hydrogenoformans Z-2901; identical to SEQ ID NO: 47724
  CDS (1)..(1014): transl_table=11

SEQ ID NO: 123194 - protein, 337 aa, Carboxydothermus hydrogenoformans Z-2901; identical to SEQ ID NO: 47725

SEQ ID NO: 123195 - DNA, 1041 bp, Geobacter metallireducens GS-15; identical to SEQ ID NO: 47732
  CDS (1)..(1041): transl_table=11

SEQ ID NO: 123196 - protein, 346 aa, Geobacter metallireducens GS-15; identical to SEQ ID NO: 47733

SEQ ID NO: 123197 - DNA, 1074 bp, Desulfovibrio desulfuricans G20; identical to SEQ ID NO: 47734
  CDS (1)..(1074): transl_table=11

SEQ ID NO: 123198 - protein, 357 aa, Desulfovibrio desulfuricans G20; identical to SEQ ID NO: 47735

SEQ ID NO: 123199 - DNA, 1059 bp, Rhodospirillum rubrum ATCC 11170; identical to SEQ ID NO: 47738
  CDS (1)..(1059): transl_table=11

SEQ ID NO: 123200 - protein, 352 aa, Rhodospirillum rubrum ATCC 11170; identical to SEQ ID NO: 47739

SEQ ID NO: 123201 - DNA, 1041 bp, Moorella thermoacetica ATCC 39073; identical to SEQ ID NO: 47740
  CDS (1)..(1041): transl_table=11

SEQ ID NO: 123202 - protein, 346 aa, Moorella thermoacetica ATCC 39073; identical to SEQ ID NO: 47741

SEQ ID NO: 123203 - DNA, 1089 bp, Syntrophus aciditrophicus SB
  CDS (1)..(1089): transl_table=11
atgaaccgtttcggcatcaggatgagtaaccagaatcaaagtgagggttatatgataaaagttggaatctacggggccagtggttatacggggcaggaatgcctcaggttgcttcttcgccattccggcgtagaggtggtcgcgatcacctcgaggcgatatgccggtcttcccatcgccgacgtctatcctgtgtttgcggggttaacgtcattggcatttatgaatgccgctccccatgaagttgcccgggaggccgatgtgatttttctggcgttgccccacagcgaatccatgaaggtggccccaatattctgggaaagcgggaagaaagtaatcgatctcagcgcggatttccggttacgggatgtcgatgtttatgaatcctggtacggaaggcatgtctcctcccagcttgttccgcaaaccgtttacggtattcctgagctctaccgggaggaagtggcgaaaacccggtttgtggcgaatcccggatgttatccaaccagcattattctgggaagcgcacctgctctcaaaaacggactgattgacacgacctcggtgattgtggattccaaatccggcaccagcggcgctggtcgtgaacccgcagtggggtctcttttctgtgaagtcaatgaaggattcaaagcctataaagtttgcaaccaccgtcatactcctgagattgaacaggaattgagtcgtcttgccggccaggaaataagagtttccttcacaccccacctgcttccgctcgatcgggggattctaagcaccatttacgcgacattgacccgggatatcacaggcaaagaagtgacggaactataccggaattattatgagggagaaagatttgtccggatttgccagccgggaagtttcccgaatgtggcctttgttcgagggtccaattactgtgatatcggcgtagcggtggatgcgcgcactcaacggttgattgttgtttcggccattgataatctggttaagggcgcagccggtcaggcgatccagaatatgaacattttctgcggattcccggagcacgaggggctcgagatgattgccctgtttccctga

SEQ ID NO: 123204 - protein, 362 aa, Syntrophus aciditrophicus SB
MNRFGIRMSNQNQSEGYMIKVGIYGASGYTGQECLRLLLRHSGVEVVAITSRRYAGLPIADVYPVFAGLTSLAFMNAAPHEVAREADVIFLALPHSESMKVAPIFWESGKKVIDLSADFRLRDVDVYESWYGRHVSSQLVPQTVYGIPELYREEVAKTRFVANPGCYPTSIILGSAPALKNGLIDTTSVIVDSKSGTSGAGREPAVGSLFCEVNEGFKAYKVCNHRHTPEIEQELSRLAGQEIRVSFTPHLLPLDRGILSTIYATLTRDITGKEVTELYRNYYEGERFVRICQPGSFPNVAFVRGSNYCDIGVAVDARTQRLIVVSAIDNLVKGAAGQAIQNMNIFCGFPEHEGLEMIALFP

SEQ ID NO: 123205 - DNA, 1029 bp, Frankia sp. CcI3; identical to SEQ ID NO: 47744
  CDS (1)..(1029): transl_table=11

SEQ ID NO: 123206 - protein, 342 aa, Frankia sp. CcI3; identical to SEQ ID NO: 47745

SEQ ID NO: 123207 - DNA, 1041 bp, Saccharophagus degradans 2-40; identical to SEQ ID NO: 47752
  CDS (1)..(1041): transl_table=11

SEQ ID NO: 123208 - protein, 346 aa, Saccharophagus degradans 2-40; identical to SEQ ID NO: 47753

SEQ ID NO: 123209 - DNA, 1053 bp, Methylobacillus flagellatus KT; identical to SEQ ID NO: 47754
  CDS (1)..(1053): transl_table=11

SEQ ID NO: 123210 - protein, 350 aa, Methylobacillus flagellatus KT; identical to SEQ ID NO: 47755

SEQ ID NO: 123211 - DNA, 1023 bp, Methanococcoides burtonii DSM 6242; identical to SEQ ID NO: 47758
  CDS (1)..(1023): transl_table=11

SEQ ID NO: 123212 - protein, 340 aa, Methanococcoides burtonii DSM 6242; identical to SEQ ID NO: 47759

SEQ ID NO: 123213 - DNA, 1008 bp, Ralstonia metallidurans CH34; identical to SEQ ID NO: 47760
  CDS (1)..(1008): transl_table=11

SEQ ID NO: 123214 - protein, 335 aa, Ralstonia metallidurans CH34; identical to SEQ ID NO: 47761

SEQ ID NO: 123215 - DNA, 1053 bp, Acidobacteria bacterium Ellin345; identical to SEQ ID NO: 47764
  CDS (1)..(1053): transl_table=11

SEQ ID NO: 123216 - protein, 350 aa, Acidobacteria bacterium Ellin345; identical to SEQ ID NO: 47765

SEQ ID NO: 123217 - DNA, 1023 bp, Rubrobacter xylanophilus DSM 9941; identical to SEQ ID NO: 47772
  CDS (1)..(1023): transl_table=11

SEQ ID NO: 123218 - protein, 340 aa, Rubrobacter xylanophilus DSM 9941; identical to SEQ ID NO: 47773

SEQ ID NO: 123219 - DNA, 975 bp, Cytophaga hutchinsonii ATCC 33406; identical to SEQ ID NO: 47776
  CDS (1)..(975): transl_table=11

SEQ ID NO: 123220 - protein, 324 aa, Cytophaga hutchinsonii ATCC 33406; identical to SEQ ID NO: 47777

SEQ ID NO: 123221 - DNA, 1056 bp, Rhodococcus sp. RHA1; identical to SEQ ID NO: 47778
  CDS (1)..(1056): transl_table=11

SEQ ID NO: 123222 - protein, 351 aa, Rhodococcus sp. RHA1; identical to SEQ ID NO: 47779

SEQ ID NO: 123223 - DNA, 1059 bp, Trichodesmium erythraeum IMS101; identical to SEQ ID NO: 47780
  CDS (1)..(1059): transl_table=11

SEQ ID NO: 123224 - protein, 352 aa, Trichodesmium erythraeum IMS101; identical to SEQ ID NO: 47781

SEQ ID NO: 123225 - DNA, 981 bp, Shewanella sp. MR-4; identical to SEQ ID NO: 47784
  CDS (1)..(981): transl_table=11

SEQ ID NO: 123226 - protein, 326 aa, Shewanella sp. MR-4; identical to SEQ ID NO: 47785

SEQ ID NO: 123227 - DNA, 1032 bp, Alkalilimnicola ehrlichei MLHE-1; identical to SEQ ID NO: 47786
  CDS (1)..(1032): transl_table=11

SEQ ID NO: 123228 - protein, 343 aa, Alkalilimnicola ehrlichei MLHE-1; identical to SEQ ID NO: 47787

SEQ ID NO: 123229 - DNA, 1035 bp, Pseudomonas aeruginosa UCBPP-PA14; identical to SEQ ID NO: 47790
  CDS (1)..(1035): transl_table=11

SEQ ID NO: 123230 - protein, 344 aa, Pseudomonas aeruginosa UCBPP-PA14; identical to SEQ ID NO: 47791

SEQ ID NO: 123231 - DNA, 1041 bp, Leuconostoc mesenteroides subsp. mesenteroides ATCC 8293; identical to SEQ ID NO: 47792
  CDS (1)..(1041): transl_table=11

SEQ ID NO: 123232 - protein, 346 aa, Leuconostoc mesenteroides subsp. mesenteroides ATCC 8293; identical to SEQ ID NO: 47793

SEQ ID NO: 123233 - DNA, 1044 bp, Solibacter usitatus Ellin6076; identical to SEQ ID NO: 47794
  CDS (1)..(1044): transl_table=11

SEQ ID NO: 123234 - protein, 347 aa, Solibacter usitatus Ellin6076; identical to SEQ ID NO: 47795

SEQ ID NO: 123235 - DNA, 1050 bp, Magnetococcus sp. MC-1; identical to SEQ ID NO: 47796
  CDS (1)..(1050): transl_table=11

SEQ ID NO: 123236 - protein, 349 aa, Magnetococcus sp. MC-1; identical to SEQ ID NO: 47797

SEQ ID NO: 123237 - DNA, 1044 bp, Mycobacterium avium 104; identical to SEQ ID NO: 47798
  CDS (1)..(1044): transl_table=11

SEQ ID NO: 123238 - protein, 347 aa, Mycobacterium avium 104; identical to SEQ ID NO: 47799

SEQ ID NO: 123239 - DNA, 1047 bp, Nocardioides sp. JS614; identical to SEQ ID NO: 47802
  CDS (1)..(1047): transl_table=11

SEQ ID NO: 123240 - protein, 348 aa, Nocardioides sp. JS614; identical to SEQ ID NO: 47803

SEQ ID NO: 123241 - DNA, 1044 bp, Neisseria meningitidis FAM18; identical to SEQ ID NO: 47806
  CDS (1)..(1044): transl_table=11

SEQ ID NO: 123242 - protein, 347 aa, Neisseria meningitidis FAM18; identical to SEQ ID NO: 47807

SEQ ID NO: 123243 - DNA, 1059 bp, Nostoc punctiforme PCC 73102; identical to SEQ ID NO: 47812
  CDS (1)..(1059): transl_table=11

SEQ ID NO: 123244 - protein, 352 aa, Nostoc punctiforme PCC 73102; identical to SEQ ID NO: 47813

SEQ ID NO: 123245 - DNA, 948 bp, Actinobacillus pleuropneumoniae serovar 1 str. 4074; identical to SEQ ID NO: 47814
  CDS (1)..(948): transl_table=11

SEQ ID NO: 123246 - protein, 315 aa, Actinobacillus pleuropneumoniae serovar 1 str. 4074; identical to SEQ ID NO: 47815

SEQ ID NO: 123247 - DNA, 1038 bp, Bacillus cereus G9241; identical to SEQ ID NO: 47818
  CDS (1)..(1038): transl_table=11

SEQ ID NO: 123248 - protein, 345 aa, Bacillus cereus G9241; identical to SEQ ID NO: 47819

SEQ ID NO: 123249 - DNA, 1059 bp, Crocosphaera watsonii WH 8501; identical to SEQ ID NO: 47820
  CDS (1)..(1059): transl_table=11

SEQ ID NO: 123250 - protein, 352 aa, Crocosphaera watsonii WH 8501; identical to SEQ ID NO: 47821

SEQ ID NO: 123251 - DNA, 1032 bp, Exiguobacterium sibiricum 255-15; identical to SEQ ID NO: 47822
  CDS (1)..(1032): transl_table=11

SEQ ID NO: 123252 - protein, 343 aa, Exiguobacterium sibiricum 255-15; identical to SEQ ID NO: 47823

SEQ ID NO: 123253 - DNA, 1017 bp, Prosthecochloris aestuarii DSM 271; identical to SEQ ID NO: 47824
  CDS (1)..(1017): transl_table=11

SEQ ID NO: 123254 - protein, 338 aa, Prosthecochloris aestuarii DSM 271; identical to SEQ ID NO: 47825

SEQ ID NO: 123255 - DNA, 1605 bp, Kineococcus radiotolerans SRS30216
  CDS (1)..(1605): transl_table=11
gtgggaggccgacctcgggcaggtccgggccgtgctggaggccaacgtcctgggggccttccacgtcgtccgggcggtggtcccggggatggtcgcgcgcgggtcggggcgcgtggtggacctgagctcgggggcggcgtcctcggacagcgggatccacgccgcctacggcgccagcaaggccgcgctgttccgcctcggcggggcgatcgcggccgccggcgccgcgcacggggtccgggccttcgagctctcccccggggtggtgcgcaccgcgatggcgacgggcatgggccagcacgccgagcgcacggagtggaccgacccggccgacgtcgtcgcgatggtcctggccatcgcggccggcgagctggacgggtggtcggggcgctacctgcgggtcggggtggacacccccgggtcgctgctggccgcggaggccacgcgctccccccgcggccggcggctggttgtggagccctacggcgaggacgacccgctccacccctgatgcatgcctacccagcggcgtgtatggtcatgcacatggaaccggggaagcggctgtcggtcgccgtcgcaggagccagcggctacgccggcggcgaggtcctgcgcgtgctgctggaccacccgcacgtcgagatcggcgccctcaccggcgcctccaacgcgggaacccccctcggcgccctgcagccgcacctgccgccgctggccgaccgcgtcctgcagcccaccaccaccgaggtcctcgccggccacgacgtcgtcttcctcgccctgccgcacggcgcctcggccgaggtcgccgccgagctcggggacgacgtcctcgtcgtcgacctcggcgccgaccaccgcctcaccgaccccgcccgctgggcggagttctacggcggcacccacgccgggacctggccctacggcctgcccgagctgccgctcgccgggggcgggacccagcgggagaacctcgtcggcacccgccgcatcgcggtccccgggtgctacccgaccgcggtcagcctggccctggccccgggtctggccgccggcctgctggaacccgccgacgtggtcgtcgtggccgcctcggggacctccggggccggcaagagcctcaagccgcacctgctgggggcagaggtcatgggctcgatgagcccctacggcgtcggcggcgggcaccgtcacacccccgagatcgagcagaacctcgccctgtccgcgggggtgcccgtgcaggtgtccttcacccccaccctggccccgatgtcccgcgggatcctggccacctgcaccgcccggctcgcccccggcgccgccgccggcgacgtgcgggccgcctgggaacgggcctacgccgccgaacccttcgtgcacctgctccccgaggggcggtggccgtccacggcgtcggtcctggggggcaactcgtgcgcgatgcagctcgccgtcgacgagcgcgccggccgcgtcctcgtcgtcgccgccatcgacaacctcgtcaagggaaccgccggaggagccgtgcaatcggtgaacatcgccctcggactgccggagggcaccgggctgaccgccgcgggggtcgccccgtga

SEQ ID NO: 123256 - protein, 534 aa, Kineococcus radiotolerans SRS30216
MGGRPRAGPGRAGGQRPGGLPRRPGGGPGDGRARVGARGGPELGGGVLGQRDPRRLRRQQGRAVPPRRGDRGRRRRARGPGLRALPRGGAHRDGDGHGPARRAHGVDRPGRRRRDGPGHRGRRAGRVVGALPAGRGGHPRVAAGRGGHALPPRPAAGCGALRRGRPAPPLMHAYPAACMVMHMEPGKRLSVAVAGASGYAGGEVLRVLLDHPHVEIGALTGASNAGTPLGALQPHLPPLADRVLQPTTTEVLAGHDVVFLALPHGASAEVAAELGDDVLVVDLGADHRLTDPARWAEFYGGTHAGTWPYGLPELPLAGGGTQRENLVGTRRIAVPGCYPTAVSLALAPGLAAGLLEPADVVVVAASGTSGAGKSLKPHLLGAEVMGSMSPYGVGGGHRHTPEIEQNLALSAGVPVQVSFTPTLAPMSRGILATCTARLAPGAAAGDVRAAWERAYAAEPFVHLLPEGRWPSTASVLGGNSCAMQLAVDERAGRVLVVAAIDNLVKGTAGGAVQSVNIALGLPEGTGLTAAGVAP

SEQ ID NO: 123257 - DNA, 1029 bp, Sulfitobacter sp. EE-36; identical to SEQ ID NO: 47830
  CDS (1)..(1029): transl_table=11

SEQ ID NO: 123258 - protein, 342 aa, Sulfitobacter sp. EE-36; identical to SEQ ID NO: 47831

SEQ ID NO: 123259 - DNA, 1029 bp, Roseovarius nubinhibens ISM; identical to SEQ ID NO: 47832
  CDS (1)..(1029): transl_table=11

SEQ ID NO: 123260 - protein, 342 aa, Roseovarius nubinhibens ISM; identical to SEQ ID NO: 47833

SEQ ID NO: 123261 - DNA, 1029 bp, Oceanicola batsensis HTCC2597; identical to SEQ ID NO: 47834
  CDS (1)..(1029): transl_table=11

SEQ ID NO: 123262 - protein, 342 aa, Oceanicola batsensis HTCC2597; identical to SEQ ID NO: 47835

SEQ ID NO: 123263 - DNA, 1017 bp, Pseudoalteromonas tunicata D2; identical to SEQ ID NO: 47842
  CDS (1)..(1017): transl_table=11

SEQ ID NO: 123264 - protein, 338 aa, Pseudoalteromonas tunicata D2; identical to SEQ ID NO: 47843

SEQ ID NO: 123265 - DNA, 1014 bp, Photobacterium sp. SKA34; identical to SEQ ID NO: 47844
  CDS (1)..(1014): transl_table=11

SEQ ID NO: 123266 - protein, 337 aa, Photobacterium sp. SKA34; identical to SEQ ID NO: 47845

SEQ ID NO: 123267 - DNA, 1035 bp, Oceanospirillum sp. MED92; identical to SEQ ID NO: 47846
  CDS (1)..(1035): transl_table=11

SEQ ID NO: 123268 - protein, 344 aa, Oceanospirillum sp. MED92; identical to SEQ ID NO: 47847

SEQ ID NO: 123269 - DNA, 978 bp, Flavobacteria bacterium BBFL7; identical to SEQ ID NO: 47848
  CDS (1)..(978): transl_table=11

SEQ ID NO: 123270 - protein, 325 aa, Flavobacteria bacterium BBFL7; identical to SEQ ID NO: 47849

SEQ ID NO: 123271 - DNA, 1038 bp, delta proteobacterium MLMS-1; identical to SEQ ID NO: 47850
  CDS (1)..(1038): transl_table=11

SEQ ID NO: 123272 - protein, 345 aa, delta proteobacterium MLMS-1; identical to SEQ ID NO: 47851

SEQ ID NO: 123273 - DNA, 1035 bp, Oceanobacter sp. RED65; identical to SEQ ID NO: 47852
  CDS (1)..(1035): transl_table=11

SEQ ID NO: 123274 - protein, 344 aa, Oceanobacter sp. RED65; identical to SEQ ID NO: 47853

SEQ ID NO: 123275 - DNA, 1056 bp, Desulfitobacterium hafniense DCB-2; identical to SEQ ID NO: 47854
  CDS (1)..(1056): transl_table=11

SEQ ID NO: 123276 - protein, 351 aa, Desulfitobacterium hafniense DCB-2; identical to SEQ ID NO: 47855

SEQ ID NO: 123277 - DNA, 1005 bp, Vibrio sp. Ex25
  CDS (1)..(1005): transl_table=11
atgctaaaaaccacgattattggagccagcggttacaccggcgcagagttagcgttaatggttaataaacacccacaactcacgctatcaggtttatacgtttccgccaacagtgttgatgcaggaaagaatattgcgcagctgcacggtaagttagcaggcatcattgatatgccggtctcgccactaacggatccactgcaaatcgctcaagaatcggatgtggtgtttttagcaacggctcatgaggtgagccacgatctagccccaactttcttggaggcaggctgtcaggtattcgatttatcgggggcattccgcgtccaaagtgaaggtttttacaacaccttttatggcttcgagcatcaacataataactggctagataaagctgcatacggcttagcagagtggaaccaggaatcaattaaaactgctcccttagttgctgtagcaggttgctacccgactgcttcgcagttagccatcaaacctctactcgaaaatgcattagtggataccaatcaatggcctgtcattaacgcgaccagcggtgtgtccggagctgggcgtaaagcttctatggtgaacagtttctgtgaagtgagcttgcaaccttatggtgtatttactcatcgtcaccaaccagaaattgctcagcacttaggttgcgatgtgatttttactccgcacctaggcaactttaaacgcggcattcttgccacgatcaccatgaagctagcatcaggcgttacagagcaacaagtcgctcaagcatttgaacaagcttatctaggaaagccagccgtgcgtttaaaaggcgatggtattccacgtattcaggatgtcgaaaatacccctttctgcgatatcggctggaaggtacaaggcgaacatatcattgtgatttcagccatcgacaacctactcaaaggtgcatcaagtcaagcgatgcaatgtctcaatattcattatggttacccagaactgacagcgttgctgtag

SEQ ID NO: 123278 - protein, 334 aa, Vibrio sp. Ex25
MLKTTIIGASGYTGAELALMVNKHPQLTLSGLYVSANSVDAGKNIAQLHGKLAGIIDMPVSPLTDPLQIAQESDVVFLATAHEVSHDLAPTFLEAGCQVFDLSGAFRVQSEGFYNTFYGFEHQHNNWLDKAAYGLAEWNQESIKTAPLVAVAGCYPTASQLAIKPLLENALVDTNQWPVINATSGVSGAGRKASMVNSFCEVSLQPYGVFTHRHQPEIAQHLGCDVIFTPHLGNFKRGILATITMKLASGVTEQQVAQAFEQAYLGKPAVRLKGDGIPRIQDVENTPFCDIGWKVQGEHIIVISAIDNLLKGASSQAMQCLNIHYGYPELTALL

SEQ ID NO: 123279 - DNA, 1056 bp, marine gamma proteobacterium HTCC2143; identical to SEQ ID NO: 47860
  CDS (1)..(1056): transl_table=11

SEQ ID NO: 123280 - protein, 351 aa, marine gamma proteobacterium HTCC2143; identical to SEQ ID NO: 47861

SEQ ID NO: 123281 - DNA, 942 bp, Pseudomonas putida GB-1; identical to SEQ ID NO: 47862
  CDS (1)..(942): transl_table=11

SEQ ID NO: 123282 - protein, 313 aa, Pseudomonas putida GB-1; identical to SEQ ID NO: 47863

SEQ ID NO: 123283 - DNA, 1035 bp, Pseudomonas putida GB-1; identical to SEQ ID NO: 47864
  CDS (1)..(1035): transl_table=11

SEQ ID NO: 123284 - protein, 344 aa, Pseudomonas putida GB-1; identical to SEQ ID NO: 47865

SEQ ID NO: 123285 - DNA, 1038 bp, Marinobacter sp. ELB17; identical to SEQ ID NO: 47866
  CDS (1)..(1038): transl_table=11

SEQ ID NO: 123286 - protein, 345 aa, Marinobacter sp. ELB17; identical to SEQ ID NO: 47867

SEQ ID NO: 123287 - DNA, 978 bp, unidentified eubacterium SCB49; identical to SEQ ID NO: 47870
  CDS (1)..(978): transl_table=11

SEQ ID NO: 123288 - protein, 325 aa, unidentified eubacterium SCB49; identical to SEQ ID NO: 47871

SEQ ID NO: 123289 - DNA, 1011 bp, Moritella sp. PE36; identical to SEQ ID NO: 47874
  CDS (1)..(1011): transl_table=11

SEQ ID NO: 123290 - protein, 336 aa, Moritella sp. PE36; identical to SEQ ID NO: 47875

SEQ ID NO: 123291 - DNA, 1038 bp, Herbaspirillum seropedicae; identical to SEQ ID NO: 47876
  CDS (1)..(1038): transl_table=11

SEQ ID NO: 123292 - protein, 345 aa, Herbaspirillum seropedicae; identical to SEQ ID NO: 47877

SEQ ID NO: 123293 - DNA, 1041 bp, Magnetospirillum gryphiswaldense; identical to SEQ ID NO: 47878
  CDS (1)..(1041): transl_table=11

SEQ ID NO: 123294 - protein, 346 aa, Magnetospirillum gryphiswaldense; identical to SEQ ID NO: 47879

SEQ ID NO: 123295 - DNA, 990 bp, Vitis vinifera
  CDS (1)..(990)
atgaactttcaggcagttcggattggtgtacttggggccagtggctacactggttcagagattgttagacttctggcaaaccatccacactttggcattaccctcatgactgcagacagaaaagctggtcaatcaattggatcagtatttccacatttgatcacacaagatttaccagatatggttgctatcaaggatgcaaatttttctaatgtggatgctgtgttttgttgtttgccacatggaaccacacaggacataatcaaagctcttcccaagagtttaaagattgttgacctttctgcagactttcgtctgcaagaaattgctgaatatgaagaatggtatggtcagccacacagagccccagatttgcagaaagaagcagtgtatggcttgacagagattttgagggaagaaattaaagctgcacgtcttgttgccaatcctggctgttatcctacaaccattcagcttcctcttgttcccttgttgaaggctaatctcattgaaacaagaaatctcattattgatgcaaaatctggtgtgagtggagcaggtcgtggtgccaaggaggcaaatctgtacactgaaatagctgaaggcattcattcttatggtattacaaggcatcgccatgttcctgagattgagcagggactttcagatgctgcacatgcaaaagtgactgtcagcttcactcctcacctaatgccaatgagccgtggtatgcaatcaactatatacgtggaaatgaccccaggagtcacaattgaggatttgtacaaacaattaaagattgcctatgaggacgaagaatttgtaattttgctggagaaaggagttgttcctcatactcgaaatgtccgtggatccaattactgtcttctgaatgtctttcctgatcgaatccctggacgagcaattatagtatctgttattgataatcttgtgaagggagcttctggtcaagccttgacagaatcttaa

SEQ ID NO: 123296 - protein, 329 aa, Vitis vinifera
MNFQAVRIGVLGASGYTGSEIVRLLANHPHFGITLMTADRKAGQSIGSVFPHLITQDLPDMVAIKDANFSNVDAVFCCLPHGTTQDIIKALPKSLKIVDLSADFRLQEIAEYEEWYGQPHRAPDLQKEAVYGLTEILREEIKAARLVANPGCYPTTIQLPLVPLLKANLIETRNLIIDAKSGVSGAGRGAKEANLYTEIAEGIHSYGITRHRHVPEIEQGLSDAAHAKVTVSFTPHLMPMSRGMQSTIYVEMTPGVTIEDLYKQLKIAYEDEEFVILLEKGVVPHTRNVRGSNYCLLNVFPDRIPGRAIIVSVIDNLVKGASGQALTES

SEQ ID NO: 123297 - DNA, 1158 bp, Medicago truncatula; identical to SEQ ID NO: 47880
  CDS (1)..(1158)

SEQ ID NO: 123298 - protein, 385 aa, Medicago truncatula; identical to SEQ ID NO: 47881

SEQ ID NO: 123299 - DNA, 1035 bp, Thermoanaerobacter ethanolicus; identical to SEQ ID NO: 47882
  CDS (1)..(1035): transl_table=11

SEQ ID NO: 123300 - protein, 344 aa, Thermoanaerobacter ethanolicus; identical to SEQ ID NO: 47883

SEQ ID NO: 123301 - DNA, 1026 bp, Streptomyces griseus subsp; identical to SEQ ID NO: 47884
  CDS (1)..(1026): transl_table=11

SEQ ID NO: 123302 - protein, 341 aa, Streptomyces griseus subsp; identical to SEQ ID NO: 47885

SEQ ID NO: 123303 - DNA, 1251 bp, Oryza sativa subsp
  CDS (1)..(1251)
atgctgattaatttcttaggcagtgtgtggttacaacttacaagcagtgctgaatttgccgagaagggagtctgtgggcttaatttgaagtcatgcagtggtttcatgctcaaaacgactccaaaggtcggatgcccttcgctccgtgtgagggcatctgtctcttcaccacagaaactatactcttctaagacaacacaagttaaatcaggggaggaggtgcagattgcggttctaggggccagtggttatactggagctgagattgttcggcttctggcaaaccaccctcagtttcatatcaaagtgatgaccgcagatagaaaagctagcgaacagttcggatctgtatttcctcatttgataacgcaggacctcccaaatttagttgcaataaaagatgcagatttttcaaatgttgatgcggttttttgttgcttgccacatggaacaacccaggaaattattaaaggtttaccgaagcaactgaagattgttgatctttctgcggatttccgtttgcgtgatatcaatgagtacgctgagtggtatggtcatgcacatagggcaccagaacttcagcaagaggctgtgtatggtttaactgaagttcttcgagatgaaataagaaatgcacgacttgttgcaaatccaggatgttatcccacatctattcagcttcctcttgttcctctgataaaggcaaaactgatcaagctgagcaacattatcattgatgcaaaatctggggtttgtggagcaggacgtggagcgaaggaggcgaatctttacactgagatagctgaaggcatccatgcttatggaataaaaggccaccgtcatgctcccgagattgaacaaggactttcagaggctgctaaatctaaagtcactatcagttttactccaaatctgatctgtatgaaacgtggaatgcaatctaccatgtttgttgaaatggcacctggagtgactgccggtgatttgtaccagcatctcaagtctacttatgagggcgaagagtttgtcaagcttttacatggcagcactgttcctcacacgcgccatgtcgtgggatcaaattactgcttcatgaatgtcttcgaggacaggattcctggaagggccatcatcatctctgttatagataatcttgtgaagggagcgtctggtcaggctgtccagaacctcaatctgatgatgggcctgcctgagaacagagggctgcaatatcagcccctatttccatga

SEQ ID NO: 123304 - protein, 416 aa, Oryza sativa subsp
MLINFLGSVWLQLTSSAEFAEKGVCGLNLKSCSGFMLKTTPKVGCPSLRVRASVSSPQKLYSSKTTQVKSGEEVQIAVLGASGYTGAEIVRLLANHPQFHIKVMTADRKASEQFGSVFPHLITQDLPNLVAIKDADFSNVDAVFCCLPHGTTQEIIKGLPKQLKIVDLSADFRLRDINEYAEWYGHAHRAPELQQEAVYGLTEVLRDEIRNARLVANPGCYPTSIQLPLVPLIKAKLIKLSNIIIDAKSGVCGAGRGAKEANLYTEIAEGIHAYGIKGHRHAPEIEQGLSEAAKSKVTISFTPNLICMKRGMQSTMFVEMAPGVTAGDLYQHLKSTYEGEEFVKLLHGSTVPHTRHVVGSNYCFMNVFEDRIPGRAIIISVIDNLVKGASGQAVQNLNLMMGLPENRGLQYQPLFP

SEQ ID NO: 123305 - DNA, 2574 bp, Candida albicans; identical to SEQ ID NO: 47886
  CDS (1)..(2574): transl_table=12

SEQ ID NO: 123306 - protein, 857 aa, Candida albicans; identical to SEQ ID NO: 47887

SEQ ID NO: 123307 - DNA, 2616 bp, Neurospora crassa; identical to SEQ ID NO: 47888
  CDS (1)..(2616)

SEQ ID NO: 123308 - protein, 871 aa, Neurospora crassa; identical to SEQ ID NO: 47889

SEQ ID NO: 123309 - DNA, 2658 bp, Schizosaccharomyces pombe; identical to SEQ ID NO: 47890
  CDS (1)..(2658)

SEQ ID NO: 123310 - protein, 885 aa, Schizosaccharomyces pombe; identical to SEQ ID NO: 47891

SEQ ID NO: 123311 - DNA, 2592 bp, Saccharomyces cerevisiae; identical to SEQ ID NO: 47892
  CDS (1)..(2592)

SEQ ID NO: 123312 - protein, 863 aa, Saccharomyces cerevisiae; identical to SEQ ID NO: 47893

SEQ ID NO: 123313 - DNA, 1059 bp, Anabaena sp; identical to SEQ ID NO: 47894
  CDS (1)..(1059): transl_table=11

SEQ ID NO: 123314 - protein, 352 aa, Anabaena sp; identical to SEQ ID NO: 47895

SEQ ID NO: 123315 - DNA, 1251 bp, Deinococcus radiodurans; identical to SEQ ID NO: 47582
  CDS (205)..(1251): transl_table=11

SEQ ID NO: 123316 - protein, 348 aa, Deinococcus radiodurans; identical to SEQ ID NO: 47897

SEQ ID NO: 123317 - DNA, 1035 bp, Pseudomonas putida; identical to SEQ ID NO: 47900
  CDS (1)..(1035): transl_table=11

SEQ ID NO: 123318 - protein, 344 aa, Pseudomonas putida; identical to SEQ ID NO: 47901

SEQ ID NO: 123319 - DNA, 942 bp, Pseudomonas putida; identical to SEQ ID NO: 47908
  CDS (1)..(942): transl_table=11

SEQ ID NO: 123320 - protein, 313 aa, Pseudomonas putida; identical to SEQ ID NO: 47909

SEQ ID NO: 123321 - DNA, 1050 bp, Acinetobacter sp; identical to SEQ ID NO: 47912
  CDS (1)..(1050): transl_table=11

SEQ ID NO: 123322 - protein, 349 aa, Acinetobacter sp; identical to SEQ ID NO: 47913

SEQ ID NO: 123323 - DNA, 1068 bp, Aeropyrum pernix; identical to SEQ ID NO: 47914
  CDS (1)..(1068): transl_table=11

SEQ ID NO: 123324 - protein, 355 aa, Aeropyrum pernix; identical to SEQ ID NO: 47915

SEQ ID NO: 123325 - DNA, 933 bp, Agrobacterium tumefaciens; identical to SEQ ID NO: 47916
  CDS (1)..(933): transl_table=11

SEQ ID NO: 123326 - protein, 310 aa, Agrobacterium tumefaciens; identical to SEQ ID NO: 47917

SEQ ID NO: 123327 - DNA, 1023 bp, Aquifex aeolicus; identical to SEQ ID NO: 47918
  CDS (1)..(1023): transl_table=11

SEQ ID NO: 123328 - protein, 340 aa, Aquifex aeolicus; identical to SEQ ID NO: 47919

SEQ ID NO: 123329 - DNA, 999 bp, Archaeoglobus fulgidus; identical to SEQ ID NO: 47920
  CDS (1)..(999): transl_table=11

SEQ ID NO: 123330 - protein, 332 aa, Archaeoglobus fulgidus; identical to SEQ ID NO: 47921

SEQ ID NO: 123331 - DNA, 1029 bp, Azoarcus sp; identical to SEQ ID NO: 47922
  CDS (1)..(1029): transl_table=11

SEQ ID NO: 123332 - protein, 342 aa, Azoarcus sp; identical to SEQ ID NO: 47923

SEQ ID NO: 123333 - DNA, 1035 bp, Bacillus amyloliquefaciens; identical to SEQ ID NO: 47924
  CDS (1)..(1035): transl_table=11

SEQ ID NO: 123334 - protein, 344 aa, Bacillus amyloliquefaciens; identical to SEQ ID NO: 47925

SEQ ID NO: 123335 - DNA, 1038 bp, Bacillus anthracis; identical to SEQ ID NO: 47926
  CDS (1)..(1038): transl_table=11

SEQ ID NO: 123336 - protein, 345 aa, Bacillus anthracis; identical to SEQ ID NO: 47927

SEQ ID NO: 123337 - DNA, 1038 bp, Bacillus halodurans; identical to SEQ ID NO: 47930
  CDS (1)..(1038): transl_table=11

SEQ ID NO: 123338 - protein, 345 aa, Bacillus halodurans; identical to SEQ ID NO: 47931

SEQ ID NO: 123339 - DNA, 1038 bp, Bacillus thuringiensis subsp; identical to SEQ ID NO: 47932
  CDS (1)..(1038): transl_table=11

SEQ ID NO: 123340 - protein, 345 aa, Bacillus thuringiensis subsp; identical to SEQ ID NO: 47933

SEQ ID NO: 123341 - DNA, 1095 bp, Bifidobacterium longum; identical to SEQ ID NO: 47940
  CDS (1)..(1095): transl_table=11

SEQ ID NO: 123342 - protein, 364 aa, Bifidobacterium longum; identical to SEQ ID NO: 47941

SEQ ID NO: 123343 - DNA, 1065 bp, Bordetella bronchiseptica; identical to SEQ ID NO: 47942
  CDS (1)..(1065): transl_table=11

SEQ ID NO: 123344 - protein, 354 aa, Bordetella bronchiseptica; identical to SEQ ID NO: 47943

SEQ ID NO: 123345 - DNA, 1065 bp, Bordetella pertussis
  CDS (1)..(1065): transl_table=11
atggcccaagcatcgaattcgcgcatcaaggttggcatcgtcggcggcaccgggtataccggcgtcgagctgctgcgcctgctgtcgcagcatccccacgtggagttgaccgccatcacgtcccgcaaggaagacggattgccggtggccgacatgtatcccaacctgcgcggccgcgtgaagctggccttctcggcgcccgagaaagcctcgctgaccgattgcgacgtggtgttcttcgcgaccccgcatggcgtggccatggcgcaggcggccgaactgctggccgccggcacccgcgtcatcgaccttgccgccgatttccgcctgcaggacacggccgtgttcgagcgctggtacaagattccgcatacctgccccgacatcctggccgactccgtctatggcctggtcgagctcaaccgcgaggccatctccaaggcgcgggtgatcggcaacccgggctgctatcccaccacggtgctgctgggcctggctccgctgatcgagggcggcaagcaactggtcgacgtccagaccctgatcgccgactgcaagtcgggcgtgtcgggcgccggccgcaaggccgaggtgggctcgctgttctccgaggcgagcgacaacttcaaggcctatggcgtggccggccaccgccatcagccggaaatcgtcgcccagctcgagaagctggccggcggcaaggtggggctgacgttcgtgccgcacctggtgcccatgatccgcggcatgttctccacgctgtacgcccgcatcctgccgcaggctcgcgacaccgatttccaggcgctgttcgaggcccgctatgccgacgagccgttcgtcgatgtcatgccggccggcagcctgccggaaacccgttcggtgcgcgcctccaacaacctgcgcatctcggtgcaacggccgggcggcggcgaccagctggtcatcctcgtggtccaggacaacctggtcaagggcgcgtccggccaggccgtgcagaacatgaacctcatgttcggcctgcccgaatccgccggcctggaccaggtcgccatcctgccgtaa

SEQ ID NO: 123346 - protein, 354 aa, Bordetella pertussis
MAQASNSRIKVGIVGGTGYTGVELLRLLSQHPHVELTAITSRKEDGLPVADMYPNLRGRVKLAFSAPEKASLTDCDVVFFATPHGVAMAQAAELLAAGTRVIDLAADFRLQDTAVFERWYKIPHTCPDILADSVYGLVELNREAISKARVIGNPGCYPTTVLLGLAPLIEGGKQLVDVQTLIADCKSGVSGAGRKAEVGSLFSEASDNFKAYGVAGHRHQPEIVAQLEKLAGGKVGLTFVPHLVPMIRGMFSTLYARILPQARDTDFQALFEARYADEPFVDVMPAGSLPETRSVRASNNLRISVQRPGGGDQLVILVVQDNLVKGASGQAVQNMNLMFGLPESAGLDQVAILP

SEQ ID NO: 123347 - DNA, 1005 bp, Buchnera aphidicola subsp; identical to SEQ ID NO: 47948
  CDS (1)..(1005): transl_table=11

SEQ ID NO: 123348 - protein, 334 aa, Buchnera aphidicola subsp; identical to SEQ ID NO: 47949

SEQ ID NO: 123349 - DNA, 1029 bp, Campylobacter jejuni; identical to SEQ ID NO: 47952
  CDS (1)..(1029): transl_table=11

SEQ ID NO: 123350 - protein, 342 aa, Campylobacter jejuni; identical to SEQ ID NO: 47953

SEQ ID NO: 123351 - DNA, 954 bp, Caulobacter crescentus; identical to SEQ ID NO: 47956
  CDS (1)..(954): transl_table=11

SEQ ID NO: 123352 - protein, 317 aa, Caulobacter crescentus; identical to SEQ ID NO: 47957

SEQ ID NO: 123353 - DNA, 1026 bp, Chlorobium tepidum; identical to SEQ ID NO: 47958
  CDS (1)..(1026): transl_table=11

SEQ ID NO: 123354 - protein, 341 aa, Chlorobium tepidum; identical to SEQ ID NO: 47959

SEQ ID NO: 123355 - DNA, 1029 bp, Chromobacterium violaceum; identical to SEQ ID NO: 47960
  CDS (1)..(1029): transl_table=11

SEQ ID NO: 123356 - protein, 342 aa, Chromobacterium violaceum; identical to SEQ ID NO: 47961

SEQ ID NO: 123357 - DNA, 1044 bp, Corynebacterium diphtheriae; identical to SEQ ID NO: 47964
  CDS (1)..(1044): transl_table=11

SEQ ID NO: 123358 - protein, 347 aa, Corynebacterium diphtheriae; identical to SEQ ID NO: 47965

SEQ ID NO: 123359 - DNA, 1005 bp, Escherichia coli O157; identical to SEQ ID NO: 47968
  CDS (1)..(1005): transl_table=11

SEQ ID NO: 123360 - protein, 334 aa, Escherichia coli O157; identical to SEQ ID NO: 47969

SEQ ID NO: 123361 - DNA, 1005 bp, Escherichia coli; identical to SEQ ID NO: 47972
  CDS (1)..(1005): transl_table=11

SEQ ID NO: 123362 - protein, 334 aa, Escherichia coli; identical to SEQ ID NO: 47973

SEQ ID NO: 123363 - DNA, 1005 bp, Erwinia carotovora subsp; identical to SEQ ID NO: 47974
  CDS (1)..(1005): transl_table=11

SEQ ID NO: 123364 - protein, 334 aa, Erwinia carotovora subsp; identical to SEQ ID NO: 47975

SEQ ID NO: 123365 - DNA, 1041 bp, Geobacter sulfurreducens; identical to SEQ ID NO: 47978
  CDS (1)..(1041): transl_table=11

SEQ ID NO: 123366 - protein, 346 aa, Geobacter sulfurreducens; identical to SEQ ID NO: 47979

SEQ ID NO: 123367 - DNA, 1053 bp, Gloeobacter violaceus; identical to SEQ ID NO: 47980
  CDS (1)..(1053): transl_table=11

SEQ ID NO: 123368 - protein, 350 aa, Gloeobacter violaceus; identical to SEQ ID NO: 47981

SEQ ID NO: 123369 - DNA, 1038 bp, Haloarcula marismortui; identical to SEQ ID NO: 47982
  CDS (1)..(1038): transl_table=11

SEQ ID NO: 123370 - protein, 345 aa, Haloarcula marismortui; identical to SEQ ID NO: 47983

SEQ ID NO: 123371 - DNA, 1026 bp, Idiomarina loihiensis; identical to SEQ ID NO: 47984
  CDS (1)..(1026): transl_table=11

SEQ ID NO: 123372 - protein, 341 aa, Idiomarina loihiensis; identical to SEQ ID NO: 47985

SEQ ID NO: 123373 - DNA, 1023 bp, Lactococcus lactis subsp; identical to SEQ ID NO: 47986
  CDS (1)..(1023): transl_table=11

SEQ ID NO: 123374 - protein, 340 aa, Lactococcus lactis subsp; identical to SEQ ID NO: 47987

SEQ ID NO: 123375 - DNA, 1044 bp, Leifsonia xyli subsp; identical to SEQ ID NO: 47988
  CDS (1)..(1044): transl_table=11

SEQ ID NO: 123376 - protein, 347 aa, Leifsonia xyli subsp; identical to SEQ ID NO: 47989

SEQ ID NO: 123377 - DNA, 1017 bp, Leptospira interrogans serogroup Icterohaemorrhagiae serovar; identical to SEQ ID NO: 47990
  CDS (1)..(1017): transl_table=11

SEQ ID NO: 123378 - protein, 338 aa, Leptospira interrogans serogroup Icterohaemorrhagiae serovar; identical to SEQ ID NO: 47991

SEQ ID NO: 123379 - DNA, 1032 bp, Listeria monocytogenes serotype 4b; identical to SEQ ID NO: 47996
  CDS (1)..(1032): transl_table=11

SEQ ID NO: 123380 - protein, 343 aa, Listeria monocytogenes serotype 4b; identical to SEQ ID NO: 47997

SEQ ID NO: 123381 - DNA, 1032 bp, Listeria monocytogenes; identical to SEQ ID NO: 47998
  CDS (1)..(1032): transl_table=11

SEQ ID NO: 123382 - protein, 343 aa, Listeria monocytogenes; identical to SEQ ID NO: 47999

SEQ ID NO: 123383 - DNA, 1128 bp, Methanococcus jannaschii; identical to SEQ ID NO: 47578
  CDS (103)..(1128): transl_table=11

SEQ ID NO: 123384 - protein, 341 aa, Methanococcus jannaschii; identical to SEQ ID NO: 48003

SEQ ID NO: 123385 - DNA, 1032 bp, Methanopyrus kandleri; identical to SEQ ID NO: 48004
  CDS (1)..(1032): transl_table=11

SEQ ID NO: 123386 - protein, 343 aa, Methanopyrus kandleri; identical to SEQ ID NO: 48005

SEQ ID NO: 123387 - DNA, 1032 bp, Methanococcus maripaludis; identical to SEQ ID NO: 48008
  CDS (1)..(1032): transl_table=11

SEQ ID NO: 123388 - protein, 343 aa, Methanococcus maripaludis; identical to SEQ ID NO: 48009

SEQ ID NO: 123389 - DNA, 1149 bp, Methanobacterium thermoautotrophicum; identical to SEQ ID NO: 47580
  CDS (145)..(1149): transl_table=11

SEQ ID NO: 123390 - protein, 334 aa, Methanobacterium thermoautotrophicum; identical to SEQ ID NO: 48011

SEQ ID NO: 123391 - DNA, 1011 bp, Moritella abyssi; identical to SEQ ID NO: 48012
  CDS (1)..(1011): transl_table=11

SEQ ID NO: 123392 - protein, 336 aa, Moritella abyssi; identical to SEQ ID NO: 48013

SEQ ID NO: 123393 - DNA, 1011 bp, Moritella profunda; identical to SEQ ID NO: 48014
  CDS (1)..(1011): transl_table=11

SEQ ID NO: 123394 - protein, 336 aa, Moritella profunda; identical to SEQ ID NO: 48015

SEQ ID NO: 123395 - DNA, 1044 bp, Mycobacterium leprae; identical to SEQ ID NO: 48018
  CDS (1)..(1044): transl_table=11

SEQ ID NO: 123396 - protein, 347 aa, Mycobacterium leprae; identical to SEQ ID NO: 48019

SEQ ID NO: 123397 - DNA, 1044 bp, Neisseria meningitidis serogroup A; identical to SEQ ID NO: 48022
  CDS (1)..(1044): transl_table=11

SEQ ID NO: 123398 - protein, 347 aa, Neisseria meningitidis serogroup A; identical to SEQ ID NO: 48023

SEQ ID NO: 123399 - DNA, 1044 bp, Neisseria meningitidis serogroup B; identical to SEQ ID NO: 48024
  CDS (1)..(1044): transl_table=11

SEQ ID NO: 123400 - protein, 347 aa, Neisseria meningitidis serogroup B; identical to SEQ ID NO: 48025

SEQ ID NO: 123401 - DNA, 1029 bp, Nitrosomonas europaea; identical to SEQ ID NO: 48026
  CDS (1)..(1029): transl_table=11

SEQ ID NO: 123402 - protein, 342 aa, Nitrosomonas europaea; identical to SEQ ID NO: 48027

SEQ ID NO: 123403 - DNA, 1059 bp, Nostoc ellipsosporum; identical to SEQ ID NO: 48028
  CDS (1)..(1059): transl_table=11

SEQ ID NO: 123404 - protein, 352 aa, Nostoc ellipsosporum; identical to SEQ ID NO: 48029

SEQ ID NO: 123405 - DNA, 1041 bp, Oceanobacillus iheyensis; identical to SEQ ID NO: 48030
  CDS (1)..(1041): transl_table=11

SEQ ID NO: 123406 - protein, 346 aa, Oceanobacillus iheyensis; identical to SEQ ID NO: 48031

SEQ ID NO: 123407 - DNA, 1008 bp, Pasteurella multocida; identical to SEQ ID NO: 48032
  CDS (1)..(1008): transl_table=11

SEQ ID NO: 123408 - protein, 335 aa, Pasteurella multocida; identical to SEQ ID NO: 48033

SEQ ID NO: 123409 - DNA, 1005 bp, Photorhabdus luminescens subsp; identical to SEQ ID NO: 48034
  CDS (1)..(1005): transl_table=11

SEQ ID NO: 123410 - protein, 334 aa, Photorhabdus luminescens subsp; identical to SEQ ID NO: 48035

SEQ ID NO: 123411 - DNA, 1044 bp, Picrophilus torridus; identical to SEQ ID NO: 48036
  CDS (1)..(1044): transl_table=11

SEQ ID NO: 123412 - protein, 347 aa, Picrophilus torridus; identical to SEQ ID NO: 48037

SEQ ID NO: 123413 - DNA, 1080 bp, Prochlorococcus marinus; identical to SEQ ID NO: 48038
  CDS (1)..(1080): transl_table=11

SEQ ID NO: 123414 - protein, 359 aa, Prochlorococcus marinus; identical to SEQ ID NO: 48039

SEQ ID NO: 123415 - DNA, 1035 bp, Pseudomonas aeruginosa; identical to SEQ ID NO: 48042
  CDS (1)..(1035): transl_table=11

SEQ ID NO: 123416 - protein, 344 aa, Pseudomonas aeruginosa; identical to SEQ ID NO: 48043

SEQ ID NO: 123417 - DNA, 1035 bp, Pseudomonas syringae pv; identical to SEQ ID NO: 48044
  CDS (1)..(1035): transl_table=11

SEQ ID NO: 123418 - protein, 344 aa, Pseudomonas syringae pv; identical to SEQ ID NO: 48045

SEQ ID NO: 123419 - DNA, 993 bp, Pyrococcus abyssi; identical to SEQ ID NO: 48046
  CDS (1)..(993): transl_table=11

SEQ ID NO: 123420 - protein, 330 aa, Pyrococcus abyssi; identical to SEQ ID NO: 48047

SEQ ID NO: 123421 - DNA, 1056 bp, Pyrobaculum aerophilum; identical to SEQ ID NO: 48048
  CDS (1)..(1056): transl_table=11

SEQ ID NO: 123422 - protein, 351 aa, Pyrobaculum aerophilum; identical to SEQ ID NO: 48049

SEQ ID NO: 123423 - DNA, 993 bp, Pyrococcus horikoshii; identical to SEQ ID NO: 48052
  CDS (1)..(993): transl_table=11

SEQ ID NO: 123424 - protein, 330 aa, Pyrococcus horikoshii; identical to SEQ ID NO: 48053

SEQ ID NO: 123425 - DNA, 993 bp, Pyrococcus kodakaraensis; identical to SEQ ID NO: 48054
  CDS (1)..(993): transl_table=11

SEQ ID NO: 123426 - protein, 330 aa, Pyrococcus kodakaraensis; identical to SEQ ID NO: 48055

SEQ ID NO: 123427 - DNA, 999 bp, Rhizobium meliloti; identical to SEQ ID NO: 47588
  CDS (67)..(999): transl_table=11

SEQ ID NO: 123428 - protein, 310 aa, Rhizobium meliloti; identical to SEQ ID NO: 48063

SEQ ID NO: 123429 - DNA, 1041 bp, Rhodopirellula baltica; identical to SEQ ID NO: 48064
  CDS (1)..(1041): transl_table=11

SEQ ID NO: 123430 - protein, 346 aa, Rhodopirellula baltica; identical to SEQ ID NO: 48065

SEQ ID NO: 123431 - DNA, 1005 bp, Salmonella typhimurium; identical to SEQ ID NO: 48070
  CDS (1)..(1005): transl_table=11

SEQ ID NO: 123432 - protein, 334 aa, Salmonella typhimurium; identical to SEQ ID NO: 48071

SEQ ID NO: 123433 - DNA, 1005 bp, Shigella flexneri; identical to SEQ ID NO: 48074
  CDS (1)..(1005): transl_table=11

SEQ ID NO: 123434 - protein, 334 aa, Shigella flexneri; identical to SEQ ID NO: 48075

SEQ ID NO: 123435 - DNA, 1029 bp, Silicibacter pomeroyi; identical to SEQ ID NO: 48076
  CDS (1)..(1029): transl_table=11

SEQ ID NO: 123436 - protein, 342 aa, Silicibacter pomeroyi; identical to SEQ ID NO: 48077

SEQ ID NO: 123437 - DNA, 1029 bp, Streptomyces avermitilis; identical to SEQ ID NO: 48084
  CDS (1)..(1029): transl_table=11

SEQ ID NO: 123438 - protein, 342 aa, Streptomyces avermitilis; identical to SEQ ID NO: 48085

SEQ ID NO: 123439 - DNA, 1026 bp, Streptomyces clavuligerus; identical to SEQ ID NO: 48086
  CDS (1)..(1026): transl_table=11

SEQ ID NO: 123440 - protein, 341 aa, Streptomyces clavuligerus; identical to SEQ ID NO: 48087

SEQ ID NO: 123441 - DNA, 1029 bp, Streptomyces coelicolor; identical to SEQ ID NO: 48088
  CDS (1)..(1029): transl_table=11

SEQ ID NO: 123442 - protein, 342 aa, Streptomyces coelicolor; identical to SEQ ID NO: 48089

SEQ ID NO: 123443 - DNA, 1023 bp, Streptococcus mutans; identical to SEQ ID NO: 48090
  CDS (1)..(1023): transl_table=11

SEQ ID NO: 123444 - protein, 340 aa, Streptococcus mutans; identical to SEQ ID NO: 48091

SEQ ID NO: 123445 - DNA, 1053 bp, Sulfolobus acidocaldarius; identical to SEQ ID NO: 48092
  CDS (1)..(1053): transl_table=11

SEQ ID NO: 123446 - protein, 350 aa, Sulfolobus acidocaldarius; identical to SEQ ID NO: 48093

SEQ ID NO: 123447 - DNA, 1092 bp, Sulfolobus tokodaii; identical to SEQ ID NO: 47586
  CDS (43)..(1092): transl_table=11

SEQ ID NO: 123448 - protein, 349 aa, Sulfolobus tokodaii; identical to SEQ ID NO: 48097

SEQ ID NO: 123449 - DNA, 1053 bp, Synechococcus elongatus; identical to SEQ ID NO: 48098
  CDS (1)..(1053): transl_table=11

SEQ ID NO: 123450 - protein, 350 aa, Synechococcus elongatus; identical to SEQ ID NO: 48099

SEQ ID NO: 123451 - DNA, 1059 bp, Synechococcus sp; identical to SEQ ID NO: 48100
  CDS (1)..(1059): transl_table=11

SEQ ID NO: 123452 - protein, 352 aa, Synechococcus sp; identical to SEQ ID NO: 48101

SEQ ID NO: 123453 - DNA, 1056 bp, Synechocystis sp
  CDS (1)..(1056): transl_table=11
atggggaatgaaaaagctagagtcggtatcattggcgcgtcgggctatggcggcattcagctagtacgtttattgttggaacatccccaggtggaattgacctacctagcggggcacagcagtgcaggcaagccctacagtgatctttatccccatttaacccaccgggtaaacctcaccatcgaacccattgacctagaggcgatcgccagccgttgtgatgcggtgttccttggtctgcccaatggtttagcctgtgacatggccccggcattattggccaaaggttgtaaagttttagatctgtcggcggactatcgtttccgcaatcttaacacctacacggaatggtacaaaaaggatcgtcaggaccaagccaccaataaccaagctgtttacggcctgccggaattgtaccgggatgctattagggatgcccaactaattggttgccccggctgttatcccaccgccagtttactagccctttccccgttgctgaaacagggtttcattgtgcccgaaactgccattattgacgctaagtccggtacttccgggggaggtagagaggcaaaagttaacatgctcctagcagaagcagaaggatctttgggggcctacggagtagctaaacaccgccatacccctgaaattgaacagattgccagtgatttggccggtacggagctaagggtacagttcacgcctcacttgatccccatggtgcgcggtatcctagccaccgtttatgccaccctgcgggatccgggtttggtgcgggatgatctgatcaccatttacagtgctttttaccgggcttccccctttgtgaaaattctgccccacggggtttacccccaaacgaaatgggcttgggggacgaatctttgctacattggcatcgaagtggacccccgcactgggcgggtaattgtcctttccgccattgataatctggtcaaaggccaggcagggcaggcagtgcaatgcttaaacctcatgatgggttgggaagaatccttaggcttgccccaactggctttttatccctag

SEQ ID NO: 123454 - protein, 351 aa, Synechocystis sp; identical to SEQ ID NO: 47567

SEQ ID NO: 123455 - DNA, 1020 bp, Thermotoga neapolitana; identical to SEQ ID NO: 48106
  CDS (1)..(1020): transl_table=11

SEQ ID NO: 123456 - protein, 339 aa, Thermotoga neapolitana; identical to SEQ ID NO: 48107

SEQ ID NO: 123457 - DNA, 1035 bp, Thermoanaerobacter tengcongensis; identical to SEQ ID NO: 48108
  CDS (1)..(1035): transl_table=11

SEQ ID NO: 123458 - protein, 344 aa, Thermoanaerobacter tengcongensis; identical to SEQ ID NO: 48109

SEQ ID NO: 123459 - DNA, 1014 bp, Wolinella succinogenes; identical to SEQ ID NO: 48118
  CDS (1)..(1014): transl_table=11

SEQ ID NO: 123460 - protein, 337 aa, Wolinella succinogenes; identical to SEQ ID NO: 48119

SEQ ID NO: 123461 - DNA, 951 bp, Xanthomonas axonopodis pv; identical to SEQ ID NO: 48120
  CDS (1)..(951): transl_table=11

SEQ ID NO: 123462 - protein, 316 aa, Xanthomonas axonopodis pv; identical to SEQ ID NO: 48121

SEQ ID NO: 123463 - DNA, 1002 bp, Xylella fastidiosa; identical to SEQ ID NO: 48124
  CDS (1)..(1002): transl_table=11

SEQ ID NO: 123464 - protein, 333 aa, Xylella fastidiosa; identical to SEQ ID NO: 48125

SEQ ID NO: 123465 - DNA, 1005 bp, Yersinia pestis; identical to SEQ ID NO: 48128
  CDS (1)..(1005): transl_table=11

SEQ ID NO: 123466 - protein, 334 aa, Yersinia pestis; identical to SEQ ID NO: 48129

SEQ ID NO: 123467 - DNA, 1248 bp, Oryza sativa; identical to SEQ ID NO: 48132
  CDS (1)..(1248)

SEQ ID NO: 123468 - protein, 415 aa, Oryza sativa; identical to SEQ ID NO: 48133

SEQ ID NO: 123469 - DNA, 22 bp, Artificial sequence
  primer
atgctcaaggtcggtatcgttg

SEQ ID NO: 123470 - DNA, 21 bp, Artificial sequence
  primer
ttagggcagcagagctgcgtg

SEQ ID NO: 123471 - protein, 410 aa, Artificial sequence
  consensus sequence
  Variant (2)..(3): Xaa in position 2 to 3 is any amino acid
  Variant (6)..(6): Xaa in position 6 is any amino acid
  Variant (8)..(9): Xaa in position 8 to 9 is any amino acid
  Variant (11)..(13): Xaa in position 11 to 13 is any amino acid
  Variant (14)..(16): Xaa in position 14 to 16 is any or no amino acid
  Variant (19)..(43): Xaa in position 19 to 43 is any amino acid
  Variant (44)..(72): Xaa in position 44 to 72 is any or no amino acid
  Variant (74)..(79): Xaa in position 74 to 79 is any amino acid
  Variant (81)..(91): Xaa in position 81 to 91 is any amino acid
  Variant (92)..(107): Xaa in position 92 to 107 is any or no amino acid
  Variant (110)..(110): Xaa in position 110 is any amino acid
  Variant (111)..(111): Xaa in position 111 is any or no amino acid
  Variant (113)..(113): Xaa in position 113 is any amino acid
  Variant (115)..(118): Xaa in position 115 to 118 is any amino acid
  Variant (119)..(127): Xaa in position 119 to 127 is any or no amino acid
  Variant (129)..(130): Xaa in position 129 to 130 is any amino acid
  Variant (131)..(147): Xaa in position 131 to 147 is any or no amino acid
  Variant (151)..(151): Xaa in position 151 is any amino acid
  Variant (153)..(163): Xaa in position 153 to 163 is any amino acid
  Variant (164)..(178): Xaa in position 164 to 178 is any or no amino acid
  Variant (182)..(183): Xaa in position 182 to 183 is any amino acid
  Variant (185)..(187): Xaa in position 185 to 187 is any amino acid
  Variant (189)..(191): Xaa in position 189 to 191 is any amino acid
  Variant (194)..(206): Xaa in position 194 to 206 is any amino acid
  Variant (207)..(215): Xaa in position 207 to 215 is any or no amino acid
  Variant (217)..(217): Xaa in position 217 is any amino acid
  Variant (222)..(237): Xaa in position 222 to 237 is any amino acid
  Variant (238)..(250): Xaa in position 238 to 250 is any or no amino acid
  Variant (252)..(255): Xaa in position 252 to 255 is any amino acid
  Variant (256)..(259): Xaa in position 256 to 259 is any or no amino acid
  Variant (261)..(261): Xaa in position 261 is any amino acid
  Variant (263)..(264): Xaa in position 263 to 264 is any amino acid
  Variant (266)..(275): Xaa in position 266 to 275 is any amino acid
  Variant (276)..(287): Xaa in position 276 to 287 is any or no amino acid
  Variant (289)..(289): Xaa in position 289 is any amino acid
  Variant (291)..(296): Xaa in position 291 to 296 is any amino acid
  Variant (299)..(301): Xaa in position 299 to 301 is any amino acid
  Variant (303)..(319): Xaa in position 303 to 319 is any amino acid
  Variant (320)..(328): Xaa in position 320 to 328 is any or no amino acid
  Variant (330)..(341): Xaa in position 330 to 341 is any amino acid
  Variant (342)..(351): Xaa in position 342 to 351 is any or no amino acid
  Variant (353)..(380): Xaa in position 353 to 380 is any amino acid
  Variant (381)..(383): Xaa in position 381 to 383 is any or no amino acid
  Variant (387)..(387): Xaa in position 387 is any amino acid
  Variant (391)..(392): Xaa in position 391 to 392 is any amino acid
  Variant (395)..(395): Xaa in position 395 is any amino acid
  Variant (397)..(398): Xaa in position 397 to 398 is any amino acid
  Variant (400)..(402): Xaa in position 400 to 402 is any amino acid
  Variant (404)..(404): Xaa in position 404 is any amino acid
  Variant (405)..(405): Xaa in position 405 is any or no amino acid
  Variant (407)..(408): Xaa in position 407 to 408 is any amino acid
GXXGYXGXXLXXXXXXHPXXXXXXXXXXXXXXXXXXXXXXXXXXXXXXXXXXXXXXXXXXXXXXXXXXXXXXDXXXXXXPXXXXXXXXXXXXXXXXXXXXXXXXXXXDLXXDXRXXXXXXXXXXXXXYXXXXXXXXXXXXXXXXXXXYGLXEXXXXXXXXXXXXXXXXXXXXXXXXXXPGCXXTXXXLXXXPLXXXXXXXXXXXXXXXXXXXXXXGXSGAGXXXXXXXXXXXXXXXXXXXXXXXXXXXXXYXXXXXXXXHXHXXEXXXXXXXXXXXXXXXXXXXXXXFXPXXXXXXRGXXXTXXXXXXXXXXXXXXXXXXXXXXXXXXYXXXXXXXXXXXXXXXXXXXXXXPXXXXXXXXXXXXXXXXXXXXXXXXXXXXXXXDNLXKGAXXQAXQXXNXXXGXXEXXGL

SEQ ID NO: 123472 - protein, 27 aa, Artificial sequence
  protein pattern
  Variant (2)..(7): Xaa in position 2 to 7 is any or no amino acid
  Variant (11)..(11): Xaa in position 11 is any amino acid
  Variant (14)..(14): Xaa in position 14 is Ala, Gly, Gln, Ser or Thr
  Variant (15)..(15): Xaa in position 15 is Ala or Ser
  Variant (16)..(16): Xaa in position 16 is Ala, Gly, Ser or Thr
  Variant (17)..(17): Xaa in position 17 is any amino acid
  Variant (18)..(18): Xaa in position 18 is Ala, Cys or Gly
  Variant (19)..(19): Xaa in position 19 is Ile, Leu, Met or Val
  Variant (21)..(21): Xaa in position 21 is Ala, Cys, Asp, Asn, Ser or Val
  Variant (22)..(26): Xaa in position 22 to 26 is any amino acid
  Variant (27)..(27): Xaa in position 27 is Asp, Glu, Gly, Asn or Ser
IXXXXXXDNLXKGXXXXXXQXXXXXXX

SEQ ID NO: 123473 - DNA, 240 bp, Escherichia coli
  CDS (1)..(240): transl_table=11
atgacccaatccgtgttgctgccaccggggcctttcacccggagacaagcgcaagcggtcactaccacgtacagcaatatcacactcgaagacgaccagggcagtcacttccgtctggtggttcgtgatactgaaggccggatggtctggcgggcatggaactttgagccggatgccggtgaaggtcttaaccgctatatccgcacctcaggcatccgtacagacacggccacccgctaa

SEQ ID NO: 123474 - protein, 79 aa, Escherichia coli
MTQSVLLPPGPFTRRQAQAVTTTYSNITLEDDQGSHFRLVVRDTEGRMVWRAWNFEPDAGEGLNRYIRTSGIRTDTATR

SEQ ID NO: 123475 - DNA, 240 bp, Escherichia coli
  CDS (1)..(240): transl_table=11
atgaggatgagcgaatatttcagaatacttcagggactgcctgacggtccttttacccgcaaacaggccgaagccgttgccgcacagtaccggaacgtctttatcgaggatgaccacggcgaacagtttcgcctggttgtccgtaataacggaacaatggtctggcgtacctggaattttgaggacggtgccgggtactggatgaaccatgtcatccgtgatttcgggatccttaagtaa

SEQ ID NO: 123476 - protein, 79 aa, Escherichia coli
MRMSEYFRILQGLPDGPFTRKQAEAVAAQYRNVFIEDDHGEQFRLVVRNNGTMVWRTWNFEDGAGYWMNHVIRDFGILK

SEQ ID NO: 123477 - DNA, 228 bp, Salmonella enterica
  CDS (1)..(228): transl_table=11
atgatcccactgaaatccctgcctgatggcacgttcacccacgaacaggccgaagcggtggcagcacagtatcagaatgtcgccattgaagacgatcaggggacgcaccttcgcttggttgtgcgtaaggacggcgaaatggtctggcggggctggaattttgaaccgggcggcgagtactggctcaaccgctgtatcgaaagccacggtatccgtaaaacgcagtaa

SEQ ID NO: 123478 - protein, 75 aa, Salmonella enterica
MIPLKSLPDGTFTHEQAEAVAAQYQNVAIEDDQGTHLRLVVRKDGEMVWRGWNFEPGGEYWLNRCIESHGIRKTQ

SEQ ID NO: 123479 - DNA, 234 bp, Escherichia coli
  CDS (1)..(234): transl_table=11
atgagcgaatatttcagaatacttcaggggctgccggacggctcctttacccgcgaacaggcggaagccgttgccgcacagtaccggaacgtctttatcgaggatgagcagggaacgcattttcgcctggttgtccgcaataacagtggcctggtctggcgtacctggaattttgaggacggtgccgggtactggatgaaccatgtcatcagggatttcggcattcttaagtaa

SEQ ID NO: 123480 - protein, 77 aa, Escherichia coli
MSEYFRILQGLPDGSFTREQAEAVAAQYRNVFIEDEQGTHFRLVVRNNSGLVWRTWNFEDGAGYWMNHVIRDFGILK

SEQ ID NO: 123481 - DNA, 240 bp, Escherichia coli
  CDS (1)..(240): transl_table=11
atgaggatgagcgaatatttcagaatacttcaggggctgccggacggctcctttacccgcgaacaggcggaagccgttgccgcacagtaccggaacgtctttatcgaggatgaccacggggaacattttcgcctggttgtccgcaataacagtggcctggtctggcgtacctggaattttgaggacggtgccgggtactggatgaaacatgtcatccggaatttcggcattcttaagtaa

SEQ ID NO: 123482 - protein, 79 aa, Escherichia coli
MRMSEYFRILQGLPDGSFTREQAEAVAAQYRNVFIEDDHGEHFRLVVRNNSGLVWRTWNFEDGAGYWMKHVIRNFGILK

SEQ ID NO: 123483 - DNA, 234 bp, Escherichia coli B
  CDS (1)..(234): transl_table=11
atgccagaacttactgtactgccttatggtccgtttacccgccagcagtcagcggctgtggcgtcacaatacaccaacgttgctacagaggatgaccagaacacacattttcgcctggtggtccgggataccgacggcaggatgcactggcgggccaggaactttgagccggaggcgggttactggctgaaccgctatctcaccagcgatggcattcgcagagccacaacgtaa

SEQ ID NO: 123484 - protein, 77 aa, Escherichia coli B
MPELTVLPYGPFTRQQSAAVASQYTNVATEDDQNTHFRLVVRDTDGRMHWRARNFEPEAGYWLNRYLTSDGIRRATT

SEQ ID NO: 123485 - DNA, 234 bp, Escherichia coli O6
  CDS (1)..(234): transl_table=11
atgtcggactgtcaccctgttttattgcccgaaggccctttctcacgcgaacaggcgatggctgtcacaacagcttaccgcaatgtgcttattgaagatgatcagggaacgcatttccggctggttatccacaatgctgaagggcagctacgctggcggtgctggaattttgaacctgatgccggaaaacagctaaatccatatctcgccagtgagggaattctcaggcaataa

SEQ ID NO: 123486 - protein, 77 aa, Escherichia coli O6
MSDCHPVLLPEGPFSREQAMAVTTAYRNVLIEDDQGTHFRLVIHNAEGQLRWRCWNFEPDAGKQLNPYLASEGILRQ

SEQ ID NO: 123487 - DNA, 243 bp, Salmonella typhimurium
  CDS (1)..(243): transl_table=11
atgacagacaacatcatgagcccactgaaatccctgcctgatggcacgttcacccacgaacaggccgaagcggtggcagcacagtatcagaatgtcgccattgaagacgatcaggggacgcaccttcgcttggttgtgcgtaaggacggcgaaatggtctggcggggctggaattttgaaccgggcggcgagtactggctcaaccgctgtatcgaaagccacggtatccgtaaaacgcagtaa

SEQ ID NO: 123488 - protein, 80 aa, Salmonella typhimurium
MTDNIMSPLKSLPDGTFTHEQAEAVAAQYQNVAIEDDQGTHLRLVVRKDGEMVWRGWNFEPGGEYWLNRCIESHGIRKTQ

SEQ ID NO: 123489 - DNA, 240 bp, Escherichia coli
  CDS (1)..(240): transl_table=11
atgaggatgagcgaatatttcagaatacttcaggggctgcctgacggctcctttacccgcgaacaggccgaagccgttgccgtacagtaccggaacgtctttatcgaggatgatcacggcgaacagtttcgcctggttgtccgtaataacggtgcaatggtctggcgtacctggaattttgaggacggtgccgggtactggatgaaccatgtcatccgtgatttcgggattcttaagtaa

SEQ ID NO: 123490 - protein, 79 aa, Escherichia coli [sequence omitted]

SEQ ID NO: 123491 - DNA, 240 bp, Salmonella typhimurium
  CDS (1)..(240): transl_table=11
atgaggatgagcgaatatttcagaatacttcagggactgccggacggtccttttacccgcaaacaggccgaagccgttgccgcacagtaccggaatgtctttatcgaggatgatcagggaacgcattttcgcctggttgtccgtcaggatggcacgttgatctggcgctcctggaattttgaggactgtgccgggtactggatgaaccggtacatcagggatttcgggattcttaagtaa

SEQ ID NO: 123492 - protein, 79 aa, Salmonella typhimurium
MRMSEYFRILQGLPDGPFTRKQAEAVAAQYRNVFIEDDQGTHFRLVVRQDGTLIWRSWNFEDCAGYWMNRYIRDFGILK

SEQ ID NO: 123493 - DNA, 22 bp, Artificial sequence
  primer
atgacccaatccgtgttgctgc

SEQ ID NO: 123494 - DNA, 23 bp, Artificial sequence
  primer
ttagcgggtggccgtgtctgtac

SEQ ID NO: 123495 - protein, 76 aa, Artificial sequence
  consensus sequence
  Variant (2)..(3): Xaa in position 2 to 3 is any amino acid
  Variant (4)..(7): Xaa in position 4 to 7 is any or no amino acid
  Variant (9)..(10): Xaa in position 9 to 10 is any amino acid
  Variant (13)..(13): Xaa in position 13 is any amino acid
  Variant (15)..(15): Xaa in position 15 is any amino acid
  Variant (19)..(19): Xaa in position 19 is any amino acid
  Variant (22)..(22): Xaa in position 22 is any amino acid
  Variant (26)..(26): Xaa in position 26 is any amino acid
  Variant (29)..(29): Xaa in position 29 is any amino acid
  Variant (32)..(32): Xaa in position 32 is any amino acid
  Variant (37)..(37): Xaa in position 37 is any amino acid
  Variant (39)..(39): Xaa in position 39 is any amino acid
  Variant (47)..(48): Xaa in position 47 to 48 is any amino acid
  Variant (49)..(49): Xaa in position 49 is any or no amino acid
  Variant (51)..(53): Xaa in position 51 to 53 is any amino acid
  Variant (56)..(56): Xaa in position 56 is any amino acid
  Variant (61)..(62): Xaa in position 61 to 62 is any amino acid
  Variant (67)..(67): Xaa in position 67 is any amino acid
  Variant (69)..(70): Xaa in position 69 to 70 is any amino acid
  Variant (72)..(74): Xaa in position 72 to 74 is any amino acid
MXXXXXXLXXLPXGXFTRXQAXAVAXQYXNVXIEDDXGXHFRLVVRXXXGXXXWRXWNFEXXAGYWXNXXIXXXGI

SEQ ID NO: 123496 - protein, 38 aa, Artificial sequence
  protein pattern
  Variant (3)..(3): Xaa in position 3 is Asp or Pro
  Variant (5)..(5): Xaa in position 5 is Pro, Ser or Thr
  Variant (8)..(8): Xaa in position 8 is His or Arg
  Variant (9)..(9): Xaa in position 9 is Glu, Lys or Arg
  Variant (12)..(12): Xaa in position 12 is Glu or Gln
  Variant (15)..(15): Xaa in position 15 is Ala or Thr
  Variant (16)..(16): Xaa in position 16 is Ala, Thr or Val
  Variant (17)..(17): Xaa in position 17 is Gln or Thr
  Variant (19)..(19): Xaa in position 19 is Gln, Arg or Ser
  Variant (21)..(22): Xaa in position 21 to 22 is any or no amino acid
  Variant (24)..(25): Xaa in position 24 to 25 is any or no amino acid
  Variant (28)..(28): Xaa in position 28 is Asp or Glu
  Variant (29)..(29): Xaa in position 29 is any amino acid
  Variant (31)..(31): Xaa in position 31 is Glu, Ser or Thr
  Variant (32)..(32): Xaa in position 32 is any amino acid
  Variant (33)..(33): Xaa in position 33 is Phe or Leu
LPXGXFTXXQAXAVXXXYXNXXIXXEDXXGXXXRLVVR

SEQ ID NO: 123497 - protein, 29 aa, Artificial sequence
  protein pattern
  Variant (2)..(2): Xaa in position 2 is any amino acid
  Variant (3)..(3): Xaa in position 3 is Leu or Met
  Variant (4)..(4): Xaa in position 4 is any amino acid
  Variant (7)..(7): Xaa in position 7 is Ala, Cys, Gly, Ser or Thr
  Variant (8)..(8): Xaa in position 8 is any amino acid
  Variant (12)..(12): Xaa in position 12 is any amino acid
  Variant (13)..(14): Xaa in position 13 to 14 is any or no amino acid
  Variant (16)..(18): Xaa in position 16 to 18 is any amino acid
  Variant (19)..(20): Xaa in position 19 to 20 is any or no amino acid
  Variant (22)..(23): Xaa in position 22 to 23 is any amino acid
  Variant (24)..(24): Xaa in position 24 is Ile or Leu
  Variant (25)..(25): Xaa in position 25 is any amino acid
  Variant (26)..(26): Xaa in position 26 is Asp, Ser or Thr
  Variant (27)..(27): Xaa in position 27 is any amino acid
GXXXWRXXNFEXXXGXXXXXNXXXXXXGI

SEQ ID NO: 123498 - DNA, 1284 bp, Escherichia coli
  CDS (1)..(1284): transl_table=11
atggctgatacaaaagcaaaactcaccctcaacggggatacagctgttgaactggatgtgctgaaaggcacgctgggtcaagatgttattgatatccgtactctcggttcaaaaggtgtgttcacctttgacccaggcttcacttcaaccgcatcctgcgaatctaaaattacttttattgatggtgatgaaggtattttgctgcaccgcggtttcccgatcgatcagctggcgaccgattctaactacctggaagtttgttacatcctgctgaatggtgaaaaaccgactcaggaacagtatgacgaatttaaaactacggtgacccgtcataccatgatccacgagcagattacccgtctgttccatgctttccgtcgcgactcgcatccaatggcagtcatgtgtggtattaccggcgcgctggcggcgttctatcacgactcgctggatgttaacaatcctcgtcaccgtgaaattgccgcgttccgcctgctgtcgaaaatgccgaccatggccgcgatgtgttacaagtattccattggtcagccatttgtttacccgcgcaacgatctctcctacgccggtaacttcctgaatatgatgttctccacgccgtgcgaaccgtatgaagttaatccgattctggaacgtgctatggaccgtattctgatcctgcacgctgaccatgaacagaacgcctctacctccaccgtgcgtaccgctggctcttcgggtgcgaacccgtttgcctgtatcgcagcaggtattgcttcactgtggggacctgcgcacggcggtgctaacgaagcggcgctgaaaatgctggaagaaatcagctccgttaaacacattccggaatttgttcgtcgtgcgaaagacaaaaatgattctttccgcctgatgggcttcggtcaccgcgtgtacaaaaattacgacccgcgcgccaccgtaatgcgtgaaacctgccatgaagtgctgaaagagctgggcacgaaggatgacctgctggaagtggctatggagctggaaaacatcgcgctgaacgacccgtactttatcgagaagaaactgtacccgaacgtcgatttctactctggtatcatcctgaaagcgatgggtattccgtcttccatgttcaccgtcattttcgcaatggcacgtaccgttggctggatcgcccactggagcgaaatgcacagtgacggtatgaagattgcccgtccgcgtcagctgtatacaggatatgaaaaacgcgactttaaaagcgatatcaagcgttaa

SEQ ID NO: 123499 - protein, 427 aa, Escherichia coli
MADTKAKLTLNGDTAVELDVLKGTLGQDVIDIRTLGSKGVFTFDPGFTSTASCESKITFIDGDEGILLHRGFPIDQLATDSNYLEVCYILLNGEKPTQEQYDEFKTTVTRHTMIHEQITRLFHAFRRDSHPMAVMCGITGALAAFYHDSLDVNNPRHREIAAFRLLSKMPTMAAMCYKYSIGQPFVYPRNDLSYAGNFLNMMFSTPCEPYEVNPILERAMDRILILHADHEQNASTSTVRTAGSSGANPFACIAAGIASLWGPAHGGANEAALKMLEEISSVKHIPEFVRRAKDKNDSFRLMGFGHRVYKNYDPRATVMRETCHEVLKELGTKDDLLEVAMELENIALNDPYFIEKKLYPNVDFYSGIILKAMGIPSSMFTVIFAMARTVGWIAHWSEMHSDGMKIARPRQLYTGYEKRDFKSDIKR

SEQ ID NO: 123500 - DNA, 1284 bp, Klebsiella pneumoniae
  CDS (1)..(1284): transl_table=11
atgtctgatgctaaagcaaaaatcaccctgggtggtgacactgctattgaactggatgtgctaaaaggcacgctcggtcaggatgttattgatattcgtagtcttggttcaaaaggcgtatttacctttgacccaggtttcacatcaacggcttcttgtgaatctaaaattacgtttatcgatggtgacgaggggatcctgctgcaccgcggcttcccgatcgaccagttagcgaccgaatctaattatcttgaagtctgttatatcctgctgtacggcgaaaagccgacccaggccgaatatgacgaattcaaaactaccgtcacccgccacaccatgattcatgagcagatcacccgtctgttccacgcgttccgtcgcgattcccacccgatggcggtgatgtgcgggatcaccggcgcgctggcggcgttctatcatgattccctcgacgtgaataacccgcgtcaccgcgagattgccgcctaccgtctgctgtccaaaatgccaaccatggcagccatgtgttacaaatattctatcggccagccgtttgtttatccgcgcaacgacctctcctacgccggcaacttcctgcgcatgatgtttgcgacaccgtgcgaagagtatgaagtcaatccggtgctggagcgcgcgatggatcgtattctgatcctgcacgccgatcacgagcagaacgcgtcaacctccacggtacgtaccgcgggctcctccggcgctaacccgttcgcctgtatcgctgcgggcatcgcctccctgtggggaccggcacacggtggcgccaacgaagcggcgctgaaaatgctggaagagatcagctccgttgagcacattccggaatttgttcgtcgtgcgaaagacaagaatgactctttccgcctgatgggcttcggccatcgtgtttacaaaaactacgatccgcgcgccaccgtgatgcgtgaaacctgccatgaagtgctgaaagagctgggcaccaaagacgacctgctgcaggtggccatggagctggagcatatcgcgctgaacgacccgtacttcatcgagaagaaactgtatccgaatgtcgacttctactccggtattatcctgaaagcgatgggtattccgtcctccatgtttaccgttatcttcgccatggcgcgtaccgtgggctggattgcgcactggaacgaaatgcacagcgatggtatgaagatcgcccgtccgcgtcagctgtataccggctacgccaaacgcgatttccagtccgacattaagcgttaa

SEQ ID NO: 123501 - protein, 427 aa, Klebsiella pneumoniae
MSDAKAKITLGGDTAIELDVLKGTLGQDVIDIRSLGSKGVFTFDPGFTSTASCESKITFIDGDEGILLHRGFPIDQLATESNYLEVCYILLYGEKPTQAEYDEFKTTVTRHTMIHEQITRLFHAFRRDSHPMAVMCGITGALAAFYHDSLDVNNPRHREIAAYRLLSKMPTMAAMCYKYSIGQPFVYPRNDLSYAGNFLRMMFATPCEEYEVNPVLERAMDRILILHADHEQNASTSTVRTAGSSGANPFACIAAGIASLWGPAHGGANEAALKMLEEISSVEHIPEFVRRAKDKNDSFRLMGFGHRVYKNYDPRATVMRETCHEVLKELGTKDDLLQVAMELEHIALNDPYFIEKKLYPNVDFYSGIILKAMGIPSSMFTVIFAMARTVGWIAHWNEMHSDGMKIARPRQLYTGYAKRDFQSDIKR

SEQ ID NO: 123502 - DNA, 1813 bp, Zea mays
  CDS (56)..(1567)
ctgcatttgcttggctgctgctcccttctcccaccgaccaactcgatcccgcgccatggatcgcgccgaccccgcgcggggccgccttgccgtgctctcctcccacctccgtggtgcaggggccgaggaggcggcggggctggagaggtcgccggtatccgcgccggcgcccgggccccgcgccggcgcgcttgccgtggtggacgggaggaccgggaagcggcacgaggtcaaggtctccgaagacggcaccgtgcgcgccaccgacttcaagaagattaccactggaaaggacgacaagggtcttaagatttatgatcctggttaccttaacactgcccctgttcgctcgtccatctgctacatcgatggagatgagggaatccttcgctataggggttatccaatcgaagaattggctgaaagcagctcgtttgttgaggtggcctaccttttaatgtatgggaacttgcctactcagagtcaattggcaggctgggaatttgctatttctcagcattctgctgttccccaaggactgttggatatcatacaatcaatgccccatgatgctcaccccatgggtgttcttgccagtgcaatgagcaccctttctgtctttcatccagatgcaaaccctgctctacaaggtcaagatctttataaatcgaagcaggtgagggataaacaaattgtgcgagtacttgggaaggcaccaacaatagcagctgctgcctacttgagattagcaggaagacctcccgtccttcctttaaatactctatcttattcagagaacttcttgtacatgctggactctttgggtgacagaacatataaaccaaatcctcgacttgctcgagctctagatattctttttattctgcatgctgaacatgaaatgaactgctccactgctgctgttaggcaccttgcttcaagtggtgtggatgtatttactgctctttctggtggtgttggagctctatatggtcctctgcatggcggcgcaaacgaggcagtacttaaaatgttaaatgagattggaagcatggaaaatattccagatttcattgtaggagtgaagaacaggaagaggaagatgtccggttttgggcaccgtgtgtataaaaactatgaccctcgtgctaaagtcataaggaaattggcagatgaggtgttctcaattgttggacgggatccacttattgaggtggccattgccctagaaaaggcagccctgtcagacgaatattttatcaagaggaagctgtatccaaatgtggatttctactctgggctaatttatagggcaatgggattccctacagaattttttcctgtgctgtttgctattcctcgcatgggtggctggctagcgcattggaaagagtcactcgatgatcctgacactaagattataaggccccaacaggtatacaccggcttctggcttaggcactatacccccgtcagagaacgagtgctatcaagccagagtgaggaacttggtcaggttgccacctcaaacgcaactaggcgccgccgtgctggttctgccctgtagaagctgcagcgtataaacgcaccggcatactcaataaacatcgaccacttttgtgcttgaaaaggccacaaatgctttttagcttggttggagttgtaggccttttgttgtcgagtatataggcaataatgcagtgagaacaccacaccgttacaatgtaaaactgtcacgaggcatcacttgctggtgtacaccccttgcgttctctatgacttaatcacttaacttcccaaaagatgaaaaaaa

SEQ ID NO: 123503 - protein, 503 aa, Zea mays
MDRADPARGRLAVLSSHLRGAGAEEAAGLERSPVSAPAPGPRAGALAVVDGRTGKRHEVKVSEDGTVRATDFKKITTGKDDKGLKIYDPGYLNTAPVRSSICYIDGDEGILRYRGYPIEELAESSSFVEVAYLLMYGNLPTQSQLAGWEFAISQHSAVPQGLLDIIQSMPHDAHPMGVLASAMSTLSVFHPDANPALQGQDLYKSKQVRDKQIVRVLGKAPTIAAAAYLRLAGRPPVLPLNTLSYSENFLYMLDSLGDRTYKPNPRLARALDILFILHAEHEMNCSTAAVRHLASSGVDVFTALSGGVGALYGPLHGGANEAVLKMLNEIGSMENIPDFIVGVKNRKRKMSGFGHRVYKNYDPRAKVIRKLADEVFSIVGRDPLIEVAIALEKAALSDEYFIKRKLYPNVDFYSGLIYRAMGFPTEFFPVLFAIPRMGGWLAHWKESLDDPDTKIIRPQQVYTGFWLRHYTPVRERVLSSQSEELGQVATSNATRRRRAGSAL

SEQ ID NO: 123504 - DNA, 1854 bp, Glycine max
  CDS (153)..(1694)
aacaatttcgcttttcccttcaaacttccaagttccaattcaactctgatccttaaattcatttgcatattcagtcctttgaattattccactttcttcaaatcattccaattccacaaccaacgaagaagcatcatcaacacaacacaacaatgtcaaaaacaacaacttcttccgaacaaactgcacgaaaccgtttggccaccctcgcagctcacttgcttccctccgacgccacctccgccgccgcgatcctccacccccaccggctctccgcccccaccggagacttgccgccggcgaacctgaagggcacccttaccgtcgtcgacgagaggaccggcaagaagtaccagatcgaagtcaccccagatggcaccgtcagagcctctgacttcaagaagatatcatctgggaaaaatgacaagggactcaaactttatgatcctggctatttgaacactgctcctgtcatctcaaggatttcttacattgatggtgatgctggaatccttagatatagaggatatcctattgaagacttggcagagaaaagcacctttacagaagtgtcatatctcatactgtatggaaatttgccttctgaaagtcagttagcggaatgggaattcgccttatctcagcattcagctgtaccacaaggagttttggatatgatagaatcaatgcctcatgatgcacatcctatgggcatgcttgtcaatgccatgagcgctttgtctgtttttcatcctgatgcaaatcctgctctcaaaggtcttgatatctacaactcaaagcaagtgagagacaagcaaatagcacgggttattggaaagataacaacaattgctgctgcgattaatcttagattggcaggaaggccgcctgtgcttccatccaacaaactttcttacacagagaacttcctatacatgctagattcttttggcaatcgatcatataaacctaatcctcgactaactcgagcgctggacattatcttcgtcctgcatgcagaacatgaaatgaattgctctacatctgctgtacgtcacctctcatcaagtggtgttgatgtatatactgctattgctggggctgttggagctctatatggacctcttcatggtggagccaatgaggctgtcctcaaaatgttgagtgaaattggaactgttgagaacattccagcattcattgagggtgttaaagccaggaaacggaagctcagtggttttggacatcgtgtgtacaaaaattatgatccaagagcaaaggtcttgaggaaactgacagaggaagtgttttccattgttggccgggatcctcttatagagattgctgttgccttggagaagattgcactgtctgatgagtatttcatcaagaggaagctatatccaaatgttgacttctactctggactgatttatagggccatggggtttcaacctgagtttttcactgttttatttgccatccctcgaatggccgggtacttggcacattggcgagagtccttggatgatcctgatacaaagattatgagacctcaacaggtttatgttggggagtggttgaggcattatgcaccaattaatcaaaggactgcatcaagtaacactgacaaacttggtcaattggctgtatcaaacgcctcaaagaggcgtcttgctggatctggggcttaactagtgaaactgccaagtgctcaataaggtccagactccagagaaaaaattaattttttttctggtacataaaataagtttgtttgtttatgtataaaattatgatatcaaatagataaataaaatcatgaaatcaataagaccatggtttcagtaaaaa

SEQ ID NO: 123505 - protein, 513 aa, Glycine max
MSKTTTSSEQTARNRLATLAAHLLPSDATSAAAILHPHRLSAPTGDLPPANLKGTLTVVDERTGKKYQIEVTPDGTVRASDFKKISSGKNDKGLKLYDPGYLNTAPVISRISYIDGDAGILRYRGYPIEDLAEKSTFTEVSYLILYGNLPSESQLAEWEFALSQHSAVPQGVLDMIESMPHDAHPMGMLVNAMSALSVFHPDANPALKGLDIYNSKQVRDKQIARVIGKITTIAAAINLRLAGRPPVLPSNKLSYTENFLYMLDSFGNRSYKPNPRLTRALDIIFVLHAEHEMNCSTSAVRHLSSSGVDVYTAIAGAVGALYGPLHGGANEAVLKMLSEIGTVENIPAFIEGVKARKRKLSGFGHRVYKNYDPRAKVLRKLTEEVFSIVGRDPLIEIAVALEKIALSDEYFIKRKLYPNVDFYSGLIYRAMGFQPEFFTVLFAIPRMAGYLAHWRESLDDPDTKIMRPQQVYVGEWLRHYAPINQRTASSNTDKLGQLAVSNASKRRLAGSGA

SEQ ID NO: 123506 - DNA, 1119 bp, Archaeoglobus fulgidus DSM 4304
  CDS (1)..(1119): transl_table=11
atgaaggacggattggaagatgtgattgcctgcaaaaccacgatttcgaggattgcccttgaaaacgggagggcaattcttgagtacaggggttacgacatccgtgaccttgcgagaaaggcaagctacgaggaggtggcttaccttctgctttacggagagctgccgaagaaatacgagcttcaggacttcaaaatagagcttgctgagaggagggagctaccacctcaaatcataggtctcctcactcatctgccgccatacacgcaccccatggtcgtgctcagaactgcaacaagctacctcggcagccttgacaagaagatagctgtaaggacgagggaggaaactttcaacaaggcaaaggacttgattgccaagtttcccacaatagtggcttactatcacagaatcaggacgggaaggaacataattccgccagctcttgaattcagccatgctgcaaactttctgtacatgcttcacggggaggaaccaaccaaaactgctgagagagcgctggacatggatttaattcttcacgcggagcacgagctaaatgcctcaacctttgcggcgaggattgcagcgtcaactcttgcagacatctacgcctgcgttgttgccgcaactggaacgctgatggggccgctgcatggaggagcggcgcaggaggtcatgaggatgcttagggaggttgcatctccaagaagggctgaggagtacgtgaaaagaaaaatagaggctggagagaggataatgggattcgggcacagggtttacagaggagttatggacccaagggcggagttgctgaggtatctggctaaaagacttgctgctgaaggctcaacgaagtggttcgaaatcagcgaggccatcgccaaggctgcttacaagtacaagaagctccttccaaacgttgacttctactccgcaagcgtttacgccaacctcggcattcccgacgacctcttcgtcaacatcttcgctatgggcaggatttcaggctggactgcccacatcatagagcagtacgagaacaacaggcttataaggccaagagcggagtatgtgggggagaaggagaagaagttcatccctctgtcgaaaaggtga

SEQ ID NO: 123507 - protein, 372 aa, Archaeoglobus fulgidus DSM 4304
MKDGLEDVIACKTTISRIALENGRAILEYRGYDIRDLARKASYEEVAYLLLYGELPKKYELQDFKIELAERRELPPQIIGLLTHLPPYTHPMVVLRTATSYLGSLDKKIAVRTREETFNKAKDLIAKFPTIVAYYHRIRTGRNIIPPALEFSHAANFLYMLHGEEPTKTAERALDMDLILHAEHELNASTFAARIAASTLADIYACVVAATGTLMGPLHGGAAQEVMRMLREVASPRRAEEYVKRKIEAGERIMGFGHRVYRGVMDPRAELLRYLAKRLAAEGSTKWFEISEAIAKAAYKYKKLLPNVDFYSASVYANLGIPDDLFVNIFAMGRISGWTAHIIEQYENNRLIRPRAEYVGEKEKKFIPLSKR

SEQ ID NO: 123508 - DNA, 1302 bp, Mesorhizobium loti MAFF303099
  CDS (1)..(1302): transl_table=11
gtgggcggcgcgaaccaagaggctacggcaacgcttcaattcgctggcaagacccatgaattcaaggtgcgaagcggctccgtcggacccgacgtcatcgacatcgcctcgctctacagcacgaccggcgccttcacctacgaccccggcttcacttcgacggcaagctgcgagtccgaaatcaccttcatcgacggcgacgccggtattctcctccaccgcggctatccgatcgaccagttggccgaacacggcgacttcctcgaagtctgctacctcctgctctacggcgaattgccgaccaaggcgcagaaggacgatttcgattaccgcgtgacgcgccacaccatggtgcacgagcagatgtcgcgcttcttcaccggtttccgccgcgacgcgcacccgatggcggtgatgtgcggcgtggtgggcgcgctgtcggccttctatcacgactccaccgacatctcggacccctaccagcgcatggtcgcctcgatgcgtctgatcgccaagatgccgacgatcgcggccatggcctacaagtaccacatcggccagcccttcatttacccaaagaacgatctcggcttcgcggcaaacttcctgcatatgtgctttgccgtgccgtgcgaagagtacaagatcaacccggtgctggcgcgcgccatggagcgcatcttcatcctgcacgcagatcacgagcagaacgcctcgacctcgacggttcgcctcgccggctcgtcgggcgccaacccgttcgcctgcatcgccgccggcatcgcttgcttgtggggcccggcccatggcggtgccaatgaagcggcgctcaacatgctgggcgagatcggccatgtcgatcacatcccggagttcatcgcccgcgccaaggacaagaacgacccgttccggctgatgggctttggccaccgcgtctacaagaactacgatcctcgtgcgaaaatcatgcagaagacggcgcacgaggttctgggcgaactcggcatcaaggacgatccgctgctcgacatcgccatggaactggaaaagatcgcgctgaccgatccctatttcatcgagaagaagctgtatccgaatgtcgacttctattccggcatcacgctgaaggcgctgggcttccccaccaccatgttcaccgttctgttcgcggtcgcccgcaccgtcggctggatcgcgcagtggaaagagatgatcgaggacccgcgccagaagattggccgcccgcgccagctctacacgggtgcgccggagcgcgactacgtgccgatcgccaagcgctga

SEQ ID NO: 123509 - protein, 433 aa, Mesorhizobium loti MAFF303099
MGGANQEATATLQFAGKTHEFKVRSGSVGPDVIDIASLYSTTGAFTYDPGFTSTASCESEITFIDGDAGILLHRGYPIDQLAEHGDFLEVCYLLLYGELPTKAQKDDFDYRVTRHTMVHEQMSRFFTGFRRDAHPMAVMCGVVGALSAFYHDSTDISDPYQRMVASMRLIAKMPTIAAMAYKYHIGQPFIYPKNDLGFAANFLHMCFAVPCEEYKINPVLARAMERIFILHADHEQNASTSTVRLAGSSGANPFACIAAGIACLWGPAHGGANEAALNMLGEIGHVDHIPEFIARAKDKNDPFRLMGFGHRVYKNYDPRAKIMQKTAHEVLGELGIKDDPLLDIAMELEKIALTDPYFIEKKLYPNVDFYSGITLKALGFPTTMFTVLFAVARTVGWIAQWKEMIEDPRQKIGRPRQLYTGAPERDYVPIAKR

SEQ ID NO: 123510 - DNA, 1161 bp, Thermoplasma volcanium GSS1
  CDS (1)..(1161): transl_table=11
atgccggaaacaactgaagaaattagcaagggtttggaagatgtcaacattaaatggacaaggctaacaactatagatggaaataaaggtatccttagatatgggggatactccgtagaggatataatcaataacggcgcacaggcagaggagattcagtaccttttcttatatggagaattacctaatgcacaggaattaaagatctttaaagaaaatgtgcaaaaaggatataacattccagatttcgtaataaattcaattaggcagcttccaagagaatcagatgcagttgcaatgcagatggctgcagttgcgtctatggcagcatctgaaataaagttcaagtggaataaggatacggacagggatgttgctgcacagatgataggcagcatgtccgctataactgcaaatgtctataggcatatcctcggtatgccagctgagaggccaaaaccgtctgacagctatgctgaaagcttccttaaagctgcctttggcaggaatgttacaaaggaggaagtagatgcaataaacactgcgctaatactttacacagaccacgaggttcctgcgtcaacaactgcaggacttgttgctgtatcaacattgagtgatatttactctggcataactgctgctcttgctgcactcaagggcccgctccatggtggtgctgcagaagccgcaatagcgcagtttgatgaaataaaagagccttcaaacgtagagaaatggttcaatgacaacataataaacggcaagaagaggctcatgggattcgggcacagagtatataagacatatgatccaagggcaaagatattcaagggaatagctgagaatctctccaagaataatgcagaggtaaagaaaatatacgatatagccacaaagttggaggacctcggtgttaaacagtttggatcaaaaggcatatacccgaacacagactacttctctggcatagtttacatgtccgtaggtttcccccttaggaacaacatatacactgctctgtttgccctatcaagggttactggctgggaagcacacttcatagagtacgtagaagaacagcagagattaataaggccaagggctgtctatgttggccctgctgagagaaaatttgtaaaactacctgacagaaaataa

SEQ ID NO: 123511 - protein, 386 aa, Thermoplasma volcanium GSS1
MPETTEEISKGLEDVNIKWTRLTTIDGNKGILRYGGYSVEDIINNGAQAEEIQYLFLYGELPNAQELKIFKENVQKGYNIPDFVINSIRQLPRESDAVAMQMAAVASMAASEIKFKWNKDTDRDVAAQMIGSMSAITANVYRHILGMPAERPKPSDSYAESFLKAAFGRNVTKEEVDAINTALILYTDHEVPASTTAGLVAVSTLSDIYSGITAALAALKGPLHGGAAEAAIAQFDEIKEPSNVEKWFNDNIINGKKRLMGFGHRVYKTYDPRAKIFKGIAENLSKNNAEVKKIYDIATKLEDLGVKQFGSKGIYPNTDYFSGIVYMSVGFPLRNNIYTALFALSRVTGWEAHFIEYVEEQQRLIRPRAVYVGPAERKFVKLPDRK

SEQ ID NO: 123512 - DNA, 1104 bp, Thermotoga maritima MSB8
  CDS (1)..(1104): transl_table=11
ttgatacaaaagggactggaaggcgtcaaaatatgtgaaagttcgatatgctatctggatggcatcaacggaaggctctactaccgaggaataccggttgaggaactcgcggaaaaatcgaccttcgaagaaacggcctactttctctggtacggaaagcttcccacaaagagtgagcttgaagaattcaaaaggaaaatggcagattacagagagcttcctgcagaagcccttggaattctttaccatcttccgaaaaaccttcattacattgatgttttgaagatattcctttctattcacggttccatggatgggaacgatgaggatctcagagaaaaagccatcagggttgccagcgtctttcccacaatactggcgtattactacagatactctaaaggaaaagaactgataaggccaagaaaagacttatcacacgttgagaacttctactacatgatgttcggagagagaaacgaaaagatccgtcttctggaatctgcgttcattcttctcatggagcaggatataaacgcttccacctttgccgcgctcgtgatagcctccacactctccgatctttattcctgtattgtaggggctctcggtgcactcaagggtcctctccacggtggtgcaagtgaaaaggttccacccatgctggaagagatcggaagcgaagacagggtggaagagttcgttcaaaagtgtctgaaagagaaaagaaagatcatgggattcgggcatcgagtttacaaaacttacgatccgagagcggtgtttttgaagagagtccttcaggaacactttccagatagcaaactgttcagaatcgccagcaagctggaagaatacatcgtttccaacaagatcaaaaacatatacccgaatgtggatctgtattcgagcgttctcttcgaagaactcggttttccaaggaacatgttcactgccctgtttgcaactgcgcgtgttgtcggatggaccgctcatgtgatcgaatacgtgagtgacaacaagctgatcagaccaaccagtgagtacgtgggtcctatggatgtcgaatacattcctatcgagcggagggatgagaatgggtaa

SEQ ID NO: 123513 - protein, 367 aa, Thermotoga maritima MSB8
MIQKGLEGVKICESSICYLDGINGRLYYRGIPVEELAEKSTFEETAYFLWYGKLPTKSELEEFKRKMADYRELPAEALGILYHLPKNLHYIDVLKIFLSIHGSMDGNDEDLREKAIRVASVFPTILAYYYRYSKGKELIRPRKDLSHVENFYYMMFGERNEKIRLLESAFILLMEQDINASTFAALVIASTLSDLYSCIVGALGALKGPLHGGASEKVPPMLEEIGSEDRVEEFVQKCLKEKRKIMGFGHRVYKTYDPRAVFLKRVLQEHFPDSKLFRIASKLEEYIVSNKIKNIYPNVDLYSSVLFEELGFPRNMFTALFATARVVGWTAHVIEYVSDNKLIRPTSEYVGPMDVEYIPIERRDENG

SEQ ID NO: 123514 - DNA, 1119 bp, Bacillus halodurans C-125
  CDS (1)..(1119): transl_table=11
atgagtgtcactcgtggtcttgaaggcgtcgttgcgacgacatctagcgtaagttcgattattgaaagtgtattaacgtatcaaggatacgatattgatgaacttgctgaacatgcaagttttgaagaagtaatataccttctttggaatggaaagctcccaaataaagtagagcttaaagaacttgcagatgaacttgcaaataacgctgaaatcccgcaagaagtcattgagcaaatgaaagcttatccgttagatcgcgtacacccaatgggcgctcttcgcacagcgatttcaagcttaggcttgtatgatgaggaagcggatcttatggatgaagcagcaaacaagcgaaaggcattgaagcttcaagcgcaagtttcaacggttgtgacagcgttttctcgcattcgcgaaggaaaagagcctgttgcgcctcgtacagatttaagttttgcggcgaatttcttgtacatgctaacaggagaagagcctgatgaaatagcggttgatgcatttaataaagcacttgttctgcatgctgatcacgagctaaacgcctctacattcacagcacgagtctgtgttgcgactctttctgacgtttactctggtattacagcagcgattggggcattaaagggacctcttcacggtggtgccaacgaacaggtaatggccatgctcacggaaatcggcgatgttgaaaacgttgaaccttacatccgcaaagctttggacaacaaacaaaaaattatgggcttcggtcaccgagtgtataaaaatggcgatccacgtgctaaacacctacgggaaatgtctaagaaattaacgagcattacgggggaaagcaagtggtacgagatgtctgtgaaaattgaagaaatcgtaacaaatgaaaaaggactattgccaaacgttgatttctattccgctagcgtttaccatagtcttggaatcaaacacgacttatttacaccgatttttgctgttagccgtatgagcggatggttggctcatattttagagcaatacagcaacaaccgcttgattcgccctcgggcagaatatgttggaccgaacaagcgacaatatgtacgtttggaagagcgcaactaa

SEQ ID NO: 123515 - protein, 372 aa, Bacillus halodurans C-125
MSVTRGLEGVVATTSSVSSIIESVLTYQGYDIDELAEHASFEEVIYLLWNGKLPNKVELKELADELANNAEIPQEVIEQMKAYPLDRVHPMGALRTAISSLGLYDEEADLMDEAANKRKALKLQAQVSTVVTAFSRIREGKEPVAPRTDLSFAANFLYMLTGEEPDEIAVDAFNKALVLHADHELNASTFTARVCVATLSDVYSGITAAIGALKGPLHGGANEQVMAMLTEIGDVENVEPYIRKALDNKQKIMGFGHRVYKNGDPRAKHLREMSKKLTSITGESKWYEMSVKIEEIVTNEKGLLPNVDFYSASVYHSLGIKHDLFTPIFAVSRMSGWLAHILEQYSNNRLIRPRAEYVGPNKRQYVRLEERN

SEQ ID NO: 123516 - DNA, 1287 bp, Pasteurella multocida subsp. multocida str. Pm70
  CDS (1)..(1287): transl_table=11
atgtctgaattaactgcaaaactgacccttagcgatggacgtgaatatgacctacctgtacacaaaggctctcttggttatgatgcaatagatgtacaatctctggttaagaataaactgttcaccttcgatccaggctttatgtcaacagcctgttgtcgctctgaaattacttatatcgatggcgataatggtgttttattacatcgaggctaccctattgctgagctggctaaaaatgcagattaccttgaagttgcgcatttattgctttttggtgaaagaccgtctcctgaagaatacaaaaactttacgcaattagtccgtcgtcataccctcgttcacgaacaaatctctcgctttttccacggtttccgtcgtgactcacacccaatggcaatcatgtgtggggtaagtggtgctttagccgccttctaccatgactccttagatattaatgatattactcaccgtgaaatcaccgcaattcgtttacttgctaaaatgccaactttggcggcgatgtgctataaatactcgattggtcagcctttcatgttcccgcaaaatcatctctcttattccggtaatttcctttacatgatgtttgcgacgccttgtgaaccttacatcgttaacccggtattagagcgtgccatggatcgtattttcattttgcatgctgaccatgaacaaaatgcgtccacctcaaccgtgcgcaccgcagcctcttctggcgccaatccatttgcctgtattgcagcaggtattgcctcactttggggacctgctcatggtggtgctaatgaagcctgtatcaatatgttagaagaaattggtacagtcgatcgtattcctgaatttattgctcgtgcaaaagacaaaaatgatccattccgattaatgggctttggtcaccgtgtgtataaaaactatgacccgcgtgccaaagtcatgcgtcaaacttgtcatgaagttttaaaagagctcaatattcaaaatccgctctttgatgttgccatggaattagaacgtattgcactcagtgacccatatttcattgaccataagttgtatccaaatgtggatttctattctggtattattctcaaggctattggcattccaacatccatgtttacggtgatgttcgccttagccagaacggtaggttggattgcacattggaaagaaatgttcaaaccgggcaatatgaaaattgtccgccctcgccagctctacatgggtgaaaaagaacgttcttttgaagctatggacaagagttaa

SEQ ID NO: 123517 - protein, 428 aa, Pasteurella multocida subsp. multocida str. Pm70
MSELTAKLTLSDGREYDLPVHKGSLGYDAIDVQSLVKNKLFTFDPGFMSTACCRSEITYIDGDNGVLLHRGYPIAELAKNADYLEVAHLLLFGERPSPEEYKNFTQLVRRHTLVHEQISRFFHGFRRDSHPMAIMCGVSGALAAFYHDSLDINDITHREITAIRLLAKMPTLAAMCYKYSIGQPFMFPQNHLSYSGNFLYMMFATPCEPYIVNPVLERAMDRIFILHADHEQNASTSTVRTAASSGANPFACIAAGIASLWGPAHGGANEACINMLEEIGTVDRIPEFIARAKDKNDPFRLMGFGHRVYKNYDPRAKVMRQTCHEVLKELNIQNPLFDVAMELERIALSDPYFIDHKLYPNVDFYSGIILKAIGIPTSMFTVMFALARTVGWIAHWKEMFKPGNMKIVRPRQLYMGEKERSFEAMDKS

SEQ ID NO: 123518 - DNA, 1131 bp, Halobacterium sp. NRC-1
  CDS (1)..(1131): transl_table=11
atgtccgacgaactcaagaaggggctcgaagacgtgctcgtggccgaatccgacctgagcttcatcgacggcgacgccggcaagctcgtgtactgcggatacgccatcgaggacctcgcgcgcaccgccagctacgaggaagtgttgtacctgctttggcacggcgacctcccgacgcgatccgaactcgacgccttccgggcggacatggcgagccaccgcgagatcgacgacgacgtcctcgcgctcgtcgagaacctcgcggccgccgacgccgacccgatggccgcgctccgaaccgccgcctcggcgctgtccgcgcacgacgacaccgccggcggctcggatcccgacgacgcccgcgagtcagggaaacgcatcaccgcgaaactccccaccatcgtcgcggcgttcacgcgcctccggaacggcgacgacgtggtcgcaccccgcgacgacctcggccacgccgcgaacttcctgtacatgctgaacggcgaggcgcccgacgacgtgctcgcggacgtcttcgaccaggcgctggtgttgcacgccgaccacggcctgaacgcgtccacgttctccgggatggtcacggcaagcacgctggcggacgtccacgccgcggtcacgtccgcgatcggcacgctctcgggcagcctccacggcggcgcgaacgccaacgtcatgcggatgctcaaggaggtcgacgacagcgacaaggacccgctgtcctgggtccaggacgccctggcgaacggcgagcgcgtgatggggttcggccaccgcgtctacaacgtcaaagacccccgggcgcacatcctcagcgagcgcagcgaggagctcggtgcggccgccggcgacaccaaatggtacgagatgagcgtcgccatcgaggattacatggctgatgagaagggcctcgcgccgaacgttgatttctactcggcgtcgacgtactaccagatggggatccccgtcgacatctacacgccgatcttcgccatgtcccgcgtcggcggctgggtcggccacgtcctcgaacagtacgacgacaaccgcctcatccgaccgcgcgcgcgatacgtgggtgccgaggaccgcgacagcacgcccctcgacgagcggtaa

SEQ ID NO: 123519 - protein, 376 aa, Halobacterium sp. NRC-1
MSDELKKGLEDVLVAESDLSFIDGDAGKLVYCGYAIEDLARTASYEEVLYLLWHGDLPTRSELDAFRADMASHREIDDDVLALVENLAAADADPMAALRTAASALSAHDDTAGGSDPDDARESGKRITAKLPTIVAAFTRLRNGDDVVAPRDDLGHAANFLYMLNGEAPDDVLADVFDQALVLHADHGLNASTFSGMVTASTLADVHAAVTSAIGTLSGSLHGGANANVMRMLKEVDDSDKDPLSWVQDALANGERVMGFGHRVYNVKDPRAHILSERSEELGAAAGDTKWYEMSVAIEDYMADEKGLAPNVDFYSASTYYQMGIPVDIYTPIFAMSRVGGWVGHVLEQYDDNRLIRPRARYVGAEDRDSTPLDER

SEQ ID NO: 123520 - DNA, 1269 bp, Campylobacter jejuni subsp. jejuni NCTC 11168
  CDS (1)..(1269): transl_table=11
atgtcaaattccgttactataaccgataatagaaatggaaaaagctatgaatttcctatatatgacggtacaactgggccaagcgttgtagatatgtcaagtttttataaacaaacaggaatgttttcttatgatgagggcttgacttctacagctacttgtaaatcaaaaatcacttatattgatggagaaaatggaattttaatgcaccgtggctatcctatagagtggcttgctgaaaacaaactttatttagatgtggttcatcttttactttataaagaattacctgatgctacgcgtcttgaagcgtttcgttatgaaatgaaaaaacgttcttttatccatgaaggtatgcaccgtctttttgattctttccctgataatgctcatcctatggcagttttacaaggtgctgtttcatcgcttagtgctttttatcctgatcatttaaacatgaatgtaaaagaagaatatatggaaatggcagctagaatagtagctaaaatccctactatagtggccaccgcttatagatataaacacggctttcctatggcttatccaaatttagatcgtggttttacagaaaatttcttatatatgttaagaacctatccttacgatcatgtagagcttaaacctatagaagtaaaagcacttgatacagtttttatgcttcatgcagatcatgagcaaaatgcttcaacttcaacagttcgtgctgtgggttcaactcatgctcatccttatgcctgtatagcagcaggtattggtgcgctttggggtcatgcacatggtggagctaatgaaggtgttattagaatgcttgagcaaataggtagtgttgatagggtagatgaattcatcaaaagagctaaggataaaaacgatcctttccgcttgatgggctttgggcatagggtttataaaaattttgatcctagagcaaaagtactgaaaaagcttcgtgatcaacttattgatgagttgggtattgataccaatcttattaaagtagcaacgcgtatagaagagattgctttaagcgatgattattttgttcaaagagggttatatccgaatgttgattttcatagtggacttattttaaaagccttaggtattccaaatgaaatgtttgctactttatttgttatagggcgcaccccaggatggatagctcagtggatagaacaaaaagagcaagaaagtcttaaaatagtccgtccaagacaactttatttgggtgaaactagtaaaatttaa

SEQ ID NO: 123521 - protein, 422 aa, Campylobacter jejuni subsp. jejuni NCTC 11168
MSNSVTITDNRNGKSYEFPIYDGTTGPSVVDMSSFYKQTGMFSYDEGLTSTATCKSKITYIDGENGILMHRGYPIEWLAENKLYLDVVHLLLYKELPDATRLEAFRYEMKKRSFIHEGMHRLFDSFPDNAHPMAVLQGAVSSLSAFYPDHLNMNVKEEYMEMAARIVAKIPTIVATAYRYKHGFPMAYPNLDRGFTENFLYMLRTYPYDHVELKPIEVKALDTVFMLHADHEQNASTSTVRAVGSTHAHPYACIAAGIGALWGHAHGGANEGVIRMLEQIGSVDRVDEFIKRAKDKNDPFRLMGFGHRVYKNFDPRAKVLKKLRDQLIDELGIDTNLIKVATRIEEIALSDDYFVQRGLYPNVDFHSGLILKALGIPNEMFATLFVIGRTPGWIAQWIEQKEQESLKIVRPRQLYLGETSKI

SEQ ID NO: 123522 - DNA, 1170 bp, Escherichia coli O157:H7 EDL933
  CDS (1)..(1170): transl_table=11
atgagcgacacaacgatcctgcaaaacagtacccatgtcattaaaccgaaaaaatctgtggcgctttctggcgttccggcgggcaatacggcgctctgcaccgtgggtaaaagtggcaatgacttgcattaccgtggctacgatattcttgatctggcggaacattgcgaatttgaagaagtggcgcatctgctgatccacggcaaactgccgacccgtgacgaactcgccgcctacaaaacgaaactgaaagccctgcgcggtttaccggctaacgtgcgtaccgtgctggaagccttaccggcggcgtcacacccgatggatgttatgcgcaccggcgtttccgcgctcggctgcacgctgccagaaaaagaggggcataccgtctctggcgcgcgggatattgccgacaaactgctggcgtcacttagctcgattcttctctactggtatcactacagccacaacggcgaacgcatccagccggaaaccgatgacgactccatcggtggtcacttcctgcatctgctgcacggcgaaaagccgtcgcaaagctgggaaaaggcgatgcatatttcgctggtgctgtacgccgaacacgagtttaacgcctccacctttaccagccgggtgattgcgggcactggctctgatatgtattccgcgattattggcgcgattggtgcactgcgcgggccgaagcacggcggggcgaatgaagtgtcgctggagatccagcaacgctacgaaacgccggacgaagccgaagccgatatccgcaagcgggtggaaagcaaagaagtggtcattggttttggtcatccggtttataccatcgccgacccgcgccaccaggtgattaaacgtgtggcgaagcagctctcgcaggaaggcggctcgctgaagatgtacaacatcgccgatcgcctggaaacggtgatgtgggagagcaaaaagatgttccccaatctcgactggttctccgctgtttcctacaacatgatgggcgttcccaccgagatgttcacaccactgtttgttatcgcccgcgtcaccggctgggcggcgcacattatcgaacaacgtcaggacaacaaaattatccgtccttccgccaattatgttggaccggaagaccgccagtttgtcgcgctggataagcgccagtaa

SEQ ID NO: 123523 - protein, 389 aa, Escherichia coli O157:H7 EDL933
MSDTTILQNSTHVIKPKKSVALSGVPAGNTALCTVGKSGNDLHYRGYDILDLAEHCEFEEVAHLLIHGKLPTRDELAAYKTKLKALRGLPANVRTVLEALPAASHPMDVMRTGVSALGCTLPEKEGHTVSGARDIADKLLASLSSILLYWYHYSHNGERIQPETDDDSIGGHFLHLLHGEKPSQSWEKAMHISLVLYAEHEFNASTFTSRVIAGTGSDMYSAIIGAIGALRGPKHGGANEVSLEIQQRYETPDEAEADIRKRVESKEVVIGFGHPVYTIADPRHQVIKRVAKQLSQEGGSLKMYNIADRLETVMWESKKMFPNLDWFSAVSYNMMGVPTEMFTPLFVIARVTGWAAHIIEQRQDNKIIRPSANYVGPEDRQFVALDKRQ

SEQ ID NO: 123524 - DNA, 1284 bp, Escherichia coli O157:H7 EDL933
  CDS (1)..(1284): transl_table=11
  misc_feature (80)..(80): m is a or c
atggctgatacaaaagcaaaactcaccctcaacggggacacagctgttgaactggatgtgctgaaaggcacgctgggtcmagatgttattgatatccgtactctcggttcaaaaggtgtgttcacctttgaccctggcttcacttcaaccgcatcctgcgaatctaaaattacttttattgatggtgatgaaggtattttgctgcaccgcggtttcccgatcgatcagctggcgaccgattctaactacctggaagtttgttacatcctgctgaatggtgaaaaaccgactcaggaacagtatgacgaatttaaaactacggtgacccgtcataccatgatccacgagcagattacccgtctgttccacgctttccgtcgcgactcacatccaatggcagtcatgtgtggtattaccggcgcgctggcggcgttctatcacgactcgctggatgttaacaatcctcgtcatcgtgaaattgccgcgttccgcctgctgtcgaaaatgccgaccatggcagcgatgtgttacaagtattccattggtcagccatttgtttatccgcgcaacgatctctcctatgccggtaacttcctgaatatgatgttctccacgccgtgcgaaccgtatgaagttaatccgattctggaacgtgctatggaccgtattctgatcctgcacgctgaccatgaacagaacgcctctacctccaccgtgcgtaccgctggctcttcgggtgcgaacccgtttgcctgtatcgcagcaggtattgcttcactgtgggggcctgcacacggtggtgctaacgaagcggcgctgaaaatgctggaagaaattagctccgttaaacacattccggaatttgttcgtcgtgcgaaagataaaaatgattctttccgcctgatgggcttcggtcaccgcgtgtacaaaaattacgacccgcgcgccaccgtaatgcgtgaaacctgccatgaagttctgaaagagctgggcaccaaagatgacctgctggaagtggctatggagctggaaaacatcgcgctgaacgacccgtactttatcgagaagaaactgtacccgaacgtcgatttctactctggtatcatcctgaaagcgatgggtattccgtcttccatgttcaccgtcatcttcgctatggcccgtaccgttggctggatcgctcactggagcgaaatgcacagtgacggcatgaagatcgcccgtccgcgccagttgtacaccggctatgaaaaacgagactttaaatcagatgttaaacattaa

SEQ ID NO: 123525 - protein, 427 aa, Escherichia coli O157:H7 EDL933
  misc_feature (27)..(27): The Xaa at location 27 stands for Gln, or Pro.
MADTKAKLTLNGDTAVELDVLKGTLGXDVIDIRTLGSKGVFTFDPGFTSTASCESKITFIDGDEGILLHRGFPIDQLATDSNYLEVCYILLNGEKPTQEQYDEFKTTVTRHTMIHEQITRLFHAFRRDSHPMAVMCGITGALAAFYHDSLDVNNPRHREIAAFRLLSKMPTMAAMCYKYSIGQPFVYPRNDLSYAGNFLNMMFSTPCEPYEVNPILERAMDRILILHADHEQNASTSTVRTAGSSGANPFACIAAGIASLWGPAHGGANEAALKMLEEISSVKHIPEFVRRAKDKNDSFRLMGFGHRVYKNYDPRATVMRETCHEVLKELGTKDDLLEVAMELENIALNDPYFIEKKLYPNVDFYSGIILKAMGIPSSMFTVIFAMARTVGWIAHWSEMHSDGMKIARPRQLYTGYEKRDFKSDVKH

SEQ ID NO: 123526 - DNA, 1236 bp, Deinococcus radiodurans R1
  CDS (1)..(1236): transl_table=11
gtgtgccctgcccgctctcatctctttgtcaccccggcagggacgtttgaccgcccctttttcgccccctggaagaagggcaggtgttatcctctgctcactatgtcgaacattgccaaagggcttgaaggtgttctctttaccgagagcaagctgacgtttatcaacggctcggagggcattctgacccacctgggcattccgattcaggaatgggccgaaaagagcaccttcgaggaactcagcctcgcgctgctcgacgccaaactgcccaccgccgaggaactcgccaagttcgacgccgaactcaaggccaaccgcgccatccccgatcagctcgtgggcatcatccgcgacatgcccaagggcgtacaccccatgcaggcgctgcgcacggcggtcagctacctgggcctgctcgaccctcaggccgaggacatcacccctgaggcccggcgcgccatcagcacccgcatgatcgcgcagttctcgaccatcatcgcggcgatcaaccgcgcccaagaaggccaggacatcgtggccccccgcgccgacctgacccacgcgggcaacttcctgtacatgctgaccggcaacgagcccacccccgagcaggcccgtctgttcgacatcgcgctcgtgctgcacgccgaccacggcatgaacgcctcgaccttcacggcgattgcgaccagctcgaccctcagcgacatgtactcctgcatggtgagcgccatcggcgcgctcaaaggcccgctgcacggcggcgccaacgaagccgtgatgaccatgctcgacgaaatcggcaccgtggacaaggccgaggcgtacatcacggggaagctcgacaacaaagagaagatcatgggcgtgggccaccgcgtctacaagtacttcgacccccgctcgcgcgtgctgcgcgactacgccgagcacgtcgccaacaaagaaggcaagagcaactactaccagatcctcgaagccatcgagaagatcatcgtggaccgcatgggcgccaagggcatctaccccaacgtggacttctactccggcaccgtgtacagcgacctgggcatcaagaaggaatacttcacccccatctttgccctggcccgcatcagcggctggtgcgccagcgtcatcgagtacagccaggacaaccgcctgctgcgccccgacgccgagtacaccggcgcccgcgaccagcactacgtggacatcaaagaccgccagtaa

SEQ ID NO: 123527 - protein, 411 aa, Deinococcus radiodurans R1
MCPARSHLFVTPAGTFDRPFFAPWKKGRCYPLLTMSNIAKGLEGVLFTESKLTFINGSEGILTHLGIPIQEWAEKSTFEELSLALLDAKLPTAEELAKFDAELKANRAIPDQLVGIIRDMPKGVHPMQALRTAVSYLGLLDPQAEDITPEARRAISTRMIAQFSTIIAAINRAQEGQDIVAPRADLTHAGNFLYMLTGNEPTPEQARLFDIALVLHADHGMNASTFTAIATSSTLSDMYSCMVSAIGALKGPLHGGANEAVMTMLDEIGTVDKAEAYITGKLDNKEKIMGVGHRVYKYFDPRSRVLRDYAEHVANKEGKSNYYQILEAIEKIIVDRMGAKGIYPNVDFYSGTVYSDLGIKKEYFTPIFALARISGWCASVIEYSQDNRLLRPDAEYTGARDQHYVDIKDRQ

SEQ ID NO: 123528 - DNA, 1296 bp, Mycobacterium leprae TN
  CDS (1)..(1296): transl_table=11
gtggccgacaccgacgacaccgtcactctgaagtatccgggaggcgagatcgatctacagattgtccgtgccaccgaaggtaatgacggcattgcgatcgtcccggtattggccaagaccggttacactacgtttgatgtcggctacggtaacaccgcatccaccaagagttccatcacctacattgatggtgacgccgggattctgcgttaccgcggctatccgattgagcagctcgccgagaagtcgaccttcatagaggtttgctatctgctgatctatggggagttaccagccaccgatcagctggccgaattcacccatcggatccagcgccacaccatgttgcacgaggaccttaagcgattctatgatggcttcccgcgcaacgcgcacccgatgccggtgttgtccagcgtggtcaacgcattgagtgcttactatcaggatgcactggacccgatggacaacggccaagtagagctgtcgacgatccgactcttggccaagctgcccactatcgctgcctatgcatacaagaagtcggtaggccagccgttcctttacccggacaacgcgttttctctagtagagaacttccttcgaatgacttttggtttgccggctgagccctatgagcccgaccctgaggtggtccgggctctggacatgctgtttatcctgcatgctgaccacgagcaaaactgttcgacgtcaaccgtgcgtttggtgggctcgtcgcgagccaacctgttcacctcgatttcgggcggcattaacgcgctgtggggaccgctgcacggcggtgccaaccaggcggtgcttgagatgctcgaaggtatccgcgagagtggcgacgacgttggtggatttgtccaaaaagtaaagaattgccaggccggtgtgaaattgatgggctttggtcaccgcgtctacaagaactacgatccgcgggcccgcatcgtcaaggaacaggctgacaagatcctggtcaaacttggtggcgatgacgatttgctgaacattgccaagggactcgaggaggcggcgctaaccgatgactatttcatcgagcgcaagctttacccgaacgtcgacttctacaccggtctgatctaccgggccctcggttttccgacccggatgttcaccgtgttgtttgctttgggtcggctgccaggctggattgcgcactggcgtgagatgcacgacgagggtgacagtaagattggccgtccgcgccaaatatacaccggctacacagagcgtgactacaccgcaattgaaacacgatag

SEQ ID NO: 123529 - protein, 431 aa, Mycobacterium leprae TN
MADTDDTVTLKYPGGEIDLQIVRATEGNDGIAIVPVLAKTGYTTFDVGYGNTASTKSSITYIDGDAGILRYRGYPIEQLAEKSTFIEVCYLLIYGELPATDQLAEFTHRIQRHTMLHEDLKRFYDGFPRNAHPMPVLSSVVNALSAYYQDALDPMDNGQVELSTIRLLAKLPTIAAYAYKKSVGQPFLYPDNAFSLVENFLRMTFGLPAEPYEPDPEVVRALDMLFILHADHEQNCSTSTVRLVGSSRANLFTSISGGINALWGPLHGGANQAVLEMLEGIRESGDDVGGFVQKVKNCQAGVKLMGFGHRVYKNYDPRARIVKEQADKILVKLGGDDDLLNIAKGLEEAALTDDYFIERKLYPNVDFYTGLIYRALGFPTRMFTVLFALGRLPGWIAHWREMHDEGDSKIGRPRQIYTGYTERDYTAIETR

SEQ ID NO: 123530 - DNA, 1290 bp, Agrobacterium tumefaciens str. C58
  CDS (1)..(1290): transl_table=11
atgacggaaaaaagcgctacagtgacacttggcgaaaagcaggtggaactcccggtcagggaaggcacgattggaccaagcgtcgtcgatatcgccacgctctacaagcacacgggctccttcacctacgacccgggtttcacgtcgacggcctcctgcgaatccaagatcacctatatcgacggtgacgagggcgttctcctgcatcgtggtttccccatcgagcaactggctgaacagggcgacttcctcgaaacctgctatctgctgctctacggcgaactgccgacggctgcgcagaagaaggatttcgacacccgcgtcacgcgccacaccatggtgcatgagcagatgagccgcttcttcaccggctatcgtcgcgacgcacacccgatggccgtcatgtgcggcacggtcggcgctctctcggccttctatcacgactcgacggacatcaccgatccgcaccagcgcatggtcgcttcgctgcgcatgatcgcgaagatgccgacgatcgccgccatggcctacaagtaccatatcggccagcccttcgtttacccgaagaacgatctggattacgcctccaacttcctgcacatgtgctttgccgtgccgtgcgaggactacaaggtggacccggttctggcccgcgccatggatcgcatcttcatcctgcatgccgatcacgagcagaacgcctccacctccacggtgcgtcttgccggttcgtcgggtgcaaatccgttcgcctgtatcgcggctggcatcgcctgcctctggggtccggctcacggcggcgccaacgaagcggcgctcaacatgctgaacgagatcggctctgtcgaccgcatcccggaatatatcgcccgcgccaaggacaagaacgatccgttccgcctgatgggctttggccaccgcgtctacaaaaactacgacccgcgcgccaagatcatgcagaagacgatgtacgaagtgctggaagccaccggcaattccgacgatccgatcatgcaggtcgcgctcgaactggaaaagatcgccctttccgacccatacttcgtcgaaaagaagctctacccgaatgtcgacttctattcgggcatcacgctgaaggcgctcggcttccccaccaccatgttcaccgttctcttcgctctcgcccgcaccgtcggctggatcgcacagtggaacgaaatgatcgaagatccgcagcagcgcatcggccgtccgcgccagctctatacgggcgccggcaagcgcgattacgttccggtttccaagcgttaa

SEQ ID NO: 123531 - protein, 429 aa, Agrobacterium tumefaciens str. C58
MTEKSATVTLGEKQVELPVREGTIGPSVVDIATLYKHTGSFTYDPGFTSTASCESKITYIDGDEGVLLHRGFPIEQLAEQGDFLETCYLLLYGELPTAAQKKDFDTRVTRHTMVHEQMSRFFTGYRRDAHPMAVMCGTVGALSAFYHDSTDITDPHQRMVASLRMIAKMPTIAAMAYKYHIGQPFVYPKNDLDYASNFLHMCFAVPCEDYKVDPVLARAMDRIFILHADHEQNASTSTVRLAGSSGANPFACIAAGIACLWGPAHGGANEAALNMLNEIGSVDRIPEYIARAKDKNDPFRLMGFGHRVYKNYDPRAKIMQKTMYEVLEATGNSDDPIMQVALELEKIALSDPYFVEKKLYPNVDFYSGITLKALGFPTTMFTVLFALARTVGWIAQWNEMIEDPQQRIGRPRQLYTGAGKRDYVPVSKR

SEQ ID NO: 123532 - DNA, 1122 bp, Sulfolobus tokodaii str. 7
  CDS (1)..(1122): transl_table=11
atggagataaagaaaggtcttgaagacgtttatgttaaagaaacagagataacatatattgacggggaactaggtaggttatattatagaggttactccatatatgacttggctgaattctctaattttgaagaagtaagttacctaatattatatggtaaattaccaaatagagaagaattaaactggttccaggaaaagctaagggaagaaagatacttaccagattttataataaaatttctaagagaagtgagaaaagatgcccaaccaatggatatactaagaactgctgtgagcttacttggtattgaagattcaaaaaatgatgaacgaactgatataaagggcataaaattaatttcaaaattccctactattgtagctaattatgcaagattaagaaaagggctagatataattgagccagatcctaaactttcacactcggagaatttcttgtacatgctatatggagatagaccaaatgaaataaaatcaaaggctatggatgtcacattaatcttacatattgatcatgaaatgaacgcatcaacctttgcctcattagttgtagcctctactttttcagatttatattcttctatagtagctgggatatcagcattgaaagggcctttgcacggaggggcaaactatgaggcactaaaaatgtttaaggaaattggatctcccgaaaaagttaacgattatattctaaataggctttctaacaaacaaagaataatgggatttggacatcgtgtttataaaacttatgatccaagggcaagaatattaaaacagtatgctaaactattagctgaaaaagaaggaggagaaatatatactttatatcaaatagctgagaaagttgaagagattggaataaagtatttaggtcctaaaggtatatatcctaatgttgatttcttctccagtattgttttctactctttaggtttcgagccagacttctttccggcagtttttgcttcagccagagtagttggctgggttgctcatatcatggagtatataaaagataataagataattaggcctaaagcatactataaaggggaaataggaaagaaatatattccaattgatagtaggtaa

SEQ ID NO: 123533 - protein, 373 aa, Sulfolobus tokodaii str. 7
MEIKKGLEDVYVKETEITYIDGELGRLYYRGYSIYDLAEFSNFEEVSYLILYGKLPNREELNWFQEKLREERYLPDFIIKFLREVRKDAQPMDILRTAVSLLGIEDSKNDERTDIKGIKLISKFPTIVANYARLRKGLDIIEPDPKLSHSENFLYMLYGDRPNEIKSKAMDVTLILHIDHEMNASTFASLVVASTFSDLYSSIVAGISALKGPLHGGANYEALKMFKEIGSPEKVNDYILNRLSNKQRIMGFGHRVYKTYDPRARILKQYAKLLAEKEGGEIYTLYQIAEKVEEIGIKYLGPKGIYPNVDFFSSIVFYSLGFEPDFFPAVFASARVVGWVAHIMEYIKDNKIIRPKAYYKGEIGKKYIPIDSR

SEQ ID NO: 123534 - DNA, 1137 bp, Sulfolobus tokodaii str. 7
  CDS (1)..(1137): transl_table=11
atgagcgtagaagtaagtagaggattggaaaatgtaattataaaaactactggattaacttacattgatggcattaacggtatattaagatatagagggtacgatattaacgatttagttaattatgcttcatatgaggagctaatccatttaatgctttacggtgaattacctaacagacaacaattaaatcagattaaaggtataataaatgaaagttttgaagttccagaacaagttatatcaacgatattttcgatgcctagaaactgtgatgcaataggaatgatggaaacagcatttggcatattagcttcaatatatgatccaaaatggaacagagctactaataaagaattagctgttcaaattattgcaaaaactgcaacaattaccgcaaatatttatagggctaaagaagggttaaaaccaaagatcccagaaccatcagagagctatgctgaaagcttcttggctgcaacgtttggtaaaaagcctactcaagaagagataaaggctatggatgcttcactaattttatatacagatcacgaagttccagcctcaacaactgcagccttagtagcctcctcaaccctctcggatatgtactcatgtattgttgcagcattagctgcactaaagggtcctttgcatggtggtgcagctgaggaagctttcaaacagtttgtagaaataggttctgtcgaaaatgcagataaatggtttgaggaaaaaataataaaaggcaaaagtaggctcatgggattcgggcatcgtgtatataagacttatgatcctagggcaaaaatatttaagacattggctaaatcctttgctgaaaaaaatgaaaatgttaaaaagtattatgaaattgcagaaagaatagagaaattgggagttgacacattcggtagtaagcatatttatcctaatactgacttttacagtggtatagtattttatgctttaggcttcccaatatatatgttcacttcactgttcgctctatcaagagtattagggtggttagctcacataattgaatatgtagaggaacagcatagactcattagacctagagcactatacattggaccagaaaaaagagagtttaaacctatagagttaagataa

SEQ ID NO: 123535 - protein, 378 aa, Sulfolobus tokodaii str. 7
MSVEVSRGLENVIIKTTGLTYIDGINGILRYRGYDINDLVNYASYEELIHLMLYGELPNRQQLNQIKGIINESFEVPEQVISTIFSMPRNCDAIGMMETAFGILASIYDPKWNRATNKELAVQIIAKTATITANIYRAKEGLKPKIPEPSESYAESFLAATFGKKPTQEEIKAMDASLILYTDHEVPASTTAALVASSTLSDMYSCIVAALAALKGPLHGGAAEEAFKQFVEIGSVENADKWFEEKIIKGKSRLMGFGHRVYKTYDPRAKIFKTLAKSFAEKNENVKKYYEIAERIEKLGVDTFGSKHIYPNTDFYSGIVFYALGFPIYMFTSLFALSRVLGWLAHIIEYVEEQHRLIRPRALYIGPEKREFKPIELR

SEQ ID NO: 123536 - DNA, 1281 bp, Caulobacter crescentus CB15
  CDS (1)..(1281): transl_table=11
atgaccgataaagccacgctgacgatcggcgacaagagctatgagctgccgatcctcaagggcagcacgggtccggacgtcatcgacgttcggaagatctacggtgaaagcgatcacttcacgttcgatccaggcttcacctccaccgcctcgtgcgagagcaagatcacctatatcgacggcgacgcgggcatcctgctgcaccgcggctatccgatcgaccagctggccgagaagtcctcgttcctcgaggtctgctacctgctgctgaacggcgaactgcccaaggccgacgagttcgccaagttcgagcacaacatcacctaccacacgatgttgcacgctcagttcgaccgcttcttcgagggcttccgccgcgacgctcacccgatggcggtcatgaccggcgccgtcggcgctctgtcggccttctattcggacagcatcaatgtcgacgacgcccgtgagcgcgagatcagcgcccatcgcctgatcgcgaagatgccgacgatcgccgcccgcgcctacaagtacacggtcggccagccgttcgtgtcgccgcgcaacgacctgtcgtattcggaaaacttcctgcgcatgtgcttcgccgtgccggccgaggactggaagccgaacccggtgctgacccgcgccatggaccggatcttcatcctgcacgccgatcacgagcagaacgcctcgacctcgaccgtccgtctggccggttcgtcgggcgcgcacccgttcgcctgtatcgccgccggcatcgcctgcctgtggggcccgtcgcacggcggcgccaaccaggaagcgcttgagatgctggagaccatcggttcggtcgacaacatcaaggactacgtccagggcgtgaaggaccggaagtacaagctgatgggcttcggccaccgcgtgtacaagaacttcgacccgcgcgcgaaggtcatgcaaaagaccgcgcacgaggttctggccgagctgggccataacaacgatccgctgctgcaggtcgcccaggagctggaaaaggtcgccctgaacgacccgtacttcgtcgatcgcaagctgtacccgaacatcgatttctattcgggcatcaccctgcgcgcgatgggcttcccgaccaacatgttcaccgtgctgttcgccctggcccgcaccgtgggctggatcagccagtggaaggaaatgttcgaggaccccacccgcaagatcggtcgtccccgtcagctctacacgggcgccacgcatcgcgactacgtcacgctcgacaagcgctaa

SEQ ID NO: 123537 - protein, 426 aa, Caulobacter crescentus CB15
MTDKATLTIGDKSYELPILKGSTGPDVIDVRKIYGESDHFTFDPGFTSTASCESKITYIDGDAGILLHRGYPIDQLAEKSSFLEVCYLLLNGELPKADEFAKFEHNITYHTMLHAQFDRFFEGFRRDAHPMAVMTGAVGALSAFYSDSINVDDAREREISAHRLIAKMPTIAARAYKYTVGQPFVSPRNDLSYSENFLRMCFAVPAEDWKPNPVLTRAMDRIFILHADHEQNASTSTVRLAGSSGAHPFACIAAGIACLWGPSHGGANQEALEMLETIGSVDNIKDYVQGVKDRKYKLMGFGHRVYKNFDPRAKVMQKTAHEVLAELGHNNDPLLQVAQELEKVALNDPYFVDRKLYPNIDFYSGITLRAMGFPTNMFTVLFALARTVGWISQWKEMFEDPTRKIGRPRQLYTGATHRDYVTLDKR

SEQ ID NO: 123538 - DNA, 1122 bp, Listeria innocua Clip11262
  CDS (1)..(1122): transl_table=11
atgacgttatctaaagggttggaaaatgtatatgttgctgagacttccattagttctattattgatgatatgttaacgtacgttggttacggtattgatgatttgatggaaaataatgcttcttttgaagaagtgatttacttattatggcatttacgtttgccaaataaagaagaatttaaaaagtttaaattagaaatccaagaaaatatggcagtatctgaaaccattattacaagtttaagaatgcaaaatcatcaaaaattgcatccaatgagcgttttaagaacaacggtatcgatgttaggtgtgtttgacaccgaagcagaattagatgatggggaagctgtgtaccgaaaagggctacgtcttcaagcgaaaatgccaacgattgttgctgctttttcaagaattcgtcgcggacttgatcccattccgccaagagaagatttaaatatggcagcaaatttcctttatatgattacaggggaagaagcggatgagttatcggtagaagcaatgaacaaagcgctagtactgcacgcagaccatgagtttaatgcatctacatttacagctcgagtttgtgtggcaacgctttcggacgtttattctggtgtaacatctgctattggtgcgctaaaaggcccacttcatggtggtgcgaacgaacgtgtatttgatatgttagaagaaatcgatgcagctggcgatgtacgtaattatatccaagaaaaaatcgatactaaacaaaaaatcatgggctttggtcaccgagtttatcgaggtggggatccgcgtgctaaacatttacgtgaaatgtctagaaaattaactgctgaaaaaggcgaagaaaaatggtttgatatttcactgcaagtagaagaagctgtttgggaattaaaacatttaaaacctaatgttgacttttattcagcttccgtttaccacgcgcttgggattgaccgcgatttattcacgctagtattttctgttagccgtgtttctggttggttagcacacatttttgaacaatatcgtgataatcgtcttattcgtccacgtgctatctacgttggacctgaaaatagaagttatttacctgtagaagaacgaatttaa

SEQ ID NO: 123539 - protein, 373 aa, Listeria innocua Clip11262
MTLSKGLENVYVAETSISSIIDDMLTYVGYGIDDLMENNASFEEVIYLLWHLRLPNKEEFKKFKLEIQENMAVSETIITSLRMQNHQKLHPMSVLRTTVSMLGVFDTEAELDDGEAVYRKGLRLQAKMPTIVAAFSRIRRGLDPIPPREDLNMAANFLYMITGEEADELSVEAMNKALVLHADHEFNASTFTARVCVATLSDVYSGVTSAIGALKGPLHGGANERVFDMLEEIDAAGDVRNYIQEKIDTKQKIMGFGHRVYRGGDPRAKHLREMSRKLTAEKGEEKWFDISLQVEEAVWELKHLKPNVDFYSASVYHALGIDRDLFTLVFSVSRVSGWLAHIFEQYRDNRLIRPRAIYVGPENRSYLPVEERI

SEQ ID NO: 123540 - DNA, 1137 bp, Nostoc sp. PCC 7120
  CDS (1)..(1137): transl_table=11
atgatggtgtgcgaatacaagcctggtttagaaggcattcccgccgcccaatcgagtatcagttatgtagatgggcaaaagggaatactagaatatcgtggcatccggattgaggatttagcccagcaaagtacttttctggagactgcttatcttttaatctggggtgagttgccaacaaaagaagaattgcaagtatttgaggaggaagtccgtcttcatcggcggattaaataccggattcgggatatgatgaagtgctttcccgaatctggtcatccaatggatgcactccaagcctctgcggcggctttaggcttgttttactcccgtcgagatttgcacaatcctgcctatattcgggatgctgtagtgcggctaatagctactattccgacgatggtagctgcattccagttgatgcggaaaggtaatgaccccgttaagccccgtgatgatttagattattccgccaattttctctacatgctcaacgagaaagaaccggatgctttggcggcaaaaatctttgatatctgcttgattctccatgtcgagcatacgatgaatgcttccacctttagtgctagggtaacagcttccaccttgactgacccgtatgcggtggttgctagcgctgtggggactttaggagggcctttacacggtggagccaatgaagaagtaatccagatgttggaagagattggttccgtggagaatgtgcgttcttatgtcgaggagaggttgcaacgtaaagacaagctcatgggctttggacatcgtgtctacaaagttaaagacccacgggcgacaattttgcaaggcctcgcagaacagttgtttgccaagttcggcgcagataagtattacgacatcgcccaagaaatggaacgggtagtcgaagagaaacttggtcataaagggatttatcccaatgttgacttctactctggtttagtgtatcggaagatgggtattcctacagacttgtttacaccaatctttgcgatcgctcgtgttgctggttggttagcccactggaaagaacaactcgaagagaaccgcattttccgtcctacccaggtttacaacggcaaacacagtgttacctacacccccattgaccaacgttaa

SEQ ID NO: 123541 - protein, 378 aa, Nostoc sp. PCC 7120
MMVCEYKPGLEGIPAAQSSISYVDGQKGILEYRGIRIEDLAQQSTFLETAYLLIWGELPTKEELQVFEEEVRLHRRIKYRIRDMMKCFPESGHPMDALQASAAALGLFYSRRDLHNPAYIRDAVVRLIATIPTMVAAFQLMRKGNDPVKPRDDLDYSANFLYMLNEKEPDALAAKIFDICLILHVEHTMNASTFSARVTASTLTDPYAVVASAVGTLGGPLHGGANEEVIQMLEEIGSVENVRSYVEERLQRKDKLMGFGHRVYKVKDPRATILQGLAEQLFAKFGADKYYDIAQEMERVVEEKLGHKGIYPNVDFYSGLVYRKMGIPTDLFTPIFAIARVAGWLAHWKEQLEENRIFRPTQVYNGKHSVTYTPIDQR

SEQ ID NO: 123542 - DNA, 1302 bp, Ralstonia solanacearum GMI1000
  CDS (1)..(1302): transl_table=11
atgacgccgtccgatgtgaaagccaccctatcgttttccgatggctcgcccagcgtcgagttgccgatctacacgggcacggttggcccggacgtgatcgacatccgcaagctgtacggccagacgggcaagttcacctacgaccccggcttcatgtcgaccgcgtcgtgcaactccaagatcacctatatcgatggcgacaagggcgagctgctctatcgcggctacgccatcgacgatctggcgggcaagtgcgacttcctggaaatctgctacctgctgctcaagggcgagctgcccaacgccaagcagaaggatgagttcaacagcaccgtcatgaaccacaccatggtgcatgagcagatgcagttcttcctgcgcggcttccgtcgcgatgcgcatccgatggccgtgctgaccggcctggtgggcgccatgagcgcgttctatccggatgccgccaacatcaacgattcgcgcgagcgcgagatctcgcagatccgcctgatcgccaagctgccgacactggtggcgatggcctacaagtacaacatcggccagccgctgatctacccgcagaacaacctgtcctacaccggcaacttcatgcgcatgatgttcgccacgccgtgcgaggactacaaggtcaacccggtgcttgagcgcgcgctcgaccgcatcttcatcctgcacgccgaccacgagcagaacgcctcgacctcgacggtgcgcctggctggctcctcgggcaccaacccgatcgccgccattgcagccggcatcgcctgcctgtggggcccggcgcacggcggcgcgaacgaagcggcgctgaacatgctggaagagatcggcagcgtcgacaagatcgatgagttcatcaagcaggtcaaggacaagaacagcggcgtgcgcctgatgggcttcggccaccgcgtgtacaagaactacgatccgcgcgccaagctgatgcgtgagacctgccatgaagtgctgcaggaactcggcctggagaacgatcgcctgttcaagctggccatggcgctcgagaagatcgcgctggaagacgaatacttcgtcagccgcaagctgtatccgaacgtcgatttctactcgggcatcgtgcagcgcgcgctgggcatcccgacctcgatgttcacctgcatcttcgcgctggcccgctcggtgggctggatcgcgcagtgggaagagatgatcaccgatccggaatacaagatcggccgtccgcgccagctgttcaacggcgccgccacccgcgcggtgcccgagctgggcaagcgctga

SEQ ID NO: 123543 - protein, 433 aa, Ralstonia solanacearum GMI1000
MTPSDVKATLSFSDGSPSVELPIYTGTVGPDVIDIRKLYGQTGKFTYDPGFMSTASCNSKITYIDGDKGELLYRGYAIDDLAGKCDFLEICYLLLKGELPNAKQKDEFNSTVMNHTMVHEQMQFFLRGFRRDAHPMAVLTGLVGAMSAFYPDAANINDSREREISQIRLIAKLPTLVAMAYKYNIGQPLIYPQNNLSYTGNFMRMMFATPCEDYKVNPVLERALDRIFILHADHEQNASTSTVRLAGSSGTNPIAAIAAGIACLWGPAHGGANEAALNMLEEIGSVDKIDEFIKQVKDKNSGVRLMGFGHRVYKNYDPRAKLMRETCHEVLQELGLENDRLFKLAMALEKIALEDEYFVSRKLYPNVDFYSGIVQRALGIPTSMFTCIFALARSVGWIAQWEEMITDPEYKIGRPRQLFNGAATRAVPELGKR

SEQ ID NO: 123544 - DNA, 1314 bp, Brucella melitensis 16M
  CDS (1)..(1314): transl_table=11
gtggacatgaaaggaaaaacgatgtcagataagacagccagctttaccctcgacggcaaaacgttcgatctgcctgtgcgaaaaggcactgtcgggccggatgtcgttgatattggtccactttacaagaattcccacgcattcacctacgaccctggcttcacttccaccgcttcgtgcgaatccaaaatcacctatatcgatggtgacgaaggcgtcctgctttatcgcggctacccgatcgaccagcttgccgagcatggcgacttcctcgaaacctgctatctgcttctttacggcgaactgccgaccgcaacccagaaggccgatttcgactatcgtgtaacccgccacaccatgctgcacgagcagatgacgaagttcttcaccggcttccgtcgtgatgcccacccgatggctgtcatggtgggttgcctgggcgccatgtccgccttctaccacgactcgaccgatatcaccgatccgcatcagcgcatggtcgcttcgatccgcctgatcgccaaggtgccgacgcttgcagccatggcctacaagtaccatatcggccagccgttcgtatatccgaagaacgacctcgatttcgcgtcgaacttcctgcacatgtgcttcaccgtgccttgcgaagagtacaaggtgaacccggttctggcgcgcgccatggaccgcattttcatcctgcatgctgatcacgaacagaatgcctccacctcgaccgtccgcctcgccggctcgtcgggtgcaaacccgtttgcctgcattgccgctggcgtggcctgcctctggggcccggctcatggcggcgccaatgaagctgcgctcaacatgctttcggaaatcggctcggttgaccgtatcccggaatatatcgccagggctaaagacaagaacgatccgttccgtttgatgggcttcggccatcgcgtttacaagaactacgatccgcgcgccaagatcatgcagaagacctgccatgaagtcctcggcgagctgggcatcaaggatgatccgctgcttgacgttgcaatggaactggaaaggattgccctgaccgacgaatatttcatcgaaaagaagctctacccgaacatcgacttctattcgggcatcacgctgaaggcgctgggcttcccgaccgaaatgttcaccgtcctgttcgcccttgcccgcaccgttggctgggtcgcccagtggaaggaaatgatcgaagatccgcagcagaaaatcggccgtccgcgccagctctacaccggcgcaaccgaacgcgattacgtgccgcttgcaaagcgcaagtaa

SEQ ID NO: 123545 - protein, 437 aa, Brucella melitensis 16M
MDMKGKTMSDKTASFTLDGKTFDLPVRKGTVGPDVVDIGPLYKNSHAFTYDPGFTSTASCESKITYIDGDEGVLLYRGYPIDQLAEHGDFLETCYLLLYGELPTATQKADFDYRVTRHTMLHEQMTKFFTGFRRDAHPMAVMVGCLGAMSAFYHDSTDITDPHQRMVASIRLIAKVPTLAAMAYKYHIGQPFVYPKNDLDFASNFLHMCFTVPCEEYKVNPVLARAMDRIFILHADHEQNASTSTVRLAGSSGANPFACIAAGVACLWGPAHGGANEAALNMLSEIGSVDRIPEYIARAKDKNDPFRLMGFGHRVYKNYDPRAKIMQKTCHEVLGELGIKDDPLLDVAMELERIALTDEYFIEKKLYPNIDFYSGITLKALGFPTEMFTVLFALARTVGWVAQWKEMIEDPQQKIGRPRQLYTGATERDYVPLAKRK

SEQ ID NO: 123546 - DNA, 1230 bp, Pyrobaculum aerophilum str. IM2
  CDS (1)..(1230): transl_table=11
atgagtgaacaaactgttcaggtaaaaactacgggtaaaattcttcagtctccctgtggtcccattattcacggtttagaagacgttttgataaaaagcacatcaataagcgatatagacggcgagaagggcattctttggtacagagggtataggatagaagagttggccaggctctctacttatgaagaggtctcgtacctcattctatatgggaggttgccgacgaagagggagcttgaagattacattaatagaatgaaaaaatacagagagctccacccggcgacagttgaggtaattagaaacctcgccaaggcccatcccatgtttgcgctagaggcggctgtggcggcggagggcgcgtacgatgaagacaaccagaaattaatagaggcgttatcagtaggcaggtataaagccgaggagaaggagcttgcgtatagaatagccgagaagcttgtggccaaaatgccgacaatagtggcgtatcactacagattctcgcgtggactagaggtagtaaggcctagagacgatttgggacacgcggcgaactttctctacatgatgttcggcagagagccagatccccttgcctcgagggggatagatctctacttaatactccacgcagatcacgaggtccccgccagcactttcgctgcccacgtcgttgcgtctacgctgagcgacctctactcctcagtagccgctgcaatagccgcacttaaaggcccgttgcacggcggggctaatgaaatggccgttaggaactacctcgaaataggcactccggctaaggccaaggagatagtagaggcggcgactaagccaggcgggccaaagttaatgggcgtcggccaccgcgtatataaggcatatgatccaagggccaagatatttaaagagttttcaagagattatgtagccaaattcggcgatccccaaaacttgtttgcaatcgccagcgccatagagcaagaagtactgagccacccctatttccaacagcggaagctatacccaaacgtcgacttctggtccggaatagcgttttattacatggggataccgtatgagtacttcaccccaatattcgccatgtctagagtagtgggctgggttgcgcacgtcttggagtactgggagaacaacaggatattcaggcctagggcttgctatattggcccccacgatttacaatacatcccgcttgaacagagataa

SEQ ID NO: 123547 - protein, 409 aa, Pyrobaculum aerophilum str. IM2
MSEQTVQVKTTGKILQSPCGPIIHGLEDVLIKSTSISDIDGEKGILWYRGYRIEELARLSTYEEVSYLILYGRLPTKRELEDYINRMKKYRELHPATVEVIRNLAKAHPMFALEAAVAAEGAYDEDNQKLIEALSVGRYKAEEKELAYRIAEKLVAKMPTIVAYHYRFSRGLEVVRPRDDLGHAANFLYMMFGREPDPLASRGIDLYLILHADHEVPASTFAAHVVASTLSDLYSSVAAAIAALKGPLHGGANEMAVRNYLEIGTPAKAKEIVEAATKPGGPKLMGVGHRVYKAYDPRAKIFKEFSRDYVAKFGDPQNLFAIASAIEQEVLSHPYFQQRKLYPNVDFWSGIAFYYMGIPYEYFTPIFAMSRVVGWVAHVLEYWENNRIFRPRACYIGPHDLQYIPLEQR

SEQ ID NO: 123548 - DNA, 1422 bp, Arabidopsis thaliana; identical to SEQ ID NO: 93099
  CDS (1)..(1422)

SEQ ID NO: 123549 - protein, 473 aa, Arabidopsis thaliana; identical to SEQ ID NO: 93100

SEQ ID NO: 123550 - DNA, 1290 bp, Streptomyces coelicolor A3(2)
  CDS (1)..(1290): transl_table=11
gtgagcgacaactctgtagtactgcggtacggcgacggcgagtacacctacccggtgatcgacagcaccgtcggtgacaagggcttcgacatcgggaagctccgcgcccagaccggtctggtgacgctggacagcggttacggcaacaccgccgcctacaaatccgccattacctatctggacggcgaagccggcatcctccggtaccgcggctacccgatcgagcagctggccgagcgctcctccttcgtggaggtggcctacctgctgatcaacggcgagctgccgacggtcgacgagctgtccgcgttcaagggcgagatcacgcagcacaccctgctgcacgaggacgtcaagaacttctacaagggcttcccgcgcgacgcccacccgatggccatgctgtcgtcggtggtctcggcgctgtccaccttctaccaggacagccacaacccgttcgacgagcggcagcgcaacctctccacgatccggctgctcgcgaagcttccgacgatcgcggcgtacgcgtacaagaagtcgatcggccacccgttcgtctacccggccaacaacctcggctacgtcgagaacttcctgcgcatgaccttctcggttccggcgcaggagtacgagctggacccgacggtcgtcgcggccctcgacaagctgctgatcctgcacgcggaccacgagcagaactgctcgacctccacggtgcgcctggtcggctcctcgcaggcgaacatgttcgcctcgatctccgccggcatcaacgccctgtggggcccgctgcacggcggcgccaaccagtcggtgctggagatgctggaaggcatccgcgacgcgggcggcgacgtcgactccttcatccgcaaggtgaagaacaaggaggacggcgtccgcctgatgggcttcggccaccgggtctacaagaacttcgacccgcgcgccaagatcatcaaggccgccgcgcacgacgtgctctccgcgctcggcaagtccgacgagctgctggacatcgcgctgaagctggaggagcacgcgctctccgacgactacttcgtctcgcgcagcctctacccgaacgtcgacttctacaccggtctgatctaccgggccatgggcttcccgaccgagatgttcacggtcctgttcgccctcggccggctgccgggctggatcgcccagtggcacgagatgatcaaggagccgggttcccgcatcggccgcccgcgccagatctacacgggcgtcgtcgagcgcgacttcgtccccgtcgaggagcgctga

SEQ ID NO: 123551 - protein, 429 aa, Streptomyces coelicolor A3(2)
MSDNSVVLRYGDGEYTYPVIDSTVGDKGFDIGKLRAQTGLVTLDSGYGNTAAYKSAITYLDGEAGILRYRGYPIEQLAERSSFVEVAYLLINGELPTVDELSAFKGEITQHTLLHEDVKNFYKGFPRDAHPMAMLSSVVSALSTFYQDSHNPFDERQRNLSTIRLLAKLPTIAAYAYKKSIGHPFVYPANNLGYVENFLRMTFSVPAQEYELDPTVVAALDKLLILHADHEQNCSTSTVRLVGSSQANMFASISAGINALWGPLHGGANQSVLEMLEGIRDAGGDVDSFIRKVKNKEDGVRLMGFGHRVYKNFDPRAKIIKAAAHDVLSALGKSDELLDIALKLEEHALSDDYFVSRSLYPNVDFYTGLIYRAMGFPTEMFTVLFALGRLPGWIAQWHEMIKEPGSRIGRPRQIYTGVVERDFVPVEER

SEQ ID NO: 123552 - DNA, 1164 bp, Streptomyces coelicolor A3(2)
  CDS (1)..(1164): transl_table=11
atggaggcgccgcaccgtctccgcacaggtcgccgtacaccactgatcacgaggagccgcctgatgtccgacttcgtacccgggctagagggagtcgtcgcgttcgagacggagatcgccgaacccgacaaggagggcggcgcccttcgctaccgcggcgtcgacatcgaggacctggtcgggcacgtctccttcggcaacgtctggggcctgctcgtcgacggggccttcaaccccggcctgccgcccgccgagcccttccccatccccgtgcactccggcgacatcagggtcgacgtccagtccgccctcgccatgctcgcccccgcctggggcctcaaacccctgctggacatcgacgccgcccaggcccgcgacgacctcgcccgggccgccgtcatggccctgtcctacgtcgcccagtccgcgcgcggccagagcctgcccatggtcccgcagcgcgagatcgacaaggcccagtccgtggtcgaacggttcatgatccgctggcgcggcgagcccgaccccaagcacgtcgccgccgtcgacgcctactggacctccgcggccgagcacggcatgaacgcctccaccttcaccgcccgcgtcatcgcctccaccggcgcggacgtggccgccgccctctccggggccgtgggcgccatgtccggcccgctgcacggcggcgccccctcgcgcgtcctgcacatgatcgaggagatcgagcgcaccggcgacgccgaggcctacgtcaagaagaccctcgacgcgggcgagcgcctcatgggcttcggccaccgcgtctaccgcgccgaggacccgcgcgcccgggtcctgcgccgcaccgcccgcgaactgggcgccccgcgctacgaggtcgccgaggccctggagaaggccgccctggccgagctgcacgcccgccgccccgaccgggtgctggccaccaacgtcgagttctgggccgccatcatgctggacttcgccgaggtgccggcccccatgttcacctcgatgttcacctgcgcccgcaccgcgggctggtccgcgcacatcctggaacagaagcgcaccggccgcctggtccgcccctccgcccgctacacggggccgggcacccgcgacccgcgcgagatcgagggctacgccgacatcgcgggctga

SEQ ID NO: 123553 - protein, 387 aa, Streptomyces coelicolor A3(2)
MEAPHRLRTGRRTPLITRSRLMSDFVPGLEGVVAFETEIAEPDKEGGALRYRGVDIEDLVGHVSFGNVWGLLVDGAFNPGLPPAEPFPIPVHSGDIRVDVQSALAMLAPAWGLKPLLDIDAAQARDDLARAAVMALSYVAQSARGQSLPMVPQREIDKAQSVVERFMIRWRGEPDPKHVAAVDAYWTSAAEHGMNASTFTARVIASTGADVAAALSGAVGAMSGPLHGGAPSRVLHMIEEIERTGDAEAYVKKTLDAGERLMGFGHRVYRAEDPRARVLRRTARELGAPRYEVAEALEKAALAELHARRPDRVLATNVEFWAAIMLDFAEVPAPMFTSMFTCARTAGWSAHILEQKRTGRLVRPSARYTGPGTRDPREIEGYADIAG

SEQ ID NO: 123554 - DNA, 1173 bp, Streptomyces coelicolor A3(2)
  CDS (1)..(1173): transl_table=11
atgtccgtcaacagaaccgcagccgcggcaacgcccgtcgaggtgccgcgcgggctcgccggtgtcgtggtggccgacaccgaggtcggcgacgtgcgaggactcgaggggttctaccactaccgccagtactcggccgtcgaactcgcccggagtcgcggcttcgaggacgtctggcatctcctggtccacggggaactccccgacgcgcgcaccggggccgccttcgccgccgagaccgccgcgctgcggcggctccccgacgcggtgcgcgccgccctgcccgccatcgccgaggccggcgcaggctccggcccgctcgccggcatgcgcaccggtctgtccctgctgggtgcggccctgggcttccgaccggtgtacgacctgtcggtcgaccagcgccggcaggacaccctggtggcggccgcggccgtaccgacgctgctgaccgcgctgcaccggttgggacggggactcgagccggtggagccgcgcgaggacctctcgtacgccgcgaactacctgtacatgttgaccggccaggagccggacgaggcgtgcacacgggcgatcgagcagtacctgatctccaccatcgaccacgggttcaacgcgtcgaccttcaccgcgcgggtcatcgcgtcgacgggtgcggatgtcgcggcctgcctggccggcgcggtgtcggcgttgtccggcccgctgcacggcggcgcgcccagccgggcgctggacaccctggacgcgatcggcacgcccgatcgcatcgacgcgtggatccgcgagcgggtgctcgccggtgaccgcatcatgggcttcggccacgccgtctaccgcacggaggacccgcgctcacggatgctgcgtgaggtggcgcagagcttcggcggaccgcgcgtggagttcgccgtcgaggtggagcggcaggtcgaggcgatcctcgcggagctgaagccggggcgcgaactgcacaccaacgtcgagttctacgcgggcgtggtcatggaactgtgcggtctgccccgcgagatgttcactcccacgttcgcggcggcacgggtggtgggctggagcgcgaacattctggagcaggcgtccgactccaagatcatccgtccggcggcgcggtatgtggggccgggggcgccggtcggggtcccggcggtggcctga

SEQ ID NO: 123555 - protein, 390 aa, Streptomyces coelicolor A3(2)
MSVNRTAAAATPVEVPRGLAGVVVADTEVGDVRGLEGFYHYRQYSAVELARSRGFEDVWHLLVHGELPDARTGAAFAAETAALRRLPDAVRAALPAIAEAGAGSGPLAGMRTGLSLLGAALGFRPVYDLSVDQRRQDTLVAAAAVPTLLTALHRLGRGLEPVEPREDLSYAANYLYMLTGQEPDEACTRAIEQYLISTIDHGFNASTFTARVIASTGADVAACLAGAVSALSGPLHGGAPSRALDTLDAIGTPDRIDAWIRERVLAGDRIMGFGHAVYRTEDPRSRMLREVAQSFGGPRVEFAVEVERQVEAILAELKPGRELHTNVEFYAGVVMELCGLPREMFTPTFAAARVVGWSANILEQASDSKIIRPAARYVGPGAPVGVPAVA

SEQ ID NO: 123556 - DNA, 1290 bp, Xanthomonas campestris pv. campestris str. ATCC 33913
  CDS (1)..(1290): transl_table=11
gtgtccgatcttgatcaggtcacgctcaacgccggcgacacgtcggtcgttctgccggttctcaagcccacgttgggcaatgattgcgtcgatatttccaagctgaccaaagaaaccggtctgttcacctacgactcgggcttcaccgccaccgccagttgcaagtcggccatcacctacatcgatggcgacaatggcgtgctgctgtaccgcggctacccgatcgaacagttggccgagaagtccagcttcctggaagtttcgtatctgctgatgaacggcgaattgccgacggcggacgaattcaagaagttcgaccacgaagtgacgcatcacacgatgatgcacgagtcgctgaagaacttcctcggcggtttccgccacgatgcgcacccgatggccatgctggccggttcggtggcctcgctgtcggcgttctaccacgacaccctggacctcaacgatccggagcagcgccgtcaggccgccatccgtctgatcgccaaggtgccgaccctggctgctgcggcgtaccgttactcgatcggctggccgatccgctatccgcgcaacaacctgaactacgtcgaccgcttcctgcacatgatgttcgaagtgccgagcgagccgctggagatcaacccggtcgttgccaaggcactggatctgctgttcatcctgcacgccgatcacgagcagaacgcctccacctcgaccgtgcgtctggtcggttcgaccggtgccaacccgtacgcgtccgtggcagccggtatcaccgcgctgtggggcccggcacacggtggcgccaacgaagccgtgctgaagatgctggaagagatcggtaccgctgacaacgtcgagtccgccgtggccaaggccaaggacaagaactcctcgttccgtctgatgggcttcggtcaccgcgtctacaagaacttcgacccgcgcgccaagatcatccgcgagatgacccacaaggtgctgggcgagctgggtgtcaacgacccgctgctggaagttgccctgaagctggaagaagccgcgttgaaggacgactacttcgtgcagcgcaagctgtacccgaacgtggacttctactcgggcctcatctacaaggcgctcaatatcccggtggaaatgttcaccgtgatgttcgccattgcccgcaccgccggctgggtgtcgcattggctggagcagcaggtcgacccggaaatgaagatcggccgtccgcgccagatctacaccggctacgacaagcgcgactacaccgacgccggcaagcgctaa

SEQ ID NO: 123557 - protein, 429 aa, Xanthomonas campestris pv. campestris str. ATCC 33913
MSDLDQVTLNAGDTSVVLPVLKPTLGNDCVDISKLTKETGLFTYDSGFTATASCKSAITYIDGDNGVLLYRGYPIEQLAEKSSFLEVSYLLMNGELPTADEFKKFDHEVTHHTMMHESLKNFLGGFRHDAHPMAMLAGSVASLSAFYHDTLDLNDPEQRRQAAIRLIAKVPTLAAAAYRYSIGWPIRYPRNNLNYVDRFLHMMFEVPSEPLEINPVVAKALDLLFILHADHEQNASTSTVRLVGSTGANPYASVAAGITALWGPAHGGANEAVLKMLEEIGTADNVESAVAKAKDKNSSFRLMGFGHRVYKNFDPRAKIIREMTHKVLGELGVNDPLLEVALKLEEAALKDDYFVQRKLYPNVDFYSGLIYKALNIPVEMFTVMFAIARTAGWVSHWLEQQVDPEMKIGRPRQIYTGYDKRDYTDAGKR

SEQ ID NO: 123558 - DNA, 1344 bp, Chlorobium tepidum TLS
  CDS (1)..(1344): transl_table=11
atgagtgattcagaccaccgcaattcgctgacgatcatcgataaccgtaccggcaaatcgtacgagcttccgattgaaaacggcaccatccgcaccatggatcttcgcaagatcaaggagtcggaggatgatttcggtcttctcggctacgatcccgcgtttctgaacacctgctcctgcaagagcacgatcaccttcatcgatggtgacaagggcatcctgcgctatcgcggctatccgatcgagcagctcgccgaaaaaagctcgttcctcgaaacggcctacctgctcatcaagggcgagcttccagacaaggagcgtctcgcggtctggacctacaacatccgtcaccacaccatgacccacgccaacctgaccaagttcatggatggcttccgctacgatgcccatccgatgggcatcctcgtgggcacgctgggcgcgctttcaaccttctaccccgacgccaagaatgtcggcgaggaggagtcgcgcaagctccaggtgcggcggctgatcggcaagatgccgacgctcgcggcgatgagcttccggcacagcctcggtttcccctacgtgctgcccgacaacgatctgagctacgcaggcaactttctctccatgatgttccgcatgacggaaaaaaactacaagcccaatcctgtgctcgaacatgcgctcgacgtgcttttcattctgcacgccgaccacgagcagaactgttcgaccaacgccgtgcgctcggtgagcagctcgatggtcgatccctactcggccatcgccgccggttgtgccgcgctttacggcccgctacacggcggagcgaacgaggcggtgatccacatgctcaaacagatcggttccgtcgataaaatcccggagttcatcaagttggtcaagagcggcgagggacgcctgatgggcttcggccaccgcgtttacaagaattacgatccacgtgcgcggatcatcaagaagatcgccttcgatgtgttcgaggaaaccgggcgcaatccgctgctcgatatcgccatcgagctggagcggatcgcactcgaagacgattacttcatccagcgcaagctctacccgaacgtcgatttctactccggtctcatctaccaggcgatgggctttccgaccgagatgttcccggtgctgttcgccatcggacgcacgccggggtggctcgcgcagtggatcgagcacgtcaaggatccggagcagaagatcgcccgaccgcgccagatttacctcggcgagaagtgccgcgattacgtgccgatcgacgagcggccgagaaaaggggatgacgagcagaaatttggtatctgccggctctga

SEQ ID NO: 123559 - protein, 447 aa, Chlorobium tepidum TLS
MSDSDHRNSLTIIDNRTGKSYELPIENGTIRTMDLRKIKESEDDFGLLGYDPAFLNTCSCKSTITFIDGDKGILRYRGYPIEQLAEKSSFLETAYLLIKGELPDKERLAVWTYNIRHHTMTHANLTKFMDGFRYDAHPMGILVGTLGALSTFYPDAKNVGEEESRKLQVRRLIGKMPTLAAMSFRHSLGFPYVLPDNDLSYAGNFLSMMFRMTEKNYKPNPVLEHALDVLFILHADHEQNCSTNAVRSVSSSMVDPYSAIAAGCAALYGPLHGGANEAVIHMLKQIGSVDKIPEFIKLVKSGEGRLMGFGHRVYKNYDPRARIIKKIAFDVFEETGRNPLLDIAIELERIALEDDYFIQRKLYPNVDFYSGLIYQAMGFPTEMFPVLFAIGRTPGWLAQWIEHVKDPEQKIARPRQIYLGEKCRDYVPIDERPRKGDDEQKFGICRL

SEQ ID NO: 123560 - DNA, 1281 bp, Yersinia pestis KIM
  CDS (1)..(1281): transl_table=11
atggctgacaaaaaagcgacgctgaatttaggcgaagctgcgatcgaactgggtgtcctatccccaaccctcggcactgacgtgatcgacgtccgcaccttaggttctaaaggttattttacctttgaccccggttttacctctaccgcatcctgcgaatcaaaaatcacctatattgatggtgatcagggtattttgctgcaccgtggcttcccgattgcccagttggcaaaagattctacttatctggaagtttgttacattctgctgtacggcgaaacacctacgccagaagagtacaaaacgttcaaaaccacagtgacccgacataccatgatccacgagcagatcacccgtctgttccatggtttccgccgcgattcacatccgatggccgtgctatgtggggttactggtgcgctagccgccttctaccatgatgctctggatgttaataacgagcgccatcgtgaaattaccgccttccgtctgttgtctaaaatgccgactgtcgcagcgatgtgttataaatattcactgggtcaaccgtttgtttatccacgtaacgatctgtcctacgcgggtaacttcctacacatgatgttctctacgccatgtgagaaatatgaagttaacccagtactggaacgcgctatggatcgtattctcatcctgcacgcagatcacgaacagaacgcgtcaacatcgaccgtccgtactgccggctcttctggcgctaacccgtttgcctgtatcgccgcggggatcgcatccctgtggggccctgcgcacggtggtgccaatgaagcctgcctgaagatgttggaagagattaaaactgttgagcatatccctgaatttatccgccgcgcgaaagataagaatgactcattccgtctgatgggttttggtcaccgtgtctataaaaactatgaccctcgtgccaccgtcatgcgtgaaacctgtcatgaagtgttagaagagctgaagctgaataacagcttgttagaagtggcgatggagttggaaaacatcgcactgaacgatccttacttcattgagaaaaaactgtatccaaacgtggacttctattcaggtattatcctgaaagccatggggattccatcgtcaatgtttacggtgatattcgccattgcccgaaccatcggttggattgctcactggaacgaaatgcataatgacggcatcaagattgcccgtccgcgccagctttatactggctatacagaacgtgatttccagagccaattgaaaaaataa

SEQ ID NO: 123561 - protein, 426 aa, Yersinia pestis KIM
MADKKATLNLGEAAIELGVLSPTLGTDVIDVRTLGSKGYFTFDPGFTSTASCESKITYIDGDQGILLHRGFPIAQLAKDSTYLEVCYILLYGETPTPEEYKTFKTTVTRHTMIHEQITRLFHGFRRDSHPMAVLCGVTGALAAFYHDALDVNNERHREITAFRLLSKMPTVAAMCYKYSLGQPFVYPRNDLSYAGNFLHMMFSTPCEKYEVNPVLERAMDRILILHADHEQNASTSTVRTAGSSGANPFACIAAGIASLWGPAHGGANEACLKMLEEIKTVEHIPEFIRRAKDKNDSFRLMGFGHRVYKNYDPRATVMRETCHEVLEELKLNNSLLEVAMELENIALNDPYFIEKKLYPNVDFYSGIILKAMGIPSSMFTVIFAIARTIGWIAHWNEMHNDGIKIARPRQLYTGYTERDFQSQLKK

SEQ ID NO: 123562 - DNA, 1149 bp, Thermosynechococcus elongatus BP-1
  CDS (1)..(1149): transl_table=11
atggttgcttgcgaatttagccccggtcttgacggtattcccgttgctcaatcggccattagctatgtggatggccaagcaggcattctggagtatcgcggtgtcccgattcaggaactagcggagaaaagcacgtttttggaaactgccttcctcttgatttggggctactggccaaacagggaggagttagcagcctttgagcacgatattacctaccatcgccgcgttaaatatcgcattcgcgatatgatgaaatgctttcccgaaagtggccaccccatggatgccctgcaggcctcggcgggagccttgggattgttctattcacggcgggcactcgaggatccagagtacattcgggcagcggtgattcgcctcttggcaaaaattccaacgatggtggcggcctttcaactgatccgcaagggaaatgacccagtcatgccctgtgatgaactggactatgcggccaattttctctatatgctcaatgagcggcggccggatccatttgcagcgcgagtatttgatatttgcttgattctccacgcggagcacacgatgaatgcctcaaccttctcggcgcgggtgacggcctcgacgttgacagacccctacgccgtggttgcttcagcggtgggtacgctggcagggccactccacgggggcgccaatgaagatgtgatcaatatgcttgaagaaatcggcagtgtcgagaatgtccgtccctatgtggaaaagtgtatccagaacaagatcaaaattgctgggtttggccatcgtgtgtataaggtcaaggatccgcgcgccacgattttacagaagttggcggagcagttgtttgataagtttggcggcgatcgctactacgacattgccctgaaactggaggaagtggtgggcgaatacctcagttacaaggggatttaccccaatgtagacttttactctggtcttgtctaccggcggttgggaattcccagtgatttgtttacgccggtgtttgcgatcgcccgcgtggccggttggctagcccactggaaggaacaactggaggccaatcgcatttatcgtcccacccaagtctatacgggtgcccacaatcagccctatgtgcccatggaggaacgcaatcatcgcccctaa

SEQ ID NO: 123563 - protein, 382 aa, Thermosynechococcus elongatus BP-1
MVACEFSPGLDGIPVAQSAISYVDGQAGILEYRGVPIQELAEKSTFLETAFLLIWGYWPNREELAAFEHDITYHRRVKYRIRDMMKCFPESGHPMDALQASAGALGLFYSRRALEDPEYIRAAVIRLLAKIPTMVAAFQLIRKGNDPVMPCDELDYAANFLYMLNERRPDPFAARVFDICLILHAEHTMNASTFSARVTASTLTDPYAVVASAVGTLAGPLHGGANEDVINMLEEIGSVENVRPYVEKCIQNKIKIAGFGHRVYKVKDPRATILQKLAEQLFDKFGGDRYYDIALKLEEVVGEYLSYKGIYPNVDFYSGLVYRRLGIPSDLFTPVFAIARVAGWLAHWKEQLEANRIYRPTQVYTGAHNQPYVPMEERNHRP

SEQ ID NO: 123564 - DNA, 1122 bp, Oceanobacillus iheyensis HTE831
  CDS (1)..(1122): transl_table=11
ttgacagcatcgacaaaggggttagaaggtattgtcgctacgcagtcatcgattagttcgattattgatgatcaactatcctatgtagggtatagaattgatgatttggctgaaaattcaagctttgaagagattatttatctactttggaatcaaaaattaccgaataagtctgaattggatgaattaaagtctcaactggctgaaaatatggatatacctgatgcaattattaatcacttgcgttcctatgatttgaatacggtacatccaatggctgcattacgtactgcaatatcattgcttggactatatgataatgaagcagatgttatggatgaacaagctaacaaacgaaaagcggttcgtattcaagcacaaatagcaacaatcgtaaccactttttctcgtattcgtaaaggtcaagaacctgtaaaaccaaaaaaggatcttagctacgcagaaaactttatatatatgttaaatggtaaagaaccagaggatatcgaagtagaagcaattaataaagcgctcgtacttcatgccgatcatgaacttaatgcatccacctttactgctcgagtatgtgtggctacattatcggatatttattcagggatcactgcagcaattggagcattaaaaggtccattacacggtggtgctaatgaaaatgtcatgaaaatgctaactgaaattggcgaagaggaaaatgctattccttatataaaagaaaaattagcaaataaagataaaatcatgggtatgggacatcgtgtataccgtacaggagatcctcgtgcaaaatttttacgagagatgtcaaaagaacttacaaaattaactggacaagaaaaatggtataatatgtcagttaaaatagaagattatattaaagaaaataaagggcttcctgcaaatgtagatttttacagtgcatcagtatatcatagcttgggtcttgatcatgatatattcacaccattatttgctgtaagtcgtacttcaggatggattgctcatattctagaacaatatgaaaataaccgtttaattcgtccacgtgcagagtacacaggtccagaattacgtgactatgtttctattgaacaaagaggttaa

SEQ ID NO: 123565 - protein, 373 aa, Oceanobacillus iheyensis HTE831
MTASTKGLEGIVATQSSISSIIDDQLSYVGYRIDDLAENSSFEEIIYLLWNQKLPNKSELDELKSQLAENMDIPDAIINHLRSYDLNTVHPMAALRTAISLLGLYDNEADVMDEQANKRKAVRIQAQIATIVTTFSRIRKGQEPVKPKKDLSYAENFIYMLNGKEPEDIEVEAINKALVLHADHELNASTFTARVCVATLSDIYSGITAAIGALKGPLHGGANENVMKMLTEIGEEENAIPYIKEKLANKDKIMGMGHRVYRTGDPRAKFLREMSKELTKLTGQEKWYNMSVKIEDYIKENKGLPANVDFYSASVYHSLGLDHDIFTPLFAVSRTSGWIAHILEQYENNRLIRPRAEYTGPELRDYVSIEQRG

SEQ ID NO: 123566 - DNA, 1107 bp, Oceanobacillus iheyensis HTE831
  CDS (1)..(1107): transl_table=11
ttgaagacagatgaaaaatttgttccaggcttagatggtgtgattgcatcggaaacagcaatttcttttttagatgttgaaaaggaaaaaattatcattaatggacatgatcttatcgaattatcattaaaacaggattatttagatattctttatttacttttggaaggggatctgccaaaaaaagtagagataacaaaaacagagaaattattgaaagatcattatgaagttcctcaagcagtattggatatcttaaaactattacctaaggaaacacatccaatggatggaatgcggacggctttatctgtacttgcaggatacgataaaaatatcgaagatcgctcagctagtgcgaacaaagatcgtgcatatcagttgcttggccaattgccgacaattacagtaaatagctatcgaattttgaataatcaagaagtggtgcaaccagccacagaactatcttatagtgccaactttttatacatgattacaggaaaagaaccatcagatttacaagtggaaatttttgatcgattattgttgctttatagcgaacatgaaatgccaaactctacgtttactgctagagtaatatcttcgaccaattctgatatgtatggtgcattaactggagctatatcttcgttaaaggggaatttacatggtggtgcaaatgaagcagttatgtacatgctaaatgaagtagaaacagccgacgaatttgaacaattactatataaaaagttagaaaataaagagaaaattatggggtttggacatcgtgtctatatgaaaaaaatggacccacgcgcccttattacaaaagaagcactaaaaaaactttgtgagaaagataatgactatactttattagagatgtgtgaagccggagaggaagtaatgaaaaaagaaaaagggttgtatcctaatttagattattatgcagcacctgtttattggaaattaggtataccgatttcgctgtatacaccaatcttttttagtgcacgtaccgctggacttgcagcccatatcgttgagcaacattcaaacaatcgtatattccgtccaagagtgaaatatatcggaaaagattattaa

SEQ ID NO: 123567 - protein, 368 aa, Oceanobacillus iheyensis HTE831
MKTDEKFVPGLDGVIASETAISFLDVEKEKIIINGHDLIELSLKQDYLDILYLLLEGDLPKKVEITKTEKLLKDHYEVPQAVLDILKLLPKETHPMDGMRTALSVLAGYDKNIEDRSASANKDRAYQLLGQLPTITVNSYRILNNQEVVQPATELSYSANFLYMITGKEPSDLQVEIFDRLLLLYSEHEMPNSTFTARVISSTNSDMYGALTGAISSLKGNLHGGANEAVMYMLNEVETADEFEQLLYKKLENKEKIMGFGHRVYMKKMDPRALITKEALKKLCEKDNDYTLLEMCEAGEEVMKKEKGLYPNLDYYAAPVYWKLGIPISLYTPIFFSARTAGLAAHIVEQHSNNRIFRPRVKYIGKDY

SEQ ID NO: 123568 - DNA, 1293 bp, Brucella suis 1330
  CDS (1)..(1293): transl_table=11
atgtcagataagacagccagctttaccctcgacggcaaaacgttcgatctgcctgtgcgaaaaggcactgtcgggccggatgtcgttgatattggtccactttacaagaattcccacgcattcacctacgaccctggcttcacttccaccgcttcgtgcgaatccaaaatcacctatatcgatggtgacgaaggcgtcctgctttatcgcggctacccgatcgaccagcttgccgagcatggcgacttcctcgaaacctgctatctgcttctttacggcgaactgccgaccgcaacccagaaggccgatttcgactatcgtgtaacccgccacaccatgctgcacgagcagatgacgaagttcttcaccggcttccgtcgtgatgcccacccgatggctgtcatggtgggttgcctgggcgccatgtccgccttctaccacgactcgaccgatatcaccgatccgcatcagcgcatggtcgcttcgatccgcctgatcgccaaggtgccgacgcttgcagccatggcctacaagtaccatatcggccagccgttcgtatatccgaagaacgacctcgatttcgcgtcgaacttcctgcacatgtgcttcaccgtgccttgcgaagagtacaaggtgaacccggttctggcgcgcgccatggaccgcattttcatcctgcatgctgatcacgaacagaatgcctccacctcgaccgtccgcctcgccggctcgtcgggtgcaaacccgtttgcctgcattgccgctggcgtggcctgcctctggggcccggctcatggcggcgccaatgaagctgcgctcaacatgctttcggaaatcggctcggttgaccgtatcccggaatatatcgccagggctaaagacaagaacgatccgttccgtttgatgggcttcggccatcgcgtttacaagaactacgatccgcgcgccaagatcatgcagaagacctgccatgaagtcctcggcgagctgggcatcaaggatgatccgctgcttgacgttgcaatggaactggaaaggattgccctgaccgacgaatatttcatcgaaaagaagctctacccgaacatcgacttctattcgggcatcacgctgaaggcgctgggcttcccgaccgaaatgttcaccgtcctgttcgcccttgcccgcaccgttggctgggtcgcccagtggaaggaaatgatcgaagatccgcagcagaaaatcggccgtccgcgccagctctacaccggcgcaaccgaacgcgattacgtgccgcttgcaaagcgcaagtaa

SEQ ID NO: 123569 - protein, 430 aa, Brucella suis 1330
MSDKTASFTLDGKTFDLPVRKGTVGPDVVDIGPLYKNSHAFTYDPGFTSTASCESKITYIDGDEGVLLYRGYPIDQLAEHGDFLETCYLLLYGELPTATQKADFDYRVTRHTMLHEQMTKFFTGFRRDAHPMAVMVGCLGAMSAFYHDSTDITDPHQRMVASIRLIAKVPTLAAMAYKYHIGQPFVYPKNDLDFASNFLHMCFTVPCEEYKVNPVLARAMDRIFILHADHEQNASTSTVRLAGSSGANPFACIAAGVACLWGPAHGGANEAALNMLSEIGSVDRIPEYIARAKDKNDPFRLMGFGHRVYKNYDPRAKIMQKTCHEVLGELGIKDDPLLDVAMELERIALTDEYFIEKKLYPNIDFYSGITLKALGFPTEMFTVLFALARTVGWVAQWKEMIEDPQQKIGRPRQLYTGATERDYVPLAKRK

SEQ ID NO: 123570 - DNA, 1284 bp, Shigella flexneri 2a str. 301
  CDS (1)..(1284): transl_table=11
atggctgatacaaaagcaaaactcaacctcaacggggacacagctgttgaactggatgtgctgaaaggcacgctgggtcaagatgttattgatatccgtactctcggttcaaaaggtgtgttcacctttgacccaggcttcacttcaaccgcatcctgcgaatctaaaattacttttattgatggtgatgaaggtattttgctgcaccgcggtttcccgatcgatcagctggcgaccgattctaactacctagaagtttgttacatcctgctgaatggtgaaaaaccgactcaggaacagtatgacgaatttaaaactacggtgacccgtcataccatgatccacgagcagattacccgtctgttccacgctttccgtcgcgactcacatccaatggcagtcatgtgtggtattaccggcgcgctggcggcgttctatcacgactcgctggatgttaacaatcctcgtcatcgtgaaattgccgcgttccgcctgctgtcgaaaatgccgaccatggccgcgatgtgttacaagtattccattggtcagccatttgtttatccgcgcaacgatctctcctatgccggtaacttcctgaatatgatgttctccacgccgtgcgaaccgtatgaagttaatccgattctggaacgtgctatggaccgtattctgatcctgcacgctgaccatgaacagaacgcctctacctccaccgtgcgtaccgctggctcttcgggtgcgaacccgtttgcctgtatcgcagcaggtattgcttcactgtggggacctgcgcacggtggtgctaacgaagcggcgctgaaaatgctggaagaaattagctccgttaaacacattccggaatttgttcgtcgtgcgaaagataaaaatgattctttccgcctgatgggcttcggtcaccgcgtgtacaaaaattacgacccgcgcgccaccgtaatgcgtgaaacctgccatgaagttctgaaagagctgggcaccaaagatgacctgctggaagtggctatggagctggaaaacatcgcgctgaacgacccgtactttatcgagaagaaactgtacccgaacgtcgatttctactctggtatcatcctgaaagcgatgggtattccgtcttccatgttcaccgtcattttcgcaatggcacgtaccgttggctggatcgcccactggagcgaaatgcacagttacggtatgaagattgcccgtccgcgtcagctgtatacaggatatgaaaaacgcgactttaaaagcgatatcaagcgttaa

SEQ ID NO: 123571 - protein, 427 aa, Shigella flexneri 2a str. 301
MADTKAKLNLNGDTAVELDVLKGTLGQDVIDIRTLGSKGVFTFDPGFTSTASCESKITFIDGDEGILLHRGFPIDQLATDSNYLEVCYILLNGEKPTQEQYDEFKTTVTRHTMIHEQITRLFHAFRRDSHPMAVMCGITGALAAFYHDSLDVNNPRHREIAAFRLLSKMPTMAAMCYKYSIGQPFVYPRNDLSYAGNFLNMMFSTPCEPYEVNPILERAMDRILILHADHEQNASTSTVRTAGSSGANPFACIAAGIASLWGPAHGGANEAALKMLEEISSVKHIPEFVRRAKDKNDSFRLMGFGHRVYKNYDPRATVMRETCHEVLKELGTKDDLLEVAMELENIALNDPYFIEKKLYPNVDFYSGIILKAMGIPSSMFTVIFAMARTVGWIAHWSEMHSYGMKIARPRQLYTGYEKRDFKSDIKR

SEQ ID NO: 123572 - DNA, 1281 bp, Leptospira interrogans serovar Lai str. 56601
  CDS (1)..(1281): transl_table=11
atgagtgaattcattgaaatcaaagttggggaaaaatcctatcagtttccattgatctccggaacggacggtaaaaaaggaatcgatattagagaacttcatcaaaaaaccggactaatttcttacgatccaggtttttttaacaccgcctacgctgttagtcgaatctcccgaagagacccgaattcaggtgaactcaactatcgtggttacgacatcgcagatttagtacaacattctacatttgtggaaactagttacttattgatttatggcaaacttccaacggagcagcagcttaaagatttctctctgaaattatctaaacactcattgattcacgaagatatgatcaatctatttgatggatttccgggtaaaggtcatcctctagcggttctgtccgtgatggtaacttctctttccagttattatccagaagaatacgaagaatccttggacaaaggaatcgatcattccgcaagactgctcgcaaagattagaactatcgccgccttttcttacaaaaaaatcgtaggccaacccttcgtatatcctttggacaaacatccttattgtacaaattttctttatatgttattttcaattccttccaaggattatattcccaccgaagacatagatcgaattttaaatcaattatggatactttacgcggatcatgaacaaaacgtatccaatacaaccgttcaagtaattggctctacacaagccaacttattcgcttctatatcttctgcgatcaatgcgctttggggctctagagaaggtggtcgtcaggtcgcggcggtaggattgatagaagacattctcaaatccagaaaatcggtgccggaatattttgaaaaattcaaaggagactcggaaaagttatttggaaacggttttgggcataaggcatacgaggcaaaaagtagaagagcaatcattgcaagtaaactgtttcacgatttttacaaaaaaaatcctattggacctatcgcagaagtagctcttaaaatcgaagaatatatgcaaaatgatgaatattatatcaatcaaaatttgtatccgaatttagagttctacagcgcggtaatttttaattcacttggaataccaaaagaactttttacggctatgcaggtaatcggaaaacttccaggctggttagcgcactggagagaacaaagagtttccggaaattacagtaaggctcgtccaaaacaaatttattctggagaaatgggtagaaaatacattccactttcggaaagataa

SEQ ID NO: 123573 - protein, 426 aa, Leptospira interrogans serovar Lai str. 56601
MSEFIEIKVGEKSYQFPLISGTDGKKGIDIRELHQKTGLISYDPGFFNTAYAVSRISRRDPNSGELNYRGYDIADLVQHSTFVETSYLLIYGKLPTEQQLKDFSLKLSKHSLIHEDMINLFDGFPGKGHPLAVLSVMVTSLSSYYPEEYEESLDKGIDHSARLLAKIRTIAAFSYKKIVGQPFVYPLDKHPYCTNFLYMLFSIPSKDYIPTEDIDRILNQLWILYADHEQNVSNTTVQVIGSTQANLFASISSAINALWGSREGGRQVAAVGLIEDILKSRKSVPEYFEKFKGDSEKLFGNGFGHKAYEAKSRRAIIASKLFHDFYKKNPIGPIAEVALKIEEYMQNDEYYINQNLYPNLEFYSAVIFNSLGIPKELFTAMQVIGKLPGWLAHWREQRVSGNYSKARPKQIYSGEMGRKYIPLSER

SEQ ID NO: 123574 - DNA, 1290 bp, Leptospira interrogans serovar Lai str. 56601
  CDS (1)..(1290): transl_table=11
atggcagaggtagcaattctgaaaatcgatgggaaagaatacgaactcccgatcgtaataggcaccgaaaaagaaaaagcaatcgatatttctaaactccgtcaacagaccggatatgtaaccttggacaacggatatttaaatactggagcctgcacaagcgcggtgacttttttagacggagaactaggtattttaagatacagaggaattccgatcgaacaactcgccgaaaattccacatttactgaagtcgcctatttactgatatacggaaaaattccttcagactcagaattgaaaaaatggaacgacgaacttacgatgcacacgttgatccacgaggatcttaaacgtctttataatggatttccaaaagacggtcacccaatggcgatcatgtcttctatgatcggatctctttccacttattatcaagattcttacgatccggaaaatgcagaacacagacatatttctatgattcgtcttctcgctaagtttcctacaatcgccgcattcgcttataagaaatccattggacaacctacaattcatcctttgaacagtttggactattgcgcaaactttatgaacatgatgttctccgttccaagcgaggattataaaattgatccagaaatcgtaaaagcgttgaacttattattgattcttcatgcggaccacgaacaaaactgttctacgtctacggtgcgtttggtgggatcttctctcgcaaacttatacggcgcgatctctgctggaatttgtgctctttggggacctagacacggaggagccaatcaagaagtattagaaatgttgcaagagattcaggcaagcggtttgcccgtaaaaaaaatcgtagaaaaagcaaaagataaaaatgactctttccgtctttccggattcggtcacagggtctataaaaattttgatccacgtgcaaagatcatcaaaaaggcgtgcgactccgtattaaaaagattaggcgttcaagattctttattagatattgctaaagaactagaagaaacagctcttcatgatccttactttgtggaaagaaaactctatccaaacgtagacttttattccggaattatctaccgagccctcggaattccagtaaatatgtttacggtaatgtttgctatgggacgtcttccaggttggatcgctcagtggaaagaaatgatagaatctccggatatgaaaattggtcgtccaagacaaatctacaccggttctacagaaacttcctacaaagaagccaagaaaaaagcctga

SEQ ID NO: 123575 - protein, 429 aa, Leptospira interrogans serovar Lai str. 56601
MAEVAILKIDGKEYELPIVIGTEKEKAIDISKLRQQTGYVTLDNGYLNTGACTSAVTFLDGELGILRYRGIPIEQLAENSTFTEVAYLLIYGKIPSDSELKKWNDELTMHTLIHEDLKRLYNGFPKDGHPMAIMSSMIGSLSTYYQDSYDPENAEHRHISMIRLLAKFPTIAAFAYKKSIGQPTIHPLNSLDYCANFMNMMFSVPSEDYKIDPEIVKALNLLLILHADHEQNCSTSTVRLVGSSLANLYGAISAGICALWGPRHGGANQEVLEMLQEIQASGLPVKKIVEKAKDKNDSFRLSGFGHRVYKNFDPRAKIIKKACDSVLKRLGVQDSLLDIAKELEETALHDPYFVERKLYPNVDFYSGIIYRALGIPVNMFTVMFAMGRLPGWIAQWKEMIESPDMKIGRPRQIYTGSTETSYKEAKKKA

SEQ ID NO: 123576 - DNA, 1569 bp, Drosophila melanogaster; identical to SEQ ID NO: 93103
  CDS (1)..(1569)

SEQ ID NO: 123577 - protein, 522 aa, Drosophila melanogaster; identical to SEQ ID NO: 93104

SEQ ID NO: 123578 - DNA, 1413 bp, Corynebacterium efficiens YS-314
  CDS (1)..(1413): transl_table=11
ttggagacttttgtgtcgcgcaacaacattctggctgcacgtgatgcgtccgacctggttattgaatctggtgacctcccgcaacccgggggaaccgacaaaaagtttgaaagggaaatcgtggcttctgataacaacaaggctgtactgcactaccctggcggcgaattcgagatgggcatcaagcaggccaccgagggtaactccggtgtcatcctgggtaagatgctgtcggaaaccggtctggtcaccttcgaccccggttatgtcagcaccggttccaccgaatccaagatcacctacatcgatggtgatgcaggcatcctgcgctaccgcggctacgacattgcggatctggccgaaaatgccaccttcaatgaggtctcctacctcctgatcaagggtgagctcccgaccccggaagagctccacaagttcaacgacgagattcgtcaccacaccctgctggacgaggacttcaagtcccagttcaatgtcttccctcgcgatgcccacccgatggccaccctggcctcctcggttaacatcctctccacctactaccaggatcagctggatcccctggatgaggctcagctggacaaggcaaccgtccgcctgatggcgaaggttccgatgctggctgcatacgcacaccgtgcccgcaagggtgcgccgtacatgtacccggacaactccctcaatgcccgtgagaacttcctgcgcatgatgttcggttacccgaccgagccgtacgaggttgatccgatcatggtcaaggccctcgacaagctgctcatcctgcacgcagaccacgagcagaactgctccacctccactgtccgcatgatcggctccgcgcaggcgaacatgttcgtctccatcgccggcggcatcaacgcactctccggcccgctgcacggtggcgccaaccaggctgtcctcgagatgctcgaggagatcgcagccaacggcggcgacgcaaccgacttcatgaaccgcgtgaagaacaaggagaagggtgtccgcctcatgggcttcggacaccgcgtctacaagaactacgatccgcgtgcagccatcgtcaaggacaccgcccacgagatcctcgagcacctcggtggcgacccactgctggatctggctctcaagctggaggagatcgccctcaacgacgattacttcatctcccgcaagctgtacccgaacgtggacttctacaccggcctgatctaccgcgccatgggcttcccgacggacttcttcaccgtcctgttcgccatcggccgcctcccgggctggatcgcccactaccgcgagcagctcgccgatccgggcgccaagatcaaccgtcctcgccagatctacaccggtgagaccgcacgcaagatcatcccccgcgaagagcgctag

SEQ ID NO: 123579 - protein, 470 aa, Corynebacterium efficiens YS-314
METFVSRNNILAARDASDLVIESGDLPQPGGTDKKFEREIVASDNNKAVLHYPGGEFEMGIKQATEGNSGVILGKMLSETGLVTFDPGYVSTGSTESKITYIDGDAGILRYRGYDIADLAENATFNEVSYLLIKGELPTPEELHKFNDEIRHHTLLDEDFKSQFNVFPRDAHPMATLASSVNILSTYYQDQLDPLDEAQLDKATVRLMAKVPMLAAYAHRARKGAPYMYPDNSLNARENFLRMMFGYPTEPYEVDPIMVKALDKLLILHADHEQNCSTSTVRMIGSAQANMFVSIAGGINALSGPLHGGANQAVLEMLEEIAANGGDATDFMNRVKNKEKGVRLMGFGHRVYKNYDPRAAIVKDTAHEILEHLGGDPLLDLALKLEEIALNDDYFISRKLYPNVDFYTGLIYRAMGFPTDFFTVLFAIGRLPGWIAHYREQLADPGAKINRPRQIYTGETARKIIPREER

SEQ ID NO: 123580 - DNA, 1128 bp, Pseudomonas putida KT2440
  CDS (1)..(1128): transl_table=11
atggccgaagcaaaagtactcagtggcgcaggcctgcgtggccaggtggccggccagactgcactgtcgaccgtgggccaggccggtgccgggctgacctaccgtggttatgatgtgcgtgacctggccgccggtgccgagttcgaagaagtcgcctacctgctgctgtacggcgagctgccaacccaggctgaactggccgactacaagcgcaagctcaagggcctgcgtgacctgccgcaagccttgaaggaagtgcttgagcgcatcccgcgcgatgcccacccgatggacgtcatgcgcaccggttgctcggtactgggcaccctcgaaccagaactgaccttcgaagcccagcgcgacaagaccgaccgcctgctggcgctgttcccggccgtgatgtgctactggtaccgcttcacccaccatggcgtacgcatcgactgcaccactgatgaagacaccttgggtggccacttcctgcacctgctgcacggcaagaagccgagcgagctgcacgtcaaggtcatgaacgtgtcgctgattctctacgctgaacacgaattcaacgcctcgaccttcactgcccgcgtctgcgcctcgaccctgtctgacttgtactcctgcgttaccgcagccatcggctcgctgcgtggcccgctgcacggcggtgccaacgaggctgcgatggaactgatcgaacgcttccagagcccgcaggaagccaccgccgaactgctgcgcatgctcgagcgcaaagacaagatcatgggctttggccatgccatctacaaagagtccgacccgcgcaacgaggtgatcaagggctggtcgaagcagctggctgacgaagtgggtgacaaggtgctgtacccggtgtccgaagccatcgacaagaccatgtgggagcagaagcgcctgttccccaacgccgacttctaccatgcctcggcgtaccacttcatgggcattccgaccaagctgttcaccccgatcttcgtctgctcgcggctgaccggctgggcggcgcacgtcttcgagcagcgcgccaacaaccgcatcatccgcccgagcgccgagtatgtcggcgtcgaacagcgccagttcgtgccgatcgagcagcgctga

SEQ ID NO: 123581 - protein, 375 aa, Pseudomonas putida KT2440
MAEAKVLSGAGLRGQVAGQTALSTVGQAGAGLTYRGYDVRDLAAGAEFEEVAYLLLYGELPTQAELADYKRKLKGLRDLPQALKEVLERIPRDAHPMDVMRTGCSVLGTLEPELTFEAQRDKTDRLLALFPAVMCYWYRFTHHGVRIDCTTDEDTLGGHFLHLLHGKKPSELHVKVMNVSLILYAEHEFNASTFTARVCASTLSDLYSCVTAAIGSLRGPLHGGANEAAMELIERFQSPQEATAELLRMLERKDKIMGFGHAIYKESDPRNEVIKGWSKQLADEVGDKVLYPVSEAIDKTMWEQKRLFPNADFYHASAYHFMGIPTKLFTPIFVCSRLTGWAAHVFEQRANNRIIRPSAEYVGVEQRQFVPIEQR

SEQ ID NO: 123582 - DNA, 1290 bp, Pseudomonas putida KT2440
  CDS (1)..(1290): transl_table=11
atggctgacaaaaaagcgcagttggtcatcgagggcgctgcccccgtcgagctgcccattttaaccggcaccgttggtcctgatgtaatcgacgtccgcgggttaggggccactggtcacttcaccttcgacccaggtttcatggcgactgcctcgtgcgagtcgaagatcacctatattgacggcgacaaaggtatcctgctgcaccgcggctacccgatcgagcaactcgccgaacagtccgactacctcgaaacctgctacctgctgctcaatggcgaactgccgaatgccgagcagaaggcccagttcgtcagcactgtcaagaaccacaccatggttcacgagcagctgaagtccttcttcaacggcttccgtcgcgacgctcacccgatggcggtgatgtgcggtgtagtcggcgccctgtcggcgttctatcacgactccctggatatcaataacccgcaacaccgcgaaatctccgcggtgcgcctggtcgccaagatgccgaccctggctgcgatggtttacaagtactccatgggccagccgatgatgtacccgcgcaacgacctgtcgtacgcggaaaacttcctgcacatgatgttcaacaccccgtgcgagatcaaaccgatcagcccggtgctggccaaggcaatggaccggatcttcatcctccacgccgaccacgagcagaacgcctccacctccaccgttcgtctggcaggctcgtcgggtgccaacccgttcgcctgtatcgccgccggtatcgccgcactgtggggcccggcccacggcggtgcgaacgaagccgtactgaccatgctggatgaaatcggcgatgtctcgaacatcgacaaattcatcgccaaggccaaggacaagaacgacccgttcaagctgatgggcttcggtcaccgcgtgtacaagaaccgcgacccgcgcgccaccgtgatgaagcagacctgcgacgaagtcctgcgcgagctgggcatcaagaacgacccgcagctggaactggccatgcgcctggaagagatcgccctgaccgatccttacttcatcgagcgctcgctgtacccgaacgtcgacttctactcggggatcatcctcaaggcgatcggcattccgaccagcatgttcaccgtgatcttcgccctggcacgtaccgtgggctggatctcgcactggaaagaaatgctctccagcccgtacaagatcggccgtccgcgccagctgtacaccggcgagcagaagcgcgacatcgttgccctgaaagaccgcaagtaa

SEQ ID NO: 123583 - protein, 429 aa, Pseudomonas putida KT2440
MADKKAQLVIEGAAPVELPILTGTVGPDVIDVRGLGATGHFTFDPGFMATASCESKITYIDGDKGILLHRGYPIEQLAEQSDYLETCYLLLNGELPNAEQKAQFVSTVKNHTMVHEQLKSFFNGFRRDAHPMAVMCGVVGALSAFYHDSLDINNPQHREISAVRLVAKMPTLAAMVYKYSMGQPMMYPRNDLSYAENFLHMMFNTPCEIKPISPVLAKAMDRIFILHADHEQNASTSTVRLAGSSGANPFACIAAGIAALWGPAHGGANEAVLTMLDEIGDVSNIDKFIAKAKDKNDPFKLMGFGHRVYKNRDPRATVMKQTCDEVLRELGIKNDPQLELAMRLEEIALTDPYFIERSLYPNVDFYSGIILKAIGIPTSMFTVIFALARTVGWISHWKEMLSSPYKIGRPRQLYTGEQKRDIVALKDRK

SEQ ID NO: 123584 - DNA, 1122 bp, Staphylococcus epidermidis ATCC 12228
  CDS (1)..(1122): transl_table=11
atggcagaattaaaaagaggtttagaaggggttattgcagctgaaactaaaattagctcgataattgacagtcagttaacatatgcgggctatgatattgacgatctcgcagaaaacgcgcaatttgaagaaataatttttttactatggaattatagacttcctaatgaaaatgagttaagtgaattaaaagaaaaattatttgattatatgactcttaataatagagtatacaagcactttgaggagtatgtgacggatcatgtacatccaatgactgctctacgtacatcagtatcatatgtagctcattttgatccagaagcggaaaatgaatctgatgagaataaatatgatagagctattcgtattcaagctaaaatcgcttctttagtaacggctttcgctagagttagagacggtaaagaacctgtcaaacctaattctgaacttagttatgcagcaaatttcttatatatgttaaggggagaactaccaacagaagttgaagttgaagcatttaataaggcattaattttacatgctgatcatgaacttaacgcatctgcatttacggcacgttgcgcagtatcttcattatcagatatgtattcaggtgttgttgcagctattggttcattaaaaggaccattacatggtggtgcaaatgaacgagtgatgtcaatgcttaaagaaataggaagcattgataatgtagatcactatttagatgaaagatttgcaaataaagataaaattatgggctttggtcatcgtgtttataaagatggtgatccaagagctaaatatttaagagaaatgagccgtaaaatcactgaagaaacagggcaaagtgaactgtttgaaatgtcattagccattgagaagagaatgaaagaagaaaaaggacttattcctaatgtcgatttctttagtgctacagtctttcatagtatgaatattccacatgacttattcacaccaatatttgcagtaagtcgtacttctggctggattgctcatattttagagcaatatcgagacaatagaattatgcgaccaagagctaaatatataggtgaacaaaatcgtaaatatgtgcctattgaagaaagaccataa

SEQ ID NO: 123585 - protein, 373 aa, Staphylococcus epidermidis ATCC 12228
MAELKRGLEGVIAAETKISSIIDSQLTYAGYDIDDLAENAQFEEIIFLLWNYRLPNENELSELKEKLFDYMTLNNRVYKHFEEYVTDHVHPMTALRTSVSYVAHFDPEAENESDENKYDRAIRIQAKIASLVTAFARVRDGKEPVKPNSELSYAANFLYMLRGELPTEVEVEAFNKALILHADHELNASAFTARCAVSSLSDMYSGVVAAIGSLKGPLHGGANERVMSMLKEIGSIDNVDHYLDERFANKDKIMGFGHRVYKDGDPRAKYLREMSRKITEETGQSELFEMSLAIEKRMKEEKGLIPNVDFFSATVFHSMNIPHDLFTPIFAVSRTSGWIAHILEQYRDNRIMRPRAKYIGEQNRKYVPIEERP

SEQ ID NO: 123586 - DNA, 1290 bp, Pseudomonas syringae pv. tomato str. DC3000
  CDS (1)..(1290): transl_table=11
atggctgacaaaaaagcgcagttgatcatcgagggcgctgcccccgtcgagctgccaatactgaccggtacagtgggtccggacgtgatcgacgtacgcggtctgaccgccaccggccgcttcacatttgaccctggcttcatgtccacggcctcttgcgagtcgaagatcacctacattgatggtgacaacggaattctgctgcaccgcggctacccgatcgaacaactggccgagcagtccgattacctcgagacctgctacctgttgctcaacggcgagctgccaaccgccgaacagaaagcccagttcgtggccgtggtcaagaaccacacgatggttcacgaacaactcaagaccttcttcaacggctttcgccgtgacgcccacccgatggccgtcatgtgcggtgtagtcggcgccctgtcggcgttctaccacgattcgctggacatcaataacccgcagcaccgcgaaatttcggctgtacgcctggtcgccaagatgccgaccctggcagcgatggtctacaagtactccatgggccaacccatgatgtacccgcgcaacgacctcagctacgccgaaaacttcctgcacatgatgttcaacacgccgtgcgagatcaaaccgatcagcccggtgctggccaaggcgatggacaagatcttcatccttcacgccgatcacgagcagaacgcgtcgacctctaccgtgcgcatggcgggctcctcgggtgccaacccgttcgcctgtatcgcagccggtatcgcggcactctggggcccggctcacggcggcgccaacgaagccgtgctgaccatgctcgatgaaatcggcgacgtgtcgaacatcgacacattcatagccaaagccaaggacaagaacgatccgttcaagctcatgggcttcggtcaccgggtctacaagaaccgtgaccctcgcgcgaccgtgatgaagcagacctgcgacgaagtactcaaggaactgggcatcaaaaacgatcctcagctcgagctggccatgcgtcttgaagagatcgccctgaccgacccgtacttcatcgagcgctcgctgtacccgaacgttgacttctactcgggcatcatcctcaaggctatcggcatcccgaccagcatgttcaccgtgatcttcgccctggcgcggaccgttggctggatctcgcactggaaagaaatgctctccagcccttacaagatcggtcgcccgcgccagctctacaccggcaacgtgcaacgcgacattattgcactgaaagaccgcaagtaa

SEQ ID NO: 123587 - protein, 429 aa, Pseudomonas syringae pv. tomato str. DC3000
MADKKAQLIIEGAAPVELPILTGTVGPDVIDVRGLTATGRFTFDPGFMSTASCESKITYIDGDNGILLHRGYPIEQLAEQSDYLETCYLLLNGELPTAEQKAQFVAVVKNHTMVHEQLKTFFNGFRRDAHPMAVMCGVVGALSAFYHDSLDINNPQHREISAVRLVAKMPTLAAMVYKYSMGQPMMYPRNDLSYAENFLHMMFNTPCEIKPISPVLAKAMDKIFILHADHEQNASTSTVRMAGSSGANPFACIAAGIAALWGPAHGGANEAVLTMLDEIGDVSNIDTFIAKAKDKNDPFKLMGFGHRVYKNRDPRATVMKQTCDEVLKELGIKNDPQLELAMRLEEIALTDPYFIERSLYPNVDFYSGIILKAIGIPTSMFTVIFALARTVGWISHWKEMLSSPYKIGRPRQLYTGNVQRDIIALKDRK

SEQ ID NO: 123588 - DNA, 1290 bp, Vibrio parahaemolyticus RIMD 2210633
  CDS (1)..(1290): transl_table=11
atggcggataagaaagcgacccttcatgttgaaggtcaagcgccaatcgaactgccaattatggacggtacgctaggtacacctgtaattgacgttcgtaaactgggagccaatggttactttacttttgacccaggttttcttgccactgcatcttgtgaatcatcaatcacttacatcgatggcggcaaaggtattcttttgcaccgcggttacccgattgatcaattagccaataacgcagattacctagaagtatgttacatccttctttacggtgaagcccctacccgagaacaatacgagcaattcaaaacgacagttactcgtcacacaatggtacacgagcaaatcgcaagcttcttccatggcttccgtcgtgatgctcacccaatggcagtaatgtgtggtgtggttggtgctcttgcagccttctaccacgattcacttgatatcaataacgacgagcaccgcgaaattgcggcttatcgtctgctatctaaaatgccaactctggctgcaatgtgtttcaaatactctgttggtcagccatttatctacccacgcaacgatttgagctacgcggaaaacttcctacacatgatgtttgctaacccatgtgaagagtatgaagtgaaccctgttgttgctcgtgcgatggataaaatcttcacacttcacgcagatcacgagcaaaacgcgtcgacatcaacagtccgtttagcaggttcttctggtgcaaacccattcgcatgtattgccgctggtatcgcatcactttggggcccagctcacggtggcgcaaacgaagcatgtctgaagatgctagaagaaatcggcagcgtggataacattccagaatacgtggaacgtgcgaaagacaaagatgacccattccgtttgatgggcttcggtcaccgtgtttacaagaactacgatcctcgtgcgaccgtaatgcgcgaaacatgtcacgaagttctaaaagagctcaacattaaagatcctctgctggacgtagcaatggaacttgagcgtatcgctctttctgacgagtactttgtttctaagaagctatacccgaacgtagatttctattcaggtatcattctgaaagcgatcggtattcctgtatcaatgtttacggttatcttcgcgatttctcgtactattggttggattgcccactggaacgagatgcacagcgacccactaaaccgtatcggtcgtccacgtcagctttacaaaggcgaaacgcaacgtgaattttcgccgcttcatgagcgcgaataa

SEQ ID NO: 123589 - protein, 429 aa, Vibrio parahaemolyticus RIMD 2210633
MADKKATLHVEGQAPIELPIMDGTLGTPVIDVRKLGANGYFTFDPGFLATASCESSITYIDGGKGILLHRGYPIDQLANNADYLEVCYILLYGEAPTREQYEQFKTTVTRHTMVHEQIASFFHGFRRDAHPMAVMCGVVGALAAFYHDSLDINNDEHREIAAYRLLSKMPTLAAMCFKYSVGQPFIYPRNDLSYAENFLHMMFANPCEEYEVNPVVARAMDKIFTLHADHEQNASTSTVRLAGSSGANPFACIAAGIASLWGPAHGGANEACLKMLEEIGSVDNIPEYVERAKDKDDPFRLMGFGHRVYKNYDPRATVMRETCHEVLKELNIKDPLLDVAMELERIALSDEYFVSKKLYPNVDFYSGIILKAIGIPVSMFTVIFAISRTIGWIAHWNEMHSDPLNRIGRPRQLYKGETQREFSPLHERE

SEQ ID NO: 123590 - DNA, 1284 bp, Salmonella enterica subsp. enterica serovar Typhi Ty2
  CDS (1)..(1284): transl_table=11
atggctgatacaaaggcaaaaatcacccttactggtgacactgctattgaactggatgtgctaaaaggcacactcggtcaagatgttattgatattcgtagtctcggttcaaaaggagtttttacttttgaccctggtttcacctctaccgcatcctgcgaatctaaaatcaccttcatcgacggcgacgaaggcattttgttgcatcgcggtttcccgattgaccagcttgctaccgattccaactatctggaagtctgttacatcctgctgtacggcgaaaaaccgacgcaggaagagtatgacgagttcagaacgacagtcacccgccatacgatgatccatgagcaaatcactcgcctgttccatgctttccgtcgcgactcacatccgatggcggtaatgtgcgggatcactggcgcgctggcggcgttctaccacgactcgctggatgtgaacaatccgcgccaccgtgaaatcgcggcgttccgcctgctgtccaaaatgccgaccatggcggcgatgtgttacaaatattcaatcggtcagccgtttgtttatccgcgcaacgacctttcctacgccggtaacttcctgaacatgatgttctccacgccgtgtgaaacctatgaagtgaatccggtactggagcgcgcgatggaccgtattctgatcctgcacgctgaccatgagcagaacgcctctacgtcaacggtacgtaccgcaggttcaagcggcgccaacccgttcgcctgcattgccgccgggatcgcctccctgtggggacccgcgcacggcggcgccaacgaagccgcgctgaaaatgctggaagaaatcagctctgttaaacacattccggaatttgttcgccgtgcgaaagacaagaatgattctttccgcctgatgggcttcggtcaccgtgtttacaaaaactacgatccgcgcgccaccgtgatgcgtgaaacctgccacgaagtgctgaaagagctgggcaccaaagacgatctgctggaagtggcgatggggcttgagcacattgcgctcaacgacccgtacttcatcgagaagaaactgtacccgaacgtagacttctactccggcatcattctgaaagcgatgggcattccgtcctctatgttcaccgtgatcttcgccatggcgcgtaccgttggctggattgcacactggaatgaaatgcacactgacggcatgaaaatcgcccgtcctcgtcagctgtataccggctacgataaacgcgattttaaatcggcgctgaagcgttaa

SEQ ID NO: 123591 - protein, 427 aa, Salmonella enterica subsp. enterica serovar Typhi Ty2
MADTKAKITLTGDTAIELDVLKGTLGQDVIDIRSLGSKGVFTFDPGFTSTASCESKITFIDGDEGILLHRGFPIDQLATDSNYLEVCYILLYGEKPTQEEYDEFRTTVTRHTMIHEQITRLFHAFRRDSHPMAVMCGITGALAAFYHDSLDVNNPRHREIAAFRLLSKMPTMAAMCYKYSIGQPFVYPRNDLSYAGNFLNMMFSTPCETYEVNPVLERAMDRILILHADHEQNASTSTVRTAGSSGANPFACIAAGIASLWGPAHGGANEAALKMLEEISSVKHIPEFVRRAKDKNDSFRLMGFGHRVYKNYDPRATVMRETCHEVLKELGTKDDLLEVAMGLEHIALNDPYFIEKKLYPNVDFYSGIILKAMGIPSSMFTVIFAMARTVGWIAHWNEMHTDGMKIARPRQLYTGYDKRDFKSALKR

SEQ ID NO: 123592 - DNA, 1290 bp, Streptomyces avermitilis MA-4680
  CDS (1)..(1290): transl_table=11
gtgagcgacaactctgtagtactgcggtacggcgatggcgagtacacctacccggtgatcgacagcaccgtcggcgacaagggcttcgacatcgggaagctccgcgctcagaccggtctggtgactctggacagtgggtacggcaacactgccgcctataaatccgcgatcacctatctcgacggtgagcagggcatcctccggtaccgcggctacccgatcgagcagctggccgagcgctccaccttcctggaggtggcgtacctgctgatcaacggcgagctgccgaccgtcgacgagctctccacgttcaagggcgagatcacgcagcacaccctgctgcacgaggacgtcaagaacttctaccgcggcttcccgcgtgacgcccacccgatggcgatgctgtcctcggtggtctccgcgctgtcgacgttctaccaggacagccacaacccgttcgacgagaagcagcgcaatctctccacgatccgccttctcgccaagcttccgacgatcgcggcgtacgcctacaagaagtcgatcggtcaccccttcgtctacccgcgcaacgacctcgggtacgtcgagaacttcctgcgcatgaccttctcggtcccggcgcaggactacgacctggacccggtcgtcgtctccgcgctcgacaagctgctgattctgcacgcggaccacgagcagaactgttcgacctccaccgtgcgtctggtcggctcgtcgcaggcgaacatgttcgcgtcgatctccgccggcatctccgccctctggggcccgctgcacggtggcgccaaccagtccgtcctggagatgctcgagggcatccagacgagcggtggcgacgtcgacaccttcatccgcaaggtgaagaacaaggaagacggcgtgaagctcatgggcttcgggcaccgcgtctacaagaacttcgacccccgcgcgaagatcatcaaggcggcggcgcacgacgtcctctcggcgctcggcaagtccgacgagctgctggacatcgcgctgaagctggaggagcacgcgctggccgacgactacttcgtcgagcgcaagctctacccgaacgtggacttctacaccggtctgatctaccgcgccatgggcttcccgaccgagatgttcacggtcctgttcgccctcggccgccttccgggctggatcgcccagtggcacgagatgatcaaggagccgggctcccgcatcggccgcccgcgccagatctacacgggcgaggtcctgcgcgacttcgtcccggtcgagggccggtaa

SEQ ID NO: 123593 - protein, 429 aa, Streptomyces avermitilis MA-4680
MSDNSVVLRYGDGEYTYPVIDSTVGDKGFDIGKLRAQTGLVTLDSGYGNTAAYKSAITYLDGEQGILRYRGYPIEQLAERSTFLEVAYLLINGELPTVDELSTFKGEITQHTLLHEDVKNFYRGFPRDAHPMAMLSSVVSALSTFYQDSHNPFDEKQRNLSTIRLLAKLPTIAAYAYKKSIGHPFVYPRNDLGYVENFLRMTFSVPAQDYDLDPVVVSALDKLLILHADHEQNCSTSTVRLVGSSQANMFASISAGISALWGPLHGGANQSVLEMLEGIQTSGGDVDTFIRKVKNKEDGVKLMGFGHRVYKNFDPRAKIIKAAAHDVLSALGKSDELLDIALKLEEHALADDYFVERKLYPNVDFYTGLIYRAMGFPTEMFTVLFALGRLPGWIAQWHEMIKEPGSRIGRPRQIYTGEVLRDFVPVEGR

SEQ ID NO: 123594 - DNA, 1284 bp, Nitrosomonas europaea ATCC 19718
  CDS (1)..(1284): transl_table=11
atgcccccacaaaacgtagccactttgtcaccgggtaaaggcaaacaagagattgaactgcccattgtgtccggtaatgaaggcccggatgtcgtcgatattcgttcgctgtatgcccagagcggcatgtttacctacgaccccggttttgtgtcgacggccagctgcaaatcggccattacgttcatcgacggtgacaaaggtgttctgttgtaccgtggctatccgatcgagcaactggccacccgctgtgatttcatggaagtcagttatcttctgctgaatggcgagctgccgacacccgaccagaaagcgaaatttgtcgacaacatcaaaaaccacacgatgctgcacgagcagctgatcaagtttctcagcggattccgccgtgatgcgcaccccatggcagtcatggtcggcgtagtcggcgcattgtctgccttttatcatgacgccatggatgtctctgacgcacaacatcgcgaacagtctgcattccgcctgattgccaagctgccgacgatcacggccattgcctataaatacaatattggccagccgttcatctatccgcacaacgatctgggattcacggaaaatttcctgcacatgatgtttgccacaccggccgagcaatatactcccaatccggtcatcgtcagggcactggatcgcatcctgattctgcatgcagaccatgaacagaatgcctccacttcgactgtccgcctggccggttcgagcggagccaacccgtttgcctgtatctcagccggaattacctgcttatggggtccggcacatgggggcgcgaatgaagcctgcctcaacatgcttgaacaaatcggagatgtttcacgtatcaacgaatacattgcgcgagccaaagacaagaacgatcctttccggctgatgggctttggccaccgggtctacaaaaattttgatccgcgcgccacattgatgcgtgaaacctgccatgaggtcctggatgaactggggttacataacgaccggttgttcaagctggcgctagagctggaaaaaatcgcgttggaggatgactacttcattaccaagaagctttaccccaatgtcgatttctattcgggcatcgtacaacgcgcactgggtattccgacgtcgatgttcaccgccatttttgccacagcccgcaccgttggctgggttgctcagtggaacgaaatgatttccgatccggaacaaaaaataggccggccacgtcaactgtacgtgggcgcacctcgcagagatgtgccatga

SEQ ID NO: 123595 - protein, 427 aa, Nitrosomonas europaea ATCC 19718
MPPQNVATLSPGKGKQEIELPIVSGNEGPDVVDIRSLYAQSGMFTYDPGFVSTASCKSAITFIDGDKGVLLYRGYPIEQLATRCDFMEVSYLLLNGELPTPDQKAKFVDNIKNHTMLHEQLIKFLSGFRRDAHPMAVMVGVVGALSAFYHDAMDVSDAQHREQSAFRLIAKLPTITAIAYKYNIGQPFIYPHNDLGFTENFLHMMFATPAEQYTPNPVIVRALDRILILHADHEQNASTSTVRLAGSSGANPFACISAGITCLWGPAHGGANEACLNMLEQIGDVSRINEYIARAKDKNDPFRLMGFGHRVYKNFDPRATLMRETCHEVLDELGLHNDRLFKLALELEKIALEDDYFITKKLYPNVDFYSGIVQRALGIPTSMFTAIFATARTVGWVAQWNEMISDPEQKIGRPRQLYVGAPRRDVP

SEQ ID NO: 123596 - DNA, 1116 bp, Bacillus anthracis str. Ames
  CDS (1)..(1116): transl_table=11
atgactgttattcgaggtttagaaggggtagtagcaacaacatcatctgtgagctctattattgatgatacattaacttatgctgggtataatattgatgatttagctgagaatgctacatttgaagaagtagtgtacttattatggcatcgcaagcttcctaacgagcaagaactagcgaaatttaatgagattgtatcggaatactataaagttccaggtgagattttagcatatttgaaacaagtagatttaaaaatcgcacatccgatgtctgttttacgaactgcaatttccatgctatcattatacgatgagagcgctgaaattatggatgaaaagtccaattatttgaaagcggttaaattacaggctcaagtgggtactttagttgctgcttatgcaagaatccgtaaaggtttagatgttgttgagcctagaaatgatttatcattagctgcaaacttcttgtacatgttaaatgatcgcgagccaaatgaagttgaaattgaagcttttgataaggcgcttgtacttcacgcagatcatgagttaaacgcttctacatttactgcacgcgtttgtgtagctacactttcagatgtatattctggtattacagcagcaatcggtgcgttaaaaggtcctcttcacggcggggcaaatgaaaatgtaatgaagatgctaactgaaattggcgaagaagaaaatgtagaatcatatattcataatgctcttcaaaataaagtgaaaatcatgggctttggccaccgtgtatatgagcagggtgatccgcgtgcaaaacatttacgcgaaatgtctaagagattatgcgtgcttttaggagaagagaaatggtataatatgtctatcaaaattgaagacattgtaacaaaagaaaaaggtcttccaccaaatgttgatttctattcagcttctgtataccattgtttaggaattgaccatgacttatttacacctatttttgcaattagccgtatgtcaggctggttagctcatattctagaacaatatgaaaataaccgtttaatccgtccgcgtgctgattataatggaccaacacatcaagtgtatgttccaattgcacaacgataa

SEQ ID NO: 123597 - protein, 371 aa, Bacillus anthracis str. Ames
MTVIRGLEGVVATTSSVSSIIDDTLTYAGYNIDDLAENATFEEVVYLLWHRKLPNEQELAKFNEIVSEYYKVPGEILAYLKQVDLKIAHPMSVLRTAISMLSLYDESAEIMDEKSNYLKAVKLQAQVGTLVAAYARIRKGLDVVEPRNDLSLAANFLYMLNDREPNEVEIEAFDKALVLHADHELNASTFTARVCVATLSDVYSGITAAIGALKGPLHGGANENVMKMLTEIGEEENVESYIHNALQNKVKIMGFGHRVYEQGDPRAKHLREMSKRLCVLLGEEKWYNMSIKIEDIVTKEKGLPPNVDFYSASVYHCLGIDHDLFTPIFAISRMSGWLAHILEQYENNRLIRPRADYNGPTHQVYVPIAQR

SEQ ID NO: 123598 - DNA, 1296 bp, Mycobacterium bovis AF2122/97
  CDS (1)..(1296): transl_table=11
gtggccgacaccgacgacaccgcaaccctccgttacccgggaggcgagatcgacctgcagatcgtgcacgccaccgaaggcgccgacggcattgcgctcgggccgctgctggcaaaaaccgggcacaccacgttcgacgtcggcttcgccaacacggccgccgctaaaagctccatcacctacatcgacggagatgccggcattctgcgttatcgcggctacccgatcgaccaactggcggagaagtcaaccttcatcgaggtctgctacctgttgatttacggcgagctgcccgataccgaccagcttgcccagttcaccggccggatccagcgccacaccatgctgcacgaggatctcaagcggttcttcgacggctttccgcgcaatgcccacccgatgccggtgttgtccagcgtggtcaatgcgctgtcggcgtactaccaggatgctctggaccccatggacaacggtcaagtcgagctgtcgaccattcggctgctggccaagctgcccaccatcgccgcgtacgcctacaagaaatcggtcggccagcccttcctctacccagataactcactgacgctggtggagaacttcctacggttgacgttcggatttcccgccgagccctaccaggccgaccccgaggtggtgcgggcgctggacatgttgttcatcttgcacgccgaccacgagcagaactgctcgacgtcgacggttcggctggttggctcgtcgcgagccaacctgttcacctcgatctcgggtggcatcaacgcactatggggtccgcttcatggcggcgccaatcaggctgtcctggagatgctcgagggcattcgcgacagcggcgacgacgtcagcgagtttgtacgcaaggtcaagaaccgcgaggccggggtcaaattgatgggtttcggtcatcgtgtctacaagaactacgatccgcgggcccgcatcgtcaaggaacaggccgacaagatcctggccaagctcggcggcgatgactccttgctgggcatcgccaaggagctcgaagaggcggcgctgaccgacgactacttcatcgaacgcaagctttaccccaacgtcgacttctacaccggcctgatctaccgggccctcggcttcccgaccaggatgttcaccgtgttgtttgccctgggcaggcttcccggctggatcgcgcactggcgtgagatgcacgacgagggcgacagcaagatcggccggccccgccagatctacaccggctacgcggagcgcgactacgtcaccatagacgcgcggtag

SEQ ID NO: 123599 - protein, 431 aa, Mycobacterium bovis AF2122/97
MADTDDTATLRYPGGEIDLQIVHATEGADGIALGPLLAKTGHTTFDVGFANTAAAKSSITYIDGDAGILRYRGYPIDQLAEKSTFIEVCYLLIYGELPDTDQLAQFTGRIQRHTMLHEDLKRFFDGFPRNAHPMPVLSSVVNALSAYYQDALDPMDNGQVELSTIRLLAKLPTIAAYAYKKSVGQPFLYPDNSLTLVENFLRLTFGFPAEPYQADPEVVRALDMLFILHADHEQNCSTSTVRLVGSSRANLFTSISGGINALWGPLHGGANQAVLEMLEGIRDSGDDVSEFVRKVKNREAGVKLMGFGHRVYKNYDPRARIVKEQADKILAKLGGDDSLLGIAKELEEAALTDDYFIERKLYPNVDFYTGLIYRALGFPTRMFTVLFALGRLPGWIAHWREMHDEGDSKIGRPRQIYTGYAERDYVTIDAR

SEQ ID NO: 123600 - DNA, 1284 bp, Helicobacter hepaticus ATCC 51449
  CDS (1)..(1284): transl_table=11
atggctagcattactttaacaaacaatgagacaaaagagagttttgagtttgagcttattgaatgcacaagaggaccaaaggctgtagatttttctaagctttttgaacgcaccaatattttttcttatgacccaggttatggttcaaccgcaggatgtaaatcaaccattagctatattaatggcaaaaatggagaattactttataaagggcttccaatagaaaaaattgtagaaaaataccaatttactgatgtgtgcaagctactcattacaggtgaagttcctaaaaatgagacagaaaccaaggaatttgaaattgagcttgtgcatcgtagttttttgaatgagggactcattaatatttttaacgcatttcctgatagcgcacaccctatggcaaatctctctgcttcgctttctgcactttctactttccatttccgccatttggatatgggtaatgaggaagagcgtcaagtaatggcacggcgagcaattgctaaaatccctacacttgcagcattttcttatagacattctttagggattccatatatttatcctgatgttgcgcgtggatatgttgaaaatttcctttatatgttgcgtgcatatcctggtggtaaaatgaaacatacaattaagggtgaagttgaaatcactcctttagaaatagaggctcttgataagatttttacgcttcacgctgatcacggacaaaatgcttctactactactgtgcgcaatgttgcttctacgggagcacacccttatgcagcattaagtgctggtgttaatgcattgtggggtgcagcacacggaggagctaatgaaaaagtgttagatatgctcaatgagattggcgatgctaaaaatgttgataagtttatcaataaggcaaaagataaaaatgatccatttaggcttatgggctttggacatcgtgtgtataaaaactatgacccgcgtgcaaagattctgaaaaaactcaaagatgaccttgatgctaaaggtattaaaatgaatacacgattaagtgatttggcacataaggttgaagaagtagcattaagtgatagctactttgtagagcgaaatctttatccaaatgttgatttttactccggtatcattctttctgcacttaaaattcctgtttctcttttcacgccaatttttgttattgggcgtatgccgggttggtgtgcgcagcttttagagcacgttaaagatccaactacaagaatcacacgaccacgacaagtgtatataggtgagtaa

SEQ ID NO: 123601 - protein, 427 aa, Helicobacter hepaticus ATCC 51449
MASITLTNNETKESFEFELIECTRGPKAVDFSKLFERTNIFSYDPGYGSTAGCKSTISYINGKNGELLYKGLPIEKIVEKYQFTDVCKLLITGEVPKNETETKEFEIELVHRSFLNEGLINIFNAFPDSAHPMANLSASLSALSTFHFRHLDMGNEEERQVMARRAIAKIPTLAAFSYRHSLGIPYIYPDVARGYVENFLYMLRAYPGGKMKHTIKGEVEITPLEIEALDKIFTLHADHGQNASTTTVRNVASTGAHPYAALSAGVNALWGAAHGGANEKVLDMLNEIGDAKNVDKFINKAKDKNDPFRLMGFGHRVYKNYDPRAKILKKLKDDLDAKGIKMNTRLSDLAHKVEEVALSDSYFVERNLYPNVDFYSGIILSALKIPVSLFTPIFVIGRMPGWCAQLLEHVKDPTTRITRPRQVYIGE

SEQ ID NO: 123602 - DNA, 1488 bp, Rhodopirellula baltica SH 1
  CDS (1)..(1488): transl_table=11
atgttaggaatgggtgaacccggacgggtgagagcgtcaaagtccaaaatcgtcctctctgaccgtcggatgtgggtcccgctgattgtcgcttgcatgacgcagggctacactacgtctgtcacccccaagacgtcccgccaactcgtacattgcatctacagatcgcccatgagctcctcctccagtttggaaattcaacgagccgacaccgtccgagtccaattcggggataccaaccttgagttgcctttggtcgaaggttccgaaggtgaaaaagcgatcgatatcagtcgtttacgtgctgacactggcgtgatcaccttggacgatggcttcgtcaacacgggcagcactcgcagtgcgatcacgttcttggatggcgaaaaagggattctgcgttatcgcgggtacccgatcgaggaactggccaaaagctgtgacttcgtcgaggtcgcctaccttttgatctttggcgatctgccaaatgctgaagagattgaaacgtttcgttcagggatccgcgatcacacgatgatccacgaggacatgcggtcgttctacaacggcttccctcgtgacgctcacccgatggcgatcctcagcagcgttgtcggtgcactgtcaacgttctatcaagattccatggatctgaatgatccgcgacaggtcgagatttctctgtatcgcttgattgcgaaattgcccacgatcgcggcatacagctacaagaaatcgatgggccaaccgttcatgtatccgaagaacgagttggactactgcgagaacttcttgcacatgatgttcgcgacgccgacctccgattacttggtcgaccccgatttcgcggaagcactgaacttgctgtttatcgtgcacgcggaccacgagcaaaactgcagcacgtcgaccgttcggatggttggcagcagcaacgccaacttgttcgcgtcgatctcggccggcatcggtgcattgtggggaccgcttcacggcggtgccaacgaagcttgcgtgaacatgctcgaacaaatcgcggccgacggcggcgacgtgaagaagtacgtcgacatggcgaaggacaaatccaacgacttccgcatcatgggctttggtcaccgcgtttacaaaaactcggatccacgagcgacaatcatccgagcgagctgcgataagttgctggccaaattgaacctggatgatccattgttcgaagttgctcaaaagctagaagaagtcgcgctcaaggacgaatacttcatcgagcggaagttgtatcccaacgtcgatttctattccggcgtgatctaccgagcgctcggcattccggtccagatgttcacggttctattcgccattggtcgtttgcccggttggttggctcactggcgtgagatgcatgccaacccagcctcgcgaatcaatcgtccgcgtcagatctacaccggcgcgacgcagcgtgatgtggttccagtcgatcaacgctag

SEQ ID NO: 123603 - protein, 495 aa, Rhodopirellula baltica SH 1
MLGMGEPGRVRASKSKIVLSDRRMWVPLIVACMTQGYTTSVTPKTSRQLVHCIYRSPMSSSSSLEIQRADTVRVQFGDTNLELPLVEGSEGEKAIDISRLRADTGVITLDDGFVNTGSTRSAITFLDGEKGILRYRGYPIEELAKSCDFVEVAYLLIFGDLPNAEEIETFRSGIRDHTMIHEDMRSFYNGFPRDAHPMAILSSVVGALSTFYQDSMDLNDPRQVEISLYRLIAKLPTIAAYSYKKSMGQPFMYPKNELDYCENFLHMMFATPTSDYLVDPDFAEALNLLFIVHADHEQNCSTSTVRMVGSSNANLFASISAGIGALWGPLHGGANEACVNMLEQIAADGGDVKKYVDMAKDKSNDFRIMGFGHRVYKNSDPRATIIRASCDKLLAKLNLDDPLFEVAQKLEEVALKDEYFIERKLYPNVDFYSGVIYRALGIPVQMFTVLFAIGRLPGWLAHWREMHANPASRINRPRQIYTGATQRDVVPVDQR

SEQ ID NO: 123604 - DNA, 1179 bp, Prochlorococcus marinus subsp. marinus str. CCMP1375
  CDS (1)..(1179): transl_table=11
ttggagcaaaaggctatagacaatcaaaatgatccctgcaacatggttttaaagcctggtctcgaaggtgtacccgttacacaatcagctatctgtgacattaatggccttaaaggagagctgaaatataggggttattcaattgcggagttagcggctaaaagcagctttttagaaaccacttatcttctcatctggggagatctcccaagctcaaagcaactaagggaattcgaagatgcaatacaaatgcatcgcagactgagcttcagagttcgagacatgatgaagtgcttccctgcgactggccatcctatggatgccctgcaatcaagcgctgcatcgctaggcctattttattcaagaagagccattgacaaccctcaatatatttacgatgcagtagtaaggctaattgcaaaaatcccaacaatggttgcagcttttcagctgatcagaaaaggacaagatcccatacaacctcgagacgatttaccttattcagcgaactttctttatatgttgactgaaagggaacctgaccccctcgcagccagagtattcgatagatgcttaatacttcatgcagaacacagtttaaatgcaagtacatttagtgcccgagttacagcaagcactttgactgacccctatgcagttgttgcttcagctgttggcacccttgctgggcctttgcatggtggtgcaaatgaggatgtaattgcaatgcttgaagagattggcgcacctgaaaatgctaggaattatttaaaacaagcaattgatcagaaaagcaaaataatgggttttgggcatagggaatataaagtcaaagatcctagagcgacacttttgcaaggatttgcagaagacctatttgcaagatttgggaaagatgaaatgtatgacgtagctagatcagtggaagaagaagcctctccattactagggccaagaggtatatatccaaatgttgacttttactcaggtctggtatatcgaaagttaggaatcccaagagatttatttactccaatttttgccatttcgcgcgtggctggctggctagcccattggcgtgaacaactaagtgctaatcgtattttcagaccaacacaaatttacactggcaagaaaaccagagcttggtgcgcattagaagaacggaataaaaactaa

SEQ ID NO: 123605 - protein, 392 aa, Prochlorococcus marinus subsp. marinus str. CCMP1375
MEQKAIDNQNDPCNMVLKPGLEGVPVTQSAICDINGLKGELKYRGYSIAELAAKSSFLETTYLLIWGDLPSSKQLREFEDAIQMHRRLSFRVRDMMKCFPATGHPMDALQSSAASLGLFYSRRAIDNPQYIYDAVVRLIAKIPTMVAAFQLIRKGQDPIQPRDDLPYSANFLYMLTEREPDPLAARVFDRCLILHAEHSLNASTFSARVTASTLTDPYAVVASAVGTLAGPLHGGANEDVIAMLEEIGAPENARNYLKQAIDQKSKIMGFGHREYKVKDPRATLLQGFAEDLFARFGKDEMYDVARSVEEEASPLLGPRGIYPNVDFYSGLVYRKLGIPRDLFTPIFAISRVAGWLAHWREQLSANRIFRPTQIYTGKKTRAWCALEERNKN

SEQ ID NO: 123606 - DNA, 1311 bp, Bordetella pertussis Tohama I
  CDS (1)..(1311): transl_table=11
atgaacctgtctgacaaaaaagccacgctatccttttcggacggcagcgctcctatcgaattcccagtctacaagggtacggtcggcccggacgtgatcgacatccgcaagctgtatggccagacgggtatgttcacgttcgaccccggcttcatgtccaccgccgcctgcgcctcgggcattacctacatcgacggcgacaagggcgaactgctgtaccgcggctatcccatcgagcagctggccgtcaattgcgacttcctcgacatctgctacctgatcctcaacggcgagctgcccaacggcggccagaagcaggatttcgactcgcaggtgacccatcacacgatggtcaacgagcagctgcatttcttcctgcgcggcttccgccgcgacgcgcacccgatggcggtgctgacgggcctggtgggcgcgctgtcggccttctaccacgactcgaccgacatcaccaacccgcaccatcgccacgtctcggccatccgcctgatcgccaagatgccgacgctggtcgccatggcgtacaagtattcgcaaggccagccgttcatctatccgcagaatgacctgtcgtacaccggcaacttcctgcgcatgatgtgcgcgaccccgtgtgaagagtacaaggtcaatgacgtcgtcgagcgcgcgctcgatcgcatcttcatcctgcatgcggaccacgagcagaacgcttcgacctcgacggtgcgcctgtgcggttcgtcgggcaccaatccgttcgccgccatcgccgccggcgtggcgtgcctgtggggcccggctcacggcggcgccaacgaagcctgcctgcagatgctcgaagaactgcaggccaacggcggtgtggccaaggtcggcgagttcatggaaaaggtcaaggacaagaactcgggcgtgcgcctgatgggctttggccaccgcgtctacaagaactacgatccgcgcgccaagctgatgcaggaaacgtgcaaggaagtcctggtggcgctgggcctggagaacgacccgctgttcaagctggccatggaactggagcgcatcgccctggaagacgactacttcgtgcagcgcaagctgtacccgaacgtcgacttctactcgggtatcgtgcaacgcgccatcggcatcccgacctcgctgttcacggccatcttcgcgctggcccgcacggtgggctggatcgcccagtggaacgaaatgctgtccgaccccgactacaagatcggccgtccgcgccagctgttcaccggttcggtcacgcgcgacgtgcccggcatggacaagcgctga

SEQ ID NO: 123607 - protein, 436 aa, Bordetella pertussis Tohama I
MNLSDKKATLSFSDGSAPIEFPVYKGTVGPDVIDIRKLYGQTGMFTFDPGFMSTAACASGITYIDGDKGELLYRGYPIEQLAVNCDFLDICYLILNGELPNGGQKQDFDSQVTHHTMVNEQLHFFLRGFRRDAHPMAVLTGLVGALSAFYHDSTDITNPHHRHVSAIRLIAKMPTLVAMAYKYSQGQPFIYPQNDLSYTGNFLRMMCATPCEEYKVNDVVERALDRIFILHADHEQNASTSTVRLCGSSGTNPFAAIAAGVACLWGPAHGGANEACLQMLEELQANGGVAKVGEFMEKVKDKNSGVRLMGFGHRVYKNYDPRAKLMQETCKEVLVALGLENDPLFKLAMELERIALEDDYFVQRKLYPNVDFYSGIVQRAIGIPTSLFTAIFALARTVGWIAQWNEMLSDPDYKIGRPRQLFTGSVTRDVPGMDKR

SEQ ID NO: 123608 - DNA, 1311 bp, Bordetella bronchiseptica RB50
  CDS (1)..(1311): transl_table=11
atgaacctgtctgacaaaaaagccacgctatccttttcggacggcagcgctcctatcgaattcccagtctacaagggtacggtcggcccggacgtgatcgacatccgcaagctgtatggccagacgggtatgttcacgttcgaccccggcttcatgtccaccgccgcctgcgcctcgggcattacctacatcgacggcgacaagggcgaactgctgtaccgcggctatcccatcgagcagctggccgtcaattgcgacttcctcgacatctgctacctgatcctcaacggcgagctgcccaacggcggccagaagcaggatttcgactcgcaggtgacccatcacacgatggtcaacgagcagctgcatttcttcctgcgcggcttccgccgcgacgcgcacccgatggcggtgctgacgggcctggtgggcgcgctgtcggccttctaccacgactcgaccgacatcaccaacccgcaccatcgccacgtctcggccatccgcctgatcgccaagatgccgacgctggtcgccatggcgtacaagtattcgcaaggccagccgttcatctatccgcagaatgacctgtcgtacaccggcaacttcctgcgcatgatgttcgcgaccccgtgtgaagagtacaaggtcaatgacgtcgtcgagcgcgcgctcgatcgcatcttcatcctgcatgcggaccacgagcagaacgcttcgacctcgacggtgcgcctgtgcggttcgtcgggcaccaatccgttcgccgccatcgccgccggcgtggcgtgcctgtggggcccggctcacggcggcgccaacgaagcctgcctgcagatgctcgaagaactgcaggccaacggcggtgtggccaaggtcggcgagttcatggaaaaggtcaaggacaagaactcgggcgtgcgcctgatgggctttggccaccgcgtctacaagaactacgatccgcgcgccaagctgatgcaggaaacgtgcaaggaagtcctggtggcgctgggcctggagaacgacccgctgttcaagctggccatggaactggagcgcatcgccctggaagacgactacttcgtgcagcgcaagctgtacccgaacgtcgacttctactcgggtatcgtgcaacgcgccatcggcatcccgacctcgctgttcacggccatcttcgcgctggcccgcacggtgggctggatcgcccagtggaacgaaatgctgtccgatcccgactacaagatcggccgtccgcgccagctgttcaccggttcggtcacgcgcgacgtgcccggcatggacaagcgctga

SEQ ID NO: 123609 - protein, 436 aa, Bordetella bronchiseptica RB50
MNLSDKKATLSFSDGSAPIEFPVYKGTVGPDVIDIRKLYGQTGMFTFDPGFMSTAACASGITYIDGDKGELLYRGYPIEQLAVNCDFLDICYLILNGELPNGGQKQDFDSQVTHHTMVNEQLHFFLRGFRRDAHPMAVLTGLVGALSAFYHDSTDITNPHHRHVSAIRLIAKMPTLVAMAYKYSQGQPFIYPQNDLSYTGNFLRMMFATPCEEYKVNDVVERALDRIFILHADHEQNASTSTVRLCGSSGTNPFAAIAAGVACLWGPAHGGANEACLQMLEELQANGGVAKVGEFMEKVKDKNSGVRLMGFGHRVYKNYDPRAKLMQETCKEVLVALGLENDPLFKLAMELERIALEDDYFVQRKLYPNVDFYSGIVQRAIGIPTSLFTAIFALARTVGWIAQWNEMLSDPDYKIGRPRQLFTGSVTRDVPGMDKR

SEQ ID NO: 123610 - DNA, 1146 bp, Prochlorococcus marinus subsp. pastoris str. CCMP1986
  CDS (1)..(1146): transl_table=11
ttggatactcataaactaattttaaaaccaggattagagggagttccagtaactaattcatcaatatgtgatattgacggtcaaaaagggaaattattatatagaggctattcaattgaagaattagcacagaaaagtagtttcttagagactgcttttttattaatttggggagaattaccttcagcaacagaactaagagattttgaacaagaagtacagatgcatcggagattaagcttcagagtaagagatatgatgaaatgctttcctgccacagggcatcccatggatgctctgcagtccagtgccgcctctcttggtcttttctactcaagaagagcgatagatgatcccaagtatatctacaacgcagtgataagactaattgcaaaaattccaacaatgattgctgcatttcaacttataagaaaaggacaagatcccattcaacctagggatgatttatcctactcatcgaattttctttacatgttgactgaaaaagaacaagatcccatagctgcaaaagtttttgatagatgcctaattcttcatgcagaacatagtttaaatgcgagtacatttagcgcacgagttacggctagcactcttacagacccatacgcagtaattgcctctgcagtaggaacattagctggtcctcttcatggtggagctaatgaagatgtaattgccatgttagaagatattaaaactccagaaaaagctgcttcatttttagaagatgctattcaaaacaaaagtaaaataatgggtttcggacatcgagagtacaaagttaaagatcctcgagcaattattcttcagaaattagcagaggagctttttgttaggtttggaaaagatgaaatgtatgaagttgctaaaaaattagagttagaggctatcccaaggctaggaggaaaaggtattttcccaaacgttgatttttattctggccttgtttacagaaaacttggtattccccgtgacttatttactcctatttttgcaatatcaagagtcgcaggttggttagctcattggagggaacaattaggcgcaaacagaatttttagaccgtctcaaatttataccggttcggctccaagagattggattactttagaaaatcgaaaataa

SEQ ID NO: 123611 - protein, 381 aa, Prochlorococcus marinus subsp. pastoris str. CCMP1986
MDTHKLILKPGLEGVPVTNSSICDIDGQKGKLLYRGYSIEELAQKSSFLETAFLLIWGELPSATELRDFEQEVQMHRRLSFRVRDMMKCFPATGHPMDALQSSAASLGLFYSRRAIDDPKYIYNAVIRLIAKIPTMIAAFQLIRKGQDPIQPRDDLSYSSNFLYMLTEKEQDPIAAKVFDRCLILHAEHSLNASTFSARVTASTLTDPYAVIASAVGTLAGPLHGGANEDVIAMLEDIKTPEKAASFLEDAIQNKSKIMGFGHREYKVKDPRAIILQKLAEELFVRFGKDEMYEVAKKLELEAIPRLGGKGIFPNVDFYSGLVYRKLGIPRDLFTPIFAISRVAGWLAHWREQLGANRIFRPSQIYTGSAPRDWITLENRK

SEQ ID NO: 123612 - DNA, 1191 bp, Synechococcus sp. WH 8102
  CDS (1)..(1191): transl_table=11
gtggctcagaagcagtcaggggacctgcgccatgcgcggacaggcatcgaacttcgacccggtctggatggtgtaccggccacccagtccgccatctgtgacatcgatggcgagcaggggctgttgacctaccgcggctatccaatgcaggacctggcggccaacagcagcttcctggagacagcctttttgctgatctggggggagctacccagccgcgatcagctggcggagttcgagcacgccgtacagatgcaccggcgggtgagcttccgggtgcgagacatgatgaagtgtttccccgcaagtgggcatccgatggatgcgctgcaatccagcgcagcatccctggggctgttctattcccgtcgggccatcgacgatccgcagtacgtgtatgacgcggtggtgcggctgatcgccaagatccccacgatggttgcggccttccagctgattcggaagggccaggatccgattcagccccgcgacgacctggcctactccgccaatttcctctacatgctcaccgagcgtgagccggatcctctggcggcacgcatcttcgaccgttgcctgatgcttcacgccgagcacagcctcaacgccagcaccttcagcgcccgcgtcaccgccagcacactcaccgatccctacgccgtggtggcctcggcggtgggcacccttgccggacctctgcatgggggagctaatgaagatgtgctggcgatgctggaagaggtgggaacagccgagaacgccggcgcctatctcgatgaagccatggccgccaagcgcaagatcatgggtttcggccaccgtgaatacaaggtgaaggatccccgtgcggtgattcttcaggccttggtggaggagatgttcgcccgctttggccacgatgagctctacgacgtagcggtggccatcgagcgggaggcggagtcccgcctcgggcccaaaggcatctaccccaacgtcgatttctattcaggcctggtgtaccggaagctcggcatcccgagggatttgttcacgccggtgttcgccatcgcacgcgtggctggctggctggcccattggcgggagcagctcggggccaatcgcattttccggccctctcagatttattcgggctcccagctacgcgcgtggatgcccatagatgagcgtgtcaccgctccggccgcttaa

SEQ ID NO: 123613 - protein, 396 aa, Synechococcus sp. WH 8102
MAQKQSGDLRHARTGIELRPGLDGVPATQSAICDIDGEQGLLTYRGYPMQDLAANSSFLETAFLLIWGELPSRDQLAEFEHAVQMHRRVSFRVRDMMKCFPASGHPMDALQSSAASLGLFYSRRAIDDPQYVYDAVVRLIAKIPTMVAAFQLIRKGQDPIQPRDDLAYSANFLYMLTEREPDPLAARIFDRCLMLHAEHSLNASTFSARVTASTLTDPYAVVASAVGTLAGPLHGGANEDVLAMLEEVGTAENAGAYLDEAMAAKRKIMGFGHREYKVKDPRAVILQALVEEMFARFGHDELYDVAVAIEREAESRLGPKGIYPNVDFYSGLVYRKLGIPRDLFTPVFAIARVAGWLAHWREQLGANRIFRPSQIYSGSQLRAWMPIDERVTAPAA

SEQ ID NO: 123614 - DNA, 1308 bp, Chromobacterium violaceum ATCC 12472
  CDS (1)..(1308): transl_table=11
atgactgggagtattgctgtggaaactaatcgcaaagtcacgctcagctacaacgagggcaaggaaaccctggacctgccggtcctggggggcacgctgggtccggatgtcgtcgacatccgcggcttcggcaaaacaggcatgttcaccttcgacccgggcttcctggccaccgccagctgcgagtccaagatcaccttcatcgacggcgacctgggccatctgtactaccgcggctacccgatcgagcagctggccgagaagagcgactacctggaagtctgctacctgctgctgaacggcgagctgccgaccgcggcgcagcgcaaggaattcgaacgcggcgtgatgcgccacaacatgctgcacgaccagctgatgagcctgttcaagggcttccgccgcgacgcgcacccgatggcggtgatggtgggcgtggtgggcgcgctgtccgccttctaccatgactcgctggacatctccaatccggagcaccgccgcatctcggcccaccgcctgatcgccaagctgccgaccatcgccgcccaggcttaccgctacaacaagggcctgccgttctcctatccgaagaacggcctgacctatgcggaaaacttcctgcacatgatgttctccaccccgtgcgaggagtacaaggtgaacccggtgctggcgcgcgcgctggaccgcatcttcaccctgcacgccgaccacgagcagaacgcctccacctccaccgtccgtctggccggctcctccggcgccaacccgttcgcgtgcatcgccgcctgcatcgcctgcctgtggggcccgtcccacggcggcgccaacgaggccgtgctgaagatgctggacgagatcggttccgtggacaatgtggccgacttcatgcagggcgtgaaggacaagcgctacaagctgatgggcttcggccaccgcgtgtacaagaacatggacccgcgcgccgccatcatgaagcagacctgcgacgaagtgctgaacgagctgggcctgcataacgatccgaaattcaagctggccatggagctggaaaagatcgcgctgtccgacccgtacttcatcgagcgcaagctgtacccgaacgtggacttctactccggcatcgtgctgtccgcgatcggcatcccggtttccatgttcaccccgatcttcgcgctggcccgcaccgtgggctggatcgcgcactggaacgagatgatcggcgatccgggcatgaagatcggccgtccgcgccagctgtacaccggcgccgcgcgccgcgacttcgtggaagtcgccaagcgctga

SEQ ID NO: 123615 - protein, 435 aa, Chromobacterium violaceum ATCC 12472
MTGSIAVETNRKVTLSYNEGKETLDLPVLGGTLGPDVVDIRGFGKTGMFTFDPGFLATASCESKITFIDGDLGHLYYRGYPIEQLAEKSDYLEVCYLLLNGELPTAAQRKEFERGVMRHNMLHDQLMSLFKGFRRDAHPMAVMVGVVGALSAFYHDSLDISNPEHRRISAHRLIAKLPTIAAQAYRYNKGLPFSYPKNGLTYAENFLHMMFSTPCEEYKVNPVLARALDRIFTLHADHEQNASTSTVRLAGSSGANPFACIAACIACLWGPSHGGANEAVLKMLDEIGSVDNVADFMQGVKDKRYKLMGFGHRVYKNMDPRAAIMKQTCDEVLNELGLHNDPKFKLAMELEKIALSDPYFIERKLYPNVDFYSGIVLSAIGIPVSMFTPIFALARTVGWIAHWNEMIGDPGMKIGRPRQLYTGAARRDFVEVAKR

SEQ ID NO: 123616 - DNA, 1269 bp, Wolinella succinogenes DSM 1740
  CDS (1)..(1269): transl_table=11
atgggcacagtcactttcacgaataacgaaacgggcgaaaaatttgaatttgaaattctcaaccccacgcgaggtccgcagttggtcgatttttcgaagttttatgagacaacaggaatgttcacctttgaccctggctatggttcgaccgccaactgtaaatcagagatcagttttgtggatggaaaaaagggtgagctggtctactatggacaccctatcgaagagctggtggagaagtataagtttgttgatgtcattaaactgctcattggaaatggctatatctttcccaccaaagaggaatcggatcaatttgagcgtgagctagtgcgccgctcctacatccacgaggggctccgaaagattatcgatgcttttcctgatggcgctcatccgatggcgaatctctcctcatccgtttccgcgctctcgactttctactacgatcatatcgacatggagtatgaggcagagtatcagacgatggcacgaagaatcatcgccaaaacccccacgctagcagcctttgcctatcgaagctctgtgggatcaccttttgtctatcctgatgcagaccgcggctatgtggaaaacttcctttatatgcttagagcctatcctcatggaaagcttaaagaggagatttcacccattgaagtgagtgcgcttgatacgatctttatgcttcatgctgaccatggtcaaaacgcctctacggccacagtgcgcaatgttgctagtacgggagtccacccctatgcggctctatcagcgggcttgagcgcactttggggcaaggctcatggaggggcgaacgaatcggttatggatcagcttgagatgattggcgatgttaaaaatgttgatcgctacattgccaaagccaaagacaaaaacgactcctttagattgatgggctttggccatcgagtctataagagctatgatccaagggctagaattctcagaaaactcaaagacgatctagaccaaaaaggggtcaagatgaatcagcgcctcgtggagattgccgagaagatcgaagaggtggcgacgcaagatgaatattttctctccaggagtctctaccccaatgttgatttctactcaggaatcatcctcacagcgcttaagattccaaagagcatgttcacgcccattttcgccatcggaaggatgcctgggtggtgtgggcaagttttagagctgcttcaagagcccaatgtcaaaatcacgcgtccccgacagatgtatgtcggaaaataa

SEQ ID NO: 123617 - protein, 422 aa, Wolinella succinogenes DSM 1740
MGTVTFTNNETGEKFEFEILNPTRGPQLVDFSKFYETTGMFTFDPGYGSTANCKSEISFVDGKKGELVYYGHPIEELVEKYKFVDVIKLLIGNGYIFPTKEESDQFERELVRRSYIHEGLRKIIDAFPDGAHPMANLSSSVSALSTFYYDHIDMEYEAEYQTMARRIIAKTPTLAAFAYRSSVGSPFVYPDADRGYVENFLYMLRAYPHGKLKEEISPIEVSALDTIFMLHADHGQNASTATVRNVASTGVHPYAALSAGLSALWGKAHGGANESVMDQLEMIGDVKNVDRYIAKAKDKNDSFRLMGFGHRVYKSYDPRARILRKLKDDLDQKGVKMNQRLVEIAEKIEEVATQDEYFLSRSLYPNVDFYSGIILTALKIPKSMFTPIFAIGRMPGWCGQVLELLQEPNVKITRPRQMYVGK

SEQ ID NO: 123618 - DNA, 1143 bp, Gloeobacter violaceus PCC 7421
  CDS (1)..(1143): transl_table=11
atgagcggcgagtatgttcctggtctggaaggcgtccctgcaacccgttcgaatatcagtttcgtggacggcaaagccggcgtcctggagtaccgcggcatcccaatcgaccagcttgccgagtcgagcacgtttttagagaccgcctttttattgatttttgaccacctgcccaccaaggacgaactgctctccttcgaagtcgagatcctgggccaccggcgggtcaaataccgcatccgcgacatgatcaaaagcttccccgagagcggccggccgatggtggccctccagtcgtgcatcgcggcgctggggcttttttatccgctgcaaaacgagagcaaagaaaaatacgcctacgattcgactatccgcctactcgcgaagatgccgacgatggtggcgacgtttcatcagatgcgcctgggcaacgatcccatcccgccgcgcgacgacttgggccacgccgccaattttctctacatgctcacgggcaaggaacccgacccacgggcggcgcgcatcttcgatgtctgtctgatgctgcacgccgagcacaccgtcaacgcctcgactttttcggccctggtcaccgcctccaccctggccgacccctataccgtgatcacctcggcggcgggcaccctctcaggcccgctccacggcggcgccaacgaagaggtgatccgcatgctcaaggaaatcggcaccatcgagcgcgtccgcccctacctcgagaatcgcctcgcccgcaaggaaaaaatcatgggcgtcggccaccgggtctacaaagtcaaagacccgcgcgccacgatcttgcagaatctggcccaggagttgttcgaccgcttcggccacagccgcctctacgacatcgccgtcgaagtcgagcgcgtttgcgacgagttgctcggccaaaagggcatctaccccaacgtcgacttctactcgggtctggtctacgaaaagatgggcattcccgccgacatgttcaccccggtattcgccatctcgcgggtggcggggtggctcgcccactggcacgagcagttggccgacaaccgcatcttccgtcccacccaggtctacaccggctcccacaacgtcgaattcacgcctctgtcgctgcgctcctacgcctag

SEQ ID NO: 123619 - protein, 380 aa, Gloeobacter violaceus PCC 7421
MSGEYVPGLEGVPATRSNISFVDGKAGVLEYRGIPIDQLAESSTFLETAFLLIFDHLPTKDELLSFEVEILGHRRVKYRIRDMIKSFPESGRPMVALQSCIAALGLFYPLQNESKEKYAYDSTIRLLAKMPTMVATFHQMRLGNDPIPPRDDLGHAANFLYMLTGKEPDPRAARIFDVCLMLHAEHTVNASTFSALVTASTLADPYTVITSAAGTLSGPLHGGANEEVIRMLKEIGTIERVRPYLENRLARKEKIMGVGHRVYKVKDPRATILQNLAQELFDRFGHSRLYDIAVEVERVCDELLGQKGIYPNVDFYSGLVYEKMGIPADMFTPVFAISRVAGWLAHWHEQLADNRIFRPTQVYTGSHNVEFTPLSLRSYA

SEQ ID NO: 123620 - DNA, 1284 bp, Photorhabdus luminescens subsp. laumondii TTO1
  CDS (1)..(1284): transl_table=11
atggcagataacaaagcaactctagccccagacggttcagttgctattgaattggacgtgctcacaccgacccttgggtccaaagtcatcgacgttcgtactctcggctcccaaggtttctatacctacgatcctggttttacttccacagcatcttgcgaatccaagatcacttacattgatggtaacgaaggtgtattgctgcaccgtggtttccctatcgaccagctagcgacaaaatccacttatctggaagtctgctatatcctgctgtatggtgaaacaccaacacaagaacagtttgataaattcaaaaaaaccattacccgccacaccatgattcacgaacagatccatcgcctgttcaacggtttccgccgtgattcgcatcctatggccgtactgtgtggtgttactggcgctctggctgctttctatcatgatgctctggacgtgaacaatccacgtcaccgtgacattaccgcctaccgcctgctgtcaaaaatgccgacagtggccgccatgtgctacaaatactctatcggtcagccattcgtttatccacgcaatgatctctcctatgcaggcaacttcctaaacatgatgttcgctacgccgtgtgaagagtataaagtgaacccagtactggaacgcgctatggatcgcatctttatcctacatgcggaccatgaacaaaatgcatctacctcaacagtacgtaccgcaggttcttctggcgctaacccatttgcctgtattgccgcaggtatcgcttctctttggggccccgctcatggcggcgcaaacgaagcttgtctgcgtatgttggaagaaattcagtcagttgaacatattccggaattcattaaacgcgccaaagataaaaatgatgctttccgtctgatgggatttggtcatcgcgtttacaaaaactatgatcctcgtgcaaccgtcatgcgtgaaacctgccatgaagtgctagatgaactcggcctgaatgacagcctgctggaagttgctatggaacttgaacgtatcgctctgcacgatccttattttattgagaaaaaactgtatccgaacgtggatttctactccggcattatcctgaaagcaatgggtattccatccactatgttcactgttattttcgccattgcccgtactatcggctggatcgctcactggaatgaaatgcatgatggtggcgtgaaaatcgctcgcccacgtcaactctataccggctacacaaaacgtgatttcgatagccagcttgaaaaataa

SEQ ID NO: 123621 - protein, 427 aa, Photorhabdus luminescens subsp. laumondii TTO1
MADNKATLAPDGSVAIELDVLTPTLGSKVIDVRTLGSQGFYTYDPGFTSTASCESKITYIDGNEGVLLHRGFPIDQLATKSTYLEVCYILLYGETPTQEQFDKFKKTITRHTMIHEQIHRLFNGFRRDSHPMAVLCGVTGALAAFYHDALDVNNPRHRDITAYRLLSKMPTVAAMCYKYSIGQPFVYPRNDLSYAGNFLNMMFATPCEEYKVNPVLERAMDRIFILHADHEQNASTSTVRTAGSSGANPFACIAAGIASLWGPAHGGANEACLRMLEEIQSVEHIPEFIKRAKDKNDAFRLMGFGHRVYKNYDPRATVMRETCHEVLDELGLNDSLLEVAMELERIALHDPYFIEKKLYPNVDFYSGIILKAMGIPSTMFTVIFAIARTIGWIAHWNEMHDGGVKIARPRQLYTGYTKRDFDSQLEK

SEQ ID NO: 123622 - DNA, 1290 bp, Vibrio vulnificus YJ016
  CDS (1)..(1290): transl_table=11
atggcggataagaaagcgacccttcatgttgaaggtaaagcgccgatcgaattgccaattatggaaggttctttgggaacgcctgtaattgatgttcgtaagctaggagcgaacggctacttcactttcgacccgggttttcttgccactgcatcttgtgaatcgcaaataacatacatcgacggcggaaaaggcatcctgcttcaccgtggataccctattgatcagcttgcaaacaacgctgattacctagaggtttgttatattctactttacggtgaagcccctactcgtgagcaatacgagaaattcaaaacaactgttactcgccacactatggtgcacgaacaaattgccagcttcttccatggcttccgtcgtgatgcacaccctatggcagtaatgtgtggtgttgttggcgcacttgctgcgttctaccacgattctctagacatcaataatgacctgcaccgtgagatcacagcgtatcgtctgttgtctaagatgccgactttggctgcgatgtgttacaagtactctacaggccagccgttcatctaccctcgcaatgatttgagctacgcagaaaacttcctacacatgatgtttgctacaccatgtgaagaatatgaagtaaaccctgtcgttgcacgtgcgatggacaaaatcttcactctgcacgcagaccacgaacaaaatgcgtcaacgtcaacggtacgtttggcgggttcttctggtgcaaacccgtttgcttgtattgcggcaggtattgcatcgctttggggtccagctcatggcggcgcaaatgaagcgtgtttgaagatgttggaagagattggttcagtcgacaacattcctgagtacgtggatcgagcgaaagacaaagatgacccattccgtttgatgggctttggtcaccgtgtttacaagaactacgatccacgcgcaaccgtcatgcgtgaaacctgtcatgaagtgcttaaagagctcaacattcaagatccactgcttgatgttgcaatggaacttgagcgtattgctctttcagacgagtactttgtatcgaagaaactgtacccgaacgttgatttctactcaggcatcattctgaaagcgattggcattccagtttcaatgtttaccgttatcttcgcaatttcacgcaccatcggttggattgcacactggaacgaaatgcacagtgacccactgaaccgtatcggtcgccctcgccagttgtacacaggggaagtccaacgcgatttccaacctatgcacgaacgcgagtaa

SEQ ID NO: 123623 - protein, 429 aa, Vibrio vulnificus YJ016
MADKKATLHVEGKAPIELPIMEGSLGTPVIDVRKLGANGYFTFDPGFLATASCESQITYIDGGKGILLHRGYPIDQLANNADYLEVCYILLYGEAPTREQYEKFKTTVTRHTMVHEQIASFFHGFRRDAHPMAVMCGVVGALAAFYHDSLDINNDLHREITAYRLLSKMPTLAAMCYKYSTGQPFIYPRNDLSYAENFLHMMFATPCEEYEVNPVVARAMDKIFTLHADHEQNASTSTVRLAGSSGANPFACIAAGIASLWGPAHGGANEACLKMLEEIGSVDNIPEYVDRAKDKDDPFRLMGFGHRVYKNYDPRATVMRETCHEVLKELNIQDPLLDVAMELERIALSDEYFVSKKLYPNVDFYSGIILKAIGIPVSMFTVIFAISRTIGWIAHWNEMHSDPLNRIGRPRQLYTGEVQRDFQPMHERE

SEQ ID NO: 123624 - DNA, 1308 bp, Corynebacterium diphtheriae NCTC 13129
  CDS (1)..(1308): transl_table=11
ttgaaagggatgcttgtggctactgaaaacaaggataaggcggttcttcactaccctggtggcgagtatgagatggatatcatccatgcaaccgagggcaacgatggtgttgtactggataaattgctgtcccaaaccggcatggtcacttttgaccccggctatgtaagcaccggttccactgaatcgaagatcacctacattgacggcgacaacggcatcctgcgccaccgcggctatgacatcgcggatctagcggaaaacgcaaccttcaacgaagtctcctaccttctgatcaaaggccacctgccaaccgttgatgaactccacaagttcaacaacgaaatccgtcaccacaccctgctggacgaggactttaagagccagttcaacatcttcccacgtgacgcacacccaatgtccgtgctggcttcctccgtgaacatcttgtccacctactaccaagatcagctcaacccactcgatgaggagcagctagacaaggcaaccgttcgcctgctggctaaggtcccaatgctcgcggcttacgcataccgcgcatccaagggcgcaccatacatgtacccagacaactccttgaatgctcgtgagaacttcctgcgcatgatgttcggttacccaaccgagccatacgaggttgacccagtagtagcaaaggcactggataagctgctcattctgcacgcagaccacgagcaaaactgctcaacctccaccgtccgcatgatcggttccgcgcaggctaacatgtttgttgctgttgctggtggcatcaacgccctttccggcccactgcacggtggcgcaaaccaggccgttttggaaatgctcgaagagatcaaggccaacggcggcgacgctaccgactttatgaaccgcgtgaagaacaaggaaaaaggcgttcgcctgatgggcttcggccaccgcgtgtacaagaactacgacccacgtgcagccatcgtgaaggaaaccgcacacgagatcctcgaacacctcggtggtgacgaacttttggatcttgccatgaagctcgaagagatcgcactgagcgacgactacttcgtatcgcgcaagctatacccgaacgtcgacttctacaccggcttgatctaccgcgcaatgggattccccacggacttcttcaccgtcctctttgccatcggtcgtctgccaggctggatcgctcagtaccgcgagcagttggcaaccaccaccaagatcaaccgcccacgtcagatttacaccggagaaaccttgcgaaaggtcactccacgcgagcagcgctaa

SEQ ID NO: 123625 - protein, 435 aa, Corynebacterium diphtheriae NCTC 13129
MKGMLVATENKDKAVLHYPGGEYEMDIIHATEGNDGVVLDKLLSQTGMVTFDPGYVSTGSTESKITYIDGDNGILRHRGYDIADLAENATFNEVSYLLIKGHLPTVDELHKFNNEIRHHTLLDEDFKSQFNIFPRDAHPMSVLASSVNILSTYYQDQLNPLDEEQLDKATVRLLAKVPMLAAYAYRASKGAPYMYPDNSLNARENFLRMMFGYPTEPYEVDPVVAKALDKLLILHADHEQNCSTSTVRMIGSAQANMFVAVAGGINALSGPLHGGANQAVLEMLEEIKANGGDATDFMNRVKNKEKGVRLMGFGHRVYKNYDPRAAIVKETAHEILEHLGGDELLDLAMKLEEIALSDDYFVSRKLYPNVDFYTGLIYRAMGFPTDFFTVLFAIGRLPGWIAQYREQLATTTKINRPRQIYTGETLRKVTPREQR

SEQ ID NO: 123626 - DNA, 1305 bp, Rhodopseudomonas palustris CGA009
  CDS (1)..(1305): transl_table=11
atggacgcaacgaccaacaacaaaacggcaacgctgacggttggaaacaagaacttcgatcttccggtgctcaccgggacagtcggtcccgacgtcatcgacatcggcaagctctacgcgcagaccggaatgttcacctacgatccgggcttcacgtcgacggcgagctgccagtccaaaatcacttacatcgacggcgacgcaggcgttctcgagtatcgcggttacccgattgaacagctcgccgaaaaaggcgacttcctagaaacttgctatctcttgctgtacggcgaactgccgaccaaggcgcagaaggaagatttcgactaccgcgtcacccgccacaacatggttcacgagcagatggcccggttcttccagggcttccgtcgtgacgcgcatccgatggcggtgatggtggcttcggtcggcgcgctcgccgcattctaccacgactccaccgacattaacgatccgacccagcggatggtcgcttcgatccggatgatcgcgaaggtcccgacgctggccgcgatggcctacaagtactcggtcggccagcccttcatctatccgaagaacacgctcagctacgcagcgaacttcctgcggatgtgcttcgcgactccgtgcgaggaatacgtcgtcaatccggtgctggcgaacgcgctcgacaagatcttcacgctgcacgcggaccacgagcagaacgcctcgacctcgaccgtgcgcatcgccggctcgtcgggtgccaatccgttcgcctgtatcgcggcgggtatcgcctgcctgtggggcccggcgcatggcggtgccaacgaagcggcgctggcgatgctgaaggagatcggcaccgtcgagaacatcccggacttcatcgccaaggtgaaggacaagagctcttcggtgcggctgatgggcttcggccaccgcgtctataagaactacgatccgcgcgccaagatcatgcagcaggtctgccacgaagtgctggccgaaaccggccatcacggcgacccgctgctcaaggtggcgatggagctcgagaagatcgcgctcagcgatcagtacttcattgaccgcaagttgtacccgaacgtcgacttctattcgggcatcacgctgaaggcgatgggcttcccgaccgacatgttcaccgtgctgttcgcggtcgcccgcactgtcggctggatcagccagtggagcgagatgatcgaggacccgcagcagaagatcggccgtccgcgccagctcttcaccggtgcgaccacccgcaactacgtcgagatcggcaagcgcggctga

SEQ ID NO: 123627 - protein, 434 aa, Rhodopseudomonas palustris CGA009
MDATTNNKTATLTVGNKNFDLPVLTGTVGPDVIDIGKLYAQTGMFTYDPGFTSTASCQSKITYIDGDAGVLEYRGYPIEQLAEKGDFLETCYLLLYGELPTKAQKEDFDYRVTRHNMVHEQMARFFQGFRRDAHPMAVMVASVGALAAFYHDSTDINDPTQRMVASIRMIAKVPTLAAMAYKYSVGQPFIYPKNTLSYAANFLRMCFATPCEEYVVNPVLANALDKIFTLHADHEQNASTSTVRIAGSSGANPFACIAAGIACLWGPAHGGANEAALAMLKEIGTVENIPDFIAKVKDKSSSVRLMGFGHRVYKNYDPRAKIMQQVCHEVLAETGHHGDPLLKVAMELEKIALSDQYFIDRKLYPNVDFYSGITLKAMGFPTDMFTVLFAVARTVGWISQWSEMIEDPQQKIGRPRQLFTGATTRNYVEIGKRG

SEQ ID NO: 123628 - DNA, 1296 bp, Mycobacterium avium subsp. paratuberculosis K-10
  CDS (1)..(1296): transl_table=11
gtggccgacaccgacgacatcgccactttgaagtacccgggcggggaaaccgacctggagatcgtcagcgccaccgagggcgccgacggcatcgcgctgggttcgctgttgtccaagaccggctacaccaccttcgacaacggctttgtcaacaccgcctcgtgcaagagcgcgatcacctacatcgacggcgacgccggcatcctgcgttaccgcggctacccgatcgagcaactggccgagaagtcgaccttcctcgaggtgagctacctgttgatctacggcgagctgccggacaaggaccagctggccgagttcaccaagcggatccagctgcacaccatgctgcacgaggacctgaagcggttcttcgacggcttccctcgcaacgcccacccgatgccggtgctgtccagtgccgtcaacgcgctgtccgcctactaccccgattcgctggacccgatggacaccgaggacgtcgagctgtccacgatccggttgctggccaagctgccgaccatcgccgcgtacgcctacaagaagtcggtcggccagcccttcctctacccggacaacaagctgagcctggtggagaacttcctgcgcatgacgttcggcctgcccgccgagccgtaccaggccgaccccgaggtggtccgcgcgctggacatgctgctgatcctgcacgccgaccacgaacagaactgctcgacgtcgacggtccggctggtggggtcctcccaggccaacctgttcacctccatctccggcggcatcaacgcgctgtgggggccgctgcacggtggggccaaccaggcggtgctcgagatgctggagaagatccgccaaagcgacgacgacgtcagcgaattcgtgcgcaaggtgaagaaccgcgaggccggggtgaagctgatgggcttcggtcaccgggtgtacaagaactacgacccgcgggcgcgcatcgtcaaggaacaggccgacaagatcctggccaagctcggcggcgacgacgacctgctcgacatcgccaagcaactcgaagaggccgcgctgaccgacgagtacttcatcgagcgcaagctgtaccccaacgtcgacttctacaccggcctgatctaccgggcgctgggcttcccgacccggatgttcaccgtgctgttcgcgctggggcgcctgcccggctggatcgcgcactggcgcgagatgcacgacgagggcgacagcaagatcggccgcccgcgccagatctacaccggctacaccgagcgcgactacgtcaccatcgacgcccgctag

SEQ ID NO: 123629 - protein, 431 aa, Mycobacterium avium subsp. paratuberculosis K-10
MADTDDIATLKYPGGETDLEIVSATEGADGIALGSLLSKTGYTTFDNGFVNTASCKSAITYIDGDAGILRYRGYPIEQLAEKSTFLEVSYLLIYGELPDKDQLAEFTKRIQLHTMLHEDLKRFFDGFPRNAHPMPVLSSAVNALSAYYPDSLDPMDTEDVELSTIRLLAKLPTIAAYAYKKSVGQPFLYPDNKLSLVENFLRMTFGLPAEPYQADPEVVRALDMLLILHADHEQNCSTSTVRLVGSSQANLFTSISGGINALWGPLHGGANQAVLEMLEKIRQSDDDVSEFVRKVKNREAGVKLMGFGHRVYKNYDPRARIVKEQADKILAKLGGDDDLLDIAKQLEEAALTDEYFIERKLYPNVDFYTGLIYRALGFPTRMFTVLFALGRLPGWIAHWREMHDEGDSKIGRPRQIYTGYTERDYVTIDAR

SEQ ID NO: 123630 - DNA, 1251 bp, Wolbachia endosymbiont of Drosophila melanogaster
  CDS (1)..(1251): transl_table=11
atggataaaaaagtgctattagaactaagtaatggattaaaaatcgagctacctgtattaagcggaacaacaggtcctgatgtgttaaatatcaaggatttatataagatgacaggattattcacttacgatccagggtttgtttctacagcttcatgctcttctacaattacattcattgatggagatgaaggagttcttaaatataggggacataatatagctgatttggcagagaataataattttactgctgtgatttatttattgctctatggtgaattacccagttcagagcaacacaaaaaatttcttctcaaaatacaagaatcatccaaagtatcagagcaagttacaaatgtaattaaagcatttccaaaaactgctcaccctatgtcaatcttagttgcatgttttgcaagtttgtcagcatcttatcatgaaaagcatggcaacaatgtcaatggtgaagacctagattttggaatttctgcaatagcgcaagtttccacaattattgcaatgatttataggcatatcaacaatcaggaattcataaatgctaacaatgaattaagttacagtgaaaatttcttaaagatgatatttggcgatgctgttgataatgataaaagcgccctttttgcaaaagctctggataaaatatttactctccatgctgatcatgaacagaatgcttctacggcggctgtcagattggtgggatcggctggttctaatctgtttgcaagcctctctgcaggagttgctacactttggggaccagcacatggtggagctaatgaggcagttataaatatgctaaaagagatagagcaaagtggagatatagataaattcatcgaaaaagctaaagatgataaagatccatttaaattgatgggatttggacatcgtgtttataaaaattatgatccgcgcgcgcgtatattggaaggcgcttgccatgaggttctaagtaaactagaacaaaataatgaactgcttaaaattgcaaaaaaacttgaagaaatagctttaaaggatgaatattttatcgtgcgtaagttatatccaaatgttgatttttactcaggtataataatgaatgctattgatatcccctcaaatatgttcacgcctatttttgcactcgcaagaaccactggttgggttactcagtggtatgaaatgataaatgataaagaaactaagatctgtagaccaaggcaactctattttggtaaataa

SEQ ID NO: 123631 - protein, 416 aa, Wolbachia endosymbiont of Drosophila melanogaster
MDKKVLLELSNGLKIELPVLSGTTGPDVLNIKDLYKMTGLFTYDPGFVSTASCSSTITFIDGDEGVLKYRGHNIADLAENNNFTAVIYLLLYGELPSSEQHKKFLLKIQESSKVSEQVTNVIKAFPKTAHPMSILVACFASLSASYHEKHGNNVNGEDLDFGISAIAQVSTIIAMIYRHINNQEFINANNELSYSENFLKMIFGDAVDNDKSALFAKALDKIFTLHADHEQNASTAAVRLVGSAGSNLFASLSAGVATLWGPAHGGANEAVINMLKEIEQSGDIDKFIEKAKDDKDPFKLMGFGHRVYKNYDPRARILEGACHEVLSKLEQNNELLKIAKKLEEIALKDEYFIVRKLYPNVDFYSGIIMNAIDIPSNMFTPIFALARTTGWVTQWYEMINDKETKICRPRQLYFGK

SEQ ID NO: 123632 - DNA, 1140 bp, Bdellovibrio bacteriovorus HD100
  CDS (1)..(1140): transl_table=11
atggctgaagtaaatatctatgaaggcgccttggacaagggtttggaaggcgttgttgcatgtacgacgaaagtgtcttttatcgtcggtgattctctaaatttccgtggttacacgatcgatgatcttgctgcgaattccacttttgaggaagtaacttatcttctttggaacgacaaacttccaaatgctcaagagctggcggcattctccactcaacttcgcaatgaaatggctttgagccctgatttcatcaaagttttgaaagcaatccctaccaacgttcacccaatgggttggttgcgtacggctgtttctttgatggctcactgggattctgatgccaacgacaacggcgctgaagcaaacttgcgcaagtctgttcgtttgactgcgaaaatgggaactcttctttgtgcattcgatgccatccgcaaaggcaaagagcctgtagctcctaaagctgacaaatccatggcttggaacatgatgtacatgctgggcggcggagctgagccaaaagctgagcacgtaaaagtgatggacacgtgcttgatccttcacgctgaccacgagctgaactgctctgcgttcgcaactcgcgtaaccgcttcttctttgtctgaccttcactctgcaatcgtttctgctattggcgcgttgaaaggtcctttgcacggtggtgcgaacgaacaagtgatcctgatgctgcaaaaaatcggcacgatggaaaaagctcagcagttcgttaaagacgctttggctgcaaaagaaaaagttatgggtatcggtcaccgcgtttacaaaaacggcgaccctcgcgctcgtatcctgcgtggcatgtccgacaagctgactaaagatgctggcatccaccacatgtatgaaatgtccactttgatcgacgacaccatgttcaacgaaaaaggcttgatgccgaacgtggacttctactctgcaactgtttacttctctatgggcatcccgacagatctgttcacgccgatcttcgcggcttcccgtatttccggctggtgcgcacacgccttcgagcagtacgcaaacaaccgtatctaccgtcctcgtggcaaatgggcaggcaaagagggtctgaaatggactccagccaaccaacgctaa

SEQ ID NO: 123633 - protein, 379 aa, Bdellovibrio bacteriovorus HD100
MAEVNIYEGALDKGLEGVVACTTKVSFIVGDSLNFRGYTIDDLAANSTFEEVTYLLWNDKLPNAQELAAFSTQLRNEMALSPDFIKVLKAIPTNVHPMGWLRTAVSLMAHWDSDANDNGAEANLRKSVRLTAKMGTLLCAFDAIRKGKEPVAPKADKSMAWNMMYMLGGGAEPKAEHVKVMDTCLILHADHELNCSAFATRVTASSLSDLHSAIVSAIGALKGPLHGGANEQVILMLQKIGTMEKAQQFVKDALAAKEKVMGIGHRVYKNGDPRARILRGMSDKLTKDAGIHHMYEMSTLIDDTMFNEKGLMPNVDFYSATVYFSMGIPTDLFTPIFAASRISGWCAHAFEQYANNRIYRPRGKWAGKEGLKWTPANQR

SEQ ID NO: 123634 - DNA, 1116 bp, Bacillus cereus ATCC 10987
  CDS (1)..(1116): transl_table=11
atgactgttattcgaggtttagaaggggtagtagcaacaacatcatctgtgagctctattattgatgatacattaacttatgttgggtataatattgatgatttagctgagaatgctacatttgaagaagtagtgtacttattatggcatcgcaagcttcctaacgagcaagaactagcggaatttaaggaaattgtatcggaatactataaagttccaggtgagattttagcatatttgaaacaagtagatttaaaaatcgcacatccgatgtctgttttacgaactgcaatttccatgctatcattatacgatgagagcgctgaaattatggatgaaaagtccaattatttgaaagcggttaaattacaggctcaagtaggaactttagttgctgcttacgcaagaatccgtaaaggcttagatgttgttgagcctagaaatgatttatcattagctgcaaacttcttgtacatgttaaatgatcgcgagccaaatgaagttgaaattgaagcttttgataaggcgcttgtacttcacgcagatcatgagttaaacgcttctacatttactgcacgcgtttgtgtagctacactttcagatgtatattctggtattacagcagcaatcggtgcgttaaaaggtcctcttcacggcggggcaaatgaaaatgtaatgaagatgttaactgaaattggcgaagaagaaaatgtagaatcatatattcataatgctcttcaaaataaagtgaaaattatgggctttggccaccgtgtatatgagcatggtgatccacgtgcaaaacatttacgcgaaatgtctaagagattatgcgtgcttttaggagaagagaaatggtataatatgtctatcaaaattgaagacattgtaacaaaagaaaaaggtcttccaccaaatgttgatttctattcagcttctgtataccattgtttaggaattgaccatgacttatttacacctatttttgcaattagccgtatgtcaggctggttagctcatattctagaacaatatgaaaataaccgtttaatccgtccgcgtgctgattataatggaccaacacatcaagtttatgttccgattgcacaacgataa

SEQ ID NO: 123635 - protein, 371 aa, Bacillus cereus ATCC 10987
MTVIRGLEGVVATTSSVSSIIDDTLTYVGYNIDDLAENATFEEVVYLLWHRKLPNEQELAEFKEIVSEYYKVPGEILAYLKQVDLKIAHPMSVLRTAISMLSLYDESAEIMDEKSNYLKAVKLQAQVGTLVAAYARIRKGLDVVEPRNDLSLAANFLYMLNDREPNEVEIEAFDKALVLHADHELNASTFTARVCVATLSDVYSGITAAIGALKGPLHGGANENVMKMLTEIGEEENVESYIHNALQNKVKIMGFGHRVYEHGDPRAKHLREMSKRLCVLLGEEKWYNMSIKIEDIVTKEKGLPPNVDFYSASVYHCLGIDHDLFTPIFAISRMSGWLAHILEQYENNRLIRPRADYNGPTHQVYVPIAQR

SEQ ID NO: 123636 - DNA, 1422 bp, Magnaporthe grisea 70-15; identical to SEQ ID NO: 93109
  CDS (1)..(1422)

SEQ ID NO: 123637 - protein, 473 aa, Magnaporthe grisea 70-15; identical to SEQ ID NO: 93110

SEQ ID NO: 123638 - DNA, 1491 bp, Gibberella zeae PH-1
  CDS (1)..(1491)
atggttttgtcacagaagcaaggccgtcgcgagacgttgaccgtcgtcgacaacagaacaaatcagagctacgagatccccatcacccataactccattccagcaacagaattcaagaaaatcaaggctgaggctggaaatgatcgtccagaagatgagacgaaccagggtctcagagtttatgatcccgcctacatgaacactgccgtcgtacagagcaaaatcacatacatcaacggcctggatggcgttcttcgctatcgcggataccccatcgagcagttggtggaaaagagcgatttcctcgagtctgcctatctcctcatttatggcgagcttcccacaaaatcagagtacgacttgtggcatggcgaggtgatgcaccacacatacattcacagcgacattgagaacatgttcaagtcgttccgctatgattctcaccccatgtccatgctgactgccgcctttgctaccctgggagcgtttgccccggaagccaacccttctctcgccggccagaagctctacaccaatgccgcgtcaggcaacttggaagcccttcagatgttggacaagcagattctccgtatccttggaaaggcgcccactctcgctgcggcttcttacagaatgcgccaaggccgacctttcaaccgaccagcacaggatttgggatacactggaaacttcctgtaccttctggaccatctctccgagaccgactacaagccgcatcccgttcttgccagggctctggacaagcttttcatcattcacgccgaccacgaagtcaactgttccaccgccacagtcatgcaagttggaagttccctggtggacccttacagcgttgtcgctgcaggatgcgcagcactctacggcccatctcacggaggcgcttccgagtcagcgatccgcatgctgatcgagatcggatctccagagaacgtcccagcattcatgcaggcagttgagaagcgggaacgcgttcttgtcggattcggtcaccgtgtctacaagaacgtcgatcctcgctccaccgccatccgcaagctcgccgaggaagtcttcgaggtcaccggcagaaacaagctgttggacacggctctcacacttgccgactatgcccgaaagagcgaattcatgcgcagcaggaacctgtaccccaacgtcgacttttactctggtctgatctaccaggccatgggtttccctcttgacttctaccctgtcttgttcgctgtcccacgatgcgttggatggttggcgcactggagacagatgatgctgaactcagctggtgtcaagatctggagacctcgacagctgtacatcggagagggcgagagagagtatgttgaggccaaggacagaaaggccaaggctgatgctacagtctttgatgctcctgtcaaggttggacacggtggaaacagccagcgcactctacttgctacctctagcaaggagttgaagactattcaatga

SEQ ID NO: 123639 - protein, 496 aa, Gibberella zeae PH-1
MVLSQKQGRRETLTVVDNRTNQSYEIPITHNSIPATEFKKIKAEAGNDRPEDETNQGLRVYDPAYMNTAVVQSKITYINGLDGVLRYRGYPIEQLVEKSDFLESAYLLIYGELPTKSEYDLWHGEVMHHTYIHSDIENMFKSFRYDSHPMSMLTAAFATLGAFAPEANPSLAGQKLYTNAASGNLEALQMLDKQILRILGKAPTLAAASYRMRQGRPFNRPAQDLGYTGNFLYLLDHLSETDYKPHPVLARALDKLFIIHADHEVNCSTATVMQVGSSLVDPYSVVAAGCAALYGPSHGGASESAIRMLIEIGSPENVPAFMQAVEKRERVLVGFGHRVYKNVDPRSTAIRKLAEEVFEVTGRNKLLDTALTLADYARKSEFMRSRNLYPNVDFYSGLIYQAMGFPLDFYPVLFAVPRCVGWLAHWRQMMLNSAGVKIWRPRQLYIGEGEREYVEAKDRKAKADATVFDAPVKVGHGGNSQRTLLATSSKELKTIQ

SEQ ID NO: 123640 - DNA, 1392 bp, Candida glabrata CBS 138; identical to SEQ ID NO: 93117
  CDS (1)..(1392)

SEQ ID NO: 123641 - protein, 463 aa, Candida glabrata CBS 138; identical to SEQ ID NO: 93118

SEQ ID NO: 123642 - DNA, 1194 bp, Candida albicans SC5314
  CDS (1)..(1194): transl_table=12
atgagaggtatcaaaggtttagtttgggaaggttctgttttggacccaattgaaggtatccgtttcagaggaagaaccatcccagacattcaaaaagaattgccaaaagcaccaggtggtgaagaaccattaccagaagctcttttctggttgttgttgactggtgaagttccaactgacgcccaaactaaggctttatccgaagaatttgctgctagatcagcattaccaaagcacgttgaagaattgatcgacagatctccatctcacttgcacccaatggctcaattctccattgccgttactgctttggaatctgaatcccaatttgcccaagcttatgctaaaggtgccaacaaatccgaatactggaaatacacttacgaagattccatcgatttgttagctaaattgccaaccattgctgctaagatttacagaaacgttttccacgatggtaaattgccagctgccattgactccaaattggattacggtgctaacttggccagtttgttaggttttggtgacaacaaggaatttgttgaattaatgagattgtaccttaccatccactctgaccacgaaggtggtaacgtctctgcacacaccacccacttggttggttccgctttatcttccccattcttgtcattagctgctggtttgaatggtttagctggtccattacacggtagagctaaccaagaagttttggaatggttgttcaaattaagagaagaattaaacggtgactactccaaggaagccattgaaaaatacttgtgggaaaccttgaactccggtagagttgtcccaggttacggtcacgctgtcttgagaaagaccgatccaagatacactgctcaaagagaatttgctcttaaacatatgccagactacgaattgttcaaattggtttcaaacatttacgaagtcgctccaggtgttttgaccaaacacggtaagaccaagaacccatggccaaatgtggactcccactctggtgtcttgttacaatactacggtttgactgaacaatctttctacactgtcttgttcggtgtttccagagcctttggtgtcttgccacaattgatcttggaccgtggtatcggtatgccaattgaaagaccaaaatctttctccactgaaaaatacattgaattggtcaaaaacatcaacaaagcttaa

SEQ ID NO: 123643 - protein, 397 aa, Candida albicans SC5314
MRGIKGLVWEGSVLDPIEGIRFRGRTIPDIQKELPKAPGGEEPLPEALFWLLLTGEVPTDAQTKALSEEFAARSALPKHVEELIDRSPSHLHPMAQFSIAVTALESESQFAQAYAKGANKSEYWKYTYEDSIDLLAKLPTIAAKIYRNVFHDGKLPAAIDSKLDYGANLASLLGFGDNKEFVELMRLYLTIHSDHEGGNVSAHTTHLVGSALSSPFLSLAAGLNGLAGPLHGRANQEVLEWLFKLREELNGDYSKEAIEKYLWETLNSGRVVPGYGHAVLRKTDPRYTAQREFALKHMPDYELFKLVSNIYEVAPGVLTKHGKTKNPWPNVDSHSGVLLQYYGLTEQSFYTVLFGVSRAFGVLPQLILDRGIGMPIERPKSFSTEKYIELVKNINKA

SEQ ID NO: 123644 - DNA, 1401 bp, Tribolium castaneum; identical to SEQ ID NO: 93135
  CDS (1)..(1401)

SEQ ID NO: 123645 - protein, 466 aa, Tribolium castaneum; identical to SEQ ID NO: 93136

SEQ ID NO: 123646 - DNA, 1146 bp, Prochlorococcus marinus str. AS9601
  CDS (1)..(1146): transl_table=11
ttggacagtaacaaactaattttaaaaccaggattagagggtgtcccagttactaattcatctatctgtgatattgacggcaacaaaggtaaattattgtacagagggttctccattgaggaactatccaaaaaaagcagttttttagaaactgcttaccttttgatttggggtgaattgcccacggctattcaacttagagattttgaacaagaagtccagatgcatcgaaggttaagttttagagtcagagatatgatgaaatgttttcctgctaccggtcatcctatggatgctcttcaatctagtgcagcttctttggggttattctattcacgtagagcaatagatgatcctaattacatttacaacgcagtgataagactaatagcaaaaattccaacaatgattgctgcgtttcaacttattagaaaaggacaagacccaattcaaccaagagatgatttaacttactcatcaaattttctttacatgctgactgaaaaagaacaagatcctatagctgcaaaagtttttgacaggtgtttaatcctacatgccgaacatagtttaaacgcaagtacatttagcgctagagttactgcaagtactcttacagacccatatgctgtcatcgcctctgcagtaggaacccttgctggcccactgcatggaggagcaaatgaggacgtaattgcaatgttagaagagattaaaactccagaaaatgctgggtcttttttagataatgcaattaaaaataaaagtaagataatgggcttcggccacagagaatataaagttaaagatccaagagcaataattctacaaaaactggcagaagagctttttattagatttggagcagatgaaatgtatgaagttgctaaatcacttgaggcagaggcaataccaagacttggacctaaaggtatattccctaacgtggatttttattctggtcttgtttatagaaaacttggtattcctcgtgatttatttactccaatttttgccatatctagagtggctggttggttagctcattggagagagcaacttggagcaaacagaattttcaggccatcgcaaatctatacgggttcagcaccaagagattggatcagcctagaaaatagagaataa

SEQ ID NO: 123647 - protein, 381 aa, Prochlorococcus marinus str. AS9601
MDSNKLILKPGLEGVPVTNSSICDIDGNKGKLLYRGFSIEELSKKSSFLETAYLLIWGELPTAIQLRDFEQEVQMHRRLSFRVRDMMKCFPATGHPMDALQSSAASLGLFYSRRAIDDPNYIYNAVIRLIAKIPTMIAAFQLIRKGQDPIQPRDDLTYSSNFLYMLTEKEQDPIAAKVFDRCLILHAEHSLNASTFSARVTASTLTDPYAVIASAVGTLAGPLHGGANEDVIAMLEEIKTPENAGSFLDNAIKNKSKIMGFGHREYKVKDPRAIILQKLAEELFIRFGADEMYEVAKSLEAEAIPRLGPKGIFPNVDFYSGLVYRKLGIPRDLFTPIFAISRVAGWLAHWREQLGANRIFRPSQIYTGSAPRDWISLENRE

SEQ ID NO: 123648 - DNA, 1146 bp, Prochlorococcus marinus str. MIT 9515
  CDS (1)..(1146): transl_table=11
ttggaccctaacaaactaattttaaaaccaggattagagggtgtcccagtaactaattcatcaatatgcgatattgatggacaaaatgggaaattgttatatagaggctatgcaattgaagaattagcacagaaaagtactttcttagaaactgcttttttattaatttggggagaattgccatcagcaatagaactgagggattttgaacaagaagtacagatgcataggagattaagtttcagagttagagatatgatgaaatgttttcctgcgactggacatcctatggatgctcttcaatcgagtgctgcgtctcttggccttttttattcaaggagagccatagatgacccgaaatatatatacaacgctgtaattagacttatagccaaaattcctactatgattgccgctttccaactaattagaaaagggcaggatccaatccaaccgagagatgatttatcttactcatcaaatttcctttatatgctcacagagaaagaacaagatccaatcgcagcgaaagtttttgatagatgcttaattcttcatgcagaacacagcttaaatgcaagcaccttcagtgcgagagttacagcaagtactcttactgatccatacgcagtaattgcatctgcggtggggacactcgctggtcctcttcatggaggagcaaatgaagatgtgattgcaatgctagaagatattaaaacgcccgaaaaagccggttgttttttggatgatgctataaaaaataaaaagaaaataatgggtttcggtcacagggaatataaggttaaagatcctagagcaattattcttcaaaagttagcggaagagctttttatcagatttggtaaagatgagatgtatgaagttgctaaaaatttagagttagaagccataccaagactagggccaaaaggcattttcccaaatgttgatttctattctggtcttgtttatcgaaaacttggaataccacgagacctttttactccaattttcgcaatatccagagtagcaggatggttagctcactggagggaacaattaggagcaaacaggatttttagaccatcgcaaatttatactggatcagctccaagagattggattagtttagaaaaccgaaaataa

SEQ ID NO: 123649 - protein, 381 aa, Prochlorococcus marinus str. MIT 9515
MDPNKLILKPGLEGVPVTNSSICDIDGQNGKLLYRGYAIEELAQKSTFLETAFLLIWGELPSAIELRDFEQEVQMHRRLSFRVRDMMKCFPATGHPMDALQSSAASLGLFYSRRAIDDPKYIYNAVIRLIAKIPTMIAAFQLIRKGQDPIQPRDDLSYSSNFLYMLTEKEQDPIAAKVFDRCLILHAEHSLNASTFSARVTASTLTDPYAVIASAVGTLAGPLHGGANEDVIAMLEDIKTPEKAGCFLDDAIKNKKKIMGFGHREYKVKDPRAIILQKLAEELFIRFGKDEMYEVAKNLELEAIPRLGPKGIFPNVDFYSGLVYRKLGIPRDLFTPIFAISRVAGWLAHWREQLGANRIFRPSQIYTGSAPRDWISLENRK

SEQ ID NO: 123650 - DNA, 1191 bp, Prochlorococcus marinus str. MIT 9303
  CDS (1)..(1191): transl_table=11
gtggggcaggagcaggttggggagattcgccacgatcgcagtggcatcagctttcgtccggggctggagggagtgccagtaacccaatccgccatctgtgatatcgatggaatgcaggggcggcttgcttatcggggttatccaattgcggagctctcagcgcatagcagctttttggaaaccacctatctgttgatctggggcgatctgcccagcccacagcaacttcgtgatttcgaagctgaggtgcagatgcaccgtcgcgtgagtttccgggtacgcgacatgatgaagtgcttcccagcttcggggcacccgatggatgcacttcagtcgagtgcagcatccctggggctgttctattcccgtcgagccatcgatgacccgaagtacgtctataacgccgtggtgaggctgatcgccaagattcccacgatggtggcggccttcaagttgattcgcaaagggcaagatcccattcagcctcgtgacgacctggcctactcagccaatttcctctacatgctcaccgagcgtgaaccggaccctttggcggcaagggttcttgatcgctgcttgatcctgcatgcggaacacagtctgaatgccagtacttttagtgctcgcgtgaccgccagtacgctcacagacccttatgcagtggtggcctccgcagtgggcacccttgcaggacctctacatggtggtgccaatgaggatgttttggcgatgctcgaagagatcggcagcccagagcatgctggtgattacttggatgaagcgattgcttctaagcgcaaggtgatgggctttggtcatcgggaatatcgggtcaaggatcctcgcgctgtgatccttcagggtcttgcagaggagttgtttgcccgattcggtaccgatgagatgtacgacgtggccaaggcgttggaggcggcggcggctacccgtttaggccctaaagggatctatccgaatgtggacttctattccggtcttgtgtatcgcaagcttggaattccacgcgatctttttactcctgtgtttgccatctcacgggtggccggttggctggctcattggcgagagcaacttggcgcgaatcggattttcaggccttcgcagatttacacaggtgctcagaacagaacttggatccctagtgatgagcgtgtctcttctacgggcgcctaa

SEQ ID NO: 123651 - protein, 396 aa, Prochlorococcus marinus str. MIT 9303
MGQEQVGEIRHDRSGISFRPGLEGVPVTQSAICDIDGMQGRLAYRGYPIAELSAHSSFLETTYLLIWGDLPSPQQLRDFEAEVQMHRRVSFRVRDMMKCFPASGHPMDALQSSAASLGLFYSRRAIDDPKYVYNAVVRLIAKIPTMVAAFKLIRKGQDPIQPRDDLAYSANFLYMLTEREPDPLAARVLDRCLILHAEHSLNASTFSARVTASTLTDPYAVVASAVGTLAGPLHGGANEDVLAMLEEIGSPEHAGDYLDEAIASKRKVMGFGHREYRVKDPRAVILQGLAEELFARFGTDEMYDVAKALEAAAATRLGPKGIYPNVDFYSGLVYRKLGIPRDLFTPVFAISRVAGWLAHWREQLGANRIFRPSQIYTGAQNRTWIPSDERVSSTGA

SEQ ID NO: 123652 - DNA, 1146 bp, Prochlorococcus marinus str. MIT 9301
  CDS (1)..(1146): transl_table=11
ttggatagcaacaaactaattttaaaaccaggattagaaggtgtcccagttactaattcatctatctgtgatattgacgggaacaaaggtaaattattgtataggggctactccattgaggaactatcccaaaaaagcagttttttagaaactgcttacctattgatttggggtgaattgcccacagctattcaactaagggattttgaacaagaagttcaaatgcatagaaggttaagttttagagtcagagatatgatgaaatgttttcctgcgacaggtcatcctatggatgctcttcaatctagtgcagcttctttagggcttttctattcacgtagagcaatagatgatcctaattacatttacaacgcagtaataagacttatagcaaaaatacctactatgattgctgcgtttcaacttataagaaaaggacaagaccctattcaacctcgtgacgatttaacttactcatcaaattttctttacatgctgacagaaaaagaacaagatccaatagctgcaaaagtttttgataggtgtttaatcctacatgccgaacatagtttaaacgcaagtacatttagcgctagggttactgcaagcactcttacagacccatacgctgtcatagcctctgcagtaggaaccctggctggtccgctgcatggaggagcaaatgaggatgtgattgcaatgttagaagagatcaaaactccagaaaatgctgcttcttttttggataacgcgataaaaaataaaagtaagattatgggcttcggtcatagagaatataaagtcaaagatccaagagcaataattcttcaaaaactggcagaggagctttttattagatttggagcagatgaaatgtatgaagttgcaaaatcacttgaagcagaagcaataccaagacttggacctaagggtatattccctaacgtggatttttattctggtcttgtttatagaaaacttggtattcctcgtgatttgtttactccaatttttgccatctctagagtcgctggttggttagctcattggagagagcaacttggagcaaatagaatttttagaccatcgcaaatctatactggttcagcaccaagagattggatcagcctagaaaacagaaaataa

SEQ ID NO: 123653 - protein, 381 aa, Prochlorococcus marinus str. MIT 9301
MDSNKLILKPGLEGVPVTNSSICDIDGNKGKLLYRGYSIEELSQKSSFLETAYLLIWGELPTAIQLRDFEQEVQMHRRLSFRVRDMMKCFPATGHPMDALQSSAASLGLFYSRRAIDDPNYIYNAVIRLIAKIPTMIAAFQLIRKGQDPIQPRDDLTYSSNFLYMLTEKEQDPIAAKVFDRCLILHAEHSLNASTFSARVTASTLTDPYAVIASAVGTLAGPLHGGANEDVIAMLEEIKTPENAASFLDNAIKNKSKIMGFGHREYKVKDPRAIILQKLAEELFIRFGADEMYEVAKSLEAEAIPRLGPKGIFPNVDFYSGLVYRKLGIPRDLFTPIFAISRVAGWLAHWREQLGANRIFRPSQIYTGSAPRDWISLENRK

SEQ ID NO: 123654 - DNA, 1314 bp, Herminiimonas arsenicoxydans
  CDS (1)..(1314): transl_table=11
atgccccactcccaatctgacaccaaagccacactgtcgttttccgacggttcgccatcattggagttgccgatctacaagggaactattggtcctgacgtgattgatatccgcaagctgtacgctgcaagcggtaaattcacctatgacccaggcttcatgtctactgcgtcgtgcaattcgactattacctatatcgatggcgacaagggcgagttgctgtatcgcggctatccgatcgaacaactggcggtgcattgcgatttcctggaagccagctatttgctgttgaagggtgagttgcctaatgcggcacagaaaaaggagttcgtcgcgacggttacccgtcacacgatgttgcatgaacagatgcaattcttcttccgtggtttccgtcgcgacgcacatcccatgtcggtgctggtgggtacggtaggcgcactgtcttcgttctatcacgattcgctcgatatcagcgatgcgcatcaccgtgaagtatcggcgattcgcctgatcgcaaagatgccgacgctggtggcgatgtcgtacaaatattcagtcggtcagccattcgtgtatccacgcaatgacttgtcgtacagtgcgaacttcatgcacatgatgttttcgacgcctagcgaagaatacaaaatcaatgatgtgctggtacgcgcactggatcgcattttgatcctgcatgccgatcacgagcaaaatgcatcgacttcgaccgtgcgtctgtcgggttcgtccggcgccaatccgtttgcctgtatcgcagcgggtattgcctgcctgtggggcccggcacatggcggcgcgaatgaagcggcactgaacatgctgaaggaaattggttcagtcgacaacattcctgaattccttgccaaggtcaaagacaagaattcgggcatcaagctgatgggcttcggtcatcgcgtgtacaagaacttcgatccgcgcgccaaactgatgcgcgaaacctgccatgaagtgctggaagaactgggcctgcacgacgacccattgttcaaactggcaatggcgctggaaaaagtggcattggaagacgaatactttgtgtcgcgcaagctgtatccgaacgtcgatttctattcgggtatcgtgcaatcggcactgggtattccagtgtcgctgttcaccggtattttcgcgatggcgcgcactgtcggctgggtcgcacaatggaatgaaatgatttcagatccggagcaaaaaatcggtcgtccgcgtcagttgtacattggtgaaaaagcgcgcgatgtgccggaaatgtcgaaacgtccagcttaa

SEQ ID NO: 123655 - protein, 437 aa, Herminiimonas arsenicoxydans
MPHSQSDTKATLSFSDGSPSLELPIYKGTIGPDVIDIRKLYAASGKFTYDPGFMSTASCNSTITYIDGDKGELLYRGYPIEQLAVHCDFLEASYLLLKGELPNAAQKKEFVATVTRHTMLHEQMQFFFRGFRRDAHPMSVLVGTVGALSSFYHDSLDISDAHHREVSAIRLIAKMPTLVAMSYKYSVGQPFVYPRNDLSYSANFMHMMFSTPSEEYKINDVLVRALDRILILHADHEQNASTSTVRLSGSSGANPFACIAAGIACLWGPAHGGANEAALNMLKEIGSVDNIPEFLAKVKDKNSGIKLMGFGHRVYKNFDPRAKLMRETCHEVLEELGLHDDPLFKLAMALEKVALEDEYFVSRKLYPNVDFYSGIVQSALGIPVSLFTGIFAMARTVGWVAQWNEMISDPEQKIGRPRQLYIGEKARDVPEMSKRPA

SEQ ID NO: 123656 - DNA, 1302 bp, Burkholderia vietnamiensis G4
  CDS (1)..(1302): transl_table=11
atgactccgtctgatgttaaagccacgctatcgttcagcgacaactcgccgagcgtcgaaatgccgatttacaaggggacgatgggcccggacgtaatcgacatccgcaagctgtacggccaaaccggcaagttcacttacgacccgggcttcatgtcgacggcttcgtgcaactcggcgatcacgtacatcgacggcgacaagggcgaactgctgtaccgcggctacccgatcgacaacctcgcgcagaacgcggacttcctcgagtcctgctacctgctgctgaagggcgaactgccgaacgcagcacagaagaaggaattcgtcgacaccgtcacgaagcacacgatggtgcacgagcagatgcacttcttcttccgcggcttccgccgcgacgcgcacccgatggcgatcctggtcgccgcagtcggcgcgctgtcggcgttttaccacgactcgctcgacatcaacgacccgcgtcaccgcgaagtgtcggcgatccgcatgatcgccaagctgccgacgctcgtcgcgatggcatacaagtacagcatcggccagccgttcgtgtatccgaagaactcgctgtcgtacagcgcgaacttcatgcacatgatgttctcgaacccgtgcgaagagtacaaggtcaacgacgtgctcgtccgcgcgctcgaccgtatcctgatcctgcacgctgaccacgagcagaacgcatcgacgtcgacggtccgcctggccggctcgtcgggcgcgaacccgttcgcgtgtatcgcggccggtatcgcgtgtctgtggggcccggcgcacggtggtgcgaacgaagccgcgctgaacatgctcgagcagatcggctcgccggacaacatccccgaattcatcaagcaggtgaaggacaagaattcgggcgtgaagctgatgggcttcggtcaccgcgtgtacaagaactacgacccgcgtgcgaagctgatgcgcgaaacgtgctacgaagtgctgaacgaactgggcctgcacgacgacccgctgttcaagctcgcgatgcagctcgagaagatcgcgctggaagacgagtacttcgtgtcgcgcaagctgtacccgaacgtcgacttctactcgggtatcgtgcagcgcgcgctgggcatcccgacgtcgatgttcacgtgtatctttgcgatggcacgtacggtcggctggatcgcacagtggaacgaaatgattgcggatccggagcaaaagatcggccgtccgcgtcagctgttcatcggcgacacgccgcgcgaagcgaagccgctcaacgcacgttaa

SEQ ID NO: 123657 - protein, 433 aa, Burkholderia vietnamiensis G4
MTPSDVKATLSFSDNSPSVEMPIYKGTMGPDVIDIRKLYGQTGKFTYDPGFMSTASCNSAITYIDGDKGELLYRGYPIDNLAQNADFLESCYLLLKGELPNAAQKKEFVDTVTKHTMVHEQMHFFFRGFRRDAHPMAILVAAVGALSAFYHDSLDINDPRHREVSAIRMIAKLPTLVAMAYKYSIGQPFVYPKNSLSYSANFMHMMFSNPCEEYKVNDVLVRALDRILILHADHEQNASTSTVRLAGSSGANPFACIAAGIACLWGPAHGGANEAALNMLEQIGSPDNIPEFIKQVKDKNSGVKLMGFGHRVYKNYDPRAKLMRETCYEVLNELGLHDDPLFKLAMQLEKIALEDEYFVSRKLYPNVDFYSGIVQRALGIPTSMFTCIFAMARTVGWIAQWNEMIADPEQKIGRPRQLFIGDTPREAKPLNAR

SEQ ID NO: 123658 - DNA, 1305 bp, Bradyrhizobium sp. ORS278
  CDS (1)..(1305): transl_table=11
atggacgcaaaatccgaaagcaagaccgcgacgctcaccgtcggcaacaagaactacgatcttccgatcctgagcggcaccgtgggtcccgacgtcatcgacatcggcaagctctacgcccaggccgggatgttcacctatgaccccggcttcacctcgaccggcagctgccagtccaagatcacctatatcgacggcgacgccggcgtcctggaataccgcggctatccgatcgagcagctcgccgaaaagggcgacttcctcgagacctgctatctgctgctgtacggggaactcccgacgccggcgcagaagaaggatttcgactatcgcgtgacccatcatacgatggtgcacgagcagatggcccgcttcttccagggcttccgccgcgacgcccatccgatggccgtcatggtcgcctcggtcggcgcgctcgccgcgttctatcacgactcgaccgacatcaacgatcccaagcagcggatgatcgcctcgatccggatgatcgcgaagatcccgaccctggctgcgatggcctacaaatattcgatcggccagcctttcgtttatccgaagaacgcgctgtccttctccgagaacttcctcaacatgtgcttcgcggtgccgtgcgaggagtacaagccaaacccggtgctcgccaacgcgctcgacaagatcttcatcctgcacgccgaccacgagcagaacgcctcgacctccacggtgcgcatcgccggctcctcgggcgccaacccgttcgcctgcatcgccgccggcatcgcctgcctgtggggaccggcgcatggcggcgccaacgaggcggcgctgaacatgctggccgagatcggcaccgtcgacaagattcccgagttcatcgccaaggtgaaggacaagaacagcgacgtgcgcctgatgggcttcggccatcgcgtctacaagaactatgacccgcgcgccaagatcatgcagaagatgtgtcacgcggtgctcaaggagacgggccacgccgacgatcagatgctcaaggtcgcgatggagctcgagaagatcgcgctcagcgatcagtacttcatcgaccgcaagctctacccgaacgtcgacttctactcgggcatcaccttgaaggcgatgggcttcccggtctcgatgttcaccgtgctgttcgcggtcgcccgcaccgtcggctggatcagccaatggagcgagatgatcgaggacccgcagcagaagatcggccgtccacgccagctctacaccggcgtcaccacgcgccagtacatcgatatcgacaagcgcagctga

SEQ ID NO: 123659 - protein, 434 aa, Bradyrhizobium sp. ORS278
MDAKSESKTATLTVGNKNYDLPILSGTVGPDVIDIGKLYAQAGMFTYDPGFTSTGSCQSKITYIDGDAGVLEYRGYPIEQLAEKGDFLETCYLLLYGELPTPAQKKDFDYRVTHHTMVHEQMARFFQGFRRDAHPMAVMVASVGALAAFYHDSTDINDPKQRMIASIRMIAKIPTLAAMAYKYSIGQPFVYPKNALSFSENFLNMCFAVPCEEYKPNPVLANALDKIFILHADHEQNASTSTVRIAGSSGANPFACIAAGIACLWGPAHGGANEAALNMLAEIGTVDKIPEFIAKVKDKNSDVRLMGFGHRVYKNYDPRAKIMQKMCHAVLKETGHADDQMLKVAMELEKIALSDQYFIDRKLYPNVDFYSGITLKAMGFPVSMFTVLFAVARTVGWISQWSEMIEDPQQKIGRPRQLYTGVTTRQYIDIDKRS

SEQ ID NO: 123660 - DNA, 1191 bp, Synechococcus sp. WH 7803
  CDS (1)..(1191): transl_table=11
gtgagtccaaccgaggggggagaaatccgtcatgagcgcaccggtttggtgttccgccctgggttggaaggggttcctgcaacccagtcgtcaatctgcgatatcgacgggcagaagggattgctgtcctatcgcggctatcccgttgatgtgctcgcgtcccactgcagtttcctggaaaccacctacctactgatctggggtgaactccccaatccacagcagctgagagatttcgagcaggaggtgcagatgcaccgacgggtgagcttccgcgttcgcgacatgatgaagtgttttccatcggatggtcatccgatggatgctctgcagtcgagtgcggcctcgctcgggttgttttactcccggcgcgccatcgatgatccccagtacatctacgacgccgtcgtgaggttgatcgccaagatccccaccatggttgcggcgtttcagttgatccgcaaaggacaggatccgattcaaccccgtgatgacctggcctattcggccaatttcctttacatgctcatggagcgtgagcctgaccctctggcgtcgagaatctttgatcgctgtctgatcctgcatgcggaacacagcctgaatgccagcacgttcagcgcgagggtgacagccagcacgttgaccgatccttacgccgtggtcgcttccgctgtgggaaccctggccggtcccctgcatggaggagccaatgaagatgtgctcgccatgttggatgagatcgggacagccgatcgtgccgccgattacctcgatgcggccatcgcaagcaaacgcaaagtgatgggtttcggccatcgggagtaccgggtgaaagacccccgtgctgtgattcttcaggcactggccgaagagctgtttgcccgcttcggccacgacgagatgtacgacgtggcccgtgctctggaggccgctgccgagcgtcgcctcgggccgaaagggattttccccaatgtggacttctactcgggcttggtgtaccgcaagctcggcattccaagggatctgttcacgcccgtgttcgccatcgccagggtggcgggatggcttgcccactggcgggagcaactgggcgccaaccgcattttccggccctctcagatctacacgggctgttcgatgcgtcagtggagcccgctggaagaccggcttccctccgcaagcacctaa

SEQ ID NO: 123661 - protein, 396 aa, Synechococcus sp. WH 7803
MSPTEGGEIRHERTGLVFRPGLEGVPATQSSICDIDGQKGLLSYRGYPVDVLASHCSFLETTYLLIWGELPNPQQLRDFEQEVQMHRRVSFRVRDMMKCFPSDGHPMDALQSSAASLGLFYSRRAIDDPQYIYDAVVRLIAKIPTMVAAFQLIRKGQDPIQPRDDLAYSANFLYMLMEREPDPLASRIFDRCLILHAEHSLNASTFSARVTASTLTDPYAVVASAVGTLAGPLHGGANEDVLAMLDEIGTADRAADYLDAAIASKRKVMGFGHREYRVKDPRAVILQALAEELFARFGHDEMYDVARALEAAAERRLGPKGIFPNVDFYSGLVYRKLGIPRDLFTPVFAIARVAGWLAHWREQLGANRIFRPSQIYTGCSMRQWSPLEDRLPSAST

SEQ ID NO: 123662 - DNA, 1134 bp, Thermus thermophilus HB27
  CDS (1)..(1134): transl_table=11
atggaagtggcacgcggtctggaaggcgttctcttcacggaaagccggatgtgctacattgacggccagcaggggaagctctactactacggcatccccatccaggagctggcggagaagagcagctttgaggaaaccaccttcctcctcctccacgggagactgccgcgaaggcaggagctggaggagttctcggccgccctcgcccggcgccgcgccctgcccgcccaccttctggagtccttcaagcgctaccccgtctccgcccaccccatgagcttcctgcgcacggcggtctccgagctcgggatgctggaccccaccgagggggacatctcccgggaggccctctacgagaaggggcttgacctcatcgccaagttcgccaccatcgtggccgccaacaagcgcctcaaggagggcaaggagcccatccctccccgggaggacctctcccacgccgccaacttcctctacatggcgaacggggtggagccctcccccgagcaggcccgcctcatggacgcggccctcatcctccacgccgagcacggcttcaacgccagcaccttcaccgccatcgccgccttctccacggagaccgacctctactcggccatcaccgccgccgtggcctccctgaaggggccgcgccacggcggggccaacgaggccgtgatgcgcatgatccaggagatcggcacccccgagcgggcccgggagtgggtgcgggagaagctggccaagaaggagcgcatcatgggcatgggccaccgggtctacaaggcctttgaccccagggccggggtcctggaaaagctcgcccggttggtggcggagaagcacggccactccaaggagtaccagatcctgaagatcgtggaggaggaggcggggaaggtcctgaaccccaggggcatctaccccaacgtggacttctactccggggtggtctactccgacctgggcttcagcctggagttcttcacccccatcttcgccgtggcccggatctcgggctgggtggggcacatcctggagtaccaggagctggacaaccgcctcctccgccccggggccaagtacatcggggagctggacgtgccctacgtccccctcgaggcccgggagtag

SEQ ID NO: 123663 - protein, 377 aa, Thermus thermophilus HB27
MEVARGLEGVLFTESRMCYIDGQQGKLYYYGIPIQELAEKSSFEETTFLLLHGRLPRRQELEEFSAALARRRALPAHLLESFKRYPVSAHPMSFLRTAVSELGMLDPTEGDISREALYEKGLDLIAKFATIVAANKRLKEGKEPIPPREDLSHAANFLYMANGVEPSPEQARLMDAALILHAEHGFNASTFTAIAAFSTETDLYSAITAAVASLKGPRHGGANEAVMRMIQEIGTPERAREWVREKLAKKERIMGMGHRVYKAFDPRAGVLEKLARLVAEKHGHSKEYQILKIVEEEAGKVLNPRGIYPNVDFYSGVVYSDLGFSLEFFTPIFAVARISGWVGHILEYQELDNRLLRPGAKYIGELDVPYVPLEARE

SEQ ID NO: 123664 - DNA, 1122 bp, Picrophilus torridus DSM 9790
  CDS (1)..(1122): transl_table=11
atgagtataagtcttggtcttgaggacgttttcataaagtacacatcattaacatcgatagatggtgaaaagggggagctcaggtacaggggttatgatataaaagatctcgttgaacactgctcctttgaggaggttgcctatctaatgttttacggcgagcttccaaaaagagacgagctagaacactttaaaagcaatgtaatgaagaattataaaattcctgaaaatgtaaaaaacatcataaaaaacatgccaagggatggcgatgcccttgcaatcatggaggcagccttcgccgcattgagcaccgaggaatacacatgggaaaaggaaagggatcgtgaaaaggccgcagagattatgggccgcgcccttggaattgtctcggctgtctttaggtacagggacggaagggaaataaaggatcctgagaataagggttatgccgaggcatttcttaatgcatgctttgattcaggcatagatgaggataaaataaaggcaatgaacgcggcattgatactttacatagatcatgaggtaccggcatcaaccacggcagcacttgttgcatcatcaacgttatctgatatgtactcatgtgttacagcagcaatagctgcactgaagggaccgcttcacggaggggcggcagaggctgcctataagcagttccttgcaataaaatctcctgaaaacgttgattcatggttcaatgaaaatatattaaacaataaaaagagattaatgggctttggccacagggtttataaaacatacgatccaaggatgttaatcttcaaggagcttgcaaggaaaaatgcaaaaaccgatgaacagaaaaaaatacttgagcttgcagagaggcttgaggctctgggcgttaagaactttggccagaaaaagatctttccaaacactgattactattcaggcatagtctttaatgagataggctttccattatacatgttcacaacgctcttcgcactttcaagggttgttggctgggttgcacacatatcagagtacgttgagagcgaggagagattaataaggccaagggcaatatatataggacctgagaagagagatgttgtaccaatagataaaagataa

SEQ ID NO: 123665 - protein, 373 aa, Picrophilus torridus DSM 9790
MSISLGLEDVFIKYTSLTSIDGEKGELRYRGYDIKDLVEHCSFEEVAYLMFYGELPKRDELEHFKSNVMKNYKIPENVKNIIKNMPRDGDALAIMEAAFAALSTEEYTWEKERDREKAAEIMGRALGIVSAVFRYRDGREIKDPENKGYAEAFLNACFDSGIDEDKIKAMNAALILYIDHEVPASTTAALVASSTLSDMYSCVTAAIAALKGPLHGGAAEAAYKQFLAIKSPENVDSWFNENILNNKKRLMGFGHRVYKTYDPRMLIFKELARKNAKTDEQKKILELAERLEALGVKNFGQKKIFPNTDYYSGIVFNEIGFPLYMFTTLFALSRVVGWVAHISEYVESEERLIRPRAIYIGPEKRDVVPIDKR

SEQ ID NO: 123666 - DNA, 1122 bp, Staphylococcus aureus subsp. aureus MRSA252
  CDS (1)..(1122): transl_table=11
atggcagaattacaaagaggtttagaaggggttatcgcagcggagactaaaataagttcaattattgaaagtcaattgacttatgccggctatgatattgatgatctagctgaaaatgcgcaatttgaagaagttattttcctattatggaactatagattgccaaatgaagaagagcttgctcatttaaaggggaaattaaatcaatacatgacattaaatcctcgtgtgtatacacattttgaggagtatgttacagatcacgtgcatccaatgacagcattacgtacgtcattatcatatattgcacatttcgatcctgatgctgaaaatgaatcagatgaaaatcgttatgaaagagcaatgcgtatacaggctaaagtagcatcattagttacagcgtttgctcgagtaagacaagataaagaaccaattaagcctaatcctgacttaagttatgcagcaaacttcctatatatgttacgtggggaattaccaacagatatagaagtggaagccttcaataaagcgcttattttacacgctgatcatgagttgaacgcatctgcatttacagcacgttgtgcggtatcttcattgtcagatatgtactcaggtattgtagcagctgtaggttctctgaaagggccattacatggtggtgcaaatgaacaagttatgacgatgttatctgagattgggtcaattgaaaatgttgatgcttacttagatgaaaaatttgctaataaagataaagtaatgggcttcggtcatcgtgtatataaagatggtgatcctagagcgaaatatttaagagaaatgagccgtcaaattacgaaagacgctggtcgtgaagaattatttgaaatgtcagtgaaaatggaaaaacgcatggcagaagaaaaaggattaattccaaatgttgatttttatagtgcgagtgtttatcactgtatggaaatacctcatgacttattcacgccaatctttgctgtaagtcgttctgcaggatggattgctcatattttagaacaatataaagataatagaattatgcgtcctagagcaaaatatattggcgaaacgaatcgtaagtatattccgcttgaagaaagaaaataa

SEQ ID NO: 123667 - protein, 373 aa, Staphylococcus aureus subsp. aureus MRSA252
MAELQRGLEGVIAAETKISSIIESQLTYAGYDIDDLAENAQFEEVIFLLWNYRLPNEEELAHLKGKLNQYMTLNPRVYTHFEEYVTDHVHPMTALRTSLSYIAHFDPDAENESDENRYERAMRIQAKVASLVTAFARVRQDKEPIKPNPDLSYAANFLYMLRGELPTDIEVEAFNKALILHADHELNASAFTARCAVSSLSDMYSGIVAAVGSLKGPLHGGANEQVMTMLSEIGSIENVDAYLDEKFANKDKVMGFGHRVYKDGDPRAKYLREMSRQITKDAGREELFEMSVKMEKRMAEEKGLIPNVDFYSASVYHCMEIPHDLFTPIFAVSRSAGWIAHILEQYKDNRIMRPRAKYIGETNRKYIPLEERK

SEQ ID NO: 123668 - DNA, 1275 bp, Acinetobacter sp. ADP1
  CDS (1)..(1275): transl_table=11
atgtctgaagcaactggcaagaaagccgtattaaagcttgatggcaaagaaattgaattaccaatttacagcggcacattgggcccagatgtaattgacgttaaggatgtattggctgcaggtcattttacttttgatcctggtttcatggcgaccgcttcatgtgaatcgaagattacattcattgacggaaacgaaggtgtgttattacaccgcggttacccaattgatcagcttgcaactcaagcagattatttggaaacttgctatttgttattaaatggtgaacttcctacgccagagcaaaaacaagaatttgatgctaaagttcgtaaccacaccatggttcacgatcaagttagccgtttcttcaatggtttccgtcgtgatgcgcaccctatggcaatcatggtgggtgtagtcggtgctttatctgcgttttatcacaaccagttaaacattgaagatgtcaatcatcgtgaaattactgcaattcgtttgattgcaaaaattccaacgcttgctgcttggagttataaatacactgtcggccaaccgttcatttaccctcgtaatgatcttggttatgcagaaaacttcctgcacatgatgtttgcaaccccagcagaccgtgattacaaagttaatccaattcttgctaaggcaatggatcgtattttcacgcttcatgcagatcatgaacaaaatgcttcaacatctacagtccgtttggctggttcaaccggtgcgaatccgtatgcgtgtatcgcagcaggtatttctgcactttggggccctgctcatggtggtgcaaacgaagctgttctgaaaatgcttgatgaaattggcactgttgagaacgttgctggtttcatggaaaaagtgaaaaccaaagaagttaaactcatgggctttggtcaccgtgtgtataaaaacttcgatccacgcgcgaaagtcatgaaagaaacatgtgatgaagttcttgccgcactcggcattaacgatccacaacttgaacttgcgatggaacttgagcgcattgcgttgtctgatgaatacttcatcaagcgtaatttgtatccaaacgtagacttctattcaggtatcattcttaaagcgattggtattccaacagaaatgtttacagtgatctttgcacttgcacgtactgtgggctggatcagccactggttagaaatgcacagtgctccgtacaaaattggtcgtcctcgtcagctttacactggcgaaaccaaacgcgacattaaacgttaa

SEQ ID NO: 123669 - protein, 424 aa, Acinetobacter sp. ADP1
MSEATGKKAVLKLDGKEIELPIYSGTLGPDVIDVKDVLAAGHFTFDPGFMATASCESKITFIDGNEGVLLHRGYPIDQLATQADYLETCYLLLNGELPTPEQKQEFDAKVRNHTMVHDQVSRFFNGFRRDAHPMAIMVGVVGALSAFYHNQLNIEDVNHREITAIRLIAKIPTLAAWSYKYTVGQPFIYPRNDLGYAENFLHMMFATPADRDYKVNPILAKAMDRIFTLHADHEQNASTSTVRLAGSTGANPYACIAAGISALWGPAHGGANEAVLKMLDEIGTVENVAGFMEKVKTKEVKLMGFGHRVYKNFDPRAKVMKETCDEVLAALGINDPQLELAMELERIALSDEYFIKRNLYPNVDFYSGIILKAIGIPTEMFTVIFALARTVGWISHWLEMHSAPYKIGRPRQLYTGETKRDIKR

SEQ ID NO: 123670 - DNA, 1287 bp, Erwinia carotovora subsp. atroseptica SCRI1043
  CDS (1)..(1287): transl_table=11
atggctgataaaaaagcaacacttactctagagggtaaagatccaattgagctaaatgtcctatctggcacattggggtatgatgagattgatattcgtcccctcggttctaaaggttacttcacatttgaccccggctttacctcaaccgcatcttgcgaatccaagattacctatatcgacggcgacgaaggcatcctactgcaccgtggcttcccaattgcccaactggctgaaaaatctaattatcttgaagtttgttacatcctgctgttcggcgagcccccgacggcagaacaatatgaaacctttaagacaaccgttactcgccacacgatgatccatgagcagattacccgtctgttccacggtttccgtcgtgattcacatccaatggccgtcttatgtggcgtcaccggtgcactggcagcgttctaccacgattcattggacattagcattgagcgccaccgcgaaattgcggcctaccgcctgctgtccaaaatgccaaccgttgcggcgatgtgctacaaatattcactgggccagccgtttgtttatccgaaaaacaacctgtcctacgcgggtaatttcctgcatatgatgttctccactccttgtgaagaatatgttgtgaatccggtgctagaacgggcgatggaccgtattctgatcctgcatgccgatcacgaacaaaacgcctcgacttctaccgtgcgtaccgcgggttcgtctggtgcaaacccgtttgcctgtatcgccgcggggatcgcctcgctgtggggaccggcacacggcggcgcgaacgaagcctgtctacgtatgctggaagaaatcagcagcgtggaacacatcccggcgtttatcgagcgtgcaaaagacaagaacgactccttccgcctgatgggcttcggtcaccgtgtgtacaaaaaccacgatccgcgcgccacagtcatgcgtgaaacctgccatgaagtgctgaaagagctgggcagaaaagatgatctgctggaagtggcgatggagctagaacatatcgcgctgaacgacccgtacttcattgagaagaaactgtacccgaacgtggacttctactcaggtatcatcctgaaagcaatggggattccgtcttccatgtttaccgtcatcttcgcgatggcgcgtaccgtgggctggattgcgcactggagcgaaatgcacgccgacggcattaaaattgcccgtccacgtcagctgtacaccggctacgacaaacgtgactttgcgtccaatctgaaacacgattaa

SEQ ID NO: 123671 - protein, 428 aa, Erwinia carotovora subsp. atroseptica SCRI1043
MADKKATLTLEGKDPIELNVLSGTLGYDEIDIRPLGSKGYFTFDPGFTSTASCESKITYIDGDEGILLHRGFPIAQLAEKSNYLEVCYILLFGEPPTAEQYETFKTTVTRHTMIHEQITRLFHGFRRDSHPMAVLCGVTGALAAFYHDSLDISIERHREIAAYRLLSKMPTVAAMCYKYSLGQPFVYPKNNLSYAGNFLHMMFSTPCEEYVVNPVLERAMDRILILHADHEQNASTSTVRTAGSSGANPFACIAAGIASLWGPAHGGANEACLRMLEEISSVEHIPAFIERAKDKNDSFRLMGFGHRVYKNHDPRATVMRETCHEVLKELGRKDDLLEVAMELEHIALNDPYFIEKKLYPNVDFYSGIILKAMGIPSSMFTVIFAMARTVGWIAHWSEMHADGIKIARPRQLYTGYDKRDFASNLKHD

SEQ ID NO: 123672 - DNA, 1284 bp, Erwinia carotovora subsp. atroseptica SCRI1043
  CDS (1)..(1284): transl_table=11
atgacagtcagaacatccacgttgacggcagaagggcaggcgagtattgcgctggaaatgcgttccggcgtactggggaaaacggctgtggatattcgcccactcggcgagcatgggctatgcagctatgaccccggttttgctaacacggcagggtgtgagtcggcgattacctacattgatgcagcgaatagcgtgttgctgcatcggggcttccctgtcgaacagcttgccgagcagtgcgactttactgaggtttgttacattctgctgcacggcgacgccccttcaccggaggcgtatgcgaaatttgctgacaacattacccgacatacgctggttcatgagcagattacccggatgttcagcggttttcgtcgcgattcccacccaatggcgctgatgtgcgcggtggtcggtgcgctggccgcgttctatcacgatgtcttggatatcaataacgcggaacaccgcgagctggcggcggtacggctgctgtcgaaaatgccgacgctggcggcgatgtgctacaaatactccgtcgaacagccgtctgtgtatccccgaaattctctctcctataccggcaacttcctacacatgctgttttcgattccggcagagaagtatgaagttaatccggtgttggaacgggcgatgaaccgcatcctgattctgcatgccgatcatggtcaatgcccatcaaccatggcggtcagagcgtctggttcttccggcgcgaacccgtttgcctgtattgcggctgggctggcgtcgatgtgggggccgttgcacggtggggcgaatgaagcctgcatgcgcatgctggaagagattaaaacggtcgaccgcgttcctgaatttgtacggcgtgcgaaagaccgctgtgattcattccgcctgatggggtttggtaactctgtctaccagcatttcgatccacgtgcggcgattctgcgtaaaacctgttacgaggtgctcaacgaattaggcatggaggacagcctgttgcaggtggcgatggagctggaacatatcgctatgaccgatgcctattttctggagaataaactctaccctagtgtcgatttctatacctccgtcattctgaaagcgatggggctgccgtcatcaatgtttaccgtcatctctaccgtcggcaggacgattggctggattgcgcattgggatgaaatgcacaaacagcaggaaatcagcatctatcgcccacggcaaatttataccgggcagccgcagcgggactatgtttctctgaagggataa

SEQ ID NO: 123673 - protein, 427 aa, Erwinia carotovora subsp. atroseptica SCRI1043
MTVRTSTLTAEGQASIALEMRSGVLGKTAVDIRPLGEHGLCSYDPGFANTAGCESAITYIDAANSVLLHRGFPVEQLAEQCDFTEVCYILLHGDAPSPEAYAKFADNITRHTLVHEQITRMFSGFRRDSHPMALMCAVVGALAAFYHDVLDINNAEHRELAAVRLLSKMPTLAAMCYKYSVEQPSVYPRNSLSYTGNFLHMLFSIPAEKYEVNPVLERAMNRILILHADHGQCPSTMAVRASGSSGANPFACIAAGLASMWGPLHGGANEACMRMLEEIKTVDRVPEFVRRAKDRCDSFRLMGFGNSVYQHFDPRAAILRKTCYEVLNELGMEDSLLQVAMELEHIAMTDAYFLENKLYPSVDFYTSVILKAMGLPSSMFTVISTVGRTIGWIAHWDEMHKQQEISIYRPRQIYTGQPQRDYVSLKG

SEQ ID NO: 123674 - DNA, 1311 bp, Propionibacterium acnes KPA171202
  CDS (1)..(1311): transl_table=11
atgatgagtgtcccaaataagaagccggagggcggaccaacggcaacccttatcctggacggccaggaatacactttgcccgttatcgcaggaaccaccggcgatcgagtcatcgacatttctaaccttcgtcaactaaccggcggggtgacaaccttcgacccggcattcgccaatactgcgtcctgccgctcggcgatctcgtggatcgacggcgaagaaggcgtgctcacctatcgtggcctacccatcgagaccttagctaaggagcgcgtctcctttgtggagaccgcctggctgctgatcttcggtcacctgcccactgaggctcaacgcgacgacttccggaatcgcttgaccgagtattcggcattacaccggtcgatgaaccttcacttcaatgccttcccacctaacggccacccgatggcgatcatgtcctcgatgatcaacgcgatgagcacccacgaccgtccgagaatcactgatgaggagtccttcaccgacgcggctgccaagctcatgtccaaggtgaggacgatcgcggctgcttcttataaggcgtctattggggagccagcgatttacccgcgctatgacctcaaatatgtcgaaaatttcatgcacatgatgttttctctgccgtaccgcgcctacgagccggatccggtggcggcaagagccctcaacctgttcttcgtgctacacgctgatcacggccagaactgttcgacctcgacagtgcggatggttgggtcctcgggtgccaaccttttcacgtcgtgttcagccggagtgtgcgctctgtggggagaccgccacggtggcgccaacgtcaacgctgtgctcgccttacaacgtatccgcaattctggactcaccccacgtcaatacctggcgaaggccaaagattcgggggagaggatttctggcttcgggcatcgcgtctaccgcaattgggacccccgagcgagaatcttccgcagtgtcgtcggtccgctgctcgacaccatgcacaaaccggatccgctgctcgacgttgccatggagctggaggaagctgtgctggccgacgactacttcatcgagcgcaggctgtaccccaacgtggacttctattccgggatcgttttacgcgcgctcggcatcccgctgaacatgttcactgtcatgttcgctatcgggcggatggctggttggatcgcccactggaaggaggtttttgaggatccgacaacgaggatttcccgtcctcgcgagctttacgatggtccggtatcgactccgtgggtgccacgcggcgagcgctga

SEQ ID NO: 123675 - protein, 436 aa, Propionibacterium acnes KPA171202
MMSVPNKKPEGGPTATLILDGQEYTLPVIAGTTGDRVIDISNLRQLTGGVTTFDPAFANTASCRSAISWIDGEEGVLTYRGLPIETLAKERVSFVETAWLLIFGHLPTEAQRDDFRNRLTEYSALHRSMNLHFNAFPPNGHPMAIMSSMINAMSTHDRPRITDEESFTDAAAKLMSKVRTIAAASYKASIGEPAIYPRYDLKYVENFMHMMFSLPYRAYEPDPVAARALNLFFVLHADHGQNCSTSTVRMVGSSGANLFTSCSAGVCALWGDRHGGANVNAVLALQRIRNSGLTPRQYLAKAKDSGERISGFGHRVYRNWDPRARIFRSVVGPLLDTMHKPDPLLDVAMELEEAVLADDYFIERRLYPNVDFYSGIVLRALGIPLNMFTVMFAIGRMAGWIAHWKEVFEDPTTRISRPRELYDGPVSTPWVPRGER

SEQ ID NO: 123676 - DNA, 1287 bp, Propionibacterium acnes KPA171202
  CDS (1)..(1287): transl_table=11
atgggttcgagtgcaaggttcgtcgacgaagacactcacctcgatttcagcaaggttgtcgctactgacggccaggtgggttacgacgtcgcgggtctgctcaacaagaccggcaacgtcatgatcgacccgggattcgtcaacacggcatcctgcgagtcacagatcacctacattgacggtgagcagggagttttgcgttaccgcggctacccgattgagcagctcgctgaacagtcgaccttccttgagaccgcctaccttgtcctctatggggaactgccaagcaaggcccaattggacggcttcgaggagcgtattcgtcgcactaccctcatcgacgagcggatgcgtgacctcttccgatgcttcccccgtcggtcccacccgatgcctgtgttggctgcgggcatcatggccctgtcgaccttctcacagaaatcctccggcactgatcccgaccaaatcgaggcggccaccactcgcctcatcgccaaggtccccaccctggccgccttcggctacaagaactcgatgggccagccgaccctctaccccgataactccctgagctacgtccagaacttcatccggatgagcttcggcttcccgactgaaccctacgagttcaatgacgaaatcacccgcgctctggaaaccctgctcatcctgcacgttgatcacgagcagaactgttcaacctcgacggtccgtatggtcgcgtcgtcgggtgccaacatgtacgcggcggttgccgcaggcgtcaacgccctgtccggcccgaagcacggtggcgcaaaccaggccgtcctcgaaatgctgcaatttattcgcgactccggcatgaccactaaggagttcgtccgtaaggtcaaggacaaagaatccgacatcaagctgatgggctttggccaccggatctacaagaactacgatccacgcgccgccatcatcaagaaacatgccgaccgcattatggaactccataccggtcgtgaggaccttctcgagatcgccaaggaacttgaagagaccgcgctaaacgatgactacttcaaggagcgcaagctctacccgaacgttgatttctataccggcctcatctacgaggccatgggcttcccgatgaatatgttcaccgtgctgttcgcactgggacgtctgcccgggtggatcgcccagtaccgagagcaagttgccagcggaggcaacaagatttggcgtccgcgtcagatcttcaccgggtctgacaagcgagattacgtaccactcaacaagcgtgcctga

SEQ ID NO: 123677 - protein, 428 aa, Propionibacterium acnes KPA171202
MGSSARFVDEDTHLDFSKVVATDGQVGYDVAGLLNKTGNVMIDPGFVNTASCESQITYIDGEQGVLRYRGYPIEQLAEQSTFLETAYLVLYGELPSKAQLDGFEERIRRTTLIDERMRDLFRCFPRRSHPMPVLAAGIMALSTFSQKSSGTDPDQIEAATTRLIAKVPTLAAFGYKNSMGQPTLYPDNSLSYVQNFIRMSFGFPTEPYEFNDEITRALETLLILHVDHEQNCSTSTVRMVASSGANMYAAVAAGVNALSGPKHGGANQAVLEMLQFIRDSGMTTKEFVRKVKDKESDIKLMGFGHRIYKNYDPRAAIIKKHADRIMELHTGREDLLEIAKELEETALNDDYFKERKLYPNVDFYTGLIYEAMGFPMNMFTVLFALGRLPGWIAQYREQVASGGNKIWRPRQIFTGSDKRDYVPLNKRA

SEQ ID NO: 123678 - DNA, 1278 bp, Leifsonia xyli subsp. xyli str. CTCB07
  CDS (1)..(1278): transl_table=11
atgccgaccgcgtccctgacctacccgggcggtgtggccgagttcccgatgctgccgagcagtcagggacccggcagcatcgacctctccagcttcacccgccagaccgggctgaccagtctggactacggctttgtcaacaccgccgccactcgctcctcgatcacttacatcgacggcgacgccgggattctgcgctaccgcggttacccgatcgagcagctggccgggaactccaccttcctcgaggtggcttggttgctcatccacggtgagctgcccagtgcctcggagctcgcggacttcgacgcgcgcatccgtcgtcacacgctcctccacgaggatctgcgccgcttcttcagcgcgctcccgcacgacgcgcacccgatgtcggtgctctccagcgcggtctccgcgctgtcgaccttctaccaggactcgctgagcgtccacgacccggagcaggtggagctctccaccgtccgcctcctggcgaaattgccggtcatcgcggcctacgcccacaagaagagcattggtcaggcgttcctctacccggacaattcgctgagcttcgtggacaacttcctccgcctcaacttcggtacgctggccgagccgtacgaggtggacccggtgctctcccgtgcgctggagcgtctgctcatcctgcacgaggaccacgagcagaacgcctccacgtcgacggtccgcctcgtcggctcgacccaggccaatctgttcgcctcggtctccgccggcatcaacgccctctacggtccgcttcacggcggcgccaatgaggctgtgctgcagatgctcgccggcatccgcgactcgggcgagggcgttcagaagttcgtcgagcgtgtcaagaacaaggagtccggcgtcaagctcatgggcttcggccaccgcgtctacaagaacttcgacccccgggccaggctcgtcaagcagtccgcggacgaggttctctccgctctgggcgtccacgacccgcttctcgacatcgccaaggagctcgaggaagtcgctctcgccgaccagtatttcatagaccgcaagctctacccgaatgtggacttctacaccggcgtcatctacaaggcgatgggcttcccgactcggatgttcacggtgctcttcgccatcggccgcctccccggctggatcgcccactggcgtgagatgatgctcgacccgggcaccaagatcggccgcccccagcagctttacgtgggttcccccgaacgcagctggccgtcctcccgctga

SEQ ID NO: 123679 - protein, 425 aa, Leifsonia xyli subsp. xyli str. CTCB07
MPTASLTYPGGVAEFPMLPSSQGPGSIDLSSFTRQTGLTSLDYGFVNTAATRSSITYIDGDAGILRYRGYPIEQLAGNSTFLEVAWLLIHGELPSASELADFDARIRRHTLLHEDLRRFFSALPHDAHPMSVLSSAVSALSTFYQDSLSVHDPEQVELSTVRLLAKLPVIAAYAHKKSIGQAFLYPDNSLSFVDNFLRLNFGTLAEPYEVDPVLSRALERLLILHEDHEQNASTSTVRLVGSTQANLFASVSAGINALYGPLHGGANEAVLQMLAGIRDSGEGVQKFVERVKNKESGVKLMGFGHRVYKNFDPRARLVKQSADEVLSALGVHDPLLDIAKELEEVALADQYFIDRKLYPNVDFYTGVIYKAMGFPTRMFTVLFAIGRLPGWIAHWREMMLDPGTKIGRPQQLYVGSPERSWPSSR

SEQ ID NO: 123680 - DNA, 1287 bp, Desulfotalea psychrophila LSv54
  CDS (1)..(1287): transl_table=11
atgagtgaaaaagcaaccctgactgttggcggtgcaagttatgaacttgatgttaccagtggaacggaggatgagaggtgtattgatattcaatcgttacgtgctaaatcgggctatatcaccatggatccaggctttggcagtactggtgcctgcttctctgatatcacatatgttgatggtgagagaggaatcctgcgttatcgtggctaccctattgagcagatagcggagagggcaagttttgtggagacatgctcgctgattatctatggtgaacttcccgatgcagaaaccctgaacaggtttcgcagggccctggcagaacatgcgccactgcacacaagcctctatcactacttttccggatttcccgaatcgtcgcctcccatggcgattctctcggcaatgcttaacctggtctcctgtttccaccccggtgttctggaggtacactcagaggggcatggctttgatcgaactgccgccctcctcctgtccaaggttcgaaccatagcagcctggtcctatcggatgtctgtcggcaaaccctttaatcagccaaacccccatctcacttactgtgcaaattttctgcatatgatgttttccgagccctttcaagaatatatccccagtccagctgtcgaaagggctttggcacttttcctgatactccatgccgatcatgagcagaactgctcgacctcaacggtgagaacagtggccagttccagggcgaacctgtttagttccgtcgcctcaggggtatgtgccctttggggacccctgcatggtggtgccaatgcagccgtgatagagatgctggaagagattatggcctcgggccggaagattgactattatatcaacagggcaaaggataaaagtaacgattacaaactgatgggctttggccatcgggtctataaaaattttgatccccgggccagcatcctcaagaagagggtttatgaggtacttgcagagctgcacaaatccgatcctctgcttgatattgccctggagcttgaggagaaaaccctgaaagatgagtactttatcagtcgtaaactctaccctaatgtcgatttctatagcggcattcttctcagggcaataggaattcctccggagatgtacacggtgatgtttgccattggtagaatgcccggctggatagcaaattggcgggaactgcatgaccagaacctccgtattacccggccacgtcaggtctatacggggaggcaggagagatcctttgtcccccttgaagagaggtaa

SEQ ID NO: 123681 - protein, 428 aa, Desulfotalea psychrophila LSv54
MSEKATLTVGGASYELDVTSGTEDERCIDIQSLRAKSGYITMDPGFGSTGACFSDITYVDGERGILRYRGYPIEQIAERASFVETCSLIIYGELPDAETLNRFRRALAEHAPLHTSLYHYFSGFPESSPPMAILSAMLNLVSCFHPGVLEVHSEGHGFDRTAALLLSKVRTIAAWSYRMSVGKPFNQPNPHLTYCANFLHMMFSEPFQEYIPSPAVERALALFLILHADHEQNCSTSTVRTVASSRANLFSSVASGVCALWGPLHGGANAAVIEMLEEIMASGRKIDYYINRAKDKSNDYKLMGFGHRVYKNFDPRASILKKRVYEVLAELHKSDPLLDIALELEEKTLKDEYFISRKLYPNVDFYSGILLRAIGIPPEMYTVMFAIGRMPGWIANWRELHDQNLRITRPRQVYTGRQERSFVPLEER

SEQ ID NO: 123682 - DNA, 1293 bp, Desulfotalea psychrophila LSv54
  CDS (1)..(1293): transl_table=11
atgtccgaaaaatttgcaacactcagcctcgacggcaaacaatactcactccccatcatcgaatcaaccaccggcgagaaagccattgatatccgatcgctgctcaaggatacggggcatataacccttgataggggctttatgaacaccgcatcctgcttcagcagcattacctaccttgatggagacaagggcattctcaactaccgaggatactccattgaagacctcgccgccaactgcagctttgtcgaggtctcctatctcattctccacggtgagttgccaaattaccaggagcttgaacactttcgccacgacatgaaccgttttgccctgctccacgaagatatgatccacttctttgatcactttccgccaaacgcctcccccatgtccatcctctccaccaccatcaactccctgcataatttttaccctgagatgaccgccaaaactgatccctacgggggcatcagcgtcaccaccgcccgactcctggccaaggttcgaaccatcgccgccttctcctataagaagagtaatggctacccccttgtctaccccagtcacaagttaaattactgtgaaaatttcctcaatatgatgtttgatcgtcccaatataccctacgagatcaaaccagaggtaaccgctgccctcaacaaactactcatcctccatgcggaccatgagcagaactgctcaaccagcaccgttcgactggtgggaagcgctcaggtaaatctctatgcatcaatttcggcaggagtaagtgccctttggggacctcttcatggaggagccaaccaggcagtcattgaaatgctcgaagagattcatgagagtggcgatgactataactactatatagaaaaggcaaaggacaagaacgaccccttccgactagcaggctttggtcaccgcgtctacaagacctttgaccctcgcgcccggataataaaggaggcctgccacgagatgctggcaagcatgaatgtccatgaccctctgttggatatagcctttgaattggaagagagggtgctcagagacgactactttatcagccgcaacctctatcccaatgtcgatttttatagcggcattatctaccgggcaatgggaattcccaccgatatgtttaccgtcatgttcgcactcggacgactaccgggatggattgcccaatggacagagatgcacgcagacccgaataccaagataggtcgacctcgccaaatatacacaggatacaagcaacgtgcttttgtacccatgtacgaaagataa

SEQ ID NO: 123683 - protein, 430 aa, Desulfotalea psychrophila LSv54
MSEKFATLSLDGKQYSLPIIESTTGEKAIDIRSLLKDTGHITLDRGFMNTASCFSSITYLDGDKGILNYRGYSIEDLAANCSFVEVSYLILHGELPNYQELEHFRHDMNRFALLHEDMIHFFDHFPPNASPMSILSTTINSLHNFYPEMTAKTDPYGGISVTTARLLAKVRTIAAFSYKKSNGYPLVYPSHKLNYCENFLNMMFDRPNIPYEIKPEVTAALNKLLILHADHEQNCSTSTVRLVGSAQVNLYASISAGVSALWGPLHGGANQAVIEMLEEIHESGDDYNYYIEKAKDKNDPFRLAGFGHRVYKTFDPRARIIKEACHEMLASMNVHDPLLDIAFELEERVLRDDYFISRNLYPNVDFYSGIIYRAMGIPTDMFTVMFALGRLPGWIAQWTEMHADPNTKIGRPRQIYTGYKQRAFVPMYER

SEQ ID NO: 123684 - DNA, 1284 bp, Mannheimia succiniciproducens MBEL55E
  CDS (1)..(1284): transl_table=11
atggccgacaaaaaagcaacactgacggtggatggaaaaaattatgaatttgatattgttaaaggttcattaggatatgaatccattgatattcacggtttaagccaaaacaaactttttatgtacgacccgggacttgtttcgactgccgtatgtgaatccgctatcacttatgtggacggcgatgaggggatgctgctttatcgtggttatcctatcgatcagctagcctctaacgccgattatcttgaagtcagttatttattactgtttggtgaacgacctaccaagcagcaatatcaggatttttccaaattggttaaacgtcacactctggtgcacgaacaattgaccaaattcttccaaggattccgtcgagattcacatccgatggcggtaatgtgcggggtaagcggcgcattggcggcattctatcacgattctattgatgttaaaaaagaagaacaccgggaattgacggcaattcgtttattggcaaaaattccgaccctggcggcgatgtgttataaatattcaatcggtcagccgtttatgttcccgcaaaataacctgtcttatgcgggaaactttctgtatatgatgtttgccaccccttgcgagccttatgtggtgaatccggtattggaacgcgcattggataaaatctttattttgcacgcggatcacgagcaaaacgcctcaacttcaacggtgcggattgccgcatcttcaggcgctaacccgtttgcctgtatcgccgccggtatcgcttcgctttgggggccgtctcatggcggcgctaacgaagcctgtattaatatgctggaagaaataggtacggtggatagaattccggaatttattgcccgggcaaaagataaaaacgacccgttccgcttaatgggctttggtcaccgcgtatataaaaactacgatccgcgagcgaaagtcatgcgtgaaacctgccatgaagtattgaaagaactgaatattaaaaatccgttgttcgatgttgccagcgagttggaacgcattgctttaagcgatccgtattttatcgatcataaattgtatcctaatgtggatttttattccggtatcgtcttaaaagccatcggtattccgacttccatgtttaccgtgatgttcgccttggcgagaactgtgggttggattgctcactggaaagaaatgtataaacaaggaaactttaaaattgcccgccctcgtcaaatttacacgggttacacggaacgcgattttcctgcgattgataaggattaa

SEQ ID NO: 123685 - protein, 427 aa, Mannheimia succiniciproducens MBEL55E
MADKKATLTVDGKNYEFDIVKGSLGYESIDIHGLSQNKLFMYDPGLVSTAVCESAITYVDGDEGMLLYRGYPIDQLASNADYLEVSYLLLFGERPTKQQYQDFSKLVKRHTLVHEQLTKFFQGFRRDSHPMAVMCGVSGALAAFYHDSIDVKKEEHRELTAIRLLAKIPTLAAMCYKYSIGQPFMFPQNNLSYAGNFLYMMFATPCEPYVVNPVLERALDKIFILHADHEQNASTSTVRIAASSGANPFACIAAGIASLWGPSHGGANEACINMLEEIGTVDRIPEFIARAKDKNDPFRLMGFGHRVYKNYDPRAKVMRETCHEVLKELNIKNPLFDVASELERIALSDPYFIDHKLYPNVDFYSGIVLKAIGIPTSMFTVMFALARTVGWIAHWKEMYKQGNFKIARPRQIYTGYTERDFPAIDKD

SEQ ID NO: 123686 - DNA, 1092 bp, Bacillus licheniformis ATCC 14580
  CDS (1)..(1092): transl_table=11
atggtttatcatgggttaaaagggattacttgtgttgaaacagccatcagccgcattgacggtgaaaaaggaaagctgatctacagagggtacaatgctgatgaactggcgctttcgtccacatttgaagaagtcgcttacctgattctcaacggggcatttccgacggaagctgaactcagcagattcaatgagctgctcgcttcatttcgtgtgcttccagaagcatgcgagcgattgatccgcagtcttccggccgaattagacgatatggcggttctgcgcacggccgtctcttcattcggggacatatcgtttgcgttcaagccgacaatggagcaggccctcaggctgattgcggccgtcccgtcaattatcgcgttcagaaagaggctggctgatggagaagagcctgttcagccgctggatgagctaggttttgtggaaaattatttttacatgctgaaaggaaagcgtccgacagaagctcagaaaaaagcgcttgaaacgtacatgattcttgcgatggaacatggcatgaacgcttcaaccttttcggcaagggttacggtgtctacggaatccgatcttgtttctgccgtcacatctgcacttggcacgatgaaaggacctttgcacggcggagcgccgtctgcggtgacggatatgctggaaggcatcggggaaaaacagcacgctgaaagctatataagagaaaagcttgaaaaaggcgagagactgatgggatttggacaccgcgtctataaaacgcatgatccgagagcgaaggctttaagggtgaaagccgaggaaattgccgggggcgacagggatatcgaccttgctcttcatgttgaaaatacggcgatccgccttttggaagaatacaagccgggccgcaagctttatacgaatgtcgaattttacgcagccgctgtgatgaaggcgatcgattttgatgccgcattgttcacccctactttttcggcagcgagaatggtcggctggtgcgcccatgtgcttgagcaggctgacaacaacatgattttcaggccatcggctaaatatgtcggagaattggtctcacagtaa

SEQ ID NO: 123687 - protein, 363 aa, Bacillus licheniformis ATCC 14580
MVYHGLKGITCVETAISRIDGEKGKLIYRGYNADELALSSTFEEVAYLILNGAFPTEAELSRFNELLASFRVLPEACERLIRSLPAELDDMAVLRTAVSSFGDISFAFKPTMEQALRLIAAVPSIIAFRKRLADGEEPVQPLDELGFVENYFYMLKGKRPTEAQKKALETYMILAMEHGMNASTFSARVTVSTESDLVSAVTSALGTMKGPLHGGAPSAVTDMLEGIGEKQHAESYIREKLEKGERLMGFGHRVYKTHDPRAKALRVKAEEIAGGDRDIDLALHVENTAIRLLEEYKPGRKLYTNVEFYAAAVMKAIDFDAALFTPTFSAARMVGWCAHVLEQADNNMIFRPSAKYVGELVSQ

SEQ ID NO: 123688 - DNA, 1119 bp, Bacillus licheniformis ATCC 14580
  CDS (1)..(1119): transl_table=11
atgacagcaacacgcggccttgaaggggtagtcgccactacatcatcagtaagttcaattattgatgatactcttacatatgtagggtataacatcgatgatttgacagaaaaagctagctttgaagaagttgtttatctgctttggcatttaaagctgccgaacaaagaggagcttgccgagcttaaaaaacagctttctgaaaatgccggtatccccaaagaagtcattgaccatttcaaatcctacccgaatggaaaagtccacccgatggcagctcttcggacagccgtttctttactcgggctgtttgacgaagaagcagatcaaatggatgcggaagcaaactacagaaaagcggtgcgtctccaagcgaagatgcctgcgcttgtcgctgctttttcaagaatccgcaaagggcttgagccgattgagccgaatccggaactcggctttgcagccaactttctctacatgctgaatggaaaagaaccttcacctgtcgaagtggaagcgtttgacaaagctttgatccttcatgcggatcatgagctgaacgcatctacgttcacagccagagtatgcgtcgcgacgctttcagacgtttactcagggataacggccgcaatcggagccttgaaaggtccgcttcacggcggagcaaacgaagcagttatgaaaatgctttcagagattggcgaggttgaaaacgtagattcatatattcacgccaagcttgaaaagaaagaaaagatcatggggttcggccaccgcgtataccgccagggcgatccccgcgcaaaacatttgaaggaaatgagcaggcgtttgacgaatttaacgggtgaaagcaaatggtatgagatttcagagcggactgaggaaatcgtcacgtctcagaaaaagctgccgccaaacgtagacttttattctgcgtcggtttatcatagcttaggaatcgaccatgatctgtttacgccgatttttgcgatcagcagggtatcaggctggctcgctcacattcttgaacagtatgaaaataaccgcctgattcgtccgcgggctgactacaccggccctgacatgcagaggttcattccgattgaagaaagaagctga

SEQ ID NO: 123689 - protein, 372 aa, Bacillus licheniformis ATCC 14580
MTATRGLEGVVATTSSVSSIIDDTLTYVGYNIDDLTEKASFEEVVYLLWHLKLPNKEELAELKKQLSENAGIPKEVIDHFKSYPNGKVHPMAALRTAVSLLGLFDEEADQMDAEANYRKAVRLQAKMPALVAAFSRIRKGLEPIEPNPELGFAANFLYMLNGKEPSPVEVEAFDKALILHADHELNASTFTARVCVATLSDVYSGITAAIGALKGPLHGGANEAVMKMLSEIGEVENVDSYIHAKLEKKEKIMGFGHRVYRQGDPRAKHLKEMSRRLTNLTGESKWYEISERTEEIVTSQKKLPPNVDFYSASVYHSLGIDHDLFTPIFAISRVSGWLAHILEQYENNRLIRPRADYTGPDMQRFIPIEERS

SEQ ID NO: 123690 - DNA, 1290 bp, Methylococcus capsulatus str. Bath
  CDS (1)..(1290): transl_table=11
atgtcgaattttgccaaacttgaactgaacgaaagcgtcgtggaagtcccggtgatcgagggcaccgagggagagaaagcgatcgacatcacgaagctgcgtgcccagaccggctatatcacgctcgatcccggctacggcaataccggctcctgtctgtcggccatcaccttcatcgacggcgagcaaggcatcctgcgctatcgtggcatcgacatcgccgaactctgcgagaagtcgaccttcgtcgaggtgagctatctcttgatctacggccagctgcccacggtggagcagtatgcaaggttcaaggagaagattcatcaccactcgctgatccatgaggacatgaagagcttcttcacctcgtatcccggccatgcccacccgatggcgatcctctcctccatggtctgctcgctctcggtctatcaccccgagttgctgaaaccggaccagaccatcgacgagcgcgacgaaaccatttcgaggctcctgtccaaggtgcgggtgctggccgccttcgcctacaagcgatcggtgggcgaggccttcgtttatacccggccggagctggattacatctccaatttcctgcatatgatgttcacccggccgatgcgcggctatgtaccggacgagctgatccgcaaggtgctggacgtgctgttcatcctccatgccgatcacgagcagaactgttccacctccacggtacgcatggtggggtcgtccaaggccaatctgttcgcggcgatctccgccggcatctgcgcgctgtgggggccgctccacggcggggccaaccaggccgtcatcgagatgctggaggaaatccaccgtgccggcggctgctacaagaaatacatcgaacgggccaaggacaagaacgatccgtaccggctgatgggattcggtcaccgggtatacaagagctacgacccccgtgcccagattctcaagaagtattgtgatgaagtgctcaattatttgggtatcgacgatcccatcctggaaatcgccaaggggttggaagaggtggcgctgaccgatccctatttcatcgaacgcaagctctatccgaacgtcgacttctattccggcatcatctaccgggcgttgaagatcccgaccaacatgttcacggtgatgttcgcgctcggccggctgccgggctggatcgcgcactggaaggagatgctggaggatccgggcatgcggatcgcccggccccgccagatctacatcggcgaaagacaacgtccctacgtgcccatcgcccagcgttga

SEQ ID NO: 123691 - protein, 429 aa, Methylococcus capsulatus str. Bath
MSNFAKLELNESVVEVPVIEGTEGEKAIDITKLRAQTGYITLDPGYGNTGSCLSAITFIDGEQGILRYRGIDIAELCEKSTFVEVSYLLIYGQLPTVEQYARFKEKIHHHSLIHEDMKSFFTSYPGHAHPMAILSSMVCSLSVYHPELLKPDQTIDERDETISRLLSKVRVLAAFAYKRSVGEAFVYTRPELDYISNFLHMMFTRPMRGYVPDELIRKVLDVLFILHADHEQNCSTSTVRMVGSSKANLFAAISAGICALWGPLHGGANQAVIEMLEEIHRAGGCYKKYIERAKDKNDPYRLMGFGHRVYKSYDPRAQILKKYCDEVLNYLGIDDPILEIAKGLEEVALTDPYFIERKLYPNVDFYSGIIYRALKIPTNMFTVMFALGRLPGWIAHWKEMLEDPGMRIARPRQIYIGERQRPYVPIAQR

SEQ ID NO: 123692 - DNA, 1296 bp, Azoarcus sp. EbN1
  CDS (1)..(1296): transl_table=11
atgagcactgaacgcactgcaacgctaaccgtcgatggcaagaccgtcgaattcccggtaatgaccggcacccatggcaatgacgtcatcgatattcgcacgctgggggccaagaccggtttcttcacttacgactcgggcttcctgtcgaccgcgagctgcaagtccacgattacgttcatcgacggtgacaagggtgaactgctctatcgcggttatcccatcgagcaactggccgacaagtgcagcttcctcgaagtcgcctatctgctgaagaacggcgagctcccgaacgggacgcagaaagtggagttcgagaacaccatcaagaaccacacgatgctgcacgaccagatgacgaagttcttcacgggcttccgtcgtgatgcgcatccgatggccgtgatggtcggcgtcgtcggcgcgctgtcggccttctatcatgaagcgatggatttctccgactccgagcaccgcaacatctcgatcaaccgcctgatcgcgaagctgccgacgatcgtcgcgatggcctacaagtacaacatgggccagccgttcatgtatccgcgcaacgagctcgactacacggcgaacttcatgcacatgatgttcggcacgccgtgcgaagagtacaagcccaatccggtgctggtgcgtgcgctcgacacgatcttcacgctgcacgccgatcacgagcagaacgcttcgacgtccaccgtgcggctcgcggggtcgtcgggtgcgaacccgttcgcgtgcatctcggccggcatcgcctgcctgtggggcccggcgcacggcggcgcgaacgaagcatgcctcaacatgctcgaggaaatcggcgacgtgtcgcgcgtcggcgaatacatcgcgcgtgcgaaggacaagaacgacagcttcaagctgatgggcttcggtcaccgcgtctacaagaacttcgacccgcgcgcgaagctgatgcgccaggtctgctacgacgtcctgggcgagctgggcctcgagaacgaccgcctcttcaagctggcgatggaactcgagaagatcgcactggaagaccagtacttcgtcgagaagaagctctatccgaacgtcgacttctactccggcatcgtgcagaaggcgctggggatcccgacgtcgatgttcacctgcatcttcgcgctggcacggaccgtcggctggatcacgcagtgggaagaaatgatcaccgatccggaatacaagatcggtcgtccgcgccagttgtacatcggtgcagcgcggcgcgacgtaccgacgctcgcacaacgtccgtaa

SEQ ID NO: 123693 - protein, 431 aa, Azoarcus sp. EbN1
MSTERTATLTVDGKTVEFPVMTGTHGNDVIDIRTLGAKTGFFTYDSGFLSTASCKSTITFIDGDKGELLYRGYPIEQLADKCSFLEVAYLLKNGELPNGTQKVEFENTIKNHTMLHDQMTKFFTGFRRDAHPMAVMVGVVGALSAFYHEAMDFSDSEHRNISINRLIAKLPTIVAMAYKYNMGQPFMYPRNELDYTANFMHMMFGTPCEEYKPNPVLVRALDTIFTLHADHEQNASTSTVRLAGSSGANPFACISAGIACLWGPAHGGANEACLNMLEEIGDVSRVGEYIARAKDKNDSFKLMGFGHRVYKNFDPRAKLMRQVCYDVLGELGLENDRLFKLAMELEKIALEDQYFVEKKLYPNVDFYSGIVQKALGIPTSMFTCIFALARTVGWITQWEEMITDPEYKIGRPRQLYIGAARRDVPTLAQRP

SEQ ID NO: 123694 - DNA, 1296 bp, Silicibacter pomeroyi DSS-3
  CDS (1)..(1296): transl_table=11
atgactgaagaaaagaaaaccgccacgcttagcctgaacggtcaatcctacgatttgccggtgtattcgccctcggcgggcccggacgtgatcgacatccgcaaactctatggtcaggccggcgtgttcacctatgacccgggcttcacctcgacggcgagctgcgacagcaccatcacctatatcgatggcgaactgggcgagctgctgcatcggggctatccgatcgaccagctggcggccaagtcgcattacctcgaggtctgctatctgctgctgtacggtgaactgccgaccgcggccgctctcgagaagttcgagaccacgatcacccgccacaccatgatccacgagcagatgcactatttcttccgcggcttccgccgcgatgcgcatccgatggcgaccatggtgggtgtggtcggcgcgatgtcggccttctatcacgactcgaccgatatcgccgacccgcatcagcgcgagatcgccagccaccgcctgatcgccaagatgccgaccatcgcggcgatggcgtataaatactcgatcggccagccgttcatgtatccgcgcaacgatctggattacgcggccaacttcctgcagatgtgttttgccgtcccggccgagcattatcatgtcgacccgatcctggcccgcgccatggaccggattttcacgctgcatgccgatcacgagcagaacgcctcgacctcgaccgtgcgtctggcgtcgtcctcgggcgcgaacccgtttgcctgtatcgccgccggtatcgcctgtctctggggtcccgcccatggcggcgccaaccaggcctgcctggagatgctgaaagagatcggctcgcccgaccgcatccccgagttcatcgcccgcgccaaggacaagaacgatccgttccgcctgatgggctttggtcaccgcgtctacaagaacttcgatccgcgcgcgacggtgatgaaacagtccgccgacgaggtgctggacctgctgggtgtggaaaacaacccgatcctggccaccgccaaggaactggaacgcgccgccctggccgatgactatttcgccgagaagaagctgttcccgaatgtcgacttctattcgggtatcatcctcgaggcgatgggcttcccgacctcgatgttcacgcccatcttcgcggtatcgcggaccgtgggttgggtcagccagtggaaagagcagctggccgatccgcagcacaagatcggccgcccgcgtcagctgtacctcggctctaccgcgcgcgactatgtggatatcgaagaccgctga

SEQ ID NO: 123695 - protein, 431 aa, Silicibacter pomeroyi DSS-3
MTEEKKTATLSLNGQSYDLPVYSPSAGPDVIDIRKLYGQAGVFTYDPGFTSTASCDSTITYIDGELGELLHRGYPIDQLAAKSHYLEVCYLLLYGELPTAAALEKFETTITRHTMIHEQMHYFFRGFRRDAHPMATMVGVVGAMSAFYHDSTDIADPHQREIASHRLIAKMPTIAAMAYKYSIGQPFMYPRNDLDYAANFLQMCFAVPAEHYHVDPILARAMDRIFTLHADHEQNASTSTVRLASSSGANPFACIAAGIACLWGPAHGGANQACLEMLKEIGSPDRIPEFIARAKDKNDPFRLMGFGHRVYKNFDPRATVMKQSADEVLDLLGVENNPILATAKELERAALADDYFAEKKLFPNVDFYSGIILEAMGFPTSMFTPIFAVSRTVGWVSQWKEQLADPQHKIGRPRQLYLGSTARDYVDIEDR

SEQ ID NO: 123696 - DNA, 1182 bp, Synechococcus elongatus PCC 6301
  CDS (1)..(1182): transl_table=11
atggggaagcccaggattgctatgactgccgtcagcgagtttcggcctggcctagaaggcgtgcccgccacactctcgagcattagctttgtcgatggccagcgcggcgtcctagagtatcgcggcatcagcatcgagcaactggcgcaacagagcagttttctggaaaccgcctacctgttgatttggggccatctaccaactcagcaggaattgaccgagttcgagcacgaaattcgctaccaccgccgcatcaagttccgcatccgggacatgatgaaatgcttccccgatagcggccatcctatggatgccctgcaggcgagcgccgcagccctcgggttgttctattcgcggcgcgccttggatgatcccgaatacattcgggcggccgttgtgcgtttgctagccaaaattccgacgatggtggctgccttccagctgatccgcaagggtaacgacccaattcagccccgcgatgaactggactacgccgccaactttctctacatgctgacggagcgcgagcccgatccagtcgcagctcggatttttgatatttgcctcaccctgcacgccgaacatacgatcaacgcctcgaccttctcggcgatggtcacagcttcgaccctgaccgatccctacgctgtcgttgcttctgccgttggcaccttggctggccccctccatggcggcgccaatgaagaagtgctggacatgctggaggcgatcggttccgtcgagaatgttgagccctacctcgaccactgcattgccaccaaaacgcgcattatgggctttgggcaccgtgtctacaaagtcaaggatccgcgggcagtcattctgcaaaatctggccgagcaactgttcgatatcttcggccatgatccctactacgaaatcgcggtcgcagtcgaaaaggcagcagccgagcgactcagccacaagggcatttaccccaacgtcgatttctactccggcttggtctatcgcaagctcggtattcctagcgatctattcacaccggtgtttgcgatcgcgcgggttgcgggctggctcgcccactggaaagagcagctgaacgaaaatcggatcttccgccccactcagatctacacgggcagccacaacctcgactacaccccgatcgccgatcgggatttggcgatcgaatctgattga

SEQ ID NO: 123697 - protein, 393 aa, Synechococcus elongatus PCC 6301
MGKPRIAMTAVSEFRPGLEGVPATLSSISFVDGQRGVLEYRGISIEQLAQQSSFLETAYLLIWGHLPTQQELTEFEHEIRYHRRIKFRIRDMMKCFPDSGHPMDALQASAAALGLFYSRRALDDPEYIRAAVVRLLAKIPTMVAAFQLIRKGNDPIQPRDELDYAANFLYMLTEREPDPVAARIFDICLTLHAEHTINASTFSAMVTASTLTDPYAVVASAVGTLAGPLHGGANEEVLDMLEAIGSVENVEPYLDHCIATKTRIMGFGHRVYKVKDPRAVILQNLAEQLFDIFGHDPYYEIAVAVEKAAAERLSHKGIYPNVDFYSGLVYRKLGIPSDLFTPVFAIARVAGWLAHWKEQLNENRIFRPTQIYTGSHNLDYTPIADRDLAIESD

SEQ ID NO: 123698 - DNA, 1116 bp, Bacillus clausii KSM-K16
  CDS (1)..(1116): transl_table=11
gtgactacaactcgtggtttagaaggtattgtggcaacacaatcgagcgttagctccattattgatgatgaattaacgtaccatggttatggcattgacgacctggccgaaaatgctagttttgaagaggtcgtttatttgctgtggaatggtgaattgcctacgaaagaagaattggaatcgttttcaagagcgcttgctgaacaagcgggcgtccccgatgaaattttcgaacaaatgaaagcctatccaatcgatagcgtccatccaatggctgccctgcgcacatctgtttcaatgcttggtttgtttgatgatgaagcagaatcagtcgaggaagaaaaaaattaccgcaaagcgattaaacttcaagcaaaaattcctacaattgttgccggctttgagcggatccgttctggcaaagaaccgattgctccaaacaaggagttatcgtttgcagcaaatttcctatacatgttaacgggcgaaaacccagatgcgatttcagtaaaagcttttaataaagcgcttgtgctccatgcggatcatgaactgaacgcctcaacatttacggcgcgcgtttgtgtagcgacgctgtctgatatgtattcaggcattacagcggcaattggcgcattgaaagggcctcttcatggcggcgcaaatgagggcgtcatgaaaatgcttcttgaaatcgaagaatttgagcgagtggaaccgtatatccagaaagcgcttgataataaagagaaaatcatgggctttggccatcgtgtatacaaaaatggcgatcctcgggctaagcatttgcgggaaatgtccaaacaactaacagacgttattaaagaatcaaaatggtacgacatgtctttgcggattgaagaattggtcaccactcaaaaaggcttgctgccaaacgttgatttttattcagcgactgtataccatagtcttgggattaaacatgatttgttcacgccgatttttgcgatcagccgcacatctggctggattgcccatatcctcgaacagtatgcaaacaaccgcctgattcgtccgcgtgctgagtatgtcggtccgaacaaacgcagctacaaaccagtagaatcacgatag

SEQ ID NO: 123699 - protein, 371 aa, Bacillus clausii KSM-K16
MTTTRGLEGIVATQSSVSSIIDDELTYHGYGIDDLAENASFEEVVYLLWNGELPTKEELESFSRALAEQAGVPDEIFEQMKAYPIDSVHPMAALRTSVSMLGLFDDEAESVEEEKNYRKAIKLQAKIPTIVAGFERIRSGKEPIAPNKELSFAANFLYMLTGENPDAISVKAFNKALVLHADHELNASTFTARVCVATLSDMYSGITAAIGALKGPLHGGANEGVMKMLLEIEEFERVEPYIQKALDNKEKIMGFGHRVYKNGDPRAKHLREMSKQLTDVIKESKWYDMSLRIEELVTTQKGLLPNVDFYSATVYHSLGIKHDLFTPIFAISRTSGWIAHILEQYANNRLIRPRAEYVGPNKRSYKPVESR

SEQ ID NO: 123700 - DNA, 1122 bp, Staphylococcus epidermidis RP62A
  CDS (1)..(1122): transl_table=11
atggcagaattaaaaagaggtttagaaggggttattgcagctgaaactaaaattagctcgataattgacagtcagttaacatatgcgggctatgatattgacgatctcgcagaaaacgcgcaatttgaagaaataatttttttactatggaattatagacttcctaatgaaaatgagttaagtgaattaaaagaaaaattatttgattatatgactcttaataatagagtatacaagcactttgaggagtatgtgacggatcatgtacatccaatgactgctctacgtacatcagtatcatatgtagctcattttgatccagaagcggaaaatgaatctgatgagaataaatatgatagagctattcgtattcaagctaaaatcgcttctttagtaacggctttcgctagagttagagacggtaaagaacctgtcaaacctaattctgaacttagttatgcagcaaatttcttatatatgttaaggggagaactaccaacagaagttgaagttgaagcatttaataaggcattaattttacatgctgatcatgaacttaacgcatctgcatttacggcacgttgcgcagtatcttcattatcagatatgtattcaggtgttgttgcagctattggttcattaaaaggaccattacatggtggtgcaaatgaacgagtgatgtcaatgcttaaagaaataggaagcattgataatgtagatcactatttagatgaaagatttgcaaataaagataaaattatgggctttggtcatcgtgtttataaagatggtgatccaagagctaaatatttaagagaaatgagccgtaaaatcactgaagaaacagggcaaagtgaactgtttgaaatgtcattagccattgagaagagaatgaaagaagaaaaaggacttattcctaatgtcgatttctttagtgctacagtctatcatagtatgaatattccacatgacttattcacaccaatatttgcagtaagtcgtacttctggctggattgctcatattttagagcaatatcgagacaatagaattatgcgaccaagagctaaatatataggtgaacaaaatcgtaaatatgtgcctattgaagaaagaccataa

SEQ ID NO: 123701 - protein, 373 aa, Staphylococcus epidermidis RP62A
MAELKRGLEGVIAAETKISSIIDSQLTYAGYDIDDLAENAQFEEIIFLLWNYRLPNENELSELKEKLFDYMTLNNRVYKHFEEYVTDHVHPMTALRTSVSYVAHFDPEAENESDENKYDRAIRIQAKIASLVTAFARVRDGKEPVKPNSELSYAANFLYMLRGELPTEVEVEAFNKALILHADHELNASAFTARCAVSSLSDMYSGVVAAIGSLKGPLHGGANERVMSMLKEIGSIDNVDHYLDERFANKDKIMGFGHRVYKDGDPRAKYLREMSRKITEETGQSELFEMSLAIEKRMKEEKGLIPNVDFFSATVYHSMNIPHDLFTPIFAVSRTSGWIAHILEQYRDNRIMRPRAKYIGEQNRKYVPIEERP

SEQ ID NO: 123702 - DNA, 1284 bp, Neisseria gonorrhoeae FA 1090
  CDS (1)..(1284): transl_table=11
atgtccaaatcaatcaaactcaacgtaccgggtcgggcaggtttggagctgccggtattggaagccagcatcgggcatgatgtggttgacattcgggggctgacaaaaaatacaggtttgtttgccttcgaccccggatttgtttcaaccgcaagctgtgagtctaaaattacttacatcgacggcgatcaaggcttgctttattatcgcggataccccatcgagcagctggccgaaaagtccgattatttggaagtctgctacctgttgatttacggcgaactgccgactcccgagcaaaaggcagaatttgacaatacagtccgccgccacacgatggtgcatgaacagctgacttggttcttccggggtttccgccgcgacgcgcatccgatggcgatgatggtcggcgtggtcggcgcgctgtctgcgttctaccaagacagcttggacattactaatcccgaacaccgcaaaatcgcgatttaccgccttatttccaaaatcccgaccattgcggcaatgtgttaccgctattcaaacggtctgccgttcaattatccgaagaataatctttcttattcagaaaacttccttcatatgatgtttgccacaccgtgtgaagactacaaacctaatcccgttttggcacgcgcgctcgaccgcatctttattttgcatgccgaccacgagcaaaacgcctcaacttcaaccgtccgtctggcaggctcttcgggtgcgaacccgtttgcctgtattgctgccggtatcgcctgcctgtggggtgcttcgcacggcggtgcgaacgaagccgtgttgaaaatgctggatgaaatcggcgatgtgtccaatgttgccgcatacatggaaggcgtgaaacagcgcaaataccgcctgatgggcttcggacaccgggtataccgcaatatggatccgcgtgccagcattatgcgcgaaacctgctatgaagttttgaaggaattgggcttggaagacagtccgaaattcaaactggcgatggaattggaacagattgcgctgaaagacccgttctttatcgaacgcaaactgtatcccaatgtcgatttctattccggcatcgtcctgtccgcgctgggcatcccgaccgaaatgtttaccgtcatcttcgccctgtcgcgcagcgtgggctggatttcgcactggcacgagatgattagcgatccttcgctgaaaatcggccgcccgcgccagctttataccggttcggaacgccgcgattatgtgccggcaggcgagaggtaa

SEQ ID NO: 123703 - protein, 427 aa, Neisseria gonorrhoeae FA 1090
MSKSIKLNVPGRAGLELPVLEASIGHDVVDIRGLTKNTGLFAFDPGFVSTASCESKITYIDGDQGLLYYRGYPIEQLAEKSDYLEVCYLLIYGELPTPEQKAEFDNTVRRHTMVHEQLTWFFRGFRRDAHPMAMMVGVVGALSAFYQDSLDITNPEHRKIAIYRLISKIPTIAAMCYRYSNGLPFNYPKNNLSYSENFLHMMFATPCEDYKPNPVLARALDRIFILHADHEQNASTSTVRLAGSSGANPFACIAAGIACLWGASHGGANEAVLKMLDEIGDVSNVAAYMEGVKQRKYRLMGFGHRVYRNMDPRASIMRETCYEVLKELGLEDSPKFKLAMELEQIALKDPFFIERKLYPNVDFYSGIVLSALGIPTEMFTVIFALSRSVGWISHWHEMISDPSLKIGRPRQLYTGSERRDYVPAGER

SEQ ID NO: 123704 - DNA, 1290 bp, Pseudomonas fluorescens Pf-5
  CDS (1)..(1290): transl_table=11
atggctgacaaaaaagcgcagttgatcatcgagggcgcagcccccgtcgagctgcccattttaaccggcaccgttggtcccgatgtaatcgatgttcggggtctgacggccacgggccgcttcacttttgacccgggtttcatgtcgaccgcctcctgcgagtcgaaaatcacctacatcgacggcgacaacggcattctgctgcatcgcggctacccgatcgaacagctggccgagaaatccgactacctggaaacctgctacctgctgctcaacggtgaattgcccaccgccgaacagaaggcccagttcgtcagcaccgtgaaaaaccacaccatggttcacgagcagttgaagagcttcttcaacggtttccgccgcgacgcccacccaatggcggtgatgtgcggcgtagtgggtgcactctcggcgttctaccacgactccctggacatcaataacccacagcatcgcgaaatctccgctgtgcgcctggtggccaagatgccgaccctggcagcgatggtttacaagtactccatgggtcagccgatgatgtatccgcgcaacgacctgtcgtacgcggaaaacttcctgcacatgatgttcaacaccccgtgcgagatcaaaccgatcagcccggtactggccaaggcaatggaccggatcttcatcctccatgccgaccacgaacagaacgcctcgacgtccaccgtgcgcctggcgggctcttcgggtgccaacccgttcgcctgtatcgctgccggtatcgccgcgctctggggccctgcccacggcggcgccaacgaagcagtgctgaccatgctcgacgaaattggcgatgtctcgaacatcgacaagttcatcgccaaggccaaggacaagaacgatccgttcaaactcatgggcttcggtcaccgcgtgtacaagaaccgcgacccgcgcgccaccgtgatgaaacagacctgcgacgaagtactcaaggaactgggcatcaacaacgatccgcaactcgaactggccatgcgcctggaagagatcgccctgaccgacccatacttcatcgagcgctcgctgtacccgaacgtcgacttctactcgggcatcatcctcaaggcgatcggcattccaaccagcatgttcaccgtgatcttcgccctggcgcggaccgtcggctggatctcgcactggaaggaaatgctctccagcccgtacaagatcggccgtccacgccagctgtacaccggctacgagtcgcgtgacatcaccaaactggaagaccgcaaataa

SEQ ID NO: 123705 - protein, 429 aa, Pseudomonas fluorescens Pf-5
MADKKAQLIIEGAAPVELPILTGTVGPDVIDVRGLTATGRFTFDPGFMSTASCESKITYIDGDNGILLHRGYPIEQLAEKSDYLETCYLLLNGELPTAEQKAQFVSTVKNHTMVHEQLKSFFNGFRRDAHPMAVMCGVVGALSAFYHDSLDINNPQHREISAVRLVAKMPTLAAMVYKYSMGQPMMYPRNDLSYAENFLHMMFNTPCEIKPISPVLAKAMDRIFILHADHEQNASTSTVRLAGSSGANPFACIAAGIAALWGPAHGGANEAVLTMLDEIGDVSNIDKFIAKAKDKNDPFKLMGFGHRVYKNRDPRATVMKQTCDEVLKELGINNDPQLELAMRLEEIALTDPYFIERSLYPNVDFYSGIILKAIGIPTSMFTVIFALARTVGWISHWKEMLSSPYKIGRPRQLYTGYESRDITKLEDRK

SEQ ID NO: 123706 - DNA, 1281 bp, Psychrobacter arcticus 273-4
  CDS (1)..(1281): transl_table=11
atggctgataatcaagccacattgaccgtagatggtaaggattaccaacttcctattactgaaggcactttaggaccgtcagttattgatgttgctgctttccaaaaagctggctactggacctatgatccaggctttatggcaaccgctcctgtcgaatcaaaaatcaccttcattgatggtggtaaaggcgaactattgcatcgcggctaccctatcgaccagttagcaaacaatgcagaatatctagaagtggcttatgcactgattcatggtgacctgcctaacgctgagcagaaagcagatttctatgaaaaaatccgtaagcatatgggtgttcatgatcaattgcgtaagttctttgaaggcttccgccgtgacgcgcatccaatggcgattatggttggtgtcgttggtgctttatcagcgttttatcatgaaaatttagatattagcaacgaagaacatcgtgagattacagcgattcgtcttatcgctaaaatgccaacgcttgccgctatgagttataagtactcaaaaggcgaaccgttcatgtacccacgtaatgatttcaattatgctgaaaacttcttatacatgatgtttgcaacgcctgctgatgttaattataaaaccaatgacgttatcactcgcgccatggacaaaatctttaccctgcatgctgaccatgagcaaaacgcatcaacgtctaccgtacgtctagctggctctactggcgcaaacccttacgcttgtatcgctgctggtatcgcagcattgtggggtccatcacatggtggcgccaacgaagcggtacttgagatgctcgatgaaatcggttctgtagaaaacgtgcctgagttcatggaaaaagtgaagagccgtgaagtgaaactgatgggctttggtcatcgtgtttataaaaactttgacccacgtgcacaagtcatgaaagaaacgtgtgatgaagtattaggcgcattgggtatcaatgatcctaagcttgagcttgcaatggcgcttgagaaaattgctttagaagacccgttcttcgttgagcgtaacctgtatccaaacgttgacttttactctggcattatcttaaaagccatcggaatcccaacgtcaatgtttactgtcatcttctcattggctcgtacctctggttggatcagccattggcttgagatgcacagcacaccgttcaaaatcggtcgtccacgtcagttatatactggtgaaacgcatcgcgattttgttaaagttgaagatcgtaaatag

SEQ ID NO: 123707 - protein, 426 aa, Psychrobacter arcticus 273-4
MADNQATLTVDGKDYQLPITEGTLGPSVIDVAAFQKAGYWTYDPGFMATAPVESKITFIDGGKGELLHRGYPIDQLANNAEYLEVAYALIHGDLPNAEQKADFYEKIRKHMGVHDQLRKFFEGFRRDAHPMAIMVGVVGALSAFYHENLDISNEEHREITAIRLIAKMPTLAAMSYKYSKGEPFMYPRNDFNYAENFLYMMFATPADVNYKTNDVITRAMDKIFTLHADHEQNASTSTVRLAGSTGANPYACIAAGIAALWGPSHGGANEAVLEMLDEIGSVENVPEFMEKVKSREVKLMGFGHRVYKNFDPRAQVMKETCDEVLGALGINDPKLELAMALEKIALEDPFFVERNLYPNVDFYSGIILKAIGIPTSMFTVIFSLARTSGWISHWLEMHSTPFKIGRPRQLYTGETHRDFVKVEDRK

SEQ ID NO: 123708 - DNA, 1287 bp, Colwellia psychrerythraea 34H
  CDS (1)..(1287): transl_table=11
atggctgaatcaaaagccactctgagtattgatggcaaagaaattggtgaatttccagttttaaaaggtactgcaggtactgacgtaattgatattagaactttaggtagccatggctatttcacctacgatccgggctttttagcaacgggttcttgtgaatcatctattacctacattgatggcggcaaaggtgttctacaacaccgcggttaccctattgatagcttagctaaacaagctgattaccttgaagtttgttatatcttattgaatggcgatgcgccaactcaatcagagtatgaagaatttaagtcaatcatcactacacataccatggtacatgagaagttagttcatttcttccatggtttcttacctgatgcacatccaatggctatgctttgtggtgttgttggtgcaatgtcatctttctatcacagtgacttagatatcactgaccctgcacagcgtaaacgtagtgctcatagattgattgctaaaatgcctactatcgctgcaatggcttataaatatagtgttggtcaaccatttgtttacccacgcaatgagctttcttacgctgaaaacttccttcacatgatgttctcagtacctgctgaagaatatatagtaagccctaccgtagctaatgctatggacagaatctttactttacatgctgatcatgaacaaaatgcttcaacttctactgttcgtttagccggttcttctggtgctaacccttatgcttgtatagcagctggtgttgcatctttatggggcccagcacatggcggcgctaatgaagcatgtcttactatgcttgaacaaattggtagcttagaaaacgttgctgaatatgtagctaaagctaaagataaaaatgacccattccgtttaatgggctttggtcatcgtgtttataaaaacttcgatcctcgtgcaacagtcatgcgtgaaacttgtcatgaagtattgaatgaacttggtatcagcgatcctttacttgatgtcgctatggcattagaaaaagttgctcttgaagacccatactttattgagaaaaaactttacccgaatgttgatttttactcaggtatcatcttaaaagcaattggcattccttcaagtatgtttaccgtgatttttgctatgtctagaacggtaggttggattgctcactgggatgaaatgttgtctcagccgggtcaaaaaatcggtcgtcctcgtcagaaatacacgggtgaaattaaccgtgaattcgtaccattaaataaaagataa

SEQ ID NO: 123709 - protein, 428 aa, Colwellia psychrerythraea 34H
MAESKATLSIDGKEIGEFPVLKGTAGTDVIDIRTLGSHGYFTYDPGFLATGSCESSITYIDGGKGVLQHRGYPIDSLAKQADYLEVCYILLNGDAPTQSEYEEFKSIITTHTMVHEKLVHFFHGFLPDAHPMAMLCGVVGAMSSFYHSDLDITDPAQRKRSAHRLIAKMPTIAAMAYKYSVGQPFVYPRNELSYAENFLHMMFSVPAEEYIVSPTVANAMDRIFTLHADHEQNASTSTVRLAGSSGANPYACIAAGVASLWGPAHGGANEACLTMLEQIGSLENVAEYVAKAKDKNDPFRLMGFGHRVYKNFDPRATVMRETCHEVLNELGISDPLLDVAMALEKVALEDPYFIEKKLYPNVDFYSGIILKAIGIPSSMFTVIFAMSRTVGWIAHWDEMLSQPGQKIGRPRQKYTGEINREFVPLNKR

SEQ ID NO: 123710 - DNA, 1290 bp, Pseudomonas syringae pv. phaseolicola 1448A
  CDS (1)..(1290): transl_table=11
atggctgacaaaaaagcgcagttgatcatcgagggcgcagcccccgtcgagctgccaattctgaccggtacagtgggtccggacgtgatcgacgtacgcggcctgaccgccaccggccgcttcacatttgaccctggcttcatgtccacggcctcttgcgattcgaagatcacctacattgatggtgacaatggcattctgctgcaccgcggctacccgatcgaacaactggccgagcagtccgattacctcgaaacctgctacctgctgctcaacggcgaactgccgaccgccgaacagaaagcccagttcgtggccgtggtcaagaaccacacgatggttcacgagcaactcaagaccttcttcaacggctttcgtcgcgacgcccacccgatggccgtcatgtgcggcgtagtcggtgccctgtcagcgttctaccacgactcgctggacatcaataacccgcagcaccgcgagatttccgctgtacgcctggtggccaagatgccgaccctggcagcgatggtctacaagtactccatgggccagcccatgatgtacccgcgcaacgacctcagctacgccgaaaacttcctgcacatgatgttcaacaccccgtgcgagatcaaaccgatcagcccggtgctggccaaggcgatggacaagatcttcatccttcacgccgatcacgagcagaacgcctcgacatccaccgtccgcatggcaggctcttcgggcgccaacccgtttgcctgtatcgctgccggcatcgccgcgctctggggcccggcccacggcggcgccaacgaagcggtactgaccatgctggatgaaatcggtgacgtgtcgaacatcgacaagttcatcgccaaggccaaggacaagaacgacccgttcaagctcatgggcttcggccaccgcgtgtacaagaaccgtgacccgcgcgccaccgtaatgaagcagacctgcgacgaagtgctgaaagaactgggcatcaccaacgatcctcaactcgaactggccatgcgcctcgaagagatcgccctgaccgacccgtacttcatcgagcgctcgctgtacccgaacgtcgacttctactcgggcattatcctcaaggccatcggcattccgaccagcatgttcaccgtgatcttcgccctggcgcggactgtcggctggatctcgcactggaaggaaatgctctccagcccctacaagatcggtcgccctcgccagctgtacaccggcaacgtgcaacgcgacatcgtcgccctgcaagaccgcaagtaa

SEQ ID NO: 123711 - protein, 429 aa, Pseudomonas syringae pv. phaseolicola 1448A
MADKKAQLIIEGAAPVELPILTGTVGPDVIDVRGLTATGRFTFDPGFMSTASCDSKITYIDGDNGILLHRGYPIEQLAEQSDYLETCYLLLNGELPTAEQKAQFVAVVKNHTMVHEQLKTFFNGFRRDAHPMAVMCGVVGALSAFYHDSLDINNPQHREISAVRLVAKMPTLAAMVYKYSMGQPMMYPRNDLSYAENFLHMMFNTPCEIKPISPVLAKAMDKIFILHADHEQNASTSTVRMAGSSGANPFACIAAGIAALWGPAHGGANEAVLTMLDEIGDVSNIDKFIAKAKDKNDPFKLMGFGHRVYKNRDPRATVMKQTCDEVLKELGITNDPQLELAMRLEEIALTDPYFIERSLYPNVDFYSGIILKAIGIPTSMFTVIFALARTVGWISHWKEMLSSPYKIGRPRQLYTGNVQRDIVALQDRK

SEQ ID NO: 123712 - DNA, 1299 bp, Dechloromonas aromatica RCB
  CDS (1)..(1299): transl_table=11
atgacgaccgaacgcaaggcaactttatcaatcgatggacaggctcccgtcgatttttcgatcatgtcaccgacgcatggcaacgattgcatcgatattcgcacactgggtggcaagaccggtctgtttacctacgactccggttttctttccaccgccagttgcaagtccaagattacttttattgatggcgacgtgggccaactgctgtatcgcggttacccgatcgagcaactggctgaaaactgtaacttcctcgaagttacctacttgctgaagaacggcgagttgccgaatgccaagcagaaggctgatttcgaaagcaccatcaagaatcacaccatggtgcatgagcagttgtccaagttcttctctggtttccgccgtgatgcccacccgatggctgtgatgaccggtgtggttggcgcgctgtccgctttctaccacgatgcgatggacttctcggatgcagagcatcgtaatgtcagcttcaatcgtctggtcgccaaaatgccgaccattgtcgcgatggcctataagtacaacactggtgcgccgttcatgtatccggataacagcctggattacaccgccaacttcatgcgcatgatgttcggcaacccgtgtgaaaaatatgtgccgaatccggttctggtccgcgcactcgacaccatcttcacactgcatgccgaccacgagcaaaacgcttctacgtcgaccgtgcgcctggctggctcttcgggtgccaacccgttcgcctgtatcgctgccggtatcgcctgtctgtggggtccggcacacggtggtgccaacgaagcttgcttgcagatgctggaagaaatcggtgatgtttcccgcgtgccggaatacattgctcgcgccaaggacaagaacgattcgttcaagttgatgggctttggtcaccgcgtttacaagaacttcgacccgcgcgccaagctgatgcgccaggtttgcaatgaagtgttggctgagctcggtctggaaaatgaccgcctgttcaagctggccatggaacttgagcgcattgcgctggaagatccgtacttcgtcgagaagaagctttacccgaacgtcgacttctattctggcattgttcagaaagccatcggcattccgactgaaatgttcacctgtatcttcgcattggcccgtaccgtcggctggatgacccagtgggaagaaatgatttccgatccggaatacaagatcggtcgtccgcgtcaactgtacatgggtgcagcaaagcgcgacgtagtgccgctggcccaacgcggctaa

SEQ ID NO: 123713 - protein, 432 aa, Dechloromonas aromatica RCB
MTTERKATLSIDGQAPVDFSIMSPTHGNDCIDIRTLGGKTGLFTYDSGFLSTASCKSKITFIDGDVGQLLYRGYPIEQLAENCNFLEVTYLLKNGELPNAKQKADFESTIKNHTMVHEQLSKFFSGFRRDAHPMAVMTGVVGALSAFYHDAMDFSDAEHRNVSFNRLVAKMPTIVAMAYKYNTGAPFMYPDNSLDYTANFMRMMFGNPCEKYVPNPVLVRALDTIFTLHADHEQNASTSTVRLAGSSGANPFACIAAGIACLWGPAHGGANEACLQMLEEIGDVSRVPEYIARAKDKNDSFKLMGFGHRVYKNFDPRAKLMRQVCNEVLAELGLENDRLFKLAMELERIALEDPYFVEKKLYPNVDFYSGIVQKAIGIPTEMFTCIFALARTVGWMTQWEEMISDPEYKIGRPRQLYMGAAKRDVVPLAQRG

SEQ ID NO: 123714 - DNA, 1302 bp, Ralstonia eutropha JMP134
  CDS (1)..(1302): transl_table=11
atgaccccgtccgaagtgaaagccacgctatcgttctccgatggttcccccagcgtcgacctgccgatctatcagggcaccgtaggcccggacgtgatcgacatccgcaagctgtacggccagaccggcaagttcacctacgaccccggtttcatgtcgacggcttcatgcaattcgaagatcacctacatcgacggcgacaagggtgagttgctgtaccgcggctacccgatcgagcacctggcgcagaagtgcgaccacctcgaaacctgctacttgctgctgaagggcgaactgcctgacgccacacagaaggaagagttcgtgggccgcgtgatgaagcacaccatggtgcatgagcaactgcagttcttcctgcgcggtttccgccgcgacgcccacccgatggccgtgctgaccggtctggtcggtgccatgagcgcgttctaccacgacgcaatggatatcgatgatccgcaccagcgtgaaatctcggccatccgcctgatcgccaagatgccgaccctggtcgccatggcgtacaagtacaacatcggccagccgtacatctatccgcagaacgacctgtcctattcgggtaacttcctgcgcatgatgttcgccacgccgtgtgccccgtacaccgtgaacccggtgctcgagcgcgcgctggaccgtatcttcatcctgcacgccgaccacgagcagaacgcttcgacctcgaccgtgcgcctggccggttcgtcgggtacgaacccgttcgcagcgatcgccgccggcgtggcctgtctgtggggtccggcccacggcggcgccaacgaagccgcgctgaagatgctggaagagatcggcagcgtcgacaacatcggcgagttcatcaagcaggtcaaggacaagaactcgggcgtgcgcctgatgggctttggccaccgcgtgtacaagaactacgatccgcgtgccaagctgatgcgcgaaacttgccatgaagtgctgaacgaactgggcctgcacaacgacccgctgttcaagctcgccatggagctggaaaagatcgcgctggaagacgagtacttcgtcagccgcaagctgtacccgaacgtcgacttctactcgggcatcgtccagcgcgcgctgggcatcccgacgtcgctgttcacctgcatcttcgcgctggcccgcaccccgggctggatctcgcagtgggaagagatgatcaccgatccggagtacaagatcggccgtccgcgccagctgttcaatggcgcggcttcgcgtgaccagtcggaagcggctgcatcctaa

SEQ ID NO: 123715 - protein, 433 aa, Ralstonia eutropha JMP134
MTPSEVKATLSFSDGSPSVDLPIYQGTVGPDVIDIRKLYGQTGKFTYDPGFMSTASCNSKITYIDGDKGELLYRGYPIEHLAQKCDHLETCYLLLKGELPDATQKEEFVGRVMKHTMVHEQLQFFLRGFRRDAHPMAVLTGLVGAMSAFYHDAMDIDDPHQREISAIRLIAKMPTLVAMAYKYNIGQPYIYPQNDLSYSGNFLRMMFATPCAPYTVNPVLERALDRIFILHADHEQNASTSTVRLAGSSGTNPFAAIAAGVACLWGPAHGGANEAALKMLEEIGSVDNIGEFIKQVKDKNSGVRLMGFGHRVYKNYDPRAKLMRETCHEVLNELGLHNDPLFKLAMELEKIALEDEYFVSRKLYPNVDFYSGIVQRALGIPTSLFTCIFALARTPGWISQWEEMITDPEYKIGRPRQLFNGAASRDQSEAAAS

SEQ ID NO: 123716 - DNA, 1302 bp, Ralstonia eutropha JMP134
  CDS (1)..(1302): transl_table=11
atgacgccgtccgatgtgaaagccacgctatcgttctccgatggttcccccagcgttgagctgccgatctacaagggcaccgtaggcccggacgtgatcgacattcgcaagctgtacggccagaccggcaagttcacctacgaccccggtttcatgtcgacggcttcgtgcaattcgaagatcacctacatcgacggcgacaagggcgagctgctgtaccgcggctacccgatcgagcaactggcgcagaagtgcgaccacctcgaaacctgctacctgttgctgaagggcgaactgcccaacgccaagcagaaggaagaattcaccggccacgtcatgaaccacaccatggttcacgagcagctgcagttcttcctgcgcggtttccgccgcgatgcgcacccgatggccgtgctgaccggcctggtcggtgccatgagcgcgttctaccacgacgcgatggacatcgatgatccgcaccagcgcgagatctcggccatccgcctgatcgccaagatgccgaccatggtcgccatggcgtacaagtacaacatcggccagccgtacatctacccgcagaacgacctgtcctactcgggcaacttcctgcgcatgctgttcggcacgccgtgcgccccgtacaccgtgaacccggtgctggagcgtgcgctggaccgaatcttcatcctgcacgccgaccacgagcagaacgcttcgacctcgaccgtgcgtctggccggttcgtcgggtacgaaccccttcgcagcgatcgccgctggcgtggcctgcctgtggggtccggctcacggcggcgccaacgaagccgcgctgaagatgctggaagagatcggcagcgtcgacaacatcggcgagttcatcaagcaggtcaaggacaagaactcgggcgtgcgcctgatgggctttggccaccgcgtgtacaagaactacgatccgcgcgccaagctgatgcgcgaaacctgccatgaagtgctgaacgaactgggcctgcacaacgacccgctgttcaagctcgccatggagctggaaaagatcgcgctggaagacgaatacttcgtcagccgcaagctgtacccgaacgtcgacttctactcgggcatcgtccagcgcgcgctgggtatcccgacgtcgctgttcacctgcatcttcgcgctggctcgtaccccgggctggatctcgcagtgggaagagatgatcaccgatccggaatacaagatcggccgtccgcgccagctgttcaacggcgccgcttcgcgcgacgtgccggacatttccaagcgctaa

SEQ ID NO: 123717 - protein, 433 aa, Ralstonia eutropha JMP134
MTPSDVKATLSFSDGSPSVELPIYKGTVGPDVIDIRKLYGQTGKFTYDPGFMSTASCNSKITYIDGDKGELLYRGYPIEQLAQKCDHLETCYLLLKGELPNAKQKEEFTGHVMNHTMVHEQLQFFLRGFRRDAHPMAVLTGLVGAMSAFYHDAMDIDDPHQREISAIRLIAKMPTMVAMAYKYNIGQPYIYPQNDLSYSGNFLRMLFGTPCAPYTVNPVLERALDRIFILHADHEQNASTSTVRLAGSSGTNPFAAIAAGVACLWGPAHGGANEAALKMLEEIGSVDNIGEFIKQVKDKNSGVRLMGFGHRVYKNYDPRAKLMRETCHEVLNELGLHNDPLFKLAMELEKIALEDEYFVSRKLYPNVDFYSGIVQRALGIPTSLFTCIFALARTPGWISQWEEMITDPEYKIGRPRQLFNGAASRDVPDISKR

SEQ ID NO: 123718 - DNA, 1251 bp, Ehrlichia canis str. Jake
  CDS (1)..(1251): transl_table=11
atggtcaaagaagcagtattggaattagatggtcaaaaagtgaaattaccggttttatgtgatactaatggaaataaagttatagatattacttctttgtataaaggtacaggaatattaacttatgatccaggatttatgtctactgctgcttgtgagtccaagattacatttattgatgggaataaggggatattatgctatagaggatataatatagctgatttagttaataacaataagagttttatagaaatcgtctatttattgttttatgggtcttttcctagtgttgataatttaaaagattttatgttacagatttctcaggagtatatgcctcctgaaatggtttgtgatgttataaagtcattttcacaagattcacatcctatgactatattaatggcatgtttttctgcattggcatcttattatcatgaccaagcagttgataaagatggattaaaacatcctaagttagcagtggctaaggttgcaagcataatagcaatgatttatagatacacgactaatcaggattttattgaacctaatcatggattgtcttatagtgaaaattttatacatatgatgtttgatatttcttcttataaatttactcaagttgttgctaaagctttggatgttatttttacattacatgctgatcatgagcaaaatgcttctactgctactgttaggttggctggttcttctggtgctgacttatttgcttgtttggtagcagggatagcaactttatgggggccagctcatggtggtgctaatgaagctgtgattaatatgttaatggcaattgaaaaaccaagtaacgtaaagcagtttattcaaaaagtaaaagatggtaataaaagtacgaggctaatgggttttggtcatagggtatataaaaattatgatccacgtgctaagataatttgtgaaatttgtaaagaagtcttaaatgatttaggtgtaaatgatccattattagaaatagctttggaattggaaaatatagctttgcaggatagttattttattgaacgtagcttgtatcctaatgtggatttttattctggaattattttaaaagctattggaataccagtgagaatgtttactacattatttgcgttggctagaacatctggttggtctgctcagtggtatgagatggtggcagataagaattataaaatatgtcgtccacgtcagttatatactggtcatattgcaaaaatctag

SEQ ID NO: 123719 - protein, 416 aa, Ehrlichia canis str. Jake
MVKEAVLELDGQKVKLPVLCDTNGNKVIDITSLYKGTGILTYDPGFMSTAACESKITFIDGNKGILCYRGYNIADLVNNNKSFIEIVYLLFYGSFPSVDNLKDFMLQISQEYMPPEMVCDVIKSFSQDSHPMTILMACFSALASYYHDQAVDKDGLKHPKLAVAKVASIIAMIYRYTTNQDFIEPNHGLSYSENFIHMMFDISSYKFTQVVAKALDVIFTLHADHEQNASTATVRLAGSSGADLFACLVAGIATLWGPAHGGANEAVINMLMAIEKPSNVKQFIQKVKDGNKSTRLMGFGHRVYKNYDPRAKIICEICKEVLNDLGVNDPLLEIALELENIALQDSYFIERSLYPNVDFYSGIILKAIGIPVRMFTTLFALARTSGWSAQWYEMVADKNYKICRPRQLYTGHIAKI

SEQ ID NO: 123720 - DNA, 1296 bp, Thiobacillus denitrificans ATCC 25259
  CDS (1)..(1296): transl_table=11
atgaagaaaaccgtcaccctcactttcagcgacggcagtcccgcgattgaattgccgatcgaagagggcacctacggcaagcccgtgatcgacatccgcgccctcggcgcacacggctatttcacgcacgacccgggcttcaccgcgacttcgagctgtacctcgtcgatcacctacatcgacggcgacgaaggcctgctgtactaccggggctacccgatcgaccaactcgcctaccagtcggacttcatggaagtcagctacctgctgctgcacggcgaactgccgacggcggaacagaaggccgggttcgagcagtcgatccgtcaccacacgctgctgcacgaccagatcgaaaacgtgttccgcggctttcgccgcagcgcgcacccgatggcggtgatgatcggcgtgaccggcgcgatgtcggccttctatcacgccggcctcgacaacttcaatcccgagcaccgcgagatcgtcgcccaccgcctgatcgccaagatcccgaccgtcgccgcgtgggcgtacaagttcaacgagggccagcccttcgtctacccgcagaaccgcctgtcctacgccgagaacttcatgtacatgatgttctcgagcccctgcgaggaatacgtgcccaacccggtgctggcgcgcgcgctcgaccgcatcttcatcctgcacgccgaccacgagcagaacgcgtcgacctcgacggtacggctcgccgggtcgagcggcgccaacccctacgcctgcatcgcgagcggcatggcgtcgctgtgggggccgctgcacggcggcgccaacgaagccgtgctccgcatgctcgaggagatcgacgacgcgtccaagattcccgatttcatcaagcgcgcgaaggacaaatccgatcctttccgcctgatgggcttcggtcatcgcgtctacaagaacatggacccgcgcgcggcgatcatccgccgcacctgctacgaggtgctcgacgagcttggcctgcgtgacgatccgcagttcaagatcgcgctcgagctcgagcgcatcgcgcttgaggacgagtacttcatcgagcgcaaactctatccgaacgtcgacttctattcgggcatcatcttccgcgcgatgggtattccgaccagcatgttcacggcattgttcgcgatggcgcgcacggccggctgggtcgcgcagtggcacgagatgttatccgacccggcgcacaagatcggccgcccgcgccagctctacgcgggtccggcgcgacgcgacttcgtgccgctcgaccagcgcagggcctga

SEQ ID NO: 123721 - protein, 431 aa, Thiobacillus denitrificans ATCC 25259
MKKTVTLTFSDGSPAIELPIEEGTYGKPVIDIRALGAHGYFTHDPGFTATSSCTSSITYIDGDEGLLYYRGYPIDQLAYQSDFMEVSYLLLHGELPTAEQKAGFEQSIRHHTLLHDQIENVFRGFRRSAHPMAVMIGVTGAMSAFYHAGLDNFNPEHREIVAHRLIAKIPTVAAWAYKFNEGQPFVYPQNRLSYAENFMYMMFSSPCEEYVPNPVLARALDRIFILHADHEQNASTSTVRLAGSSGANPYACIASGMASLWGPLHGGANEAVLRMLEEIDDASKIPDFIKRAKDKSDPFRLMGFGHRVYKNMDPRAAIIRRTCYEVLDELGLRDDPQFKIALELERIALEDEYFIERKLYPNVDFYSGIIFRAMGIPTSMFTALFAMARTAGWVAQWHEMLSDPAHKIGRPRQLYAGPARRDFVPLDQRRA

SEQ ID NO: 123722 - DNA, 1137 bp, Anabaena variabilis ATCC 29413
  CDS (1)..(1137): transl_table=11
atgatggtgtgcgaatataagcctggtttagaaggcattcccgccgcccaatcgagtatcagttatgtagatgggcaaaagggaatactagaatatcgtggcatccggattgaggatttagcccagaagagtacttttctggaaactgcttatcttttaatctggggtgagttgccaacaaaagaagaattgcaagtatttgaggaggaagtccgtcttcatcggcggattaaataccggattcgggatatgatgaagtgctttcccgaatcgggtcatccaatggatgcactccaagcctctgctgcggctttaggcttgttttactcccgtcgagatttgcacaatcctgtctatattcgggatgctgtagtgcgcttaatagctactattccaacgatggtagctgcattccagttgatgcggaaaggcaatgaccccgttaaaccccgcgatgatttagattattccgccaattttctctacatgctcaacgagaaagaaccggatgctttggcggcaaaaatctttgatatctgcttgattctccatgtcgagcatacgatgaatgcttctaccttcagtgctagggtaacagcttcaaccttgacagacccctatgcggtggttgctagcgctgtgggaaccttgggagggcctttacacggtggagccaatgaagaagtaattcagatgttggaagaaatcggttccgtggagaatgtgcgttcttatgtcgaagagaggttgcaacggaaagacaagctcatgggctttggacatcgtgtttacaaggtgaaagacccacgggcaacaattttgcaaggtctcgcagaacagttgtttgccaagttcggcgcggataagtattacgacatcgcccaagaaatggaacgggtagtcgaagagaagcttggtcataaagggatttatcccaatgttgacttttactcaggtctagtgtataggaagatgggtattcctacagacttgtttacaccaatctttgcgatcgctcgtgtggctggttggttagcccactggaaagaacaacttgaagaaaaccgcatcttccgtcctacccaggtttataacggcaaacacagtgttacttacacccccattgaccaacgttaa

SEQ ID NO: 123723 - protein, 378 aa, Anabaena variabilis ATCC 29413
MMVCEYKPGLEGIPAAQSSISYVDGQKGILEYRGIRIEDLAQKSTFLETAYLLIWGELPTKEELQVFEEEVRLHRRIKYRIRDMMKCFPESGHPMDALQASAAALGLFYSRRDLHNPVYIRDAVVRLIATIPTMVAAFQLMRKGNDPVKPRDDLDYSANFLYMLNEKEPDALAAKIFDICLILHVEHTMNASTFSARVTASTLTDPYAVVASAVGTLGGPLHGGANEEVIQMLEEIGSVENVRSYVEERLQRKDKLMGFGHRVYKVKDPRATILQGLAEQLFAKFGADKYYDIAQEMERVVEEKLGHKGIYPNVDFYSGLVYRKMGIPTDLFTPIFAIARVAGWLAHWKEQLEENRIFRPTQVYNGKHSVTYTPIDQR

SEQ ID NO: 123724 - DNA, 1287 bp, Rhodobacter sphaeroides 2.4.1
  CDS (1)..(1287): transl_table=11
atgacgaaatccgcaaagctcacgatcggcgagaaggtcatcgacctgccgatccactcgcccaccctggggccggacgtggtcgacatccgcaagctctacgcggaagccgatgttttcacctacgacccgggcttcacctcgaccgccgcctgcgaaagcaccatcacctacatcgacggcgacaagggcgagctcttctaccgcggctacccgatcgagcagctggccgaccggtcgcactatctcgaggtctgctacctcctgctctacggtgaactgccgaacgcggcgcagcaggccgatttcgaataccggatcacgcggcacacgatgctgcacgagcagatccactacttcttccggggcttccgccgcgacagccatccgatggcgacgatggtgggtgtggtcggcgccatgtcggccttctaccacgactcgctcgacatcaacgatccgtggcagcgtgaggtcgcggcgatccggatgatcgccaagctgccgacgatcgcggcgatggcctacaaatattccatcggccagcccttcaactacccgcagaaccatctcgattacgcgggcaacttcctgcacatgtgcttcgccgtgccggccgagccctacacggtgaaccccgtcctcgccaaggcgatggaccggatcatgatgctgcacgccgaccacgagcagaatgcctcgacctcgaccgtgcgtctggcgggctcgtcgggggccaaccccttcgcctgcatcgcggccgggatcgcctgcctctggggccccgcccatggcggcgccaaccgggcctgtctcgagatgctgcgcgagatcggcaccgtggaccggatcccggaatatatccggcgcgccaaggacaaggacgatcccttccgcctgatgggcttcggccaccgcgtctacaagaacttcgacccgcgggcgaaggtcatgaaggaaagcgccgacgaggtgttgggcctgctcggcatcgagaacaacccgacgctccaggtcgccaaggagctggagcggatcgcgctcgaggacgattacttcgtcgcgaagaagctctatccgaacgtggacttctactcgggcatcatcctcgatgcgatgggcttccccacctcgatgttcaccccgatcttcgcgatctctcggaccgtgggctggatctcgcagtggaaggaaatgatcggcgatcccacgcagaagatcggccgcccgcggcagctctacaagggcgagacccgtcgcgactacgtcgacctgcgccaccgctga

SEQ ID NO: 123725 - protein, 428 aa, Rhodobacter sphaeroides 2.4.1
MTKSAKLTIGEKVIDLPIHSPTLGPDVVDIRKLYAEADVFTYDPGFTSTAACESTITYIDGDKGELFYRGYPIEQLADRSHYLEVCYLLLYGELPNAAQQADFEYRITRHTMLHEQIHYFFRGFRRDSHPMATMVGVVGAMSAFYHDSLDINDPWQREVAAIRMIAKLPTIAAMAYKYSIGQPFNYPQNHLDYAGNFLHMCFAVPAEPYTVNPVLAKAMDRIMMLHADHEQNASTSTVRLAGSSGANPFACIAAGIACLWGPAHGGANRACLEMLREIGTVDRIPEYIRRAKDKDDPFRLMGFGHRVYKNFDPRAKVMKESADEVLGLLGIENNPTLQVAKELERIALEDDYFVAKKLYPNVDFYSGIILDAMGFPTSMFTPIFAISRTVGWISQWKEMIGDPTQKIGRPRQLYKGETRRDYVDLRHR

SEQ ID NO: 123726 - DNA, 1194 bp, Synechococcus sp. CC9605
  CDS (1)..(1194): transl_table=11
gtggtggcccagcagcagacaggcgacctgcgccatgcgcggaccgggatcgaactgcgtccaggcctggatggcgtgccggccacccagtcggcgatctgcgacatcgatggcgagaaggggctgctcacctatcgcggctacccgatgcaggatctggcggccaacagcagctttctggaaacggcctacctgctgatctggggagagctgcccggccgcgaccagttggcggagtttgagcacgcggtgcagatgcaccggcgggtcagcttccgggtgagggacatgatgaagtgcttcccggccagcggccatcccatggacgcgctgcagtccagtgccgcttccctggggctgttctattcgcgccgggcgatcgacgacccgcagtacatctatgacgcggtggtgcggctgatcgccaagatccccacgatggtggcggcctttcagctgatccgcaaaggccaagacccaattcagccccgggatgatctggcctactccgccaatttcctttacatgctcacggaacgtgagccggatcccttggcagcgcggatctttgaccgctgcctgatgctccatgccgaacacagcctcaacgccagcaccttcagtgccagggttaccgccagcaccctcaccgacccctacgccgtggtggcttcagctgtaggcaccctcgcggggccactccacggtggcgccaacgaagatgttctcgccatgctcgagcaggtgggcagtcccgagaatgctggcgcttttctggatgaggccatcgccgccaagcgcaaaatcatgggcttcggccaccgggaatacaaggtgaaagatccccgcgccgtgatcctgcagaccctggtagaggagatgttcgccagcttcggccatgacgacctctacgacgtggcccgggcgatcgaagcagaagcagcgtcccgccttggccccaaaggcatctaccccaacgtcgatttctattcaggcctggtgtaccgcaagctcggcattcccagggatctgttcacgccggtcttcgccattgccagggtcgccggctggctggcccattggcgggagcagctcggggcgaaccggattttcaggccttcgcagatctactccggatcccagccacgctcctggatgcccattgaggagcgcgtctcggctccggccgcctaa

SEQ ID NO: 123727 - protein, 397 aa, Synechococcus sp. CC9605
MVAQQQTGDLRHARTGIELRPGLDGVPATQSAICDIDGEKGLLTYRGYPMQDLAANSSFLETAYLLIWGELPGRDQLAEFEHAVQMHRRVSFRVRDMMKCFPASGHPMDALQSSAASLGLFYSRRAIDDPQYIYDAVVRLIAKIPTMVAAFQLIRKGQDPIQPRDDLAYSANFLYMLTEREPDPLAARIFDRCLMLHAEHSLNASTFSARVTASTLTDPYAVVASAVGTLAGPLHGGANEDVLAMLEQVGSPENAGAFLDEAIAAKRKIMGFGHREYKVKDPRAVILQTLVEEMFASFGHDDLYDVARAIEAEAASRLGPKGIYPNVDFYSGLVYRKLGIPRDLFTPVFAIARVAGWLAHWREQLGANRIFRPSQIYSGSQPRSWMPIEERVSAPAA

SEQ ID NO: 123728 - DNA, 1146 bp, Prochlorococcus marinus str. MIT 9312
  CDS (1)..(1146): transl_table=11
ttggatagcaacaaactaattttaaaacccggattagagggtgtcccagttactaattcatctatctgtgatattgacggcaacaaaggtaaattattatatagaggctactccattgaggaattatcaaaaaaaagcagttttttagaaactgcttatctattgatttggggtgatttacctacagctattcaactaagagattttgaacaagaagttcaaatgcatcgaaggttaagttttagagtcagagatatgatgaaatgttttcctgcaacaggtcatcctatggacgcgcttcagtctagtgcagcttctttgggtcttttctattcacgcagagcaatagatgatcctaattacatctacaacgcagtgataagactaatagcaaaaataccaactatgattgctgcctttcaacttattagaaaaggacaagaccctattcaacctcgagatgatttaacttactcatcaaattttctttacatgcttactgaaaaagaacaagatcctatagctgcaaaagtttttgataggtgtttaattctacatgccgaacatagtttaaacgcaagtacatttagcgctagagttaccgcaagcactcttacagacccatatgcagtcattgcctctgcagtaggaacccttgctggcccgcttcatggaggagcaaatgaagatgtgattgcaatgttagaagaaatcaaaactccaaaaaatgccgcctcctttttggataacgcgataaaaaataaaagtaagataatgggcttcggtcatagagaatacaaagtcaaagatccaagagcaattattcttcaaaaacttgcagaagagctttttattagatttggggcagatgaaatgtatgaagttgctaaatcactagaggcagaagcaataccaagacttggaccaaaaggtatattccctaatgtagatttttattccggtcttgtttataggaaacttggtattcctcgtgatttatttactccaatttttgccatatcaagggttgctggttggttagctcattggagagagcaacttggagctaatagaatctttagaccatcgcaaatctatactggttcagctccaagggaatggataagcttagaaaatagagattaa

SEQ ID NO: 123729 - protein, 381 aa, Prochlorococcus marinus str. MIT 9312
MDSNKLILKPGLEGVPVTNSSICDIDGNKGKLLYRGYSIEELSKKSSFLETAYLLIWGDLPTAIQLRDFEQEVQMHRRLSFRVRDMMKCFPATGHPMDALQSSAASLGLFYSRRAIDDPNYIYNAVIRLIAKIPTMIAAFQLIRKGQDPIQPRDDLTYSSNFLYMLTEKEQDPIAAKVFDRCLILHAEHSLNASTFSARVTASTLTDPYAVIASAVGTLAGPLHGGANEDVIAMLEEIKTPKNAASFLDNAIKNKSKIMGFGHREYKVKDPRAIILQKLAEELFIRFGADEMYEVAKSLEAEAIPRLGPKGIFPNVDFYSGLVYRKLGIPRDLFTPIFAISRVAGWLAHWREQLGANRIFRPSQIYTGSAPREWISLENRD

SEQ ID NO: 123730 - DNA, 1302 bp, Rhodospirillum rubrum ATCC 11170
  CDS (1)..(1302): transl_table=11
atgacggactccaagcaaaccgtgacccttgtcgacaaccgctcaggaaaaagttacgaatttcccatcctgagcggttcgaccgggcccgatgtggtagatattcgcaagttctacacggaaacggggatgttcacctacgatccgggctatacctcgacgggcagctgttcctccgccgtgacctatatcgacggcgacgccggcatcctgctccaccgtggctatgccatcgaagaccttgccatgcactgcgactttaccgaagtcgcctatcttttgctgcgcggcgaattgccgacggcgcccaagaagaccgagttcgagaagatcatcacctatcacacgatggtccacgaacagctgcacaagttctatgacggcttccgccgcgatgcccatccgatggccgtcatgtgcggcgtggtcggggcgctctcggccttctatcacgacagcatcgacatcaccgatccgatccagcgcatgatcgcccagcaccggctggtggcgaagatgccgacgatcgccgcctgggcctataagtactcccagggccagcccttcatgtatccgcgcaacaacctgacctacgcggaaaacttcctgcacatgatgttcgccaccccgtgcgaggaatacaaggtcagcccggttctggcccgcgccatggaccgcatcctgatcttgcatgccgaccacgagcagaacgcctcgacctcgaccgtgcggctggccggatcgtcgggggccaatcccttcgcctgtatcgccgccggcatcgcctcgctgtggggccccgcccatggcggcgccaatgaggccgtgctgaagatgctgaccgagatcggcagccccgatcgcgttgacgacttcgtcaagaaagccaaggacaagaacgatccgttccgtctgatgggctttggtcaccgcgtttacaaaaattacgacccgcgcgccaagatcatggccgcgacctgccacgaagtgctcgacgagcttggcatcgtcgacgagccgctgcttgaaatcgccatgcggctggaaaagatcgcgctggaagacgaatacttcatcgaaaagaagctctatcccaacgtcgatttctattccggcatcatcttccgcgccatcggcatcccgacctcgatgttcacctgcctgttcgccctggcgcgcaccgttggctggatcagccagtggaaggaaatgatcgaggaccccgaccagaagatcggccggccgcgccagctgtacaatggcgccaccaaacgcgacttcctgccgatggacaagcgctaa

SEQ ID NO: 123731 - protein, 433 aa, Rhodospirillum rubrum ATCC 11170
MTDSKQTVTLVDNRSGKSYEFPILSGSTGPDVVDIRKFYTETGMFTYDPGYTSTGSCSSAVTYIDGDAGILLHRGYAIEDLAMHCDFTEVAYLLLRGELPTAPKKTEFEKIITYHTMVHEQLHKFYDGFRRDAHPMAVMCGVVGALSAFYHDSIDITDPIQRMIAQHRLVAKMPTIAAWAYKYSQGQPFMYPRNNLTYAENFLHMMFATPCEEYKVSPVLARAMDRILILHADHEQNASTSTVRLAGSSGANPFACIAAGIASLWGPAHGGANEAVLKMLTEIGSPDRVDDFVKKAKDKNDPFRLMGFGHRVYKNYDPRAKIMAATCHEVLDELGIVDEPLLEIAMRLEKIALEDEYFIEKKLYPNVDFYSGIIFRAIGIPTSMFTCLFALARTVGWISQWKEMIEDPDQKIGRPRQLYNGATKRDFLPMDKR

SEQ ID NO: 123732 - DNA, 1302 bp, Burkholderia thailandensis E264
  CDS (1)..(1302): transl_table=11
atgaccccgtctgatgttaaagccacgctatcgttcagcgacaattcgccgagcgtcgaactgccgatctacaagggtacgatgggccccgacgtgatcgatatccgcaagctgtacggccagaccggcaagttcacgtatgacccgggcttcatgtcgacggcgtcgtgcaactcggcgatcacgtacatcgacggcgacaagggcgaactgctgtaccgcggctacccgatcgacaatctcgcgcaaaacgcggacttcctcgaatcctgctatctgctgctcaagggcgagctgccgaacgccgcgcagaagaaggagttcgtcgccaccgtcacgaagcacacgatggtgcacgagcagatgcagttcttctttcgcggtttccgccgcgacgcgcacccgatggcgattctcgtcgccgcggtcggcgcgctgtccgcgttctaccacgactcgctcgacatcaacgatccgcgtcaccgcgaagtgtcggcgatccgcatgatcgcgaagctgccgacgctcgtcgcgatggcgtacaagtacagcatcggccagccgttcgtctatccgcgcaacgatctgtcgtacagcgcgaacttcatgcgcatgatgttcgcgaacccgtgcgaagagtacaaggtcaacgacgtgctcgtccgcgcgctcgaccgcatcctgatcctgcacgccgaccacgagcagaacgcgtcgacgtcgacggtccgtctcgcgggctcgtcgggcgcgaatccgttcgcgtgcatcgcggccggcatcgcgtgtctgtggggcccggcgcacggcggcgcgaacgaagcggcgctgaacatgctcgagcagatcggcacgccggacaacattcccgagttcatcaagcaggtgaaggacaagaactcgggcgtgaagctgatgggcttcggccaccgcgtgtacaagaactacgatccgcgcgcgaagctgatgcgcgaaacgtgctacgaagtgctcaacgagctcggcctgcacgacgatccgctgttcaagctcgcgatgcagctcgagaagatcgcgctcgaagacgagtacttcgtgtcgcgcaagctgtacccgaacgtcgacttctactcgggcatcgtccagcgcgcgctcggcatcccgacgtcgatgttcacctgcatcttcgcgatggcgcgcacggtcggctggatcgcgcagtggaacgagatgatcgccgatcccgagcagaagatcggccgtccgcggcagctcttcatcggcgaaacgccgcgcgcggcgaagccgatcgatcagcgctga

SEQ ID NO: 123733 - protein, 433 aa, Burkholderia thailandensis E264
MTPSDVKATLSFSDNSPSVELPIYKGTMGPDVIDIRKLYGQTGKFTYDPGFMSTASCNSAITYIDGDKGELLYRGYPIDNLAQNADFLESCYLLLKGELPNAAQKKEFVATVTKHTMVHEQMQFFFRGFRRDAHPMAILVAAVGALSAFYHDSLDINDPRHREVSAIRMIAKLPTLVAMAYKYSIGQPFVYPRNDLSYSANFMRMMFANPCEEYKVNDVLVRALDRILILHADHEQNASTSTVRLAGSSGANPFACIAAGIACLWGPAHGGANEAALNMLEQIGTPDNIPEFIKQVKDKNSGVKLMGFGHRVYKNYDPRAKLMRETCYEVLNELGLHDDPLFKLAMQLEKIALEDEYFVSRKLYPNVDFYSGIVQRALGIPTSMFTCIFAMARTVGWIAQWNEMIADPEQKIGRPRQLFIGETPRAAKPIDQR

SEQ ID NO: 123734 - DNA, 1368 bp, Frankia sp. CcI3
  CDS (1)..(1368): transl_table=11
gtgtccgagcaggtcagcacactgaccgtcaccgacaaccgcaccggaaaaacgtatgagataccggttacggacggcgcggtacgtgcgagtgcgtttcgctcgatcaaaacgagcgacgacgacttcgggctgatgacgtacgaccccgccttcacgaacacggcgagctgtaggagtgcgatcacctacatcgacggtgacgccggcatcctgcgctaccgcggctatccgatccaggagctggcggagaagagcagcttcctcgaggtcgcctacctgctcctcgccggcgagcttccctccgccgaggagctgtcgacctgggaagacgagatcacccatcacaccctggtccatgagtcgatcaagaagttcatcgacggcttccaccacgacgcgcacccgatgggcatgctggtctccacggtaggtgcgctgtcgaccttctacccggacgccaagacgatcgacgacccggggctgcgccggctgcagatcgtccgcctgatcgccaagatcacgacattggcggcgttctcctaccggcactcggtcggtttcccgtacgtctacccggacaacgacctgtcctacgccggcaacttcctcaacatgatgtggaaggccaccgagctcaagtacgagccggaccccaacctggagcacgccctcgacgtgctgttcatcctgcacgccgaccacgagcagaactgctcggccaacgcgatgcgcgcggtcggcagctcgcaggcggacccgttctcggcggccgccgccgcgatctccgcgctctacggtccgctgcacggtggcgccaacgagcaggtgctgcggatgctctcggagatcgggtcggtcgagaacatccccgccttcatcgcccaggtgaaggacggcaagaagaagctgatgggcttcggccaccgggtctacaagaactacgacccgcgggcccgggtgatccgtcaggtcgccgacgaggtcttcaaggtcaccggcacgaacccgttcctcgacctggccatggagctggagcggatcgcgctggaggacgagtacttcgtcgcgcgcaagctctacccaaacgtcgacttctacaccggcatcatctaccaggcgatgggcttcccggtagagatgttcccggtgctgttcgccatcggccggatgccgggatggctggcgcagtgggaggagggtctactcgaccccgagcagaagatcgcccgaccgcgccagctgtacatcggctacgaccagcggtcgtatgtcccgatagacgaccgtagcggggtcggggacagcgggatcgacccgatcgcggcccaggcggcccaggcggcaccggagcgcccgctgcgctga

SEQ ID NO: 123735 - protein, 455 aa, Frankia sp. CcI3
MSEQVSTLTVTDNRTGKTYEIPVTDGAVRASAFRSIKTSDDDFGLMTYDPAFTNTASCRSAITYIDGDAGILRYRGYPIQELAEKSSFLEVAYLLLAGELPSAEELSTWEDEITHHTLVHESIKKFIDGFHHDAHPMGMLVSTVGALSTFYPDAKTIDDPGLRRLQIVRLIAKITTLAAFSYRHSVGFPYVYPDNDLSYAGNFLNMMWKATELKYEPDPNLEHALDVLFILHADHEQNCSANAMRAVGSSQADPFSAAAAAISALYGPLHGGANEQVLRMLSEIGSVENIPAFIAQVKDGKKKLMGFGHRVYKNYDPRARVIRQVADEVFKVTGTNPFLDLAMELERIALEDEYFVARKLYPNVDFYTGIIYQAMGFPVEMFPVLFAIGRMPGWLAQWEEGLLDPEQKIARPRQLYIGYDQRSYVPIDDRSGVGDSGIDPIAAQAAQAAPERPLR

SEQ ID NO: 123736 - DNA, 1287 bp, Novosphingobium aromaticivorans DSM 12444
  CDS (1)..(1287): transl_table=11
gtgagcgataaccaggcgtctttgaccgctgacggcaagaccgtggaaatgccggtcaagagcggcacgatcgggccggatgtcatcgatatccgcaagctctatggccagacgggcatgttcacctacgacccgggcttcacctcgacggcgagctgcgattccgcgctcacctacatcgatggcgacgagggcgtgctgctccaccgcggctatccgatcggtcagctcgccgaacattcgtcgttcatggaagtgagctacctgctgctcaacggcgaactgccgagccagcaggaactggcggacttcacccgcacgatcacccgccacaccatgctgcacgaacagcttgcgacgttctatcgcggcttccgccgtgatgcgcacccgatggcgatcatgtgcggcgtggtcggcgcgctttcggcgttctatcacgacagcaccgacatttccgatccgacgcaccgcaagatcagctcgcaccgcctgatcgcgaagatgccgacgatcgcggcaatggcctacaagtattcggtcggccagcccttcgtctatccggacaacaagctgtcgtacaccggcaacttcctgaagatgaccttcggcgtccccgccgaggaatatgaagtgatccccgccgtcgaaaaggcgatggaccgcatcttcatcctccacgccgaccacgagcagaacgcctcgacgtcgaccgtgcgactggccggatcgtcgggcgccaatccgttcgcgtgcatcgcggccggcattgcctgcctgtggggccctgcgcatggcggcgccaacgaagccgcgctgaacatgctcaaggaaatcggcactccggacaagatcccgcactacatcgagcgtgcgaaggacaagaacgatccgttccgcctgatgggcttcggtcaccgcgtctacaagaactacgacccgcgcgcgaccgtgatgcagcagaccgtgcgcgaagtgttcgacgcgctgaaggtcaacgatccgctgttcgagaccgcgctgcgcctcgaagagatcgcgctgaacgacccgtacttcgtcgagaagaagctgttcccgaacgtcgacttctattcgggcatcatcctgtcggcgatcggcttcccgacgacgatgttcaccgtgctcttcgcgctggcccgcaccgtgggctgggttgcgcagtggaacgaaatgatcagcgatcccggccagaagatcggccgtccgcgccagctctacaccggcccgacgcagcgcgattacgtgccgctggctagccgctga

SEQ ID NO: 123737 - protein, 428 aa, Novosphingobium aromaticivorans DSM 12444
MSDNQASLTADGKTVEMPVKSGTIGPDVIDIRKLYGQTGMFTYDPGFTSTASCDSALTYIDGDEGVLLHRGYPIGQLAEHSSFMEVSYLLLNGELPSQQELADFTRTITRHTMLHEQLATFYRGFRRDAHPMAIMCGVVGALSAFYHDSTDISDPTHRKISSHRLIAKMPTIAAMAYKYSVGQPFVYPDNKLSYTGNFLKMTFGVPAEEYEVIPAVEKAMDRIFILHADHEQNASTSTVRLAGSSGANPFACIAAGIACLWGPAHGGANEAALNMLKEIGTPDKIPHYIERAKDKNDPFRLMGFGHRVYKNYDPRATVMQQTVREVFDALKVNDPLFETALRLEEIALNDPYFVEKKLFPNVDFYSGIILSAIGFPTTMFTVLFALARTVGWVAQWNEMISDPGQKIGRPRQLYTGPTQRDYVPLASR

SEQ ID NO: 123738 - DNA, 1236 bp, Anaplasma phagocytophilum HZ
  CDS (1)..(1236): transl_table=11
atggtagaaaaagctgttttggagtgtggagaccgtaggattagtttgccggttttacgcggcacggacgggaccccagtggttgatatcacaaccctatatagggagaacaatgtgctcacatatgacccgggttttatgtccactgctgcttgcagatcagagataactttcattgatggaaacaagggaactctacgctacaggggtattgatatagaaaatctgatcggtacacccaatagcttcagtagtatagtgtatttgttattgaagggtactctgccttctgaaactgagcatgaagagtttgtgcggattttgggcgctgaatacgatgtgcctgaacaagttatgaacgttattagatcattccctcgagattcgcatcctatggctattctcatagctagcttttctgctttagctgctaattaccacgcaagtcgcattgatccgcttacaggtgctatcatcgcaattgcgaaagtacccggcattgttgcaagtatttataggcacactgcaaatctagattttatacaagctgacgcaaacttagagtacacgcatcactttatcaggatgatgtttggcgacatggatgatgcacatcgtgatattatgcacaaagctctagatgcaatttttataatgcacgcagatcatgagcagaatgcctctacttccactgtgcgtatgacaggatcttctggagcaggtttatttgcatgtttgtgcgcaggagtggccactctgtgggggccagcgcatgggggcgcaaatgaggctgttataaagatgcttgctgagattggttcaccagaaaatgtttcgtcatttatcgacaaggtaaaaaacaacaagggcaaaagtcgtcttatggggtttgggcaccgtgtttataaaagctatgaccctagagcgcgtgttttgcgtacaatctgtaaagatgtattagattctctaggtagagatgagaatttgctagctgttgcagaagagttagaaagtcaggctttgcaggatgagtattttattgagcgcaagttgtacccaaatgtcgacttttactcaggtatagtgctaagagctatgggggttccggtagatatgtatactgcattctttgccttggcacggacgtctggatgggcatctcaatggtatgagatgattcaaagtgatgaagggaaacggatcagccgcccacgccagttatacacaggaaaataa

SEQ ID NO: 123739 - protein, 411 aa, Anaplasma phagocytophilum HZ
MVEKAVLECGDRRISLPVLRGTDGTPVVDITTLYRENNVLTYDPGFMSTAACRSEITFIDGNKGTLRYRGIDIENLIGTPNSFSSIVYLLLKGTLPSETEHEEFVRILGAEYDVPEQVMNVIRSFPRDSHPMAILIASFSALAANYHASRIDPLTGAIIAIAKVPGIVASIYRHTANLDFIQADANLEYTHHFIRMMFGDMDDAHRDIMHKALDAIFIMHADHEQNASTSTVRMTGSSGAGLFACLCAGVATLWGPAHGGANEAVIKMLAEIGSPENVSSFIDKVKNNKGKSRLMGFGHRVYKSYDPRARVLRTICKDVLDSLGRDENLLAVAEELESQALQDEYFIERKLYPNVDFYSGIVLRAMGVPVDMYTAFFALARTSGWASQWYEMIQSDEGKRISRPRQLYTGK

SEQ ID NO: 123740 - DNA, 1197 bp, Neorickettsia sennetsu str. Miyayama
  CDS (1)..(1197): transl_table=11
atgaattctgaaaaagtaaaagtgaatgtggaggaatttttaaaaagcacagctggacccttcggtgtctctgcctctttggaaccaaagggattcttttatgatccagggtatgcaaaaactgctccatgcaaatctagcattactttcatagatggtgaaaatgggatacttctgcacaggggctacccaatagaggaattggcacaaacttctgactttttgcaggtcggctaccttctcattgacggcaaacttccagattccgctgctacgcgagagtttgaagagaggataaaacacgtaccgcagcttcctgagtgtgtcttgaaaaatatccgttctttcccaacgagtgcgcacccgatggcagttttaatctctgcacttgcttcgctcgcctcagtgtacggagaaatggactttaatcagaagaagttacttttagttgcctatacgccatggctcatagcgcatatataccgacacatcaattctctggagttcgttgaacctgacatcaggcttccttataccgagaatttcctgtacatgatgtttggtgagaaaaagcccaaagatgcggaaatcttggacaaaatctttatcttgcatgcggaccatggtcaaactgcttcgacctctgttgcacggatggttgtatcttcaggagcaagcccgattgcggcatgttctgcggctacagctagtttatggggaccactgcacggtggcgcaaatgagcgagtcctggaaatgttgagaggtatagttgaaagcggtgagaaggtagaaaacttcattgagcgcgttaaaagaaaagaagagagacttatgggttttgggcacagggtgtataaaaactatgatcctcgtgcagccatattaaagcaaaaggctcatgatgtgctaaaagccgattcacctattctaaaaactgctggcgaacttgaaacaatcacagcaagggaagagtactttctgagtcgcaaattatatcctaatgtcgacttctattcgggaatagtgctagacgcactgggaatatcatcttgcatgttcacaccgattttcgcacttgctagaacagtaggttgggttgcacaaatcacagagttcttgagtgacagtgaacaaaaactttgcagacctagacaaatttacgtaggcgaaccaagaagaaacgtacacggttga

SEQ ID NO: 123741 - protein, 398 aa, Neorickettsia sennetsu str. Miyayama
MNSEKVKVNVEEFLKSTAGPFGVSASLEPKGFFYDPGYAKTAPCKSSITFIDGENGILLHRGYPIEELAQTSDFLQVGYLLIDGKLPDSAATREFEERIKHVPQLPECVLKNIRSFPTSAHPMAVLISALASLASVYGEMDFNQKKLLLVAYTPWLIAHIYRHINSLEFVEPDIRLPYTENFLYMMFGEKKPKDAEILDKIFILHADHGQTASTSVARMVVSSGASPIAACSAATASLWGPLHGGANERVLEMLRGIVESGEKVENFIERVKRKEERLMGFGHRVYKNYDPRAAILKQKAHDVLKADSPILKTAGELETITAREEYFLSRKLYPNVDFYSGIVLDALGISSCMFTPIFALARTVGWVAQITEFLSDSEQKLCRPRQIYVGEPRRNVHG

SEQ ID NO: 123742 - DNA, 1251 bp, Ehrlichia chaffeensis str. Arkansas
  CDS (1)..(1251): transl_table=11
atggttaaagaagcagtattagaattggatggtcaaagaataaaattgccggtgttatatgatactcatgggaataaggctgtagatattacttctttatataaaaatacaggaatattaacttatgatccaggatttatgtctactgctgcttgtgaatctaggattacatttattgatgggaataaaggtatattatgttataggggacatgatatagtaaatttagtaaataataataaaagttttatagaaatagtgtatttgttattttatggtgttctccctggtcttgaggatttgcaaaattttatatcgcaaatttctcaggaatataaccctcctaagatagttcatgatgttataaaatcattcccacgagattcacatcctatgtctatattaatggcatgtttttctgcgttagcatcatgttatcataatcaggataatagtgcagatcaattaaagtgtgctaagttagcagttgctaaagttgcaagtataatagcactgatttatagatatataaccaatcaagattttgtcgaatctgatacaaagttatcttacagtgaaaattttgtacatatgatgtttgatatttcttcttataagttcactcaagttgttgctaaggctttggatattatttttgtattacatgctgatcatgaacagaatgcttctactgctactgttagattatctggttcttcaggtgcagatttatttgcttgtttagtggcgggaacagcgactttgtgggggccagctcatggtggagcaaatgaagctgtgattaatatgttaatggcaattgaaaagccaagtaatgtaaagcaatttattcaaaaggtaaaagatggtaacaagagtactagacttatggggtttggtcatagagtatataagaattatgacccacgtgctaaaataatgtataaaatttgtagagaagtattaaataatttaaatgtgaatgatccattattagaaatagcattagagttagaaaatatagcattacaagatagttattttattgatcgtaatttgtatcctaatgtagatttttattccggaattgttttaaaagctattggaatcccggttaggatgtttactacattatttgcattagctagaacgtctggttggtctgctcaatggtatgagatggtagcagaagaaaattataaaatatgtcgtccacgtcagttgtatactggtaatattgcagaatgttaa

SEQ ID NO: 123743 - protein, 416 aa, Ehrlichia chaffeensis str. Arkansas
MVKEAVLELDGQRIKLPVLYDTHGNKAVDITSLYKNTGILTYDPGFMSTAACESRITFIDGNKGILCYRGHDIVNLVNNNKSFIEIVYLLFYGVLPGLEDLQNFISQISQEYNPPKIVHDVIKSFPRDSHPMSILMACFSALASCYHNQDNSADQLKCAKLAVAKVASIIALIYRYITNQDFVESDTKLSYSENFVHMMFDISSYKFTQVVAKALDIIFVLHADHEQNASTATVRLSGSSGADLFACLVAGTATLWGPAHGGANEAVINMLMAIEKPSNVKQFIQKVKDGNKSTRLMGFGHRVYKNYDPRAKIMYKICREVLNNLNVNDPLLEIALELENIALQDSYFIDRNLYPNVDFYSGIVLKAIGIPVRMFTTLFALARTSGWSAQWYEMVAEENYKICRPRQLYTGNIAEC

SEQ ID NO: 123744 - DNA, 1260 bp, Francisella tularensis subsp. holarctica
  CDS (1)..(1260): transl_table=11
atgagtaaatacgcaactcttaagtatgcagataaaaatattgaaatagaattaccagtatattctcctagcttgggtaatgactgcatagatgtttcatcattagtaaaacacggaatttttacttatgatcctggattcatgtctacagctgcatgcgaatctaaaattacatatatcgatggtggtaaaggtgtacttttacatagaggctacccaatcgaagaatggactcaaaaatcaaactacagaactctttgctatgcattgatttatggcgaactcccaacagatgaacaggttaaaagctttagacaagaaattatcaataaaatgccagtatgcgagcatgtcaaagctgcaatagctgcaatgcctcaacatacacatccaatgtcaagcttaatagctggtgttaatgtcttagctgctgaacatatccacaatggacaaaaagaatctcaagatgaagtcgcaaaaaatatcgtagcaaaaattgcaactatagcagccatggcttacagacataatcacggcaagaaattcttagaacctaaaatggaatatggctatgctgagaatttcttgtatatgatgtttgctgatgatgagagctacaaaccagatgagctacatatcaaagcaatggatacaatatttatgcttcatgctgatcacgagcaaaatgcttcaacatcaactgtaaggttatcaggatcaactggtaactctccttatgcggcaattatcgcaggcattaccgcattatggggacctgctcatggcggcgctaatgaagctgtgcttaaaatgttatctgaaattggtagcactgagaatatcgataagtatattgctaaagcgaaagataaagatgatccatttagattaatgggctttggacatagagtctacaaaaatactgatccgagagctactgcaatgaaaaagaactgtgaagaaatacttgctaaacttggtcatagtgataaccctcttctcacagtagctaaaaaactagaagaaattgctttacaagatgagttctttatcgagagaaagcttttctctaatgttgatttttactcaggtataatcttaaaagccatgggcattccagaagatatgtttacagccatatttgctctagcaagaacatcagggtggatatctcaatggatagagatggttaatgatcctgctcaaaagattggtcgtccaagacaattatatactggtgcaacaaatagaaatttctaa

SEQ ID NO: 123745 - protein, 419 aa, Francisella tularensis subsp. holarctica
MSKYATLKYADKNIEIELPVYSPSLGNDCIDVSSLVKHGIFTYDPGFMSTAACESKITYIDGGKGVLLHRGYPIEEWTQKSNYRTLCYALIYGELPTDEQVKSFRQEIINKMPVCEHVKAAIAAMPQHTHPMSSLIAGVNVLAAEHIHNGQKESQDEVAKNIVAKIATIAAMAYRHNHGKKFLEPKMEYGYAENFLYMMFADDESYKPDELHIKAMDTIFMLHADHEQNASTSTVRLSGSTGNSPYAAIIAGITALWGPAHGGANEAVLKMLSEIGSTENIDKYIAKAKDKDDPFRLMGFGHRVYKNTDPRATAMKKNCEEILAKLGHSDNPLLTVAKKLEEIALQDEFFIERKLFSNVDFYSGIILKAMGIPEDMFTAIFALARTSGWISQWIEMVNDPAQKIGRPRQLYTGATNRNF

SEQ ID NO: 123746 - DNA, 1365 bp, Saccharophagus degradans 2-40
  CDS (1)..(1365): transl_table=11
atggcagatgtaatttcttacaatttattcattttgttacaggagtccgtaatgactgataagaaagcaacccttacggtcgacggtttggacgattccattgagctgcccgtatactccggcagcgtcgggccagacgtaattgacgttcgagcccttaccggcaaaggttatttcacctacgaccccggtttcgtatctaccgcttcttgtgaatcgaagatcacatatattgatggcgacaaaggtgtattaatgcaccgtggttaccccatcgaaactctcgcggaaaaatcagactacttagagacgtgctatttacttttgcacggagaacttccttccgcagcagaatacgaagaatttaaaggcataatcacacaccacactatggtgcatgagtctatcgcccgcttcttccgtggtttccactacgattcacacccaatggcgatgatgtgcggaatagtgggtgctttatccgctttctatcacgattcattagacatctctaacccagagcaccgcttaatctcggcgcaccgtctaatagccaaaatgcctaccttagcggccatgtgctacaagcactcgcaaggccaacctttcatgtacccagacaacaacttgggctacgcagaaaacttcctgcacatgatgtttggcactccttgtgacgaccctaaagtaaaccctgttattgctcgcgcaatggatcgcatcttcttattgcatgccgatcacgagcaaaacgcgtctacttctaccgttcgcttggcaggctcttctggtgctaacccgtttgcttgtatcgctgctggtatcgcaaccctttggggccctgcgcacggtggtgctaacgaagccgtacttagcatgctagaagaaattggcgacgagaaaaacatcgacgcttacgtagcaaaagcgaaagacaaaaacgatccattccgcctaatgggctttggtcaccgcgtttacaaaaactttgacccacgcgccaaagttatgaaagaaacctgtgacgaagtattaaccgaattaggtttagaaaacgatccgttgcttaaaattgctaagcgcctagagcaaattgcattagaagacgagtacttcatccagaagaaactctaccctaacgtagacttctactcaggcatcatcatgaaggctattggtattccaacagatatgttcactgttattttcgcaacaggtcgtactgtaggctggattgctcactggcacgaaatgatctcggaaggctttaaaattggtcgtccgcgtcagctttatactggctctgtattacgcgaatttgaagagcgtgattcgcgcccaaaggctaatccggccaaattctaa

SEQ ID NO: 123747 - protein, 454 aa, Saccharophagus degradans 2-40
MADVISYNLFILLQESVMTDKKATLTVDGLDDSIELPVYSGSVGPDVIDVRALTGKGYFTYDPGFVSTASCESKITYIDGDKGVLMHRGYPIETLAEKSDYLETCYLLLHGELPSAAEYEEFKGIITHHTMVHESIARFFRGFHYDSHPMAMMCGIVGALSAFYHDSLDISNPEHRLISAHRLIAKMPTLAAMCYKHSQGQPFMYPDNNLGYAENFLHMMFGTPCDDPKVNPVIARAMDRIFLLHADHEQNASTSTVRLAGSSGANPFACIAAGIATLWGPAHGGANEAVLSMLEEIGDEKNIDAYVAKAKDKNDPFRLMGFGHRVYKNFDPRAKVMKETCDEVLTELGLENDPLLKIAKRLEQIALEDEYFIQKKLYPNVDFYSGIIMKAIGIPTDMFTVIFATGRTVGWIAHWHEMISEGFKIGRPRQLYTGSVLREFEERDSRPKANPAKF

SEQ ID NO: 123748 - DNA, 1293 bp, Methylobacillus flagellatus KT
  CDS (1)..(1293): transl_table=11
atgaaaccaagcaaagtcacccttactttcgatgatggttccgcgccaatcgaactccctattctacccggcaagctggggcccagtgttattgatatccgctccctgagcaagcatggctatttcacttacgatcccggcttcctatcaacagcctcttgtgactccaatatcactttcatcgatggcgaggaaggattgctgttttatcgcggctaccccatcgagcaactcgcagagcactccgacttcatggaagtcagctacttgctcatctatggcgagctacccaatgcggagcagaaagaaaaattcaccaataccattacgcgccacagcatggtgcatgatcagcttacgcacatcttccgcggcttcagacgcgatgcacatccgatggcagtcatggtcggtgttgtcggctccatgtcagccttctaccatgaggcaattgatgtcagcgatccgagaaaccgtgagttcgctgcgcatcgcctgttggccaaagtccctaccattgctgcctggagctacaagtacaacgttggtcagcctttcatgtacccaaagaaccgcttcaattatgcggaaaacttcatgcacatgatgttcgctaccccatgtgaggattacgaacccaaccctgtattggcaaaggcttttgagcgtattctgattctgcatgctgaccatgagcaaaatgcctctacctctacagtccgtttggcaggctccagcggggccaacccatttgcctgtgtcgctgcgggtattgcttcattgtgggggcccgcacacggcggtgccaacgaagccacgctgaaaatgctggaggaaatcggcgatatcagccgtatcggtgagtacattaagcgcgccaaagacaaaaccgattcgttccgcttaatgggattcggccaccgcgtctaccgcaacatggacccacgcgcagccatcatgcgccagacctgtcatcaagtgctcgacgagctcggcctgaatgatgaccccatgttcaaacttgcactggaactggaaaagattgcactggaagatgaatacttcgtcagccgtcggctgtatccgaatgtcgacttctattctggcatcgtcatgcgtgcaatgggtattccgaactcaatgttcacggctatctttgccttggcgcgtaccgtcggctgggttgctcaatggaatgagatgatgtccgacccaggctccaagataggccgtccacgccaactatatactggtccggaacgtcgcgactttcttccgctggatcagcgttaa

SEQ ID NO: 123749 - protein, 430 aa, Methylobacillus flagellatus KT
MKPSKVTLTFDDGSAPIELPILPGKLGPSVIDIRSLSKHGYFTYDPGFLSTASCDSNITFIDGEEGLLFYRGYPIEQLAEHSDFMEVSYLLIYGELPNAEQKEKFTNTITRHSMVHDQLTHIFRGFRRDAHPMAVMVGVVGSMSAFYHEAIDVSDPRNREFAAHRLLAKVPTIAAWSYKYNVGQPFMYPKNRFNYAENFMHMMFATPCEDYEPNPVLAKAFERILILHADHEQNASTSTVRLAGSSGANPFACVAAGIASLWGPAHGGANEATLKMLEEIGDISRIGEYIKRAKDKTDSFRLMGFGHRVYRNMDPRAAIMRQTCHQVLDELGLNDDPMFKLALELEKIALEDEYFVSRRLYPNVDFYSGIVMRAMGIPNSMFTAIFALARTVGWVAQWNEMMSDPGSKIGRPRQLYTGPERRDFLPLDQR

SEQ ID NO: 123750 - DNA, 1302 bp, Burkholderia xenovorans LB400
  CDS (1)..(1302): transl_table=11
atgaccccgtcagatgttaaagccacgctatcgttcagcgacaattcgccgagcgttgaaatgccgatctacaagggcactctcggcccggacgtgatcgacatccgcaaactgtacggccagaccggcaagttcacgtacgacccgggcttcatgtcgacggcggcgtgcaattcggcgatcacctacatcgacggcgataagggcgagttgctgtaccgcggctacccgatcgacaacctcgcggaaaacgccgacttcctcgaaacctgctatctgctgctgaagggcgaactgccgaacgcacagcagaacgccgaattcgtgaagacggtcacgaaccacacaatggtgcatgagcaaatgcacttcttcttccgtggtttccgtcgcgacgcgcacccgatggcgattctggttgccgcagtcggcgcattgtcggccttctatcacgactcgctcgacatcaacaatccgcgtcaccgtgaagtgtcggctattcgcatgatcgcgaagctgccgacgctggtggcaatggcgtacaagtacagcatcggccagccgtttgcgtacccgaagaacgacctgtcgtacagcgcgaacttcatgcacatgatgttctcgaacccgtgcgaagagtacaaggtcaacgacgtgctggtgcgcgcgctcgaccgtatcctgatcctgcacgccgaccacgaacagaatgcgtcgacctcgaccgtgcgtctcgccggttcgtcgggtgcgaatccgttcgcgtgtatcgcggccggtatcgcgtgtctatggggcccggcgcacggcggtgcgaacgaagccgcactgaacatgctggaagaaatcggctcggtggacaacattcccgagttcatcaagcaggtgaaggacaagaactcgggcgtgaagctgatgggcttcggtcaccgcgtctacaagaactacgatccgcgtgccaagctgatgcgcgaaacctgccacgaagtgctggaagaactgggcctgcacgacgacccgctgttcaagctggcaatggcgctggaaaagatcgcactggaagacgaatacttcgtgtcgcgcaagctgtacccgaacgtcgacttctactcgggcatcgtgcagcgcgcgctgggcatcccgacctccatgttcacgtgtatcttcgcgatggcgcgtacggtcggctggatcgcacagtggaacgaaatgatcgcggatccggaacagaagattggccgtccgcgtcagctgttcattggcgacacgcaacgtgaagccaagccgatcgcgcaacgttaa

SEQ ID NO: 123751 - protein, 433 aa, Burkholderia xenovorans LB400
MTPSDVKATLSFSDNSPSVEMPIYKGTLGPDVIDIRKLYGQTGKFTYDPGFMSTAACNSAITYIDGDKGELLYRGYPIDNLAENADFLETCYLLLKGELPNAQQNAEFVKTVTNHTMVHEQMHFFFRGFRRDAHPMAILVAAVGALSAFYHDSLDINNPRHREVSAIRMIAKLPTLVAMAYKYSIGQPFAYPKNDLSYSANFMHMMFSNPCEEYKVNDVLVRALDRILILHADHEQNASTSTVRLAGSSGANPFACIAAGIACLWGPAHGGANEAALNMLEEIGSVDNIPEFIKQVKDKNSGVKLMGFGHRVYKNYDPRAKLMRETCHEVLEELGLHDDPLFKLAMALEKIALEDEYFVSRKLYPNVDFYSGIVQRALGIPTSMFTCIFAMARTVGWIAQWNEMIADPEQKIGRPRQLFIGDTQREAKPIAQR

SEQ ID NO: 123752 - DNA, 1299 bp, Burkholderia xenovorans LB400
  CDS (1)..(1299): transl_table=11
atgaactcgaagacacacgcaacgctgagcttttccgacagcgaccagactattgatctgccgatttatcagggcgcgctcggaccggatgtgatcgacatccgcaagctgtacggccagaccggcaagttcacgtacgacccgggcttcatgtccacggcggcatgcaattcggcgatcacctacattgacggcgataagggcgaactgctgtatcgcggttatccgatcgacaacctcgcgcagaacgccgacttcctcgaaacctgctatctgctgctcaagggtgaactgccgaacgcgcagcagaaggaagagttcgtcaaaacggtcacgcaacacacgatggtgcacgaccagatgcacttcttcttccgcggtttccgtcgcgacgcgcacccgatggcgattctggttgccgctgtcggcgcattgtcggccttctatcatgactcgctcgacatcagcaatccggagcaccgcgaaatttccgcgatccgcatgatcgcgaagctgccgacgctggtggcgatggcgtacaagtacaccgtgggtcagccgttcgtttatccgaagaacgacctgtcgtacagcgcgaatttcatgcgcatgatgttcgccaatccggcggaagagtacaaggtcaacgacgtgctggtgcgcgcgctcgaccgtatcctgatcctgcacgccgaccacgaacagaatgcgtcgacctcgaccgtgcgtctcgccggctcgtcgggtgcgaatccgttcgcgtgtatcgcagccggtattgcgtgtctgtggggcccggcgcacggtggcgcgaacgaagccgcgctgaacatgctggaagaaatcggttcggtcgacaacattcccgagttcatcgcgcaggtgaaggacaagaattcgggcgtgaagctgatgggcttcggtcaccgcgtctacaagaactacgatccgcgtgcgaagctgatgcgcgaaacctgccacgaagtgctggaagaactgggcctgcacgacgacccgctgttcaagctggcaatggcgctggaaaagatcgcactggaagacgattatttcgtgtcgcgcaaactgtacccgaacgtcgacttctactcgggtatcgtgcagcgcgcactcggcattccgacggccatgttcacgtgtatcttcgcgatggcgcgtacggtcggctggatcgcacagtggaacgaaatgatcgcggatccggaacagaagattggccgtccgcgtcagctcttcgtgggcgagacgcaacgcgaagcgaagccgctcgcgaagcggtaa

SEQ ID NO: 123753 - protein, 432 aa, Burkholderia xenovorans LB400
MNSKTHATLSFSDSDQTIDLPIYQGALGPDVIDIRKLYGQTGKFTYDPGFMSTAACNSAITYIDGDKGELLYRGYPIDNLAQNADFLETCYLLLKGELPNAQQKEEFVKTVTQHTMVHDQMHFFFRGFRRDAHPMAILVAAVGALSAFYHDSLDISNPEHREISAIRMIAKLPTLVAMAYKYTVGQPFVYPKNDLSYSANFMRMMFANPAEEYKVNDVLVRALDRILILHADHEQNASTSTVRLAGSSGANPFACIAAGIACLWGPAHGGANEAALNMLEEIGSVDNIPEFIAQVKDKNSGVKLMGFGHRVYKNYDPRAKLMRETCHEVLEELGLHDDPLFKLAMALEKIALEDDYFVSRKLYPNVDFYSGIVQRALGIPTAMFTCIFAMARTVGWIAQWNEMIADPEQKIGRPRQLFVGETQREAKPLAKR

SEQ ID NO: 123754 - DNA, 1143 bp, Acidobacteria bacterium Ellin345
  CDS (1)..(1143): transl_table=11
atgtccacaacgacgcctacatataccaagggtttggaagacgtaatcgccgggccatccagcatttgctacatcgatggagacgctggaatcctggcgtaccgcggcattgatatccacgaactggccgacaattccaacttcgaggaagtctgctacctcctctggttcggcaagctgcccaaccgcaccgagctgcaggaactgaagctgaacatggcccgcgagcgcaagctcgacgcctcggtgatcagcatcctgcgccaggcccccaagcacgctctgccaatggacgtgctccgcaccgtggtctcggccacggcgttgtgggaccccgaagagaagaacaacgatcacgacaccaacgtgcgcaaggccatccgcctgacctctcaaatggcgatgatcgtcacggcttacgaccgcatccgcaaaggcaagccgctggttgaaccggaccgcactttgtcacatgccgccaacttcctgctcatgctctcgggcgaagtcccgagcaagagcgcggaaaaggcgctcgacatcgcgctgatcctgcaagctgaccacgagctaaacgcctcgacgtttgctgcccgcgtagtggccgcgacgctcagcgacatgcactcggccgtgaccgccggaattggcgcgctgaagggtccgctgcacggtggcgcgaacgaagctgttttccgcatcctcgacgaaattgacaagcttggcgccgacccggtcgagtacatcaagggcatgctggcgcagaagaaaaaggttcccggcttcggccatcgcgtgtacaccaccgaagacccgcgcgccacgcacttgcgccagatgtcgcgtgacctcggttactccagcggccagatcaagtggttcgagaactcccgcgccatcgaggagttcatcaagtcggaaaagaagctcaacgccaacgttgatttctattcggcttctacataccacatgcttggcattgatgtggacctgttcacgccaatcttcgcagtctcgcgcgtttcaggctggtcagcgcacgtcatcgagcagttggatgacaaccgcctgatccgtccgcgcgcagattacgtcggtccgaagcatccgacggcatacacgcagatggaccagcgcgcatag

SEQ ID NO: 123755 - protein, 380 aa, Acidobacteria bacterium Ellin345
MSTTTPTYTKGLEDVIAGPSSICYIDGDAGILAYRGIDIHELADNSNFEEVCYLLWFGKLPNRTELQELKLNMARERKLDASVISILRQAPKHALPMDVLRTVVSATALWDPEEKNNDHDTNVRKAIRLTSQMAMIVTAYDRIRKGKPLVEPDRTLSHAANFLLMLSGEVPSKSAEKALDIALILQADHELNASTFAARVVAATLSDMHSAVTAGIGALKGPLHGGANEAVFRILDEIDKLGADPVEYIKGMLAQKKKVPGFGHRVYTTEDPRATHLRQMSRDLGYSSGQIKWFENSRAIEEFIKSEKKLNANVDFYSASTYHMLGIDVDLFTPIFAVSRVSGWSAHVIEQLDDNRLIRPRADYVGPKHPTAYTQMDQRA

SEQ ID NO: 123756 - DNA, 1296 bp, Silicibacter sp. TM1040
  CDS (1)..(1296): transl_table=11
atgaccgacacacagaaaacagcccagctcagcttgaatggtgagacctacgaactccccatcttctcgccgactgccgggcccgatgttctggatatccgcaagctctacgcgcagtccggagtgttcacctatgatccgggcttcacctccactgcgagctgtgacagcacgatcacctatatcgacggcaacgaaggtgtgctgctgcatcgtggctatccgatcgaccagctggccggtaaatcccactacctcgaagtctgctacctgctcctttatggtgagctgccgaccgcgacgcagcttgaggatttcgagacccgtgtgacccgccacaccatggtccacgagcagatgcacaacttcttccgtggtttccgccgggacgcgcacccgatggcaaccttggtgggcgttgtgggcgcaatgtcggccttctatcacgactccaccgacatctccgatccgtggcagcgtgaagtggctgcaatccgcctgattgcaaaactgccgacgattgctgcgatggcctacaagtattccatcggccagccgtttgtgtatccgcgcaacgatctggattacgccgcgaacttcctgcacatgtgtttctctgtcccggccgagaactacaccgtggacccgatcctgagccgcgcgatggaccggatcttcaccctgcatgcggaccacgagcagaacgcctcgacctcgaccgtgcgtctggcgtcctcctccggggccaacccctttgcctgtatcgcagctggcattgcctgcctctggggccctgcccacggtggcgccaaccaggcctgcctcgagatgctcaaggaaatcggctctgtcgatcgcattccggagttcatcgcacgcgccaaagacaagaacgatccgttccgtctgatgggctttggccaccgcgtctacaagaacacggacccgcgcgccaaggtgctgaagcagtctgcagacgaagtgctggagcttctgggcgtggaagacaacccgctcctgcaggtcgccaaggaactcgagcagaccgcgctcaacgatccgtatttcatcgagaaaaagctgttcccgaacgtggacttctactcgggcatcatcctcgaggcgatgggcttcccgacctccatgttcaccccgatctttgcgctgtcgcgcaccgtcggctggatctcccagtggaaagaaatgatcggtgatccgcagaacaaaatcggccgtccgcgccaattgtatctcggtgagacacagcgcgactatgtcgacatcgaaaaccgctaa

SEQ ID NO: 123757 - protein, 431 aa, Silicibacter sp. TM1040
MTDTQKTAQLSLNGETYELPIFSPTAGPDVLDIRKLYAQSGVFTYDPGFTSTASCDSTITYIDGNEGVLLHRGYPIDQLAGKSHYLEVCYLLLYGELPTATQLEDFETRVTRHTMVHEQMHNFFRGFRRDAHPMATLVGVVGAMSAFYHDSTDISDPWQREVAAIRLIAKLPTIAAMAYKYSIGQPFVYPRNDLDYAANFLHMCFSVPAENYTVDPILSRAMDRIFTLHADHEQNASTSTVRLASSSGANPFACIAAGIACLWGPAHGGANQACLEMLKEIGSVDRIPEFIARAKDKNDPFRLMGFGHRVYKNTDPRAKVLKQSADEVLELLGVEDNPLLQVAKELEQTALNDPYFIEKKLFPNVDFYSGIILEAMGFPTSMFTPIFALSRTVGWISQWKEMIGDPQNKIGRPRQLYLGETQRDYVDIENR

SEQ ID NO: 123758 - DNA, 1302 bp, Myxococcus xanthus DK 1622
  CDS (1)..(1302): transl_table=11
atggccaaggacacgctgacgatcaccgacaatcggaccgggaagacctacgaggtcccgatcgagaacggctgtattcgcaccaatgctctccgccagatcaaaacgggcgacgatgactttgggttgatgggctacgatccggcgttcctcaataccgccaactgcaagagcgccatcaccttcatcgacggagacaagggcatcctggagtaccggggctaccccatcgagcagctcgcggagaagtcgagcttcctcgaggtcgcctacctcctgctgaacggtgagcttccctccgagaaggagctgcagcagttcaaccacctcgtcacgcaccacacctacgtgcacgagaacgtgaagagcttcatggacgggttccgctacgacgcgcaccccatgtccatggtgagctccacggtggcggcgctgtccagcttctaccccgacgcgaagaacatcaaggacccgctgagccgccgcatccagatcacgcggctcatcgcgaagatgcccaccatcgccgcgttctcctaccggcacacgatgggcctgccgtacatctacccggacaacgacctgtcctacgtcgccaacttcctggcgatgatcaagcgcatcggcacgtcgacctacaaggtccacccggtgctcgagcgcgcgctcgacatcctcttcatcctgcacgcggaccacgagcagaactgctccaccacgtccgtgcgcacggtgggctcgtccgaggtggatccgtactcggcggtcagcgcgggcatcggcgccctctacggcccgctgcacggcggcgccaacgaggcggtgctccgcatgctccgcgacatcggccacgtctccaagatcccggagttcatcaagtcggtgaagagcggcgagggtgagaagaagctgatgggcttcggtcaccgcgtctacaagtcctacgatccgcgcgccaaggtcatcaagcgcgtggccgacgaggtcttcgaggtgacgggcaagaacccgctgctggagatcgccgtcgagctggagcgcatcgcgctcgaggacgagtacttcgtgaagcggaagctgtacccgaacgtcgacttctactcgggcctcatctacgaggcgatgggcttccaggtcgagatgttcccggtgctcttcgccatcccccgcacggtgggctggtgcgcgcagtgggaggagatggtgacggacaacgagcagaagattgcccgtccgcgccaggtgttcacgggcgccccgcgccgcgactacgtccccatggacaagcgcgccgtcaagtag

SEQ ID NO: 123759 - protein, 433 aa, Myxococcus xanthus DK 1622
MAKDTLTITDNRTGKTYEVPIENGCIRTNALRQIKTGDDDFGLMGYDPAFLNTANCKSAITFIDGDKGILEYRGYPIEQLAEKSSFLEVAYLLLNGELPSEKELQQFNHLVTHHTYVHENVKSFMDGFRYDAHPMSMVSSTVAALSSFYPDAKNIKDPLSRRIQITRLIAKMPTIAAFSYRHTMGLPYIYPDNDLSYVANFLAMIKRIGTSTYKVHPVLERALDILFILHADHEQNCSTTSVRTVGSSEVDPYSAVSAGIGALYGPLHGGANEAVLRMLRDIGHVSKIPEFIKSVKSGEGEKKLMGFGHRVYKSYDPRAKVIKRVADEVFEVTGKNPLLEIAVELERIALEDEYFVKRKLYPNVDFYSGLIYEAMGFQVEMFPVLFAIPRTVGWCAQWEEMVTDNEQKIARPRQVFTGAPRRDYVPMDKRAVK

SEQ ID NO: 123760 - DNA, 1338 bp, Rubrobacter xylanophilus DSM 9941
  CDS (1)..(1338): transl_table=11
gtgacacaggagccgcagggcaggtcggatggtgctgcctccaccgttcagaaggacgggagcctttcggtcacggacaaccgcacgggcaggagctacgagatagagataaaggacggcaccgtccgctcgatggacttccggcagataaaggtcgacgaggacgacttcggcctcatgacctacgatcccggctacaccaacacggcgagctgccggagcgccatcacctacatcgacggcgagaggggcattctgcagcatcgggggatcccgatcgaggagctctgcgagcactccacctacctcgaggtggcctacctgctcatccacggccacctgccgaccgaggaggagctctcgcagtgggtctatgacataacccaccacacctacgtccacgagaacataaagagcttcatggacggcttccggcacgacgcgcaccccatgggcatcctgctcgccagcgtcggggcgctctccaccttctacccggaggccagcgacatagacgacgaggagcagcggaacatggcggcgatacgcctgatcgccaagatgcccaccatcgccgcctttgcctaccggcactccctcgggctgccctacgtctacccggacaacgacctctcctacaccggcaacttcctctccatgctcttcaagatggccgagcccaagtacgagccggacccgaggctcgagaaggcgctcgacgtcctcttcatcctgcacgccgaccacgagcagaacgcctccacctccgccgtcaggacggtgggctccacccgggccgacccctacaccgccgtcgccgccggggtggccgccctctacggcccgctgcacggcggggcgaacgtcgcggtgctcaagatgctccagcgcatcggcagcgtgaagaacatcccggacttcctggagaccgtcaagcagggcaaggagcgcctcatgggcttcggccaccgcgtctacaagaactacgacccgcgcgcccggatcatcaagagccacgtggacgaggtgctcgaggccaccggcaaggagagcccctggctggacatagccgtggagctggagaagcgggcgctcgacgacgagtacttcaccagccgcaagctctaccccaacgtggacttctactccggcctcatctacgaggcgctcggcatccccaccgaggccttcaccgtcatgttcgccatccccaggacgtccggctggatcgcccagtggatggagatgctgcgcgacccggagctcaagatcgcccgcccgcgccagatctacaccgggccgcgcgaccagcactacgtcccgatgagcgagcgctag

SEQ ID NO: 123761 - protein, 445 aa, Rubrobacter xylanophilus DSM 9941
MTQEPQGRSDGAASTVQKDGSLSVTDNRTGRSYEIEIKDGTVRSMDFRQIKVDEDDFGLMTYDPGYTNTASCRSAITYIDGERGILQHRGIPIEELCEHSTYLEVAYLLIHGHLPTEEELSQWVYDITHHTYVHENIKSFMDGFRHDAHPMGILLASVGALSTFYPEASDIDDEEQRNMAAIRLIAKMPTIAAFAYRHSLGLPYVYPDNDLSYTGNFLSMLFKMAEPKYEPDPRLEKALDVLFILHADHEQNASTSAVRTVGSTRADPYTAVAAGVAALYGPLHGGANVAVLKMLQRIGSVKNIPDFLETVKQGKERLMGFGHRVYKNYDPRARIIKSHVDEVLEATGKESPWLDIAVELEKRALDDEYFTSRKLYPNVDFYSGLIYEALGIPTEAFTVMFAIPRTSGWIAQWMEMLRDPELKIARPRQIYTGPRDQHYVPMSER

SEQ ID NO: 123762 - DNA, 1290 bp, Mesorhizobium sp. BNC1
  CDS (1)..(1290): transl_table=11
atggcgaattcgacggtgacacttgaacttggtgggaatagcagcgaatacccagtgcgccaggcatcgatcggacccggtgttttcgacatttcgtccctctacaagcagaccgggatgtttacttacgatcccggctttacctccacggcaagctgcgagtccaagatcacctatatcgatggcgacgaaggcctgttgcttcaccgcggctatccgatcgaccagctcgccgagcaaggcgattttctcgaggtttgctatctgctcctctacggggaactgccgacaaaggcgcagaaggaagacttcgacctacgcgtgaccaggcacacgatgattcacgagcagatgtcgcgcttcttcaccggcttccgccgtgatgcgcacccgatggccgtcatgtgcggcgtagtgggcgccctctccgccttctaccatgactcgacggatatctccgacccgcaccagcgcatggttgcctccatccgcatgatcgcaaagatgccgaccattgcggccatggcttacaaataccatatcggccagccattcatgtacccgcgcaacgagctctcctacgcggctaactttctgcacatgtgcttcgctgttccctgcgaggaatataaggtcaatccggtcctcgcacgggcgatggaccgcattttcatcctgcatgccgatcacgagcagaacgcgtcgacctcgacggtgcggcttgcaggctcctcgggcgccaatccgttcgcctgcattgcagccggaattgcttgcctatggggtcccgcccatggcggcgccaatgaggccgcgctcaatatgctcgcggaaatcggcagtgtggaccgtatcccggaatatatcgcccgcgccaaggacaagaacgatcccttccgcctcatgggcttcggtcatcgggtctataaaaactatgacccgcgcgcgaagatcatgcagaaaacctgtcatgaagtgttgtcggagcttggcatcaaggacgacccgcagctcgacatcgccatggagctcgagcgcatcgccctcaccgacgaatacttcatcgagaagaagctctatccgaatatcgacttctactccggcatcacgctgaaggcgctcggcttcccgacgaccatgttcaccgtgctcttcgccgtcgcccgcacggttggctggatcgcgcagtggaaggagatgatcgaggatccgcagcagaagatcggacgtccgcgccagctctacaccggtgcgccgcagcgcgattacgtgccgatcgcaaagcggtga

SEQ ID NO: 123763 - protein, 429 aa, Mesorhizobium sp. BNC1
MANSTVTLELGGNSSEYPVRQASIGPGVFDISSLYKQTGMFTYDPGFTSTASCESKITYIDGDEGLLLHRGYPIDQLAEQGDFLEVCYLLLYGELPTKAQKEDFDLRVTRHTMIHEQMSRFFTGFRRDAHPMAVMCGVVGALSAFYHDSTDISDPHQRMVASIRMIAKMPTIAAMAYKYHIGQPFMYPRNELSYAANFLHMCFAVPCEEYKVNPVLARAMDRIFILHADHEQNASTSTVRLAGSSGANPFACIAAGIACLWGPAHGGANEAALNMLAEIGSVDRIPEYIARAKDKNDPFRLMGFGHRVYKNYDPRAKIMQKTCHEVLSELGIKDDPQLDIAMELERIALTDEYFIEKKLYPNIDFYSGITLKALGFPTTMFTVLFAVARTVGWIAQWKEMIEDPQQKIGRPRQLYTGAPQRDYVPIAKR

SEQ ID NO: 123764 - DNA, 1284 bp, Cytophaga hutchinsonii ATCC 33406
  CDS (1)..(1284): transl_table=11
atgtcgaaggaagcggaaataatattagacggtaaaagttataaattccctgtaattgaaggatctgaaggcgaaaaagcaattgatattgcgaaacttagagatttgacgggttatgttactttagatactggttacaaaaacactggcgctaccaaaagtgctattacatttttagatggagaacaaggtattttacgctacagaggctaccctattgagcagcttgcttctaaagcttccttcttggaagtttcctatttacttatatacggtgaacttccgactacatctcaattagagaatttcaaagaacgcatcagaaaacacacaaaccttcacgaagacattaaaaaggtatttgatggttttccgtcatctgctcacccaatgggggttttatcttcggcagtaagttctttaaccgcttattatcccggttcaattgatccaacagctaatgatgatgaagttgatatgacaattgtacgtttgatggctaaattaccaacaattgctgcatggtcatacagaaattctaaaggtcagccattaatgtatccgaaaccaaaattaggatactgtgaaaatttcctatacatgatgttcggccagcccaatgaagattttgaacttgacccggttgttgttgaagcattaaacaccttatttatcctgcatgctgatcacgaacaaaactgctctacgtcaactgtacgtattgtaggttctgcgcatgcaagtttatattcttctattgctgcaggtatcaacgcactgtgggggccgctacatggtggtgcaaaccaggaagtaattgaaatgcttgaagaaataaaagcttcaggaatttctactaaagattatatcgccaaggttaaaacaaaagaagttcgtttaatgggcttcggacacagagtttataaaaactttgatccgcgtgcaaaaatcatcaaaaaagcgtgtgatgatatcttaaataaattaggggtaaaggatcctgcattagaaattgcaaaagaacttgagcaggccgcgctaagtgatccatatttcgtagaacgcaaattatatccaaacgtcgatttctactctggtattatttacaaagcgttaggtttacgcagcgacttgtttaccgttatgtttgctatcggccgtcttccgggctggattgctcagtggaaagaacttagagatgctaaagaacctatcggcagaccaagacagatctacacaggttatacagaaagagattacgttagtattgataagagaaaatag

SEQ ID NO: 123765 - protein, 427 aa, Cytophaga hutchinsonii ATCC 33406
MSKEAEIILDGKSYKFPVIEGSEGEKAIDIAKLRDLTGYVTLDTGYKNTGATKSAITFLDGEQGILRYRGYPIEQLASKASFLEVSYLLIYGELPTTSQLENFKERIRKHTNLHEDIKKVFDGFPSSAHPMGVLSSAVSSLTAYYPGSIDPTANDDEVDMTIVRLMAKLPTIAAWSYRNSKGQPLMYPKPKLGYCENFLYMMFGQPNEDFELDPVVVEALNTLFILHADHEQNCSTSTVRIVGSAHASLYSSIAAGINALWGPLHGGANQEVIEMLEEIKASGISTKDYIAKVKTKEVRLMGFGHRVYKNFDPRAKIIKKACDDILNKLGVKDPALEIAKELEQAALSDPYFVERKLYPNVDFYSGIIYKALGLRSDLFTVMFAIGRLPGWIAQWKELRDAKEPIGRPRQIYTGYTERDYVSIDKRK

SEQ ID NO: 123766 - DNA, 1296 bp, Rhodococcus sp. RHA1
  CDS (1)..(1296): transl_table=11
gtgcctgacaatgacacaaagcccacgcttacctaccctggtggtgagcacacgatgtccattgccagggcaaccgagggcaatgacggtatcgaactgggcaagctgctcgccagcaccgggtacaccaccctggacccgggtttcgtcaataccgcctccaccagctccgcgatcacctacatcgacggtgagcacgggattctccgctaccgcgggtacccgatcgaacagctggccgagaagtcgaccttcatcgaggtcagctatctgctgatctacggtgagctgcccaccacggcgcagctcgagtcgttcaccgaccggatccggcgccacacgctgctgcacgaggacctcaagaggttcttcgacggattcccgcggaacgcacacccgatgccggtcctgtccagcgccgtcaacgcgctgtccgcgtactaccaggattccctggacccggccgacccggaacaggtcgagctgtcgaccatccgtcttctcgcgaagctgccgaccatcgcggcctacgcgtacaagaagtccgtcgggcagccgttcctgtacccggacaactccctgaacctggtcgagaacttcctccggatgacgttcggcttccccgcggagccctacgagatcgatcccgagatcgccaaggctctcgacatgcttctgatcctgcacgccgaccacgagcagaactgctcgacgtcgacggtgcggctggtcggctcgtccgacgccaacctgttcacctcaatctccggtggcatcaacgcactctggggcccgctgcacggcggcgccaaccaggccgtgctggagatgctcgacgagatcaaggccagcggcagcaacgcggacgacttcgtccgcaaggtcaagaacaaggaagacggtgtgaagctcatgggcttcggacaccgtgtctaccgcaactacgacccgcgcgcggcgatcgtcaagaagacggctcacaccatcctcgagaagctcggcggcgacgacgagctgctcgacatcgcgatggcgctcgaagaggcggcgctcaccgacgactacttcgtcgagcgcaagctgtacccgaacgtcgacttctacacgggtctgatctaccgcgcgatgggtttccccacgcgcatgttcaccgttctgttcgccatgggccgcttgcccgggtggattgcacactggcgcgagatgcacgaagatcccgctacgaagatcggccgtccgcgccagatctacaccggttacaccgagcgtgactacaaggacgtcacaggtcgctga

SEQ ID NO: 123767 - protein, 431 aa, Rhodococcus sp. RHA1
MPDNDTKPTLTYPGGEHTMSIARATEGNDGIELGKLLASTGYTTLDPGFVNTASTSSAITYIDGEHGILRYRGYPIEQLAEKSTFIEVSYLLIYGELPTTAQLESFTDRIRRHTLLHEDLKRFFDGFPRNAHPMPVLSSAVNALSAYYQDSLDPADPEQVELSTIRLLAKLPTIAAYAYKKSVGQPFLYPDNSLNLVENFLRMTFGFPAEPYEIDPEIAKALDMLLILHADHEQNCSTSTVRLVGSSDANLFTSISGGINALWGPLHGGANQAVLEMLDEIKASGSNADDFVRKVKNKEDGVKLMGFGHRVYRNYDPRAAIVKKTAHTILEKLGGDDELLDIAMALEEAALTDDYFVERKLYPNVDFYTGLIYRAMGFPTRMFTVLFAMGRLPGWIAHWREMHEDPATKIGRPRQIYTGYTERDYKDVTGR

SEQ ID NO: 123768 - DNA, 1284 bp, Haemophilus somnus 129PT
  CDS (1)..(1284): transl_table=11
atgtctaaattaacagcaaaacttacacttagtgacggacgtgaatttgatttaaatgttcaacaaggaacgcttggatacgatgctgttgacgttcaaccgttagttaaaaataaattatttacttttgaccccggatttatgtcaactgcatcttgcgtttccgaaatcacctatatagatggtgataacggcatactgttacatcgtggttatcctattgcggatcttgctaaaaatgcggattatttagaagttgctcatctactgttatttggagaacgcccgaataaagaagaatatgccaactttataaagttggtcaaaaatcatactttagtacatgagcaaatttctcgcttcttccatggattccgtagagactctcaccctatggcgattatgtgcggggtaagcggtgccttagcagctttctatcatgattccttggatattaatgatattgaacaccgagaattaacagcaattcgtttattagcgaaaatgccaacgcttgcggcgatgtgttataaatattctattggacaaccttttatgttcccattaaacaaactttcttatgcaggaaattttttatatatgatgttcgcaacgccttgtgaaccttatgaagttaaccctgtattagaaaaagcgatggatagaattttcattttgcatgcagatcatgaacaaaatgcctcaacatctacagtgcgtaccgctgcttcgtccggagcaaacccttttgcttgtatcgctgcaggaattgcctctctttggggaccggctcatgggggagcaaatgaagcttgtattaacatgttagaagaaatcggttctgttgatcgtattcctgaatacattgcacgagcaaaagataaaaacgatcctttcagattaatgggattcggacatcgagtttataaaaattacgatcctcgagctaaagtgatgcgtcaaacttgccatgaagtattaaaagaattaaacattcagacaccgctctttgacgttgctatggaattagaacgtattgcgttaaatgatccttactttatcgatcataaactgtatccaaatgtcgatttttattcaggaattatcttgaaagcaataggtattccgacatcaatgtttactgttattttcgctttagctagaacagtaggttggattgctcattggaaagaaatgtttaaacctggcaatatgaagattgtacgccctcgtcaattatacaaaggacatacagaacgtaactttgatgccattgaaaaataa

SEQ ID NO: 123769 - protein, 427 aa, Haemophilus somnus 129PT
MSKLTAKLTLSDGREFDLNVQQGTLGYDAVDVQPLVKNKLFTFDPGFMSTASCVSEITYIDGDNGILLHRGYPIADLAKNADYLEVAHLLLFGERPNKEEYANFIKLVKNHTLVHEQISRFFHGFRRDSHPMAIMCGVSGALAAFYHDSLDINDIEHRELTAIRLLAKMPTLAAMCYKYSIGQPFMFPLNKLSYAGNFLYMMFATPCEPYEVNPVLEKAMDRIFILHADHEQNASTSTVRTAASSGANPFACIAAGIASLWGPAHGGANEACINMLEEIGSVDRIPEYIARAKDKNDPFRLMGFGHRVYKNYDPRAKVMRQTCHEVLKELNIQTPLFDVAMELERIALNDPYFIDHKLYPNVDFYSGIILKAIGIPTSMFTVIFALARTVGWIAHWKEMFKPGNMKIVRPRQLYKGHTERNFDAIEK

SEQ ID NO: 123770 - DNA, 1152 bp, Trichodesmium erythraeum IMS101
  CDS (1)..(1152): transl_table=11
atgtccgtcgtctgcattgaatttaagcctggtttagaaggtgttcctgctacccaatcaagtgtcagctacgtcgatggacaaaaagggatattggaataccgaggcattaatattgaagaattggcaaaaaagagttcttttctggaagcagcatatttgttaatttggggcaaccttcctactcaagaagaattgcaaagctttgagcaagagatttgcctaaacagaagaatcaaatatagaattcgggacatgatgaaatgtttcccggagactggacatcctatggatgctctacagacttcagcagcagctctgggtttattttattctcgtcgtgctcttgataacccagaatatattaggaaagcagtagtcaggctactggccaatatacccacaatggtagctgcctttgagttaatgcgtaaaggtaacgatcctgtaaagccaagggatgacttgggctatgcagccaactttttgtatatgctcaatgaaagagaacccgatccattagcagcaaaagtatttgatatttgtctgactcttcatgctgaacatactattaatgcttctacattctcagcaatggtaactgcttctaccttaactgatccctacggagttatagcttcagcagtgggaactcttgccggtccactacatgggggggcaaatgaagatgtaattagtatgttgtctgaaattggttcggtagaaaatgttaaaccatatttaaaacgatgttttgagactaaggccaaaattgcgggttttggtcaccgagtctataaagtaaaagatccaagagctatcatccttcaggaactagcagtagatttatttgaaaagtttggcgacgacaagtattatcagatagctctagaaatggaaaaggtggtagaggaaaaactaggtcacaaaggaatttacccaaatgtggatttttattctggtcttgtttatcggaaattaggtattcctagcgatttatttacccctgtatttgccattgctcgtgtggctggttggttagctcactggaaagagcaattagcagccaatcgaattttccgtcctacacaaatttattccggagatcataatattgcttatacttcccttgaagagcgagccttaatctaa

SEQ ID NO: 123771 - protein, 383 aa, Trichodesmium erythraeum IMS101
MSVVCIEFKPGLEGVPATQSSVSYVDGQKGILEYRGINIEELAKKSSFLEAAYLLIWGNLPTQEELQSFEQEICLNRRIKYRIRDMMKCFPETGHPMDALQTSAAALGLFYSRRALDNPEYIRKAVVRLLANIPTMVAAFELMRKGNDPVKPRDDLGYAANFLYMLNEREPDPLAAKVFDICLTLHAEHTINASTFSAMVTASTLTDPYGVIASAVGTLAGPLHGGANEDVISMLSEIGSVENVKPYLKRCFETKAKIAGFGHRVYKVKDPRAIILQELAVDLFEKFGDDKYYQIALEMEKVVEEKLGHKGIYPNVDFYSGLVYRKLGIPSDLFTPVFAIARVAGWLAHWKEQLAANRIFRPTQIYSGDHNIAYTSLEERALI

SEQ ID NO: 123772 - DNA, 1191 bp, Synechococcus sp. CC9311
  CDS (1)..(1191): transl_table=11
gtgagtcagacgggtggtaacgaaatccggcatgaacgcacggggttgttgttcaggcctggtttggagggtgtccccgcaacccaatcttcgatttgcgatattgacggcctgcaggggcgtctctcctatcggggctactccctcggtgaccttgcagtccacagcagttttctggagaccacgtatctgttgatttggggtgaattgccgacacctcagcaatttcgtgatttcgagcacgaagtgcagatgcatcgtcgcgtcagctttcgggtgcgcgacatgatgaagtgtttccccgccaacgggcatccgatggatgctctgcaatcgagcgcggcctctttggggctcttttattcccgtcgggccatcgacgatcctcagtacatctatgacgccgtcgtcaggctgattgccaaaattccaaccatggtggcggccttccagttgatccgtaaaggccaggatccaattcagccccgggatgacttggcgtactcagccaactttttgtacatgctcacggagcaagagcccgatcctctcgcttctcggatctttgatcgctgcttgatccttcacgctgagcacagcctcaatgccagcacgttcagcgcaagggtgacggcaagcactttgacggacccctacgccgttgtggcatcggcagtaggcaccttggcgggccctcttcacggtggagccaacgaagatgtccttgcgatgctggaagagatcgggactccggaacaagccgactcctacctcgagtcagccgtggcgagcaaacgcaaggtaatgggttttggccatcgcgagtacaaagtcaaagatccgcgggcggtgattcttcaggcattagcggaggagttgtttgttcggtttggtcacgacgagctctatgacgtggcccatgcccttgagacggctgccgctattcgactggggcctaaggggatttatcccaacgttgatttttattcaggccttgtgtacaggaagcttgggattccaagagatctgttcacccctgtgtttgcgatttcccgcgtcgctggttggctggctcactggagggagcagctcggtgcgaatcgaattttccgcccttctcagatttataccggcacatccatgcgtcattgggtccctgcggatgagcgtgtgaatgccgcgggcgcttaa

SEQ ID NO: 123773 - protein, 396 aa, Synechococcus sp. CC9311
MSQTGGNEIRHERTGLLFRPGLEGVPATQSSICDIDGLQGRLSYRGYSLGDLAVHSSFLETTYLLIWGELPTPQQFRDFEHEVQMHRRVSFRVRDMMKCFPANGHPMDALQSSAASLGLFYSRRAIDDPQYIYDAVVRLIAKIPTMVAAFQLIRKGQDPIQPRDDLAYSANFLYMLTEQEPDPLASRIFDRCLILHAEHSLNASTFSARVTASTLTDPYAVVASAVGTLAGPLHGGANEDVLAMLEEIGTPEQADSYLESAVASKRKVMGFGHREYKVKDPRAVILQALAEELFVRFGHDELYDVAHALETAAAIRLGPKGIYPNVDFYSGLVYRKLGIPRDLFTPVFAISRVAGWLAHWREQLGANRIFRPSQIYTGTSMRHWVPADERVNAAGA

SEQ ID NO: 123774 - DNA, 1287 bp, Shewanella sp. MR-7
  CDS (1)..(1287): transl_table=11
atggctgatttaaaagccaaattagaattaccagggaacgactcgatagaattgccagtaaagcaaggatccgctggttttgacgtaatcgatatcagtaaacttggcagcaagggttacttcacttttgatccaggttttctcgcgacagcctcctgtgaatctgcaattacctatatcgatggcgatcaaggtatattgttacaccgcggctatccaatcgagcaactcgccgttgattcagattacttagacctgtgttatctgctgctttacggtgaactgccgacgaaagagcaatatactgaatttgtacacacagtaaaaacccacactatggttcatgagcaactcgccttcttctttagaggtttccgtcgtgatgctcatcctatggcgatgttgtgtggtgtcactggtgcattgtccgcattttatcaagactcactcgatgtcaacgatcctcgccaccgcgaaatcgccgcgtatcgcctagtctccaaaatgccaacgattgccgctatgtgctacaagtactcttctggccagccattcgtttacccacgcaatgacttaagctacgcaggcaacttcttaagcatgatgtttgccgttccttgtgaagagtacaaggtgaacccaatcgttgaacgtgctatggaccgtatcttcattttacatgcggatcacgaacaaaacgcgtcaacgtcaaccgtgcgtttagccggttcttcaggcgcgaatccattcgcgtgtatcgcggcgggtattgcttctctatggggccctgcacacggcggcgcgaacgaagcttgtctacaaatgttagaagaaatcggttcagtggaccgtattcctgaattcatcgcccgtgcgaaagacaagaacgacccattccgtctgatgggcttcggacaccgtgtttacaaaaactttgacccacgtgccaaagtgatgcgtgaaacctgtcacgaagtgttaaaagaactgaaagtacaagatccattattagatgttgcgatggaacttgagcgtatcgcactggaagacgagtacttcatttcgaagaaactctatccaaacgtcgatttctactctggcatcatcatgaaagccattggtattccaaccagcatgttcacagtactgtttgcattagcacgtaccgtgggttggattgctcactggaaagaaatgttggatcaaccaggtcacaagatcagccgtccacgtcagctatatactggcgagactgcgcgtgacttcgttagccaagataaacgctaa

SEQ ID NO: 123775 - protein, 428 aa, Shewanella sp. MR-7
MADLKAKLELPGNDSIELPVKQGSAGFDVIDISKLGSKGYFTFDPGFLATASCESAITYIDGDQGILLHRGYPIEQLAVDSDYLDLCYLLLYGELPTKEQYTEFVHTVKTHTMVHEQLAFFFRGFRRDAHPMAMLCGVTGALSAFYQDSLDVNDPRHREIAAYRLVSKMPTIAAMCYKYSSGQPFVYPRNDLSYAGNFLSMMFAVPCEEYKVNPIVERAMDRIFILHADHEQNASTSTVRLAGSSGANPFACIAAGIASLWGPAHGGANEACLQMLEEIGSVDRIPEFIARAKDKNDPFRLMGFGHRVYKNFDPRAKVMRETCHEVLKELKVQDPLLDVAMELERIALEDEYFISKKLYPNVDFYSGIIMKAIGIPTSMFTVLFALARTVGWIAHWKEMLDQPGHKISRPRQLYTGETARDFVSQDKR

SEQ ID NO: 123776 - DNA, 1299 bp, Alkalilimnicola ehrlichei MLHE-1
  CDS (1)..(1299): transl_table=11
atgtccgagaagaccgtcaccctgaccgacaacagcaccggcaaatccgtggagttgccggtctatcaaggcacccacggccccgaggtcatcgacatcaagaatgtctatggcgagctgggctacttcacttacgacgctggcttcacctccaccgccagctgcaaaagcgatgtcaccttcatcgatggtgacaacggcgtgctgctgtatcgcggctaccccatcgaacacctggctgagaagagctccttcctggaggtctcctacctactgctgcacggcgaattgccgaacaaggccgaactggaccagttcgtcagctcggtgaccaaccacaccatgctcaacgaaagcctgaaggacttcttcgacggctttcattacaacgcccaccccatggccatgctcaccggggtggtcgggtcgctatccgccttctaccacggcgaactggacatcaacgacccgaagaaccgggagctgaccgcgcaccgggtcatcgccaagatgccgaccatcgccgcggcggcctacaaacacctggtgggcgagcccttcgtctacccgcagaaccacctgtcctacgcggggaacctgctgaacatgctgttctcccgccccaccgagaagtacgaggttaaccccgtggccgagcgggcgctggaccagctcctgatcctgcacgctgaccacgagcagaacgcctccacctccacggtgcgcctggccggttccaccggcaccaaccccttcgccgccatcgcagctggttgcgccgcgctgtggggaccggcgcatgggggggccaacgaggcggtgctgaacatgctcaacgagatcggcgacgtctccaacgtgcccaagttcatcgaaaaggcgaaggacaagaacgaccccttccgcctgatgggcttcggtcaccgggtctacaagaacttcgacccgcgggccaccatcatccgcaagacctgtcacgaggtcctggaggaactcggcgtgggcaaggacccgcagctggagctggccatggagctggaggatatcgccctgcaggacgagtacttcgtcgagcgcaagctctacccgaacgtcgacttctactcgggcatcatctaccgcgcgctgggcatccccaccgagttcttcacggtgctgtttgccctgggccgcaccccgggctggctggcgcagtggatggagatggtcaacgaccccgagcagcgcatcgggcgtccgcgccagctctacaccggcgccgccaagcgcgactacgtgccggtggatcagcgcagctga

SEQ ID NO: 123777 - protein, 432 aa, Alkalilimnicola ehrlichei MLHE-1
MSEKTVTLTDNSTGKSVELPVYQGTHGPEVIDIKNVYGELGYFTYDAGFTSTASCKSDVTFIDGDNGVLLYRGYPIEHLAEKSSFLEVSYLLLHGELPNKAELDQFVSSVTNHTMLNESLKDFFDGFHYNAHPMAMLTGVVGSLSAFYHGELDINDPKNRELTAHRVIAKMPTIAAAAYKHLVGEPFVYPQNHLSYAGNLLNMLFSRPTEKYEVNPVAERALDQLLILHADHEQNASTSTVRLAGSTGTNPFAAIAAGCAALWGPAHGGANEAVLNMLNEIGDVSNVPKFIEKAKDKNDPFRLMGFGHRVYKNFDPRATIIRKTCHEVLEELGVGKDPQLELAMELEDIALQDEYFVERKLYPNVDFYSGIIYRALGIPTEFFTVLFALGRTPGWLAQWMEMVNDPEQRIGRPRQLYTGAAKRDYVPVDQRS

SEQ ID NO: 123778 - DNA, 1305 bp, Hyphomonas neptunium ATCC 15444
  CDS (1)..(1305): transl_table=11
atggaaaacaaggttaaagacgctggtacggccaaacttgaagtcggcggtaaaacagtcagtttgccggtctattctggcacgcacggtccaaacgtaatcgacatccgtaagctttatgctgaagtcgatcatttcacgctcgaccccggcttcacgtcgacaggtagctgcgagagccagattacgttcatcgacggtgatgaaggcattctgctgcaccggggctatccgattgagcagctcgccgaaaagtcgagctatctggagctctgctatctgctactcaatggcgagctgcccaccaaggatgagtacgaagccttcggcaaggacgtgcgtcagcacacgcttcttcacacacagcaggatcgcttcttcgacgggttccggcgcgacagccacccgatggcgatgctgaccggcgcagttggcgccatggcggccttttaccccggcgcaatgggcaatgaagatcctgaggagcgtcgccgcgactccatccggcttgtcgcgaagatgccgacaattgcagcgcgctgcatgaagtacaatctcggacagaagttcgtggacccgcagaaccgcctgtcctactcagaaaacttcctgaacatgtgcttctccgtgagcgcggaagactatgaagtgaacccggttcttgcgcgtgcgatggaccgcttcttcatgcttcatgcggaccatgaacagaacgcgtctacgtccaccgttcgcctggtcgcgtcttcgggcgcgcaccccttcgccgcgattgcggccggtgtggcaagcctctggggccccagccatggcggcgccaacgaagcggcattgcgtcagcttcgcgagatcggcgacatcagcaacgttccggacttcgtgaagaaggtaaaggacaagtcgagcggtgtccgcttgatgggctttggccaccgggtttacaaaaactacgacccgcgcgcgaaagtcatgcagaaaaccgctcacgaggtgctcgacgcgctcgaccttcgcgaccatccgctgctcaaagttgcaatggaacttgagcggattgcccttcaggatgagtacttcgttgcgaagaaactttaccccaacgtcgatttctattcgggtattattctcgaagcgatgggcttcccgaccaagatgttcaccgtcctgtttgccgtggcgcggaccgtgggctgggtcgctcagatgaacgagatgctcgaagatccgagccagaaaatcggccgtcctcgccagatctataccggcgccgcaatgcgcgactatacggcaatgactagccgctag

SEQ ID NO: 123779 - protein, 434 aa, Hyphomonas neptunium ATCC 15444
MENKVKDAGTAKLEVGGKTVSLPVYSGTHGPNVIDIRKLYAEVDHFTLDPGFTSTGSCESQITFIDGDEGILLHRGYPIEQLAEKSSYLELCYLLLNGELPTKDEYEAFGKDVRQHTLLHTQQDRFFDGFRRDSHPMAMLTGAVGAMAAFYPGAMGNEDPEERRRDSIRLVAKMPTIAARCMKYNLGQKFVDPQNRLSYSENFLNMCFSVSAEDYEVNPVLARAMDRFFMLHADHEQNASTSTVRLVASSGAHPFAAIAAGVASLWGPSHGGANEAALRQLREIGDISNVPDFVKKVKDKSSGVRLMGFGHRVYKNYDPRAKVMQKTAHEVLDALDLRDHPLLKVAMELERIALQDEYFVAKKLYPNVDFYSGIILEAMGFPTKMFTVLFAVARTVGWVAQMNEMLEDPSQKIGRPRQIYTGAAMRDYTAMTSR

SEQ ID NO: 123780 - DNA, 1290 bp, Rhizobium leguminosarum bv. viciae 3841
  CDS (1)..(1290): transl_table=11
atgacggatcaaagcgctacaataaaaatcggtgacaagtctgtcgaccttgctgtcaaaagcggcacgatcggcccgagcgtcatcgatatcggtgccctctacaagaacacggcttccttcacctacgatccgggttttacctcgaccgcatcctgtgaatcgaaaatcacctacatcgacggcgacgaaggtgtcctgctgcatcgcggctatccgatcgagcagctcgccgagcacggcgacttcctcgaagtctgctacctcctgctttacggcgaactgccgaccaccgtgcagaagaaggatttcgattaccgcgtcacgcaccacaccatggtgcacgagcagatgagccgcttcttcaccggcttccgccgcgatgcgcatccgatggccgtcatgtgcggctgcgtcggcgcgctgtcggccttctatcacgactccaccgacatcaccgatccgcaccagcgcatggtcgccagcctgcgcatgatcgccaagatgccgacgcttgccgccatggcctacaagtaccatatcggccaacccttcgtttatccgaagaacgacctcgactatgcctcgaacttcctgcgcatgtgctttgccgtgccttgcgaggaatatgtggtcaatccggtgcttgcccgcgccatggaccgcatcttcatcctgcatgccgatcacgagcagaacgcctcgacctcgaccgtccgtctcgccggttcgtcgggcgccaacccgttcgcctgcatcgccgccggcatcgcctgcctctggggccccgctcacggcggcgccaacgaagcagcgctcaacatgctgaacgaaattggcacggtcgaccgcattccggaatatgtcgcccgcgccaaagacaagaacgatccgttccgcctgatgggcttcggtcaccgcgtctacaagaactacgatccgcgcgccaagatcatgcagaagacgacgcatgaagtgctcggcgaactcggcatcaaggacgatccgttgctcgaagtggcgatggagctggagcgtatcgccctcaccgacgaatatttcatcgagaagaagctctatccgaacatcgacttctattccggcatcacgctgaaggcgctgggcttccccacgaccatgttcaccgtgctcttcgcgcttgcccgcaccgtcggctggatcgcgcagtggaacgagatgattgaggatccggaacagcgcatcggccgtccgcgccagctctatgtcggcgaaccgaagcgcgattacatcccggtttcgaagcgctga

SEQ ID NO: 123781 - protein, 429 aa, Rhizobium leguminosarum bv. viciae 3841
MTDQSATIKIGDKSVDLAVKSGTIGPSVIDIGALYKNTASFTYDPGFTSTASCESKITYIDGDEGVLLHRGYPIEQLAEHGDFLEVCYLLLYGELPTTVQKKDFDYRVTHHTMVHEQMSRFFTGFRRDAHPMAVMCGCVGALSAFYHDSTDITDPHQRMVASLRMIAKMPTLAAMAYKYHIGQPFVYPKNDLDYASNFLRMCFAVPCEEYVVNPVLARAMDRIFILHADHEQNASTSTVRLAGSSGANPFACIAAGIACLWGPAHGGANEAALNMLNEIGTVDRIPEYVARAKDKNDPFRLMGFGHRVYKNYDPRAKIMQKTTHEVLGELGIKDDPLLEVAMELERIALTDEYFIEKKLYPNIDFYSGITLKALGFPTTMFTVLFALARTVGWIAQWNEMIEDPEQRIGRPRQLYVGEPKRDYIPVSKR

SEQ ID NO: 123782 - DNA, 1311 bp, Solibacter usitatus Ellin6076
  CDS (1)..(1311): transl_table=11
atggataacgagacgctgaccataacggacaatcggacgcaacagacatacaccgtcccgatctatcgcgggacggtacgagcaatggacctgcggcagattaagaaggatgccgacgatttcgggctgatgacgtacgacccggcgtttatgaacacggcgtcgtgccagagcgcgatcacctacctggatggcgagaaaggaatcctgcgatatcgcggatacccgatcgagcaactggcggagcagtgcagcttcctggaagtcgcgtacctgctgttgaatggggaactgcctacggcggagcaattggaatactggcagtgcaaggtgatgcggcacacgatgacccatgaaaacgtcaaaaagttcatggacggcttccattacgatgcgcatccaatggggattctgatcagcacggtggccgcgctttcgaccttttatcccgaggcgaagaatgtaggcgacgcaaagtgccggcacaaacagatcgtgcgactgatcggcaagatgccgacgctggcggcttacgcgtaccgccaccggctggggttgccgtatatcgctccggatccggagttgggatatacgaagaactacatgaacatgctgtggaagcggacggaaccgaagtacgcggcgaatccagtgctggcgcgggcgctggaagtactcttcattttgcacgcggatcacgagcagaattgcagcaccagcacgatgcgggcggtgggaagttcgaatgcggacccgtttgtgacgacgtcggcggcgattgccgcgctatcgggacctctgcacgggggtgcgaacgaagaagtgctgcgtatgctggacgagatcggcaaaccggagaacattccggggttcatcgaacaggtgaaggaaggcaagcgcaagctcatgggattcgggcaccgggtctacaagaactacgacccgcgcgcgcggatcatcaagcaggtggcggaggaagtcttcgaggttacggggcgcaatccgaagatcgatatcgcgctggaactggaaaagatcgcgttgtcggacgattacttcattaagcgcaagctgtatccgaacgtggatttctattcggggatcatttaccaggcgatgggtttcacgccggaccagtttacggtgctgttcggaattccgcgcacggtgggatggctggcgcagtggcaggaaatgcagcaggatccggacaagaagatcgcgcgaccgcggcaggtgtatacgggtgaagatgagcgcgacttcgtgccgattgcggatcgcggagcgagggcgatgaccgccgtataa

SEQ ID NO: 123783 - protein, 436 aa, Solibacter usitatus Ellin6076
MDNETLTITDNRTQQTYTVPIYRGTVRAMDLRQIKKDADDFGLMTYDPAFMNTASCQSAITYLDGEKGILRYRGYPIEQLAEQCSFLEVAYLLLNGELPTAEQLEYWQCKVMRHTMTHENVKKFMDGFHYDAHPMGILISTVAALSTFYPEAKNVGDAKCRHKQIVRLIGKMPTLAAYAYRHRLGLPYIAPDPELGYTKNYMNMLWKRTEPKYAANPVLARALEVLFILHADHEQNCSTSTMRAVGSSNADPFVTTSAAIAALSGPLHGGANEEVLRMLDEIGKPENIPGFIEQVKEGKRKLMGFGHRVYKNYDPRARIIKQVAEEVFEVTGRNPKIDIALELEKIALSDDYFIKRKLYPNVDFYSGIIYQAMGFTPDQFTVLFGIPRTVGWLAQWQEMQQDPDKKIARPRQVYTGEDERDFVPIADRGARAMTAV

SEQ ID NO: 123784 - DNA, 1302 bp, Magnetococcus sp. MC-1
  CDS (1)..(1302): transl_table=11
atgtctaaggaaaccatcaccattcgcgacaatcgtaccggcaaagaggtagagctgcctatccaacagggaaccgccgggccgcccgtggtagatgtgaccaaattttataaagattttggtctgtttacgctggatccggggtttcggtccacgggctcttgccgcagtaccatcacctttattgatggggataagggtgttctgttgcaccggggctaccccattgagcaattggccgccaagagctcgtttttagaggtctgctatctgctgctcaacgaaaagctgcccactaaagcggagttcgacgattttgatgataaaatcacccatcatacgatggtgcatgagcagttgttgcgcttttttgcgggctaccgccgggatgcccaccccatggcgattatggtgggggtcgtgggggcgctgtcggctttttatcatgatgcgttggatattagcgatcctaaacatcgggagatttcggcccatcgtttgatcgccaaaatccccaccattgcggcctgttcctacaaatatcactatggtcagccctttgtgtaccccaacaataagatgagctatgcagagaattttctgaatatgaccttcagaaccccctgcgacgatgattttaaaatagatcctcgtttggttagtgccatggataaaatctttatcctacacgccgaccatgaacagaacgcctctacctctaccgtacgtctggccggttcttcccgtgccaacccctttgcggcggtttctgcgggcatcagcgccctgtgggggccggcccatggtggcgctaacgaggcggttttgaaaatgttgggcgagatcggcagcgtagagcgcattgacgaatacatcgctaaagccaaggaccccaacgatcccttccgtttaatgggctttgggcaccgcgtctacaaaaattatgacccccgcgccgctgtgctgaaaggggcctgtcaagaagtgctggatgccgttggcaaacatgatgagcccctctttaaaatcgccatgaagttggaagagattgctctgaatgatgactatttcatcagcaaaaagctcttccccaatgtggatttttactcgggcattattctttcggccatgggtttccccaccaatatgtttacggtgatctttgcgctggctcgtaccgtgggctgggtcagtcagtggaaagagatgatcgaagaggagggacaggccatcgggcggcctcgtcagctctatatgggcgcaccgcagcgtgactatgtgcccatggatcaacggggataa

SEQ ID NO: 123785 - protein, 433 aa, Magnetococcus sp. MC-1
MSKETITIRDNRTGKEVELPIQQGTAGPPVVDVTKFYKDFGLFTLDPGFRSTGSCRSTITFIDGDKGVLLHRGYPIEQLAAKSSFLEVCYLLLNEKLPTKAEFDDFDDKITHHTMVHEQLLRFFAGYRRDAHPMAIMVGVVGALSAFYHDALDISDPKHREISAHRLIAKIPTIAACSYKYHYGQPFVYPNNKMSYAENFLNMTFRTPCDDDFKIDPRLVSAMDKIFILHADHEQNASTSTVRLAGSSRANPFAAVSAGISALWGPAHGGANEAVLKMLGEIGSVERIDEYIAKAKDPNDPFRLMGFGHRVYKNYDPRAAVLKGACQEVLDAVGKHDEPLFKIAMKLEEIALNDDYFISKKLFPNVDFYSGIILSAMGFPTNMFTVIFALARTVGWVSQWKEMIEEEGQAIGRPRQLYMGAPQRDYVPMDQRG

SEQ ID NO: 123786 - DNA, 1305 bp, Mycobacterium smegmatis str. MC2 155
  CDS (1)..(1305): transl_table=11
gtggccgaaaaaccgtcgaatgggcaggagcacgccaccgtcaagtacccgggtggcgagctggatctggagatcgtccatgccaccgagggcgctgacggtatcgcgctgggctcattgctggccaagaccggctacacgacctacgacggcgggttcgtcaacaccgcctcgaccaagagcgcgatcacgtacatcgacggtgacgcggggatcctgcggtatcgcggctacccgatcgagcagcttgcggagaagtcgacgttcatcgaggtcagctatctgctgatctacggcgaactccccaccgccgagcagttggagacgttcaccaaccagatccagcggcacacgctgctgcacgaggatctcaagcggttcttcgacggtttcccgcgcaacgcgcaccccatgccggtgctgtccagcgcggtcaacgcgctctcggcgtactaccaggactcgctggatccgctggacaacaagcaggtcgagctgtcgaccatccgcctgttggccaagctaccgacgatcgcggcgtacgcgtacaagaagtccgagggccagccgttcctgtacccggacaactcgctgagcctggtggagaacttcctgcggatgacgttcggtttcccggccgagccctacgaggtcgacccggagatcgtgcgcgcgctggacatgctgttgatcctgcacgccgatcacgagcagaactgctcgacctcgacggtgcgtctggtgggcagctcgcaggccaacctgttcacctcgatctccggtggcatcaacgcgctgtggggcccgctgcacggcggcgccaaccaggccgtgctggagatgctggagaagatccgctcgcagggcggcgacgtcagcgacttcgtacgcaaggtcaaaaaccgcgaggacggcgtgaagctcatgggcttcgggcaccgcgtgtacaagaactacgatccgcgggcgcgcatcgtcaaggagcaggccgacaagatcctgggcaagctcggcggcgacgacgagctgctggacatcgccaagcagctcgaggagatcgcgctcaccgacgacttcttcatcgagcgcaagctctacccgaacgtcgactactacaccggcgtgatctaccgggccatgggcttcccgacgcgcatgttcacggtgctgttcgcgctgggccggctgccgggctggatcgcgcactggcgtgagatgcactccgagcccaacaagatcggccgtccgcgccagatctacaccggctacaccgagcgcggctacaccgacatcgccggccgctga

SEQ ID NO: 123787 - protein, 434 aa, Mycobacterium smegmatis str. MC2 155
MAEKPSNGQEHATVKYPGGELDLEIVHATEGADGIALGSLLAKTGYTTYDGGFVNTASTKSAITYIDGDAGILRYRGYPIEQLAEKSTFIEVSYLLIYGELPTAEQLETFTNQIQRHTLLHEDLKRFFDGFPRNAHPMPVLSSAVNALSAYYQDSLDPLDNKQVELSTIRLLAKLPTIAAYAYKKSEGQPFLYPDNSLSLVENFLRMTFGFPAEPYEVDPEIVRALDMLLILHADHEQNCSTSTVRLVGSSQANLFTSISGGINALWGPLHGGANQAVLEMLEKIRSQGGDVSDFVRKVKNREDGVKLMGFGHRVYKNYDPRARIVKEQADKILGKLGGDDELLDIAKQLEEIALTDDFFIERKLYPNVDYYTGVIYRAMGFPTRMFTVLFALGRLPGWIAHWREMHSEPNKIGRPRQIYTGYTERGYTDIAGR

SEQ ID NO: 123788 - DNA, 1344 bp, Nocardioides sp. JS614
  CDS (1)..(1344): transl_table=11
gtggaggggagccgggtttcgcgtgccaccacgccgcagtctaagttggagcgcgtgactgattctctgaccgtccgtgacaaccgcaccggacaggagtacgaggtcccgatcaccgacggcaccatcaaggccgcggacctgggccagatcaaggccgaggaggacgcgcccggcctcgcggtctacgaccccggcttcgtgaacaccgcctcctgccgcagctcggtgaccttcatcgacggcgacaagggcgtcctggagtaccgcggctacccgatcgagcagctggcggagaagtcgagcttcctcgaggtcgcctacctcctggtccacggctcgctgccgaccagggcggagtacgaggcgtgggtgcacgagatcacgtaccacacgttcgtgcacgagaacgtcaaggagttcatgcagggcttccgctacgacgcgcacccgatggggatgctgatggcgtcggtcggggccctgtcgacgttctaccccgacgcccgcaacatcagcgacgccgacaaccggcacatgcagatcgtgcggatgatcgcgaagatgccgacgctgggcgcctggtcgttccggcacgcgcagggcaagccgttcgtctaccccgacaacgagctcggctacaccgccaacttcctctcgatgctgttcaagatgagcgagcaccggttcgaggccgacgagcgcctggtgaaggccctcgacgtgctgttcatcctgcacgccgaccacgagcagaacgcctccaccaacgcggtccgctcggtcggctcgacccaggtcgacccctactccgcggtcgccgccggggtcggcgccctctacggcccgctgcacggcggcgccaacgaggcggtgctgcggatgctgcgccggatcggcaccaaggagaacatcccctccttcatccagggcgtgaaggacggcaacgagcggctgatgggcttcggccaccgcgtctacaagaactacgacccccgcgccaagatcatcaagaagtccgccgaggacgtcttcgaggtcaccggcaccaacccgctgctggacatcgcgctggagctggagaagatcgcgctcgaggacgagtacttcgtcaagcgccgcctctaccccaacgtggacttctactccggcctgatctacgaggccttccagttcccgccggagatgttcaccgtgttgttcgcgatcggccgcacccccggctggctgtcccagtggctcgagctggtgcaggacaaggagcagaagatcgcccgccccaagcagatctacaccggtgagcgcggcctggacttcgtgcccgctgccgagcgctgggcgtga

SEQ ID NO: 123789 - protein, 447 aa, Nocardioides sp. JS614
MEGSRVSRATTPQSKLERVTDSLTVRDNRTGQEYEVPITDGTIKAADLGQIKAEEDAPGLAVYDPGFVNTASCRSSVTFIDGDKGVLEYRGYPIEQLAEKSSFLEVAYLLVHGSLPTRAEYEAWVHEITYHTFVHENVKEFMQGFRYDAHPMGMLMASVGALSTFYPDARNISDADNRHMQIVRMIAKMPTLGAWSFRHAQGKPFVYPDNELGYTANFLSMLFKMSEHRFEADERLVKALDVLFILHADHEQNASTNAVRSVGSTQVDPYSAVAAGVGALYGPLHGGANEAVLRMLRRIGTKENIPSFIQGVKDGNERLMGFGHRVYKNYDPRAKIIKKSAEDVFEVTGTNPLLDIALELEKIALEDEYFVKRRLYPNVDFYSGLIYEAFQFPPEMFTVLFAIGRTPGWLSQWLELVQDKEQKIARPKQIYTGERGLDFVPAAERWA

SEQ ID NO: 123790 - DNA, 1296 bp, Azoarcus sp. BH72
  CDS (1)..(1296): transl_table=11
atgagcactgaacgcaccgcaaccctaaccgtcgatggcaagaccgtcgatttccccgtgatgaccggcacccatggccaggatgtcatcgacatccgtaccctgggcgggaagacgggcttgttcacctacgattccggtttcctctccaccgccagctgcaagtcgaagatcaccttcatcgacggcgacaagggtgaactgctgtaccgcggctacccgatcgagcaactcgccgagaagtgcaacttcctcgaagtcgcctacctgctcaagaacggcgaactgccgaacgcggcgcagaagctggatttcgaaaacaccatcaagagccacacgatggtgcacgaccagctgacccgcttctacaacggcttccgccgtgacgcccacccgatggcgatcatggtgggcgtggtcggcgcgctgtccgcgttctaccacgacgcgatggacttctccgaccaggagcaccgcaacgtctcgatcaaccgcctgatcgcgaagctgccgaccatcgtcgccatggcctacaagtacaacaccggccagccgttcatgtacccgcgcaacgacctcgactacacgtcgaacttcatgcacatgatgttcggtacgccgtgcgaggagtacaagccgaacccggtgctggtgcgcgcgctcgacgtcatcttcacgctgcacgccgaccacgagcagaacgcctccacctccacggtgcgtctggccggctcctcgggcgcaaacccgttcgcctgcatctcggccggtattgcctgcctgtggggcccggcccacggcggcgcgaacgaagcctgcctgaacatgctggaagaaatcggcgacgtgtcccgcgtcggcgagtacatcaagcgtgccaaggacaagaacgacagcttcaagctgatgggcttcggccaccgcgtctacaagaacttcgacccgcgcgccaagctgatgggcaaggtctgcaacgacgtgctgaccgaactcggcctcgaagacgaccgcctgttcaagctggccaaggaactcgaaaagatcgcgctggaagacgagtacttcgtcgagaagaagctctacccgaacgtcgacttctactcgggcatcgtgcagaaggcactgggcatcccgacttccatgttcacctgcatcttcgcgctcgcgcgcacggtgggctggatcacccagtgggaagaaatgatcaccgatccggaatacaagatcggccgtccgcgccagctgtacatcggcgcggcacgtcgcgacgttccggtcatcggacagcgtccgtaa

SEQ ID NO: 123791 - protein, 431 aa, Azoarcus sp. BH72
MSTERTATLTVDGKTVDFPVMTGTHGQDVIDIRTLGGKTGLFTYDSGFLSTASCKSKITFIDGDKGELLYRGYPIEQLAEKCNFLEVAYLLKNGELPNAAQKLDFENTIKSHTMVHDQLTRFYNGFRRDAHPMAIMVGVVGALSAFYHDAMDFSDQEHRNVSINRLIAKLPTIVAMAYKYNTGQPFMYPRNDLDYTSNFMHMMFGTPCEEYKPNPVLVRALDVIFTLHADHEQNASTSTVRLAGSSGANPFACISAGIACLWGPAHGGANEACLNMLEEIGDVSRVGEYIKRAKDKNDSFKLMGFGHRVYKNFDPRAKLMGKVCNDVLTELGLEDDRLFKLAKELEKIALEDEYFVEKKLYPNVDFYSGIVQKALGIPTSMFTCIFALARTVGWITQWEEMITDPEYKIGRPRQLYIGAARRDVPVIGQRP

SEQ ID NO: 123792 - DNA, 1305 bp, Mycobacterium sp. KMS
  CDS (1)..(1305): transl_table=11
gtggccgataatccgtccagtgcaactgagcacgccaagctgagctaccccggcggcgagctcgagctggatatcgtcccggccaccgacggtgccgacggcatcgcgctggggtcgctgctggcgaagaccggctacaccactttcgacggcggattcgtcaacaccgcatcgacgaagagtgcgatcacctacatcgacggcgacgccggcatcctgcgctaccggggttatcccatcgagcagctggccgagaagtcgacgttcatcgaggtgagctacctgctcatctacggtgagctgccgaccgccgaccagctcgaggacttcaccaccaagatccagcggcacaccctgctgcacgaggatctcaagcggttcttcgacgggttcccgcgcaacgcccacccgatgccggtgctctcgagtgcggtcaacgcgttgagcgcgtactaccaggactcgctcgacccgatggacaagaaccaggtcgaactgtccacgatccggctgctggccaagctgccgaccatcgcggcctacgcgtacaagaagtccgaggggcagccgttcctgtacccggacaactcgctgacgctggtcgagaacttcctgcggatgacgttcggcttcccggccgagccctacgaggtcgacccggagatcgtgcgggcactcgacatgctgctgatcctgcacgccgaccacgagcagaactgctcgacgtcgacggtccggctggtgggttcctcgcaggccaacctgttcacctcgatctcgggcggcatcaatgcgctgtggggcccgctgcacggcggcgccaaccaggcggtgctggagatgttgaccaagatccagaagtccgatggtgacgtccgcgagttcgtgcgcaaggtcaaggaccgcgaggacggcgtgaagctgatgggcttcggtcaccgcgtctacaagaactacgatccgcgcgcccgcatcgtcaaggagcaggccgacaagatcctcggcaagatgggcgtcgaggacgaactgctcgacatcgcgaagtcgctcgaagaggtggcgctgaccgacgacttcttcgtcgagcgcaagctgtacccgaacgtcgacttctacaccggcgtgatctaccgggcgatgggcttcccgacgcggatgttcaccgtgctgttcgcgctgggccggctgcccggctggatcgcgcactggcgggagatgcactccgagcccggcaagatcggccgcccccggcagatctacaccggctacaccgagcgcgactacatcgacaccgacaagcgctga

SEQ ID NO: 123793 - protein, 434 aa, Mycobacterium sp. KMS
MADNPSSATEHAKLSYPGGELELDIVPATDGADGIALGSLLAKTGYTTFDGGFVNTASTKSAITYIDGDAGILRYRGYPIEQLAEKSTFIEVSYLLIYGELPTADQLEDFTTKIQRHTLLHEDLKRFFDGFPRNAHPMPVLSSAVNALSAYYQDSLDPMDKNQVELSTIRLLAKLPTIAAYAYKKSEGQPFLYPDNSLTLVENFLRMTFGFPAEPYEVDPEIVRALDMLLILHADHEQNCSTSTVRLVGSSQANLFTSISGGINALWGPLHGGANQAVLEMLTKIQKSDGDVREFVRKVKDREDGVKLMGFGHRVYKNYDPRARIVKEQADKILGKMGVEDELLDIAKSLEEVALTDDFFVERKLYPNVDFYTGVIYRAMGFPTRMFTVLFALGRLPGWIAHWREMHSEPGKIGRPRQIYTGYTERDYIDTDKR

SEQ ID NO: 123794 - DNA, 1284 bp, Neisseria meningitidis FAM18
  CDS (1)..(1284): transl_table=11
atgtccaaatcaatcaaactcaacgtaccgggtcaggcaggtttggagctgccggtattggaagccagcatcgggcacgatgtggttgacattcgggggctgacaaaaaatacaggtttgttttccttcgaccccggatttgtttcaaccgcaagctgtgagtctaaaattacttacatcgacggcgatcaaggcttgctttattatcgcggataccccatcgagcagctggccgaaaagtccgattatttggaagtctgctacctgttgatttacggcgaactgccgactcccgagcaaaaggcagaatttgacaataccgtccgccgccacacgatggtgcatgaacagctgacttggttcttccgggggttccgccgcgacgcgcatccgatggcgatgatggtcggcgtggtcggcgcactgtctgcgttctaccaagacagcttggacattagcaatcccgaacaccgcaaaatcgcgatttaccgcctgatttctaaaatcccgaccattgcggcaatgtgctaccgctattcaaacggtctgccgttcaattatccgaagaataatctttcttattccgaaaacttccttcatatgatgttcgccacgccgtgtgaagactacaaacccaatcccgttttggcacgcgcgctcgaccgcatctttattttgcatgccgaccacgagcaaaacgcctcaacttcaaccgtccgtctggcagggtcttcgggtgcgaacccgtttgcctgtattgctgccggtatcgcctgcctgtggggtgcttcgcacggcggtgcgaacgaagccgtgttgaaaatgttggacgaaatcggcgatgtgtctaatgttgccgcatacatggaaggtgtgaaacaacgcaaataccgtctgatgggcttcggtcaccgcgtgtaccgcaatatggatccgcgtgccagcattatgcgtgaaacctgctatgaagttttgaaggaattgggcttggaagacagtccgaaattcaaactggcgatggaattggaacagattgcgctgaaagacccgttctttatcgaacgcaaactgtatccaaacgtcgatttctattccggcatcgtcctgtccgcgctgggcatcccgaccgaaatgtttaccgtcatcttcgccctgtcgcgcagcgtgggctggatttcgcactggcacgagatgattagcgatccttcgctgaaaatcggccgcccgcgccagctttataccggttcggaacgccgcgattatgtgccgccaggcgagaggtaa

SEQ ID NO: 123795 - protein, 427 aa, Neisseria meningitidis FAM18
MSKSIKLNVPGQAGLELPVLEASIGHDVVDIRGLTKNTGLFSFDPGFVSTASCESKITYIDGDQGLLYYRGYPIEQLAEKSDYLEVCYLLIYGELPTPEQKAEFDNTVRRHTMVHEQLTWFFRGFRRDAHPMAMMVGVVGALSAFYQDSLDISNPEHRKIAIYRLISKIPTIAAMCYRYSNGLPFNYPKNNLSYSENFLHMMFATPCEDYKPNPVLARALDRIFILHADHEQNASTSTVRLAGSSGANPFACIAAGIACLWGASHGGANEAVLKMLDEIGDVSNVAAYMEGVKQRKYRLMGFGHRVYRNMDPRASIMRETCYEVLKELGLEDSPKFKLAMELEQIALKDPFFIERKLYPNVDFYSGIVLSALGIPTEMFTVIFALSRSVGWISHWHEMISDPSLKIGRPRQLYTGSERRDYVPPGER

SEQ ID NO: 123796 - DNA, 1311 bp, Acidovorax sp. JS42
  CDS (1)..(1311): transl_table=11
atgaaactggcagacaacaaagcgacgctatcgttcagcaacggcagcccgagcgtggaactccccgtgtaccaaggcagcatcggcccggacgtggtcgacatccgcaagctgtacgcgcaaacgggcatgttcacctatgaccccggtttcctttccacggcctcctgccagtcgtccatcacctacatcgacggcgacaagggcgagctgctgtaccgcggctaccccatcgagcagctcgccacccagtgcgactacctcgaaacctgctacctgctgctgaatggcgagctgcccaacgccgcgcagaaggccacgttcaacgaccgcgtgaccaagcacaccatggtcaacgagcagatgcagttcttcctgcgcggtttccgccgcgacgcacaccccatggccgtgctgaccggcctggtgggcgcgctgtcggccttctaccacgacagcacggacatcaataaccccgagcaccgcgagatctccgccattcgcctgatcgccaagatgcccacgctggtggccatggcgtacaagtacggcaagggcgagccctacatgtacccccgcaacgacctctcgtacgcaggcaacttcctgcgcatgatgttcggcacgccctgcgaggactacaaggtcaaccccgtgatcgaacgcgcgatggaccgcatcttcatcctgcacgccgaccacgagcagaacgcctccacctccacggtgcgcctgtgcggctcctcgggcaccaacccgttcgccgccatcgctgccggcgtggcatgcctgtggggccctgcccacggcggcgccaacgaggcctgcctgaacatgctggaagaaatccaggccatgggcggcgtgtccaaggtgggcgagttcatggagaaggtcaaggacaagtcctccggcgtgaagctgatgggctttggccaccgcgtgtacaagaactacgacccccgcgccaagctgatgcaggaaacctgcaacgaagtgctggccgagctgggcctggaaaaggacccgctgttcgccctggccaagcagctggagaagatcgccctggaggacgactacttcgtgcagcgcaagctctacccgaacgtggacttctactccggcatcgtgcagcgcgcgatcggcatcccggtcaacctgttcaccggcatcttcgcgctggcccgtacggtgggctggatcgcccagctcaacgagatgatcggcgaccccgagtacaagatcggccgcccccgccagctgttcgtgggcgccgagcgccgcgacgttccagccctcaacaagcgctga

SEQ ID NO: 123797 - protein, 436 aa, Acidovorax sp. JS42
MKLADNKATLSFSNGSPSVELPVYQGSIGPDVVDIRKLYAQTGMFTYDPGFLSTASCQSSITYIDGDKGELLYRGYPIEQLATQCDYLETCYLLLNGELPNAAQKATFNDRVTKHTMVNEQMQFFLRGFRRDAHPMAVLTGLVGALSAFYHDSTDINNPEHREISAIRLIAKMPTLVAMAYKYGKGEPYMYPRNDLSYAGNFLRMMFGTPCEDYKVNPVIERAMDRIFILHADHEQNASTSTVRLCGSSGTNPFAAIAAGVACLWGPAHGGANEACLNMLEEIQAMGGVSKVGEFMEKVKDKSSGVKLMGFGHRVYKNYDPRAKLMQETCNEVLAELGLEKDPLFALAKQLEKIALEDDYFVQRKLYPNVDFYSGIVQRAIGIPVNLFTGIFALARTVGWIAQLNEMIGDPEYKIGRPRQLFVGAERRDVPALNKR

SEQ ID NO: 123798 - DNA, 1317 bp, Magnetospirillum magnetotacticum MS-1
  CDS (1)..(1317): transl_table=11
atgacgaacgagaacaagactcccaaggaatccgtcacgctgatcaacaacagcacgggcaagaccaccgaattcccgctgctggccggctccatcggccccaaggtggcggatatccgctccttgtatgccagccaggatatcttcacctacgaccccggctacatgtccaccggctcgtgcaaatcggccatcacctatatcgacggtgacgctggcgtgctgctgcaccgcggcttcgccatcgccgatctggccgagaactgctcgttcctggaagtggcctatctgatcctcaagggcgaattgcccaacgccgagcagaagaccaagttcgaattcgacatcgcccaccattccatggtgcacgagcagatcaacttcttcttccgcggcttccgccgtgactcgcaccccatggccgtgctgtgcggcgtggtcggcgccatggccgccttctaccacgactccatcgacatcaacgatccgcaccaccgcatggtggccagctatcgtctggtggccaagatgccgaccatcgtcgcctgggcctacaagtatgctcagggccagcccttcatgttcccgcagaacaagctctcctactcggagaacttcctgcacatgatgtacgcgacgccttgcgaggaatacaaggtcagcccggtcctggcccgcgccatggaccgcatcctgatcctgcacgccgatcacgagcagaacgcgtcgacctccaccgtccgtctggccggttcgtcgggcgccaatcccttcgcctgtatcgctgcgggcatcgcctcgctgtggggtccggcccatggcggcgccaacgaggccgtgctgcagatgctgcacgagatcggttcggtggagcgcatccccgaattcatcaagaaggccaaggacaaggatgatcccttccgtctgatgggcttcggccaccgggtctacaagaactacgacccgcgcgccaagatcatgcagaagacctgccacgaagtgctgagcgagttgggcgtccatgacgagcccctgctgaagctggccatggagctggagcgcatcgccctggaagacccctatttcgtggagcgcaagctgttcccgaacgtggacttctattcgggcatcatcttccgcgccatgggcatccccacccaggtgttcacctgcctgttcgccctggcccgcaccgtgggctggatcgcccagtggaacgagatgctgaccgacccggaccagaagatcggccgtccgcgtcagctctatgtcggcccggcgcagcgggatttcgtcccgctgcacaagcgtggctag

SEQ ID NO: 123799 - protein, 438 aa, Magnetospirillum magnetotacticum MS-1
MTNENKTPKESVTLINNSTGKTTEFPLLAGSIGPKVADIRSLYASQDIFTYDPGYMSTGSCKSAITYIDGDAGVLLHRGFAIADLAENCSFLEVAYLILKGELPNAEQKTKFEFDIAHHSMVHEQINFFFRGFRRDSHPMAVLCGVVGAMAAFYHDSIDINDPHHRMVASYRLVAKMPTIVAWAYKYAQGQPFMFPQNKLSYSENFLHMMYATPCEEYKVSPVLARAMDRILILHADHEQNASTSTVRLAGSSGANPFACIAAGIASLWGPAHGGANEAVLQMLHEIGSVERIPEFIKKAKDKDDPFRLMGFGHRVYKNYDPRAKIMQKTCHEVLSELGVHDEPLLKLAMELERIALEDPYFVERKLFPNVDFYSGIIFRAMGIPTQVFTCLFALARTVGWIAQWNEMLTDPDQKIGRPRQLYVGPAQRDFVPLHKRG

SEQ ID NO: 123800 - DNA, 1137 bp, Nostoc punctiforme PCC 73102
  CDS (1)..(1137): transl_table=11
atgatggtgtgcgaatacaagcctggtttagaaggcattcccgccgctcaatcaagtatcagctatgttgatgggcaaaaaggaatactagaatatcgtggcatccggattgaagaattagcagaaaaaagtacattcctagaaactgcttatctcttaatctggggtgaactgccaagcaaggaagaactggaaggatttgagcatgaagttcgttaccaccggcggataaaataccgcattcgggacatgatgaaatgctttccagaaagcggccacccaatggatgccctacaagcctctgctgctgctttaggtttgttttattcactccgggatttacataatcctgcctacattcgagattccgtagtgcgcctgatagcaaccattccgacgatggtggcggcgttccaactgatgcgaaaaggcaatgacccggtacgtccccgtgatgacttagactattcgtccaactttctatacatgctcgatgagaaagaacccgatcctttaatggcgcggatttttgatatctgcttgatacttcaagtcgagcatacaatgaatgcttctaccttcagtgccagggttacagcttctaccttaactgatccttacgctgtggttgctagtgctgtgggaactttgggtggacccctgcatggtggagccaatgaagaagtaattcagatgttggaaaaaattggctctgtagaaaatgtccgtccttacatagagcattgtctagaaactaaatctaagattatgggctttggacatcgtgtgtataaagtaaaagacccacgagccataattttacaaggtctagcagagaaactgtttgagaagtttggctatgacaaattctatgacattgctcaagagatggaacgagtggtaggagaaaaactcggcagcaaagggatttatcctaatattgacttttactcaggtttggtgtataggaagatgggaattcctacagacttgtttacaccaatatttgcgatcgctcgcgttgctggttggctagctcactggaaagaacaactggcagaaaaccggattttccgtcctacccaggtttacaacggtttgcacgaagttacttatactcccattgaccaacggtaa

SEQ ID NO: 123801 - protein, 378 aa, Nostoc punctiforme PCC 73102
MMVCEYKPGLEGIPAAQSSISYVDGQKGILEYRGIRIEELAEKSTFLETAYLLIWGELPSKEELEGFEHEVRYHRRIKYRIRDMMKCFPESGHPMDALQASAAALGLFYSLRDLHNPAYIRDSVVRLIATIPTMVAAFQLMRKGNDPVRPRDDLDYSSNFLYMLDEKEPDPLMARIFDICLILQVEHTMNASTFSARVTASTLTDPYAVVASAVGTLGGPLHGGANEEVIQMLEKIGSVENVRPYIEHCLETKSKIMGFGHRVYKVKDPRAIILQGLAEKLFEKFGYDKFYDIAQEMERVVGEKLGSKGIYPNIDFYSGLVYRKMGIPTDLFTPIFAIARVAGWLAHWKEQLAENRIFRPTQVYNGLHEVTYTPIDQR

SEQ ID NO: 123802 - DNA, 1293 bp, Bifidobacterium longum DJO10A
  CDS (1)..(1293): transl_table=11
atggcaacggcacaacttgatgtcgattcgaacaagttcaacctgcccgtggttaaggctagtgcagggccggatggcatcgtcgtttccaaactgcgcaacgatggctgggtaacgcttgatcccggattcctcaccaccgcgcagtgcgaatcgaaaatcacctacatcgacggcaagcattcgattttgcgctactgcggttaccccatcgagcaattgtgcgagaactccgattttctggaggtggcgtggctgctgcgccacggcgagctgccgagcagggctgagtatgagcagttctgtgcggacatcaatcacaagacgatggttggcgaagacttccgtaccttcatgggttcgttcccgcgctccgctcacccgatgagcgtgcttgcctccgccatcaatgcgctggccacgttctatccggacaccaccgatatttctgacaccgaccagcttgatgaggccgccaagatcatcatggccaaggcccgtacgattgtgtcgtacatcttccgccgtcgtcgcgatgagccgatgctgtaccccgattacgcgcgcggctatgtggacgacttcctgcgcatgtgcttcgctgtgccgtacgagccgtttgaatccgacccgctgtatgtgcatgctttgggtcgtttgttgattattcatgccgaccatgagcagaactgctcgacctcggtggtgcgtatcgccggttccgcccacgctaacctgtattcggcggtggccgctggcgtcaatgcgctgtctggtccgttgcatggtggtgcgaatgaggccgtactgcgccaattgaaggcgattcgtgattccggcaagtctgtggccgagttcgtgcgtgatgccaaggagaatggccagaagatttccggccttggccaccgtgtatacaagtcgtatgatccgcgcgcggcgattgccaggaagtatctggaaaagatcatggagcgcgaagatacgcagaagctgccgtctgacgagcgcgcgctgttcgccgtggccaccgagcttgaagatattgcgctgaatgacgaatatttcgtatcgcgcaacctgtatccgaacgtcgacttctacacgggcttgatttatcgggcgatcggcttcgatccggccatgttcaccacgctgttcgcgctgggccgcattcccggttggattgcgcagtaccgtgagatgttggccgacccgaataccaagatcggccgcccacgccaggtctacaccggtccggtcgagcgcgatttcgtgccgatggacgagcggtga

SEQ ID NO: 123803 - protein, 430 aa, Bifidobacterium longum DJO10A
MATAQLDVDSNKFNLPVVKASAGPDGIVVSKLRNDGWVTLDPGFLTTAQCESKITYIDGKHSILRYCGYPIEQLCENSDFLEVAWLLRHGELPSRAEYEQFCADINHKTMVGEDFRTFMGSFPRSAHPMSVLASAINALATFYPDTTDISDTDQLDEAAKIIMAKARTIVSYIFRRRRDEPMLYPDYARGYVDDFLRMCFAVPYEPFESDPLYVHALGRLLIIHADHEQNCSTSVVRIAGSAHANLYSAVAAGVNALSGPLHGGANEAVLRQLKAIRDSGKSVAEFVRDAKENGQKISGLGHRVYKSYDPRAAIARKYLEKIMEREDTQKLPSDERALFAVATELEDIALNDEYFVSRNLYPNVDFYTGLIYRAIGFDPAMFTTLFALGRIPGWIAQYREMLADPNTKIGRPRQVYTGPVERDFVPMDER

SEQ ID NO: 123804 - DNA, 1308 bp, Rickettsia sibirica 246
  CDS (1)..(1308): transl_table=11
atgaccaatgaaaataataatgattcagaatttgctgaattaaaaatcagaggaaaaatatttaaattacctatacttaaagcaagtatcggtgaggatgtaatcgatataagtagggtatctgcggaagccgattgctttacttacgacccgggttttatgtctactgcttcttgtcagtctactatcacctatatagatggtgataaaggaatcttgcggcatcgaggatatgatattaaagacttagctgagaaaagtgattttttagaagtggcatatttactgatttatggggaactaccaagtggcgagcagtataataatttcactaaacaggttgctcatcattcattagtgaatgaaagattacactatttatttcaaaccttttgtagctcttctcatcctatggctattatgcttgcggctgtcggttctctttcggcattttatcctgatttattgaattttaaggaagcagattacgaacttaccgctattagaatgattgctaagatacctaccatcgctgcaatgtcttataaatattctataggacaaccgtttatttatcctgataattcgttagattttaccgaaaattttctgcatatgatgtttgcaacgccttgtacgaaatatacagtaaatccaataataaaaaatgctcttaataagatatttatcctacatgccgatcatgagcagaatgcttctacttcaacagtccgaattgccggctcatccggagctaacccttttgcttgtattagcacgggtattgcctcactttggggacctgctcacggcggggctaatgaagcggtaataaatatgcttaaagaaatcggtagttctgagtatattcctaaatatatagctaaagctaaggataaaaatgatccatttagattaatgggttttggtcatcgtgtatataaaaactatgacccgcgtgccgcagtacttaaagaaacgtgcaaagaagtattaaaggaactcgggcagctagacaacaatccgctcttacaaatagcaatagaacttgaagctatcgctcttaaagatgaatattttattgagagaaaattatatccaaatgttgatttttattcgggtattatctataaagctatgggtataccgtcgcaaatgttcacggtactttttgcaatagcaagaaccgtaggctggatggcacaatggaaagaaatgcacgaagaccctgaacaaaaaatcagcagacctagacagctttacaccggttatgtacatagagagtataagggtattcgggagaggtaa

SEQ ID NO: 123805 - protein, 435 aa, Rickettsia sibirica 246
MTNENNNDSEFAELKIRGKIFKLPILKASIGEDVIDISRVSAEADCFTYDPGFMSTASCQSTITYIDGDKGILRHRGYDIKDLAEKSDFLEVAYLLIYGELPSGEQYNNFTKQVAHHSLVNERLHYLFQTFCSSSHPMAIMLAAVGSLSAFYPDLLNFKEADYELTAIRMIAKIPTIAAMSYKYSIGQPFIYPDNSLDFTENFLHMMFATPCTKYTVNPIIKNALNKIFILHADHEQNASTSTVRIAGSSGANPFACISTGIASLWGPAHGGANEAVINMLKEIGSSEYIPKYIAKAKDKNDPFRLMGFGHRVYKNYDPRAAVLKETCKEVLKELGQLDNNPLLQIAIELEAIALKDEYFIERKLYPNVDFYSGIIYKAMGIPSQMFTVLFAIARTVGWMAQWKEMHEDPEQKISRPRQLYTGYVHREYKGIRER

SEQ ID NO: 123806 - DNA, 1305 bp, Rickettsia rickettsii
  CDS (1)..(1305): transl_table=11
atgaccaatgaaaataataatgattcagaatttgctgaattaaaaatcagaggaaaaatatttaaattacctatacttaaagcaagtatcggtgaggatgtaatcgatataagtagggtatctgcggaagccgattgctttacttacgacccgggttttatgtctactgcttcttgtcagtctactatcacctatatagacggtgataaaggaatcttgcggcatcgaggatatgatattaaagacttagctgagaaaagtgattttttagaagtagcatatttactgatttatggggaactaccaagtggcgagcagtataataatttcactaaacaggttgctcatcattcattagtgaatgaaagattacactatttatttcagaccttttgtagctcttctcatcctatggctattatgcttgcggctgtcggttctcttgcggcattttatcctgatttattgaattttaaggaagcagattacgaacttaccgctattagaatgattgctaagatacctaccatcgctgcaatgtcttataaatattctataggacaaccgtttatttatcctgataattcgttagattttaccgaaaattttctgcatatgatgtttgcaacgccttgtacgaaatatacagtaaatccaataataaaaaatgctcttaataagatatttatcctacatgccgatcatgagcagaatgcttctacttcaacagtccgaattgccggctcatccggagctaacccttttgcttgtattagcacgggtattgcctcactttggggacctgctcacggcggggctaatgaagcggtaataaatatgcttaaagaaatcggtagttctgagtatattcctaaatatatagctaaagctaaggataaaaatgatccatttagattaatgggttttggtcatcgtgtatataaaaactatgacccgcgtgccgtagtacttaaagaaacgtgcaaagaagtattaaaggaactcgggcagctagacaacaatctattacaaatagcaatagaacttgaagctatcgctcttaaagatgaatattttattgagagaaaattatatccaaatgttgatttttattcgggtattatctataaagctatgggtataccgtcgcaaatgttcacggtactttttgcaatagcaagaaccgtaggctggatggcacaatggaaagaaatgcacgaagaccctgaacaaaaaatcagcagacctagacagctttacaccggttatgtacatagagagtataagggtattcgggagaggtaa

SEQ ID NO: 123807 - protein, 434 aa, Rickettsia rickettsii
MTNENNNDSEFAELKIRGKIFKLPILKASIGEDVIDISRVSAEADCFTYDPGFMSTASCQSTITYIDGDKGILRHRGYDIKDLAEKSDFLEVAYLLIYGELPSGEQYNNFTKQVAHHSLVNERLHYLFQTFCSSSHPMAIMLAAVGSLAAFYPDLLNFKEADYELTAIRMIAKIPTIAAMSYKYSIGQPFIYPDNSLDFTENFLHMMFATPCTKYTVNPIIKNALNKIFILHADHEQNASTSTVRIAGSSGANPFACISTGIASLWGPAHGGANEAVINMLKEIGSSEYIPKYIAKAKDKNDPFRLMGFGHRVYKNYDPRAVVLKETCKEVLKELGQLDNNLLQIAIELEAIALKDEYFIERKLYPNVDFYSGIIYKAMGIPSQMFTVLFAIARTVGWMAQWKEMHEDPEQKISRPRQLYTGYVHREYKGIRER

SEQ ID NO: 123808 - DNA, 1116 bp, Bacillus cereus G9241
  CDS (1)..(1116): transl_table=11
atgactgttattcgaggtttagaaggggtagtagcaacaacatcatctgtgagctctattattgatgatacattaacttatgttgggtataatattgatgatttagctgagaatgctacatttgaagaagtagtgtacttattatggcatcgcaagcttcctaacgagcaagaactagcggaattcaatgagattgtatcggaatactataaagttccaggtgagattttagcatatttgaaacaagtagatttaaaaatcgcacatccgatgtctgttttacgaactgcaatttccatgctatcattatacgatgagagcgctgaaattatggatgaaaagtccaattatttgaaagcggttaaattacaagctcaagtgggaactttagttgctgcttacgcaagaatccgtaaaggcttagatgttgttgagcctagaaatgatttatcattagctgcaaacttcttgtacatgttaaatgatcgcgagccaaatgaagttgaaattgaagcttttgataaggcgcttgtacttcacgcagatcatgagttaaacgcttctacatttactgcacgcgtttgtgtagctacactttcagatgtatattctggtattacagcagcaatcggtgcgttaaaaggtcctcttcacggcggggcaaatgaaaatgtaatgaagatgttaactgaaattggcgaagaagaaaatgtagaatcatatattcataatgctcttcaaaataaagtgaaaatcatgggctttggccaccgtgtatatgagcagggtgatccacgtgcaaaacatttacgcgaaatgtctaagagattatgcgtgcttttaggagaagagaaatggtataatatgtctatcaaaattgaagacattgtaacaaaagaaaaaggtcttccaccaaatgttgatttctattcagcttctgtataccattgtttaggaattgaccatgacttatttacacctatttttgcaattagccgtatgtcaggctggttagcacatattctagaacaatatgaaaataaccgtttgatccgtccgcgtgctgattataatggaccaacgcatcaagtgtatgttccaattgcacaacgataa

SEQ ID NO: 123809 - protein, 371 aa, Bacillus cereus G9241
MTVIRGLEGVVATTSSVSSIIDDTLTYVGYNIDDLAENATFEEVVYLLWHRKLPNEQELAEFNEIVSEYYKVPGEILAYLKQVDLKIAHPMSVLRTAISMLSLYDESAEIMDEKSNYLKAVKLQAQVGTLVAAYARIRKGLDVVEPRNDLSLAANFLYMLNDREPNEVEIEAFDKALVLHADHELNASTFTARVCVATLSDVYSGITAAIGALKGPLHGGANENVMKMLTEIGEEENVESYIHNALQNKVKIMGFGHRVYEQGDPRAKHLREMSKRLCVLLGEEKWYNMSIKIEDIVTKEKGLPPNVDFYSASVYHCLGIDHDLFTPIFAISRMSGWLAHILEQYENNRLIRPRADYNGPTHQVYVPIAQR

SEQ ID NO: 123810 - DNA, 1308 bp, Rickettsia akari str. Hartford
  CDS (1)..(1308): transl_table=11
atgaccaatgacaatgattctgattcagaatttgccgaattaaaaatcagaggaaaaatatttcaattacctatacttaaagcaagtataggtgaggatgtaatcgacataagcagggtatctgcggaagtcaattgttttacttatgacccgggttttatgtctactgcttcttgtaagtctactatcacttatatagacggtgataaaggaatcttgcggcatcgaggatataatattaaagatttagccgagaagagcgattttttggaagtggcatatttgctaatctatggagaattaccaagcatcgagcagtataataatttcactaaacaggttgctcatcattcattagtgaatgaaagattacactatttatttcaaaccttttgtagctcttctcatcctatggctattatgcttgcggctattggttctctgtcggcattttatcctgatttactgaattttaaagaagcagactacgaacttaccgctattagaatgattgctaagataccaactatcgccgcaatgtcttataaatattctataggacaaccgtttgtttatcctgataattcgttagattttactgaaaattttctgcatatgatgtttgcaacgccttgtacaaaatacaaagtaaatccaataataaaaaatgcgcttaataagatatttatcctacatgcagaccatgagcagaatgcttctacttcaacagtccgaatagctggttcatctggagctaatgcttttgcgtgtattagcactggtattgcatcactttggggacctgctcacggcggagctaatgaagcggtaataaacatgcttaaagaaatcggtagttctgagaatatacctaaatatatagctaaagctaaggataaaagtgatccgtttaggttaatgggtttcggtcatcgtgtatataaaaactatgacccacgtgcctcagtacttaaagaaacgtgcaaagaagtattaaaggaacttgggcagctagaaaataatccacttttacaaatagcaatagaacttgaagctatcgctcttaaagatgaatattttattgagagaaaattatatccaaatgttgatttttattcaggtattatctataaagctatgggtataccgtcgcaaatgttcacggtactttttgcaatagcaagaaccgtaggctggatggcacaatggaaagaaatgcacgaagaccctggacaaaaaatcagcagacctagacagctttataccggttatgtacatagagagtatacgggtatcggggaaaggtaa

SEQ ID NO: 123811 - protein, 435 aa, Rickettsia akari str. Hartford
MTNDNDSDSEFAELKIRGKIFQLPILKASIGEDVIDISRVSAEVNCFTYDPGFMSTASCKSTITYIDGDKGILRHRGYNIKDLAEKSDFLEVAYLLIYGELPSIEQYNNFTKQVAHHSLVNERLHYLFQTFCSSSHPMAIMLAAIGSLSAFYPDLLNFKEADYELTAIRMIAKIPTIAAMSYKYSIGQPFVYPDNSLDFTENFLHMMFATPCTKYKVNPIIKNALNKIFILHADHEQNASTSTVRIAGSSGANAFACISTGIASLWGPAHGGANEAVINMLKEIGSSENIPKYIAKAKDKSDPFRLMGFGHRVYKNYDPRASVLKETCKEVLKELGQLENNPLLQIAIELEAIALKDEYFIERKLYPNVDFYSGIIYKAMGIPSQMFTVLFAIARTVGWMAQWKEMHEDPGQKISRPRQLYTGYVHREYTGIGER

SEQ ID NO: 123812 - DNA, 1347 bp, Prosthecochloris aestuarii DSM 271
  CDS (1)..(1347): transl_table=11
atggtacacccaaacaacgatcactcactgaccatcaccgataaccgaacaggaaaaagctatacgattcctatagagtgcggtacggtaagaacgatggatcttcggcagatcaaggttaaggaggatgattttggccttcttggttacgatcccggttttctcaatacagcctcctgcaagagtcaggtaacctatatcgatggagaaaagggtattctccgctacagggggtatcctatcgagcagcttgctgaaaaaagttcatttctggaaacagcctaccttctcatcaaagggcagctgccggatcatgaccggcttgccgcctggggaaaaaatatccagagccatacgatggtccacaccaatctcgccaagtttatggacgggtttcgctacgatggccatccaatgggtattcttgtcgggactgtcggtgccctttcgaccttctatccgggagcgaaaaacattttcgacaaggagtccagaaagcttcaggttcgaaggctgatcgggaagatgccaacccttgcggcgatgagctttcgtcacagtatgggtttcccttatgtgcttccggataatgatctgagctacactggaaattttctttccatgatgttcaagatgaccgagttgaagtatacgccaaacccggttctggaaaaggccctggacgttctttttattcttcatgccgatcatgagcagaactgttcgacaagcgccgtgcgttcggttgggagttcacaggtcgatccctattccgccctggcggcagggtgcgccgcattgtacggtcctttgcatggcggagccaacgaagcggtgattcgaatgcttgaacgcataggctctgtcgaccgtgttcctgaattcatcagatccgttaaatccggagagggccgccttatgggattcggccacagggtgtacaagaattacgatccaagggcccgcattatcaagaagattgcctttgaggtttttgatgttacaggaaccaacgatctgctcgatatcgctcttgagcttgaacggatcgcacttgaggacgattacttcgtcagccgcaagctctatccgaacgttgatttctattccggtcttatctaccaggctatgggatttccgcttgacatgtttcctgttctttttgccatcggcagaacgccgggctggcttgcccagtggactgaacatgtcaatgacagtgagcagaaaatttcccgtccccgccagatgtatcttggcgaggaacagcgcgattacgtgctgattgacgagcgtttaccgcttaatcccgatgaggagctgatgccgggcatgtgcaggctctga

SEQ ID NO: 123813 - protein, 448 aa, Prosthecochloris aestuarii DSM 271
MVHPNNDHSLTITDNRTGKSYTIPIECGTVRTMDLRQIKVKEDDFGLLGYDPGFLNTASCKSQVTYIDGEKGILRYRGYPIEQLAEKSSFLETAYLLIKGQLPDHDRLAAWGKNIQSHTMVHTNLAKFMDGFRYDGHPMGILVGTVGALSTFYPGAKNIFDKESRKLQVRRLIGKMPTLAAMSFRHSMGFPYVLPDNDLSYTGNFLSMMFKMTELKYTPNPVLEKALDVLFILHADHEQNCSTSAVRSVGSSQVDPYSALAAGCAALYGPLHGGANEAVIRMLERIGSVDRVPEFIRSVKSGEGRLMGFGHRVYKNYDPRARIIKKIAFEVFDVTGTNDLLDIALELERIALEDDYFVSRKLYPNVDFYSGLIYQAMGFPLDMFPVLFAIGRTPGWLAQWTEHVNDSEQKISRPRQMYLGEEQRDYVLIDERLPLNPDEELMPGMCRL

SEQ ID NO: 123814 - DNA, 1326 bp, Kineococcus radiotolerans SRS30216
  CDS (1)..(1326): transl_table=11
gtgttgggcaccgtcgacgggggcgggtacggtcgcgacatggctgactccgtgacgctgaagcacgcaggtggcgagctcgacctccccgtgacccctgccaccgagggtgccgccggcttcggcatcggcagcctcctcaaggagaccgggctggtcaccctcgactccggcttcaccaacaccgcctcctgcacgtcggcggtcacctacatcgacggtgacgcgggcgtcctgcgctaccgcgggtaccccatcgagcagctggccgagaagtccaccttcgtcgagaccagctacctgctcatctacgggcacctgccctccgcggcggagctgtccgccttcaccgagcggatccagcggcacaccctgctgcacgaggacctcaagcggttcttcgacggcttcccccgcgacgcgcacccgatgccggtgctgtccagcgcggtgagcgcgctgtcgacgttctaccccaactccctcaaccccttcgacgaggagcaggtggagctctccaccatccgcctcctcgccaagctgcccacgatcgcggcctacgcccaccgcaagtccctcggtcagcccctgctctaccccgacaaccgcctcgggctggtggagaacttcacccgcctcgccttcggcaaccccgccgaggactacgagatcgacccggtcatggtcaaggccctggaccagctcctcgtcctgcacgccgaccacgagcagaactgctccacctccaccgtccggctcgtcgggtcgggccaggcgaacctcttcgcctccgtctccgccggcatccacgccctctccggacccctgcacggcggggcgaactccgcggtgctggacatgctcgaggccatcaggaactccgacgacgacgtcgacacgttcatgacgaaggtcaagaacaaggagaagggcgtgcgcctgatgggcttcggccaccgggtgtacaagaactacgacccccgcgcggccatcgtgaagaagaccgccgaccagatcctctccggcctcggcaagcgcgacgagctcctcgacatcgccatgcgcctggaggagatcgccctgcacgacgactacttcgtcgagcgcaagctgtacccgaacgtcgacttctacaccggcctcatctacaaggccatgggcttccccaccaagatgttcacggtgctgttcgccctgggccgcctgccgggctggatcgcgcagtggcgcgagatgatcaacgaccccgccaccaagatcggccgcccccgccaggtgtacatcggcgagggtgcgcgcgactacaccgagatcggcgcccgctga

SEQ ID NO: 123815 - protein, 441 aa, Kineococcus radiotolerans SRS30216
MLGTVDGGGYGRDMADSVTLKHAGGELDLPVTPATEGAAGFGIGSLLKETGLVTLDSGFTNTASCTSAVTYIDGDAGVLRYRGYPIEQLAEKSTFVETSYLLIYGHLPSAAELSAFTERIQRHTLLHEDLKRFFDGFPRDAHPMPVLSSAVSALSTFYPNSLNPFDEEQVELSTIRLLAKLPTIAAYAHRKSLGQPLLYPDNRLGLVENFTRLAFGNPAEDYEIDPVMVKALDQLLVLHADHEQNCSTSTVRLVGSGQANLFASVSAGIHALSGPLHGGANSAVLDMLEAIRNSDDDVDTFMTKVKNKEKGVRLMGFGHRVYKNYDPRAAIVKKTADQILSGLGKRDELLDIAMRLEEIALHDDYFVERKLYPNVDFYTGLIYKAMGFPTKMFTVLFALGRLPGWIAQWREMINDPATKIGRPRQVYIGEGARDYTEIGAR

SEQ ID NO: 123816 - DNA, 1290 bp, Xylella fastidiosa Dixon
  CDS (1)..(1290): transl_table=11
atgtccgatcttgataaggtcacgctcaatgccggtgagacttctctcgttttaccggttttgaaacccacgttaggtaatggttgcgttgatattgccaagttgacaaaggaaaccgggctgtttacttacgactctggttttacggcaactgcaagctgtaagtctgccatcacttacattgatggtgaaaagggtgtgttgttgtaccgcggctatccgattgagcagttagccgagcactccagttttttggaggtcgcttatttgttgatgaacggtgagttaccgagaaaagacgagtttgccaagtttgatgatgaaatcacgcatcacacgatgatgcatgagtcgttgaagaactttcttggcggttttcattatgatgcacatccaatggctatgttggctgcttcggtggcttcgctgtcggcgttctaccacgatacccttgatttgaacgatcttgagcaacgtcgcttagctgcaattcgtttgatcgctaaggtgccgacgcttgcagcagcagtgcatcgctactcaattggctggccgatccgttatccacgaaacaatcttggttatgtcgagcgctttttgcatatgatgtttgaagtgcctagtgaaccgctgcagttgaatccagtcgtgaccaaagctctggatttactgtttattttgcatgctgatcatgagcagaacgcttcgacatcaacagtccgcttggtgggttcgactggcgctaatccttatgcatcggttgccgcgggcatcaccgcgttgtggggaccggcacacggcggcgctaatgaggccgtgttaaagatgttggaggagattggtgatgctaagaatgttgacttggttattgcaaaagcgaaaaccaaggacaaaaactctccattccgtttgatgggtttcggccatcgtgtctataaacattttgatccgcgtgcgaaaatcatccgtgagacggcacacacagttcttggtgagttaggtgtgaacgatccgctactggaagtagcattaaagttggaagaggtagcgctgaaagatgattactttgtgcagcgtaagttgtaccctaacgttgatttttattcgggcatcatctacaaagccatcaacattcctttggaaatgtttacagtgatgtttgccatcgcgcgtaccgcagggtgggtttctcattggcttgagcagcaagtcgaccctgagatgaaaatcagcaggccacgccaaatttacacaggtcatagcgagcgtgactacaaagatgctaggtaa

SEQ ID NO: 123817 - protein, 429 aa, Xylella fastidiosa Dixon
MSDLDKVTLNAGETSLVLPVLKPTLGNGCVDIAKLTKETGLFTYDSGFTATASCKSAITYIDGEKGVLLYRGYPIEQLAEHSSFLEVAYLLMNGELPRKDEFAKFDDEITHHTMMHESLKNFLGGFHYDAHPMAMLAASVASLSAFYHDTLDLNDLEQRRLAAIRLIAKVPTLAAAVHRYSIGWPIRYPRNNLGYVERFLHMMFEVPSEPLQLNPVVTKALDLLFILHADHEQNASTSTVRLVGSTGANPYASVAAGITALWGPAHGGANEAVLKMLEEIGDAKNVDLVIAKAKTKDKNSPFRLMGFGHRVYKHFDPRAKIIRETAHTVLGELGVNDPLLEVALKLEEVALKDDYFVQRKLYPNVDFYSGIIYKAINIPLEMFTVMFAIARTAGWVSHWLEQQVDPEMKISRPRQIYTGHSERDYKDAR

SEQ ID NO: 123818 - DNA, 1290 bp, Xylella fastidiosa Ann-1
  CDS (1)..(1290): transl_table=11
atgtccgatcttgataaggtcacgctcaatgctggtgagacttctctcgttttaccggttttgaaacccacgttaggtaatggttgcgttgatattgccaagttgacaaaggaaaccgggctgtttacttacgactctggttttacggcaactgcaagctgtaagtctgccatcacttacattgatggtgaaaagggtgtgttgttgtaccgcggctatccgattgagcaattagccgagcactccagttttttggaggtcgcttatttgttgatgaacggtgagttaccgagaaaagacgagtttgccaagtttgatgatgaaattacgcatcacacgatgatgcatgagtcgttgaagaactttcttggcggttttcactatgatgcacatccaatggctatgttggctgcttcggtggcttcgctgtcggcgttctaccacgatacccttgatttgaacgatcttgagcaacgtcgcttagctgcaattcgtttgatcgctaaggtgccgacgcttgcagcggcagcgcatcgctactcgattggctggccgatccgttatccacgaaacaatcttggttatgtcgagcgctttttgcatatgatgtttgaagtgcctagtgaaccgctgcagttgaatccagtcgtgaccaaagctctggatttactgtttattttgcatgctgatcatgagcagaacgcttcgacatcaacagtccgtttggtgggttcgactggcgctaatccttatgcatcggttgccgcgggcatcaccgcgttgtggggaccggcacacggcggcgctaatgaggccgtgttaaagatgttggaggagattggtgatgctaagaatgttgacttggttattgcaaaagcgaaaaccaaggacaaaaactctccattccgtttgatgggtttcggccatcgtgtctataaacattttgatccacgtgcgaaaatcatccgtgagatggcacacacagttcttggtgagttaggtgtgaacgatccgctactggaagtagcattaaagttggaagaggcagcgctgaaagatgattactttgtgcagcgtaagttgtaccctaacgttgatttttattcgggcatcatctacaaagccatcaacattcctttggaaatgtttacagtgatgtttgccatcgcgcgtaccgcagggtgggtttctcattggcttgagcagcaagtcgacccggagatgaaaatcagcaggccacgccaaatttacacaggtcatcgcgagcgtgactacaaagatgctaggtaa

SEQ ID NO: 123819 - protein, 429 aa, Xylella fastidiosa Ann-1
MSDLDKVTLNAGETSLVLPVLKPTLGNGCVDIAKLTKETGLFTYDSGFTATASCKSAITYIDGEKGVLLYRGYPIEQLAEHSSFLEVAYLLMNGELPRKDEFAKFDDEITHHTMMHESLKNFLGGFHYDAHPMAMLAASVASLSAFYHDTLDLNDLEQRRLAAIRLIAKVPTLAAAAHRYSIGWPIRYPRNNLGYVERFLHMMFEVPSEPLQLNPVVTKALDLLFILHADHEQNASTSTVRLVGSTGANPYASVAAGITALWGPAHGGANEAVLKMLEEIGDAKNVDLVIAKAKTKDKNSPFRLMGFGHRVYKHFDPRAKIIREMAHTVLGELGVNDPLLEVALKLEEAALKDDYFVQRKLYPNVDFYSGIIYKAINIPLEMFTVMFAIARTAGWVSHWLEQQVDPEMKISRPRQIYTGHRERDYKDAR

SEQ ID NO: 123820 - DNA, 1119 bp, Streptococcus suis 89/1591
  CDS (1)..(1119): transl_table=11
atgacagaaacgaatgggttaaaagatgcgattgcctgtgatacgcgaatcagtgcaatcgaaaatgaccgcttgtcctatgcagggtatgacattgctgaattgatggagaataacgcttcttttgaggaagtcatctatcttctgtggaacctgcatttgccaactcagattgaattaaattattttgagaaaagtctgcgaaaagaatatgcgatttcagatgcggtagagcaatgtattctgattcaatcacggcgacatttgcatcctatgagcgtgttgcgttcgacagtatctctccttggagtatataatgtacatgctgaagagaattcgttagaagctttgtatgaacaatctattcagattatgggcaaggttccgacgattattgcaacatttgctcgtttgagacgcggattggttccaattgaaccgcggtctgatctgggttttgcggcgaattttctttatatgctgaatggtgaggagccgagtgatttacaaatcaaagcgtttaataaagctttggtgcttcatgctgatcatgaattgaatgcatctacttttgctgcgcgtgtcacggcatcaacgttaacggatttatattcttgtgttaccacggcaattgggactctgaaaggctcattgcatggtggtgcaaatgaacgagtgtttgacatgttgctggctattcgcgagagtggtgatgccgagagatatttgcagaagaagctggattcgaaggaaaaaattatgggatttggccatcgagtctataaaacggttgatcctcgccaagagtatttgaaggagatggcgcgtgatttgacattcggaacagacgatgaagcgttttatagattgtcagaggaagtagaaagctttattaaaaacaaaaaaggtttaattccaaacgtagatttttattcggcgacagtttaccatgtgctaggtattgatagtgatatttttacattgatttttgcaatgagccgtatggcggggtggattgcacatgtccaggaacaacggaaaaataataaattgattcgtccgcgctcttcctacttaggtggtaggaatttggtttacatcccgattggaaagaggtaa

SEQ ID NO: 123821 - protein, 372 aa, Streptococcus suis 89/1591
MTETNGLKDAIACDTRISAIENDRLSYAGYDIAELMENNASFEEVIYLLWNLHLPTQIELNYFEKSLRKEYAISDAVEQCILIQSRRHLHPMSVLRSTVSLLGVYNVHAEENSLEALYEQSIQIMGKVPTIIATFARLRRGLVPIEPRSDLGFAANFLYMLNGEEPSDLQIKAFNKALVLHADHELNASTFAARVTASTLTDLYSCVTTAIGTLKGSLHGGANERVFDMLLAIRESGDAERYLQKKLDSKEKIMGFGHRVYKTVDPRQEYLKEMARDLTFGTDDEAFYRLSEEVESFIKNKKGLIPNVDFYSATVYHVLGIDSDIFTLIFAMSRMAGWIAHVQEQRKNNKLIRPRSSYLGGRNLVYIPIGKR

SEQ ID NO: 123822 - DNA, 1287 bp, Croceibacter atlanticus HTCC2559
  CDS (1)..(1287): transl_table=11
atgtccaagaatgcgactttagaatacgaaggaaaaaagtacgaattcccagtaattacgggaacagaaaacgaatctgccatagacattaagaccttaagaggtgttacaggtggcttaactacaatagatccaggttacaaaaatacaggctcttgtgaaagtgcaattacatttttaaatggtgaagaaggaattcttcgttacagaggatactctattgaagatttagctgaaaaagcaagttttttagaaacagcttacctgttaatttttggagaacttcctactaaagaacaattcgaaaagtttcatacagatattaaatctcactctcacgtagatgaggatattaagaaaatattagacggttttccaaagtctgcacacccaatgggcgtgttgtcttcacttacaaatgcattaattgcatttaatccatcttcagttaatgtagattctgaagaggaaatgtataacgcaatagtgaagattttaggtaaatttccagtacttacagcttgggcctacagaaaacgagttggtaagccattagattatggtgatgactctttagggtatgtagagaatttcttaaagatgatgtttaagaaacctaatggagaatataatgcgtcttctacagtagttgaagcgttagataaattattaatactacacgcagatcacgagcaaaactgctctacatctactgtacgtatagtaggttcttctcatgcaggattatttgcttctatttcagcaggaattaatgcgctttgggggccacttcacggtggtgctaaccaagctgtaatcgaaatgcttgaggctattaaagaagatggtggcgatactcataagttcatggagaaagctaaagacaaggaagatccttttcgtcttatgggctttgggcatagagtttataaaaacttcgacccaagagctaagattatcaagaaatctgcagatgatgtattaggtgctttaggaattgaggatcctgtattagatatagctaaaggtttagaaaaagaagctttagaagatagttactttgtagaccgtaaattatatcctaacgtagacttttactctggtattatttacagagcattaggaatacctactgaaatgtttactgcaatgtttgctttaggacgtttaccaggttggatagcgcaatggcgtgaaatgcgtttgcgtaaagagccaataggaagaccaagacaggtatacattggtgaaaaccatagagagtttaaggctgtaaatgagcgttaa

SEQ ID NO: 123823 - protein, 428 aa, Croceibacter atlanticus HTCC2559
MSKNATLEYEGKKYEFPVITGTENESAIDIKTLRGVTGGLTTIDPGYKNTGSCESAITFLNGEEGILRYRGYSIEDLAEKASFLETAYLLIFGELPTKEQFEKFHTDIKSHSHVDEDIKKILDGFPKSAHPMGVLSSLTNALIAFNPSSVNVDSEEEMYNAIVKILGKFPVLTAWAYRKRVGKPLDYGDDSLGYVENFLKMMFKKPNGEYNASSTVVEALDKLLILHADHEQNCSTSTVRIVGSSHAGLFASISAGINALWGPLHGGANQAVIEMLEAIKEDGGDTHKFMEKAKDKEDPFRLMGFGHRVYKNFDPRAKIIKKSADDVLGALGIEDPVLDIAKGLEKEALEDSYFVDRKLYPNVDFYSGIIYRALGIPTEMFTAMFALGRLPGWIAQWREMRLRKEPIGRPRQVYIGENHREFKAVNER

SEQ ID NO: 123824 - DNA, 1296 bp, Sulfitobacter sp. EE-36
  CDS (1)..(1296): transl_table=11
atggccgaaagtacaaaatccgcaacgttgaccatcgacgggaacagctttgaactgccgatctattccccgtcggcgggcccggatgtcatggacatccgcaagctgttctctcaggcgaatgtgttcacatatgaccctggcttcacctcgacagcggcctgtgacagcacgatcaccttcattgacggtgacgaaggcgtgttgctgcaccgtgggtatccgatcgaccaactggccagcgaatctcactacctcgaagtgtgctacctgctgctgtatggcgaactgccctctgccgcgcagctggaagagttcgaaaatctggtgaccaaccacaccatgatccacgagcagatgattaacttcttccgtggtttccgccgtgatgcacacccgatggcgatcatggtcggcgttgtgggcgcgatgtctgccttctaccacgacagcaccgacatcaacgacgcgcaccagcgcgaagtggcaacgatccgtctgatcgccaagatgccgacgattgccgcgatggcctataagtacaccatcggtcagccgttcatctatccgcgcaacgacgtagactatgccggtaacttcctgcgcatgtgtttcgccgtccctgccgaggattatgtcgtcgaccccatccttgcccgtgcgatggaccgcatctttacgctgcacgcggaccacgaacagaacgcatcgacatcgaccgtgcgtctggcgtcctcttccggggcgaacccctttgcctgtatcgctgctggcatcgcctgcctttgggggccggcgcatggtggggcgaaccaggcgtgtctggaaatgctgaaagagatcggcacaccggaccgcatccctgaattcatcgcccgcgccaaggacaagaacgacccgttccgcctgatgggctttggtcaccgcgtctacaagaaccacgacccacgcgcgaccgtgatgaaagaaagcgcggacgaagtgcttgagctgctgggtgtcgaaaacaacccgatcctgcaggtcgcgaaagagcttgaaaaacaggcgctggaagatccgtattttgcagagaagaagctgttcccgaacgtcgatttctactcgggcatcatcctcgaagcgatgggtttccccacgtcgatgttcacgccgatctttgcgctggcacggaccgttggctggatctcgcagtggaaagagcagatcagcgatcctcaactgaaaatcgggcgtccccgtcagctgtatcttggcgaaacaccacgcgactatgtgaatatcgaaaagcgctga

SEQ ID NO: 123825 - protein, 431 aa, Sulfitobacter sp. EE-36
MAESTKSATLTIDGNSFELPIYSPSAGPDVMDIRKLFSQANVFTYDPGFTSTAACDSTITFIDGDEGVLLHRGYPIDQLASESHYLEVCYLLLYGELPSAAQLEEFENLVTNHTMIHEQMINFFRGFRRDAHPMAIMVGVVGAMSAFYHDSTDINDAHQREVATIRLIAKMPTIAAMAYKYTIGQPFIYPRNDVDYAGNFLRMCFAVPAEDYVVDPILARAMDRIFTLHADHEQNASTSTVRLASSSGANPFACIAAGIACLWGPAHGGANQACLEMLKEIGTPDRIPEFIARAKDKNDPFRLMGFGHRVYKNHDPRATVMKESADEVLELLGVENNPILQVAKELEKQALEDPYFAEKKLFPNVDFYSGIILEAMGFPTSMFTPIFALARTVGWISQWKEQISDPQLKIGRPRQLYLGETPRDYVNIEKR

SEQ ID NO: 123826 - DNA, 1302 bp, Roseovarius nubinhibens ISM
  CDS (1)..(1302): transl_table=11
atgaagatggcagaacctggaaagaccgcgaagcttgaaatcgacggcaaaacctatgagttgccggtctttacgcccactgccggccccgatgtcatcgacatccgcaagctctatggtcaggcgggtgtgttcacctatgacccgggctttacctcgacggcgagctgcgacagcaccatcacctatatcgatggcggcaagggcgagctgttgcaccgcggctatccgatcgatcagctggccgagaagtcgcattatctcgaggtctgctacctgctgctctacggcgaactgccctcgacggcccagctcgaagatttcgagagccgcgtgaccaatcacacgatgctgcatgaacagatgcatttcctcttccgcggcttccgccgggatgcgcatccgatggcgatcatggtgggcgtggtcggggcgctgtcggccttctaccatgacagcaccgacatcaacgacccgtggcagcgcgaagtggcgtcgatccggatgatcgccaaaatgccgaccatcgccgccatggcctataaatacaccatcggccagcccttcgtgtacccgcgcaacgatgtcgattacgcctcgaacttcctgcgcatgtgctttgcggtgccggccgaggattacgaggtcaacccgatcctgagccgcgcgatggaccggatcttcaccctgcatgccgatcacgaacaaaacgcctcgacctcgaccgtgcgtctggcctcgtcttcgggtgccaaccccttcgcctgtatcgcagcgggcatcgcctgcctctggggcccggcccatggcggcgccaaccaggcctgcctcgaaatgctgcgcgagattggcagcgtcgaccgcatccccgaattcatcgcccgcgccaaggacaaggacgacccgttccgcctgatgggctttggccaccgcgtctacaagaactttgacccccgcgccaaagtgatgaagcaaagcgccgacgaggtgctcgacctgctcggcgtcgaggacaacccgacgcttcaggttgccaaggaactcgagaaacaggcgctggccgatccctatttcgccgaaaagaaactcttcccgaacgtcgatttctactcgggcatcattctcgaggcgatgggcttcccgacctcgatgttcaccccgatcttcgcgctgtcgcgcactgtcggctggatttcgcagtggaaggaaatgatcgccgatccacagctcaagatcggccgcccgcgtcagctctatcagggcgagaccttccgcgactacgtggacatggaaaaccgctga

SEQ ID NO: 123827 - protein, 433 aa, Roseovarius nubinhibens ISM
MKMAEPGKTAKLEIDGKTYELPVFTPTAGPDVIDIRKLYGQAGVFTYDPGFTSTASCDSTITYIDGGKGELLHRGYPIDQLAEKSHYLEVCYLLLYGELPSTAQLEDFESRVTNHTMLHEQMHFLFRGFRRDAHPMAIMVGVVGALSAFYHDSTDINDPWQREVASIRMIAKMPTIAAMAYKYTIGQPFVYPRNDVDYASNFLRMCFAVPAEDYEVNPILSRAMDRIFTLHADHEQNASTSTVRLASSSGANPFACIAAGIACLWGPAHGGANQACLEMLREIGSVDRIPEFIARAKDKDDPFRLMGFGHRVYKNFDPRAKVMKQSADEVLDLLGVEDNPTLQVAKELEKQALADPYFAEKKLFPNVDFYSGIILEAMGFPTSMFTPIFALSRTVGWISQWKEMIADPQLKIGRPRQLYQGETFRDYVDMENR

SEQ ID NO: 123828 - DNA, 1296 bp, Oceanicola batsensis HTCC2597
  CDS (1)..(1296): transl_table=11
atgacagagacgaacaaaacggcaactctgacgctagacgacaagagctatgatttgccgatcctttcgccgagcgcgggccccgatgtgatcgacatccgcaagctctatgggcaggccgacgtgttcacctatgacccgggcttcacgtccaccgcgtcctgcgaaagtgccatcacctatatcgacggcgaggaaggtgtgcttctgcaccgcggctatccgatcgaccagctggcggggaagtcccacttcctcgaggtctgctacctgctgctctacggtgaactgccgtccgccgcccagatcgaggatttcgagagccgggtgaccaaccacacgatggtgcatgaacagatgcaccgcttcttcaccgggttccgccgcgacgcgcacccgatggcgatcatgaccggcgtggtcggcgcgatgtcggccttctaccacgacagcaccgacatcagcgatccctggcaccgcgaggtcgcctcgatccgcctgatcgccaagatgccgaccatcgcggccatggcctacaagtattcgatcggccagcccttcgtgtacccgcgcaacgatctcgactatgcgtcgaacttcctgcgcatgtgcttttcggtcccggccgaggattacaacgtcgacccgatcctcagccgcgcgatggaccggatcttcaccctgcacgccgatcacgaacagaacgcctcgacctcgacggtgcggctggcgtcgtcctcgggggcgaatcccttcgcctgcatcgcggccggcatcgcctgcctctggggtccggcccatggcggcgcgaaccaggcggcgctggaaagcctcaaggaaatcggcacgcccgaccgcatccccgagttcatcgcccgggccaaggacaaggacgatccgttccgcctgatgggcttcggccaccgggtctacaagaacttcgacccgcgcgcgaaggtgatgaagcagtcggcggacgaggtgctggacctgctgggcgtcgagaacaacccgatcctcgccgtcgcgaaagaggtcgagaaacaggcgctcgaggacgattacttcgtcgaccgcaagcttttcccgaatgtcgatttctattccggcatcatcctcgaggccatgggcttccccacttcgatgttcacgccgatcttcgccctgtcgcggacggtcggctgggtgtcccagtggaaggagatgatcgaggatccgggcatgaagatcggccgcccgcgccagctctacaccggcgcgacgcagcgcgactacgtcgacgtcgagaaccgctga

SEQ ID NO: 123829 - protein, 431 aa, Oceanicola batsensis HTCC2597
MTETNKTATLTLDDKSYDLPILSPSAGPDVIDIRKLYGQADVFTYDPGFTSTASCESAITYIDGEEGVLLHRGYPIDQLAGKSHFLEVCYLLLYGELPSAAQIEDFESRVTNHTMVHEQMHRFFTGFRRDAHPMAIMTGVVGAMSAFYHDSTDISDPWHREVASIRLIAKMPTIAAMAYKYSIGQPFVYPRNDLDYASNFLRMCFSVPAEDYNVDPILSRAMDRIFTLHADHEQNASTSTVRLASSSGANPFACIAAGIACLWGPAHGGANQAALESLKEIGTPDRIPEFIARAKDKDDPFRLMGFGHRVYKNFDPRAKVMKQSADEVLDLLGVENNPILAVAKEVEKQALEDDYFVDRKLFPNVDFYSGIILEAMGFPTSMFTPIFALSRTVGWVSQWKEMIEDPGMKIGRPRQLYTGATQRDYVDVENR

SEQ ID NO: 123830 - DNA, 1137 bp, Prochlorococcus marinus str. MIT 9211
  CDS (1)..(1137): transl_table=11
atggttttaagacctgggcttgagggagtccctgtcacccaatcatccatttgtcagattaatgggaacgaagggcatctgagatatcgagggtatgcaattgatgagctggccgcaagaagtagctttctggaaacgacttatctactgatttgggggaatcttccaaaccccgatgaattaagaaatttcgaaaaggaagtccaaatgcaccgtcgacttagttttcgagtccgagacatgatgaaatgtttcccggagtctggacatcctatggatgcattgcaatccagtgccgcttcattaggtcttttttattcacgacgcgctattgatgatcctcaatatgtatatgacgcagtagtgagattaatcgcaaaaataccaacaatggttgcagcttttcaattgattcgaaagggtcaagacccaatacagccaagagataatttgccttactcttctaatttcttatatatgcttactgagcaagaaccagaccctcttgctgccagagtattagaccgctgtttaatcttgcatgctgaacatagtcttaatgccagtactttcagcgcgcgcgttacggcaagcactctgacagatccctatgcagtaatagcttcagcagtagggacactagctggtcctttacatggaggcgctaatgaagatgtgatagcgatgctagaagaaatcaaaactcctgaccaagcaggaccatatttagacaatgcgataaaaaataaaagcaagataatgggttttggccatcgtgagtacaaagtaaaagacccccgagccactcttttgcaagaattcgcagaagaattatttgcgagatttggtaaagacgaaatgtacgatgtggccaaagcagttgaagcagaagcaactactcgtttaggtcccaaaggtatatttccaaacgttgacttttactcaggtcttgtttacagaaaattgggaattcccaaagatctttttacccctatctttgccatctcaagagttgcaggatggttggctcattggcgcgaacaactaagtgccaatcggatatttagacctactcaaatatatacaggggaggaaaagcgaacgtggatccctttagacgaaaggtcgaataattaa

SEQ ID NO: 123831 - protein, 378 aa, Prochlorococcus marinus str. MIT 9211
MVLRPGLEGVPVTQSSICQINGNEGHLRYRGYAIDELAARSSFLETTYLLIWGNLPNPDELRNFEKEVQMHRRLSFRVRDMMKCFPESGHPMDALQSSAASLGLFYSRRAIDDPQYVYDAVVRLIAKIPTMVAAFQLIRKGQDPIQPRDNLPYSSNFLYMLTEQEPDPLAARVLDRCLILHAEHSLNASTFSARVTASTLTDPYAVIASAVGTLAGPLHGGANEDVIAMLEEIKTPDQAGPYLDNAIKNKSKIMGFGHREYKVKDPRATLLQEFAEELFARFGKDEMYDVAKAVEAEATTRLGPKGIFPNVDFYSGLVYRKLGIPKDLFTPIFAISRVAGWLAHWREQLSANRIFRPTQIYTGEEKRTWIPLDERSNN

SEQ ID NO: 123832 - DNA, 1287 bp, Erythrobacter sp. NAP1
  CDS (1)..(1287): transl_table=11
ttggcagacaagcaggcgaaactcgaactaggcgggcaaacttacgagtttcccgtgctcgaaggcagcaccggccctgatgtggtcgatattcggaagctgtatggttcaaccggcgccttcacctttgaccccggctacaagtcgactgcaagctgcgaaagcgcgctgacatatatcgacggccaggaaggtgtccttcttcaccgcggctatccgatcggccagctggccgagcattcgagtttcatggaaaccgcgtatctgcttcttaatggcgaactgccgagccagcaggagtacgaggacttcaattacacgatcacgcggcacaccatgctgcacgatcagttgaacacgttctatcagggcttccgccgtgacgcgcacccgatggcaatcatgtgcggcgttgttggtgctctgtcggccttctatcacgacagcaccgatatctcggaccccgagcaccgcaagatcagttcgcaccgattgattgcgaagatgccaaccatcgcagcgatggcttacaaatactcggtcggtcagccattcatgcagcccaagaacgacctgagctacacgggcaactttctgcgcatgaccttcggcgttccggctgaagaatacgaagtcattccggcggtagaaaaggcgatggaccggatcttcatcctccacgccgaccacgaacagaacgcatcgacctcgaccgttcgcctcgccggctcgtcgggcgcaaacccgtttgcctgtatcgcagctggcattgcctgcctctggggcccggctcacggcggcgcaaacgaagcggctctcaacatgctgcgcgagattggcacgcctgaccgcatcccgcactacatcgagcgcgccaaggacaagaacgacccgttccgtctgatgggctttggccaccgcgtctacaagaactacgacccgcgtgcgacggtcatgcagtcgacggtgcgcgaggtgttcgaggcgctcaacgtcaaggatccggtgttcgaaaccgcgctccagctcgaagagatcgctctcaacgatccgtatttcaaagaaaagaagctgttcccgaacgtagatttctactcaggcattatcctgtcggcgatcggcttcccgaccacgatgttcaccgctctgtttgcccttgcccgcacggtgggctgggtcgcgcagtggaacgagatgatctccgacccagcacaggtcatcggacgtcctcgccagctttacaccggtccagttgagcgcgactacgtgccgctgagcgaacgctaa

SEQ ID NO: 123833 - protein, 428 aa, Erythrobacter sp. NAP1
MADKQAKLELGGQTYEFPVLEGSTGPDVVDIRKLYGSTGAFTFDPGYKSTASCESALTYIDGQEGVLLHRGYPIGQLAEHSSFMETAYLLLNGELPSQQEYEDFNYTITRHTMLHDQLNTFYQGFRRDAHPMAIMCGVVGALSAFYHDSTDISDPEHRKISSHRLIAKMPTIAAMAYKYSVGQPFMQPKNDLSYTGNFLRMTFGVPAEEYEVIPAVEKAMDRIFILHADHEQNASTSTVRLAGSSGANPFACIAAGIACLWGPAHGGANEAALNMLREIGTPDRIPHYIERAKDKNDPFRLMGFGHRVYKNYDPRATVMQSTVREVFEALNVKDPVFETALQLEEIALNDPYFKEKKLFPNVDFYSGIILSAIGFPTTMFTALFALARTVGWVAQWNEMISDPAQVIGRPRQLYTGPVERDYVPLSER

SEQ ID NO: 123834 - DNA, 1191 bp, Synechococcus sp. RS9917
  CDS (1)..(1191): transl_table=11
gtgggggtggcacagaacgaggagattcgccatgaaaaaaccgggatcgtgttcaggcccggcctggaaggcgtgcctgccacccagtcggcgatctgcgacatcgatggccagctcggtcgtctctcctatcgcgggtatcccctggaggatctggcggttcacagcaccttcctggaaaccacctatctcctgatctggggcgagcttccttcgccgcagcaactgcgggactttgaagaggaagttcagatgcaccggcgcgtcagtttccgggtgcgcgacatgatgaagtgcttcccggccagcggtcatccgatggatgcgctgcagtcgagtgcggcatccctggggctcttctattcccgccgggcgattgatgatccccaatacatctacgacgccgtggtgcggttgatcgccaagatccccacgatggtggctgcgttccagctgatccggaaggggcaggatccgattcagccgcgggatgacctggcctactcggccaatttcctatacatgctcaccgagcgggaaccggatccgctggcggcccgcatctttgatcgctgcctgatgctgcacgccgagcacagcctgaatgcgagcaccttcagtgcccgggtcaccgccagcaccctcaccgacccctatgccgtggtggcctcggccgtcggcacgctggccggccccttgcacggtggtgccaatgaggatgtgctcgccatgctcgaagagatcggcacgcctgccaacgcagccgcctatctcgatgaggcgatggccagcaagcgcaaggtgatgggcttcggtcaccgggaatatcgcgtcaaggatccccgtgccgtgatcctgcagtcgctggcggaagagatgttcgcccgcttcggtcacgatgcgctctacgacgtggcccgcgccctggaggaggccgccgacactcgcctcggtccgaaagggatctatcccaacgtcgacttttactccggcctggtgtatcgcaagctcgggatccccagggatctgttcacaccggtgttcgccatcgcccgggtcgccggctggttggcgcactggcgggaacagctcggtgccaatcgcatttttcgtccatcgcagatctacaccggccacccgctgcgcagctgggtcgcgcgcgagagccgcgttccggctgcgggcgcctaa

SEQ ID NO: 123835 - protein, 396 aa, Synechococcus sp. RS9917
MGVAQNEEIRHEKTGIVFRPGLEGVPATQSAICDIDGQLGRLSYRGYPLEDLAVHSTFLETTYLLIWGELPSPQQLRDFEEEVQMHRRVSFRVRDMMKCFPASGHPMDALQSSAASLGLFYSRRAIDDPQYIYDAVVRLIAKIPTMVAAFQLIRKGQDPIQPRDDLAYSANFLYMLTEREPDPLAARIFDRCLMLHAEHSLNASTFSARVTASTLTDPYAVVASAVGTLAGPLHGGANEDVLAMLEEIGTPANAAAYLDEAMASKRKVMGFGHREYRVKDPRAVILQSLAEEMFARFGHDALYDVARALEEAADTRLGPKGIYPNVDFYSGLVYRKLGIPRDLFTPVFAIARVAGWLAHWREQLGANRIFRPSQIYTGHPLRSWVARESRVPAAGA

SEQ ID NO: 123836 - DNA, 1191 bp, Synechococcus sp. WH 5701
  CDS (1)..(1191): transl_table=11
atgcggatggtggtggatgcaaaccgggttgcggccgaagcggcgccggtcttccgtcccgggctggagggtgtgccggcgacccagtcggccatctgcgatatcgatggcctccagggcctgctcacctaccgcggctatcccctggaggaactggcggcctacagcaccttcctggaaaccgcccatctgctgatctggggtgagctgcccaccgtcgagcacctgcgcgccttcgagcacaacgtgcagatgcaccggcgggtgagcttccgcatccgggacatgatgaagtgcttcccggccgacgggcaccccatggacgcgctgcagtcgagcgcggcctctcttgggctgttctattcccgccgggccctggatgatcccgcctacatcgaggcggcggtggtgcgcctgatcgccaagatccccacgatggtggctgcctaccagctgattcgcctgggtcaggatccgattcagcctcgcgacgatctgtcctattcggccaacttcctctacatgctcaccgagcgggagcccgatccgctggcggccaggatcttcgatgcctgcctgatcctgcacgccgagcacagcctcaacgccagcaccttcagtgcccgggtcaccgccagcactctcaccgatccctatgccgtggtggcctcggcggtgggcaccctggccggccccctccacggtggtgccaacgaagacgtgctggccatgctcgagcagatcggcagcgaggaccaggcggaagcctggctggaccgggccattgcggagaagcagaagatcatgggcttcgggcaccgtgaatacaaggtcaaggacccccgggccgtgattctccagggcctggctgagcagctgttcgatcgcttcgggcacgacgccatgtacgacgtggcccggcgggtggaggaggtggcctccgatcgccttggtccgaagggcatctaccccaacgtcgatttctattccgggctcgtgtaccgcaagctcggcatccccagggatctgttcaccccgatcttcgcgattgccagggtggccggctggcttgcccactggaaggagcagctgggggccaaccgcatctaccgccccacccagatctataccggctacggccgcaggagttggttgcctcaggatgcccgcaatgccctgccaggcgtttaa

SEQ ID NO: 123837 - protein, 396 aa, Synechococcus sp. WH 5701
MRMVVDANRVAAEAAPVFRPGLEGVPATQSAICDIDGLQGLLTYRGYPLEELAAYSTFLETAHLLIWGELPTVEHLRAFEHNVQMHRRVSFRIRDMMKCFPADGHPMDALQSSAASLGLFYSRRALDDPAYIEAAVVRLIAKIPTMVAAYQLIRLGQDPIQPRDDLSYSANFLYMLTEREPDPLAARIFDACLILHAEHSLNASTFSARVTASTLTDPYAVVASAVGTLAGPLHGGANEDVLAMLEQIGSEDQAEAWLDRAIAEKQKIMGFGHREYKVKDPRAVILQGLAEQLFDRFGHDAMYDVARRVEEVASDRLGPKGIYPNVDFYSGLVYRKLGIPRDLFTPIFAIARVAGWLAHWKEQLGANRIYRPTQIYTGYGRRSWLPQDARNALPGV

SEQ ID NO: 123838 - DNA, 1191 bp, Synechococcus sp. WH 7805
  CDS (1)..(1191): transl_table=11
gtgagtcggagcgagagtgctgaaattcgtcatgaacgcaccggtttggtgttccgtcccgggttggaaggggttcctgcgactcagtcgtcaatctgtgacatcgatgggcaagcgggaaaactttcgtatcgcggctatgccgttgatgatctttcctctcactgcagttttctcgaaaccacgtatttgctgatctggggtgaactgcccagccctcagcaattgagagactttgagcaggaagtgcagatgcaccgaagggtgagcttccgcgtgcgagacatgatgaagtgctttccatcggatggtcatccgatggatgctctgcagtcgagtgcggcctcgcttgggctgttttattcccggcgggccatcgatgacccccaatacatctatgacgccgtggtgcggttgatcgccaagatcccaacgatggtggcggcctttcaactgatccgcaaaggacaggatccgattcaacctcgcgatgacctggcctattcggccaattttctctacatgctcatggagcgtgagcctgaccctctggcatcgcggatctttgaccgttgtctgatcctgcatgcggaacacagcctgaacgccagcacgttcagtgcgagggtcacggccagcaccctgacggatccctatgccgtggtcgcttcagctgtcggaaccctggctggtcccctgcatggaggcgccaatgaggatgttctggccatgctggatgagatcggtacagctgaccgtgcagctgattatctcgatgcggccatggccagcaaacgcaaggtcatgggtttcgggcatcgggagtatcgggtcaaagaccctcgggccgtgattcttcaggtgctggcagaagagctgtttgcccgctttggccacgacgagatgtacgacgtggctcgagcccttgaagcagctgctgagtgtcgccttggacccaaaggcattttccctaatgtcgacttctactcaggtttggtctaccgcaagctcggaattccaagggatctgttcacgcctgtattcgccatcgccagggtggcgggatggcttgcccactggcgggaacagcttggcgccaaccgcattttccggccctctcagatctacacaggccaatcgatgcgtcagtggagcccgcttgaagaccggcttccctccgcaagcacctaa

SEQ ID NO: 123839 - protein, 396 aa, Synechococcus sp. WH 7805
MSRSESAEIRHERTGLVFRPGLEGVPATQSSICDIDGQAGKLSYRGYAVDDLSSHCSFLETTYLLIWGELPSPQQLRDFEQEVQMHRRVSFRVRDMMKCFPSDGHPMDALQSSAASLGLFYSRRAIDDPQYIYDAVVRLIAKIPTMVAAFQLIRKGQDPIQPRDDLAYSANFLYMLMEREPDPLASRIFDRCLILHAEHSLNASTFSARVTASTLTDPYAVVASAVGTLAGPLHGGANEDVLAMLDEIGTADRAADYLDAAMASKRKVMGFGHREYRVKDPRAVILQVLAEELFARFGHDEMYDVARALEAAAECRLGPKGIFPNVDFYSGLVYRKLGIPRDLFTPVFAIARVAGWLAHWREQLGANRIFRPSQIYTGQSMRQWSPLEDRLPSAST

SEQ ID NO: 123840 - DNA, 1287 bp, Pseudoalteromonas tunicata D2
  CDS (1)..(1287): transl_table=11
atggccgacaataaagccacagtccatatcgatggtctagacccaattgagttaccaatttattctggaacagctggtcaagatgttatcgatgtccgcacattaggtgcacatggctatttcacatatgaccctggttttatgtcaacaggctcttgtgagtcttcaatcacttatatcgatggtgccaaaggtattttattacaccgcggctacccaatcgacgagcttgctcaaaattcacattatttagaattgtgttatttgttgttagaaggtgaattaccgactgaagaacaaatgactttatttgcgcgtgaaatcacaacaaatacaatgatgcatgaaaaaattgcatcattcttccaaggtttccgtgtagatgcgcaccctatggctatgctgtgtggtgtggtgggtgctttatcatcattttatcatgatgatattgacattaatgacccagctcaacgtaaaaccagtgcaattaaattagttgctaaattaccgacaattgcggctatggcttacaaatacaccattggtcaaccatttgtttatccacgcaatgacttaacttacgcagaaaacttcttacatatgatgttctcagtccctgctgaagaatacaaagtaagtcctgtactagcaaaagcgatggatcgtattttcatgcttcatgctgatcatgaacaaaacgcttctacttcaacagttcgccttgccggctcatcaggtgcaaatccttatgcctgtatcgcagctggtattgcttctttatggggtccagctcacggtggtgccaatgaagcatgtttgaacatgcttgaagaaattggttctgtcgatcgcatcgacgaatatgttggcaaagcaaaagataaaaacgatccgttccgtttaatgggatttggtcaccgcgtttacaaaaacttcgatccacgtgcaacggtaatgcgtcaaacatgtcacgaagtacttgctgagctaaacatccaagatccattattagatgttgcaatgcgtcttgagcaaatcgcacttgaagatccatattttgtagagaaaaaactatatccaaacgttgatttctactcaggtattatcttaaaagcaattggtattccaacaaacatgtttactgttatttttgcaatggcacgtactgtaggttggatctcacattgggatgagatgttatctcaaccaggtcataaaattggtcgtccgcgtcaattatatactggttacactaaacgtgaatttgttaaaactgaacagcgttaa

SEQ ID NO: 123841 - protein, 428 aa, Pseudoalteromonas tunicata D2
MADNKATVHIDGLDPIELPIYSGTAGQDVIDVRTLGAHGYFTYDPGFMSTGSCESSITYIDGAKGILLHRGYPIDELAQNSHYLELCYLLLEGELPTEEQMTLFAREITTNTMMHEKIASFFQGFRVDAHPMAMLCGVVGALSSFYHDDIDINDPAQRKTSAIKLVAKLPTIAAMAYKYTIGQPFVYPRNDLTYAENFLHMMFSVPAEEYKVSPVLAKAMDRIFMLHADHEQNASTSTVRLAGSSGANPYACIAAGIASLWGPAHGGANEACLNMLEEIGSVDRIDEYVGKAKDKNDPFRLMGFGHRVYKNFDPRATVMRQTCHEVLAELNIQDPLLDVAMRLEQIALEDPYFVEKKLYPNVDFYSGIILKAIGIPTNMFTVIFAMARTVGWISHWDEMLSQPGHKIGRPRQLYTGYTKREFVKTEQR

SEQ ID NO: 123842 - DNA, 1290 bp, Photobacterium sp. SKA34
  CDS (1)..(1290): transl_table=11
atggcagataagaaagctactcttcatattgaagggaaagcacctatcgaactgccgattatcgggggctctgagggccaagatgtaattgatgtgcgtaaacttggtgcaaacggcttttttacatttgacccaggttttctagcaacagcctcgtgtgaatctcaaattacatacattgatggcgaaaaaggaatcttgcttcatcgaggtttcccgattgatcaattagccaataacgcagactatttagaagtttgttttgtcttgttatacggtgaggtccctacccgagctgaatacgagcagtttagaacaacagttacacgccatacgatggtgcatgaacaaatcgcaagctttttccatggcttccgtcgtgatgcacatccaatggcaataatgtgtggtgttgtgggtgctttatctgcgttttatcatgactctcttgatattaacaacgatacacaccgcgagattacagcatttagattattatctaaaatgccaacactagcggcaatgtgtcataagtacaccctcggacaaccatttatctatcctcgtaatgatcttgattacgcggaaaatttccttcacatgatgtttgcaacaccttgtgaagagtatgaagtaagccctgtcgttgctcgcgctatggataagatatttaccctacatgctgatcacgaacagaatgcttcaacgtcaacagttcgtcttgcgggctcttctggtgctaacccatttgcttgtattgcggcaggtattgcatctctttgggggccagcacatggtggtgctaatgaagcttgtctaaagatgcttgaagaaatcggtagtgtagaaaatattcctgaattcattgagcgtgcaaaagataaagacgacccattccgtctaatgggctttggtcaccgtgtttacaaaaactacgaccctcgtgcaaccgttatgcgtgaagcttgtcatgaagtacttgaagagttgaaggttgaagatccattactagacgttgcaatggaactagagcgtattgcgctttctgatgagtactttgtcagtaagaaattataccctaatgtagatttctactctggtattattttaaaagcgattggtattccggtatcaatgtttacagtgatctttgcgatgtctcgcaccattggttggattgctcactggaacgaaatgcacagtgacccaacaaatcgtattggtcgacctcgtcaactttatactggtgagtcatatagagaatttaagcctcttcatgagcgcgaataa

SEQ ID NO: 123843 - protein, 429 aa, Photobacterium sp. SKA34
MADKKATLHIEGKAPIELPIIGGSEGQDVIDVRKLGANGFFTFDPGFLATASCESQITYIDGEKGILLHRGFPIDQLANNADYLEVCFVLLYGEVPTRAEYEQFRTTVTRHTMVHEQIASFFHGFRRDAHPMAIMCGVVGALSAFYHDSLDINNDTHREITAFRLLSKMPTLAAMCHKYTLGQPFIYPRNDLDYAENFLHMMFATPCEEYEVSPVVARAMDKIFTLHADHEQNASTSTVRLAGSSGANPFACIAAGIASLWGPAHGGANEACLKMLEEIGSVENIPEFIERAKDKDDPFRLMGFGHRVYKNYDPRATVMREACHEVLEELKVEDPLLDVAMELERIALSDEYFVSKKLYPNVDFYSGIILKAIGIPVSMFTVIFAMSRTIGWIAHWNEMHSDPTNRIGRPRQLYTGESYREFKPLHERE

SEQ ID NO: 123844 - DNA, 1311 bp, Xanthobacter autotrophicus Py2
  CDS (1)..(1311): transl_table=11
atggacgccaccaccaataccggggcaaaagcggccaagctgagcttgggggagaagagctgggacctgccgatccacggagggaccatcggccccgacgtggtcgatatctcgaagctctacggtcagaccgggctgttcacctacgaccccggctttacctccaccgcttcgtgtgaaagcaagatcacctatatcgacggtgatgagggcgtgctgctctatcgcggctaccccattgagcagctggccgagaacggcgacttcctcgagacctgctatctcctgctctacggcgaattgccgaccgccgcccagaaggccgagttcgacctctccgtgacccgtcacacgatggttcacgagcagatgacgcgcttcttccagggattccgccgcgacgcccaccccatggcgatcatggtggcatccgtcggcgcgctctccgccttctatcacgactccactgatatttctgaccccacccagcgcctgatcgcgtcgattcgcatgattgcgaagatgccgacgctggcggccatggcctacaagtattccatcggccagccgttcgtttaccccaagaacgaactcgactatacgtcgaacttcctgaacatgtgcttcgccgttccgtgcgaggattacaaggtcaaccccatcctcgcgaaggcgatggacaagatcttcatcctccacgccgatcacgagcagaacgcctccacctccacggtgcgcctcgccggctcctccggcgccaatccgtttgcctgcatcgccgccggcatcgcctgcctgtggggacccgcccatggcggcgccaacgaggccgccctcaagatgctcaccgagatcggccatgtggaccgcatcccggagtacatcaagcggtcaaaggacaagaacgaccccttccgcctcatgggcttcggccaccgggtctacaagaactacgacccgcgcgccaagatcatgcagcagacctgccatgaagtgctcggcgagctgggcatcaaggacgatccgcttctggacgtggccgtcgagctggagcgcatcgcgctctccgacgactatttcatcgagaagaagctctatccgaacatcgacttctactcgggcatcaccctgaaggcgatgggcttccccaccaccatgttcaccgtgctgttcgccctggcgcgcaccgtgggctggatcggccagtggaaggagatgatcgaggatccgggccagcgcatcggccgtccccgccagctctacaccggcgccgccctgcgcgactacgtcgccatgtccaagcgcaagtga

SEQ ID NO: 123845 - protein, 436 aa, Xanthobacter autotrophicus Py2
MDATTNTGAKAAKLSLGEKSWDLPIHGGTIGPDVVDISKLYGQTGLFTYDPGFTSTASCESKITYIDGDEGVLLYRGYPIEQLAENGDFLETCYLLLYGELPTAAQKAEFDLSVTRHTMVHEQMTRFFQGFRRDAHPMAIMVASVGALSAFYHDSTDISDPTQRLIASIRMIAKMPTLAAMAYKYSIGQPFVYPKNELDYTSNFLNMCFAVPCEDYKVNPILAKAMDKIFILHADHEQNASTSTVRLAGSSGANPFACIAAGIACLWGPAHGGANEAALKMLTEIGHVDRIPEYIKRSKDKNDPFRLMGFGHRVYKNYDPRAKIMQQTCHEVLGELGIKDDPLLDVAVELERIALSDDYFIEKKLYPNIDFYSGITLKAMGFPTTMFTVLFALARTVGWIGQWKEMIEDPGQRIGRPRQLYTGAALRDYVAMSKRK

SEQ ID NO: 123846 - DNA, 1287 bp, Flavobacteria bacterium BBFL7
  CDS (1)..(1287): transl_table=11
atgtcagaaaaagctatcttagaaatcgatgggaataaatatgaattcccaattatcactggaacagaaaatgaaaaagccatagatattaaggctttaagaggtgcaacaggtggagttaccacaattgatcctggatataaaaatacaggtagttgtgaaagcgctatcacgtttttaaatggagaagaaggtattctaagataccgtggttattccattgaggaactagctgataaagcagattttttagaagtagcttatctattgatttttggagaattgcctacacaagcgcaattagataaatttcatgcagacattaaagcaaattctcatgtagatgaagatgtaaagaaaattctagatggatttcctaagtctgctcacccgatgggagtactttcttcacttacaagtgcattgatagcatttaatccatcgtcagtaaatgtggacagtgaagaggatatgtataaggcaattgttaacattatgggaaaattccctgttttagttgcatgggcacttagaaaaagaacaggtcagccattagattatggagatgacaacttaggttatgttgagaacattttaaaaatgatgtttaaaaaacctaatgctgaatataatgtggatgaaagaatcgcaagcgcattagataaattattaattcttcatgcagaccatgagcaaaactgttcaactagtacagtacgtattgtaggttcttctcatgcaggattatttgctagtttgagtgctggaattaatgctttatggggaccacttcatggtggtgcaaatcaagcggtattagaaatgcttgaagcgataaaagaagatggtggtgatactaaaaagtacatggccaaagctaaagataaaagtgacccattccgtttaatgggattcggacatagagtatataagaattttgatcctcgtgcaaaaatcattaaagtagcagcagatgaggtgcttaactcattaggagtagatgatcctattttagatatcgcaaaaggtcttgagaaagaagctcttgaagattcttactttgtagatcgtaagctatatcctaacgttgacttctattctggtattatttatagagctatgggaattccagttgaaatgttcactgtaatgtttgcattaggacgtcttccaggatggattgcacaatggaaagaaatgcgtgagaataaagagcctataggtagaccacgtcaggtttatacaggtgaaaatcacagaccatttaaagaagtgtctgaaaggtaa

SEQ ID NO: 123847 - protein, 428 aa, Flavobacteria bacterium BBFL7
MSEKAILEIDGNKYEFPIITGTENEKAIDIKALRGATGGVTTIDPGYKNTGSCESAITFLNGEEGILRYRGYSIEELADKADFLEVAYLLIFGELPTQAQLDKFHADIKANSHVDEDVKKILDGFPKSAHPMGVLSSLTSALIAFNPSSVNVDSEEDMYKAIVNIMGKFPVLVAWALRKRTGQPLDYGDDNLGYVENILKMMFKKPNAEYNVDERIASALDKLLILHADHEQNCSTSTVRIVGSSHAGLFASLSAGINALWGPLHGGANQAVLEMLEAIKEDGGDTKKYMAKAKDKSDPFRLMGFGHRVYKNFDPRAKIIKVAADEVLNSLGVDDPILDIAKGLEKEALEDSYFVDRKLYPNVDFYSGIIYRAMGIPVEMFTVMFALGRLPGWIAQWKEMRENKEPIGRPRQVYTGENHRPFKEVSER

SEQ ID NO: 123848 - DNA, 1287 bp, marine gamma proteobacterium HTCC2207
  CDS (1)..(1287): transl_table=11
atgagtaatcgtaaagctaccctaactatcgaaggtcaagctcccattgagctgccgattcttaagggcacactaggccaagacgtcatagatataggcaccttgggctcacataatgtctttacctatgatcccggattctcagcaacggcggcctgtcagtctgatattacctatatcgacggcaacaaaggcatattgcttcaccgcggttacccgattgagcagttggccgaaaaatcagattatctagagacctgctacttgcttctcgagggcgccttgcccaatgctgaagagaaggcagagttcgttaataccatcaaataccacaccatggtaaaccgttcagttgagcactttatcagtggatttcgctatgacgcgcacccaatggccatgcttgtgggtgtcgttggcgcgatgtcttcgttttatcatgactcgctggacattaataatgaagagcaccgcaagatttccgctcatcgcttgatcgccaagattccaaccattgccgcaatgtgccacaagcatttcaccggccagccatttatctacccagataactctctatcttactcagagaacttcctgcatatgatgtttggcacgccctgcgagccctacgtcgttcagccggcgattgccaaagcgatggaccgcatcttcctgttgcacgcagatcacgagcaaaacgcctctacgtcaacagtacgtctggctggctccactggcgccaacccattctcttgtatagcggctggtatcgctgcactctggggacctgctcatggcggcgccaacgaagcagtactggatatgttggaagagattggacacgaagacaatatcgaagcctatgtcgccaaagcgaaagacaagagtgacccattccgcctgatgggctttggtcaccgcgtttataagaatcacgatccccgcgccacggttatgcgcgagagctgcgatgaagttctggcggtattgggactggagaacgatcccctgttccgtctggctaagaaactggaaaagatcgctcttgaagatgaatactttatcagcaagaagctctaccccaatgtcgacttctactccggtattattttgaaggcactgggtattccagttgaaatgttcaccgtgatttttgccacgggtcgcaccgttggctggatctcacactggaacgagatgatcactcacccataccgcattggccgtcctcgtcagctttacacgggtgctgatgtgcgtgactacccggcaatggatgatcgttaa

SEQ ID NO: 123849 - protein, 428 aa, marine gamma proteobacterium HTCC2207
MSNRKATLTIEGQAPIELPILKGTLGQDVIDIGTLGSHNVFTYDPGFSATAACQSDITYIDGNKGILLHRGYPIEQLAEKSDYLETCYLLLEGALPNAEEKAEFVNTIKYHTMVNRSVEHFISGFRYDAHPMAMLVGVVGAMSSFYHDSLDINNEEHRKISAHRLIAKIPTIAAMCHKHFTGQPFIYPDNSLSYSENFLHMMFGTPCEPYVVQPAIAKAMDRIFLLHADHEQNASTSTVRLAGSTGANPFSCIAAGIAALWGPAHGGANEAVLDMLEEIGHEDNIEAYVAKAKDKSDPFRLMGFGHRVYKNHDPRATVMRESCDEVLAVLGLENDPLFRLAKKLEKIALEDEYFISKKLYPNVDFYSGIILKALGIPVEMFTVIFATGRTVGWISHWNEMITHPYRIGRPRQLYTGADVRDYPAMDDR

SEQ ID NO: 123850 - DNA, 1302 bp, delta proteobacterium MLMS-1
  CDS (1)..(1302): transl_table=11
atgcctcataactattacactggtgaaaaggcggagttaaagctaaacggtcagctctacgagttgccggtggtggtcggtaacgaaggcgaaaaggccatcgacatccgtaccctgcgggcccagaccggctacatcaccctggatggcggttatgccaacaccggctcctgtatcagtaatatcacctatctcgatggcgagaaggggattttgaattaccggggctatgatatcgccgatctggcagaaaactgcaccttcgtggaagtggcctacctgctggaccatggttgcctgcccaatcgggagcagctcaacgatttcagccagatgctcaacgatttcgccatggtccatgaggatatgctgcgcttttttgacggttatccgcccaagagcccgcccatggccattttgtcctcgatggtcaattcgctgtgcagcttctatccggagatgagcggcaaccccctggagaatatcgacaagatggccgctcgcctgctctccaaggtgcggaccatcgccgccttctcctacaaaaaatccatgggccatcccttggtctatccccggcacgatctctcctattgcgccaatttcttgaatatgatgtttgattccccggtcaaaccctatgagatcaaccacaaggtggtctcggccctgaacaagctgctgatcctccatggcgaccatgaacagaactgttcgacctcgacggtgcggatggtgggcagcgcccgggttaacctctacgcttcggtgtcggccgggatcagcgccctgtgggggccgctgcacggtggggccaacgaggcggtgatggagatgctgcagagtatccaccaaaacggcggtgatcaccgcaaattcgtcgagcgggccaaggaccccaaggatcccttccggctggtgggttttggccaccgggtctacaagacctacgatccccgctgccggatcatcaagcaggcctgcgacgaagtactggcggatctcaattacgccgatccgctgctcgatatcgccaaggagctggaagaggtggccctccgggatgattatttcatcgagcgcaacctctatcccaacgtcgatttttattccggcatcatctaccgggccatcggtattcccaccagcatgttcacggtgatgttcgccctggggcggctgcccggctggatcgcccactggaaagagatgtgggatgacccggcctggcggatcagtcgcccccggcaggtctatgtcggccccctgggccggcccttcgtgcccatcgacgaacgctga

SEQ ID NO: 123851 - protein, 433 aa, delta proteobacterium MLMS-1
MPHNYYTGEKAELKLNGQLYELPVVVGNEGEKAIDIRTLRAQTGYITLDGGYANTGSCISNITYLDGEKGILNYRGYDIADLAENCTFVEVAYLLDHGCLPNREQLNDFSQMLNDFAMVHEDMLRFFDGYPPKSPPMAILSSMVNSLCSFYPEMSGNPLENIDKMAARLLSKVRTIAAFSYKKSMGHPLVYPRHDLSYCANFLNMMFDSPVKPYEINHKVVSALNKLLILHGDHEQNCSTSTVRMVGSARVNLYASVSAGISALWGPLHGGANEAVMEMLQSIHQNGGDHRKFVERAKDPKDPFRLVGFGHRVYKTYDPRCRIIKQACDEVLADLNYADPLLDIAKELEEVALRDDYFIERNLYPNVDFYSGIIYRAIGIPTSMFTVMFALGRLPGWIAHWKEMWDDPAWRISRPRQVYVGPLGRPFVPIDER

SEQ ID NO: 123852 - DNA, 1323 bp, Rickettsiella grylli
  CDS (1)..(1323): transl_table=11
atgactcaatctgcggaagtaacgactaaagacgtatcctctcccactgcaattttaacagtgaatgatgtacctcctattcacttacctgtttgtaaaggaacgttaggacctgaagttatcgatgtcactcaattagcaaaagtgaatcggtttacctatgatccaggattcctatcgactgcatcctgcgcgtctaaaatcacgtttattgatggtgagaaaggtattttactgtatcggggctatcccatctgtcagctcgcggaaaaatcggattttatcgaagtggcttatttattacttcatggtgaattaccgaatcaagctcaaaaaataagctttaatggcgctattaaccaacatacgatggttcatgaacaattacgtcatttttttcatggattccgcagagatgcccatcctatggccattatgttaggtgttgttggggcgctctctgctttttaccatgatttgttagacattcataataaagcacatcgtgaattagccgctctcagattaattgctaagatgccgacacttgcagcaatgtcttataagtatgcaacagggttaccttttatgtatccactaaatcatttaagctataccgaaaattttatgcatatgatgtttggtgtccccactgaagcgagtgcaccgaatcctctcttagcgcgtgcgttagataaaatttttattctgcatgcggatcatgaacagaatgcatcgacctctaccgtaagacttgcaggttcaacgggtgctaatccttatgcgtgtatttctgcaggaatagccgcgctttggggacgtgcgcatggtggcgctaacgaagcgtgtttaaatatgttacatgaaattagagagatatcacggattaaacattacatcgaaaaagcaaaggatccgaatgattcttttcgtttaatgggttttggacatcgtgtttataaaaattatgatcctcgtgcggcggtaatgaaaaaaacatgccatgacgttttggaagaaacggatcaaaaagaagttcctttgtttaagcttgctttaactttagaaaaaattgctttagaagatccttattttattgagagaaaattatatcctaatgtcgatttctattcgggtattaccttaagtgctttagggattcctactaatatgtttacagtaatttttgcattagcccgtacagtaggttggatttcacaatgggaagaaatgatgtctgatcctaaattacgtatcgcaagacctcgacaattatatgtgggttctccaaaaagaaattataaaccaattgaaaaaagataa

SEQ ID NO: 123853 - protein, 440 aa, Rickettsiella grylli
MTQSAEVTTKDVSSPTAILTVNDVPPIHLPVCKGTLGPEVIDVTQLAKVNRFTYDPGFLSTASCASKITFIDGEKGILLYRGYPICQLAEKSDFIEVAYLLLHGELPNQAQKISFNGAINQHTMVHEQLRHFFHGFRRDAHPMAIMLGVVGALSAFYHDLLDIHNKAHRELAALRLIAKMPTLAAMSYKYATGLPFMYPLNHLSYTENFMHMMFGVPTEASAPNPLLARALDKIFILHADHEQNASTSTVRLAGSTGANPYACISAGIAALWGRAHGGANEACLNMLHEIREISRIKHYIEKAKDPNDSFRLMGFGHRVYKNYDPRAAVMKKTCHDVLEETDQKEVPLFKLALTLEKIALEDPYFIERKLYPNVDFYSGITLSALGIPTNMFTVIFALARTVGWISQWEEMMSDPKLRIARPRQLYVGSPKRNYKPIEKR

SEQ ID NO: 123854 - DNA, 1281 bp, Oceanobacter sp. RED65
  CDS (1)..(1281): transl_table=11
atggctgacaaaaaagcgaagttaacggttgacggtttagacgaagccctagaacttcccgtttatgagggtacagttggccccgacgtaatcgacgtccgtagcttagtggcaaaaggcaaattcacttacgatcctggttttgtatctaccgcctcttgcgaatcaaagattacatatattgatggtggcgctggtattctccttcaccgcggctaccccatcgaacaactcgccgaaaactctgacttcctagaaacatcttacctacttttacacggcgaacttccaacccaagaagaaaaagataaattcgttaacaccattactcaccatacaatggttcacgagcaactagcacaattttttaaaggtttccgtcgtgatgcccacccaatggccgtcatgattggtgtagttggtgctctatctgctttctatcacgactctttagacatcaacgatgcacgtcatcgtgaaattgcagcacatcgcctgatcgccaagatgccaactctggccgccatggtttacaagtacaacattggccagccgtttatgtatcctcgtaacgacctaggttactctgaaaacttcctgcacatgatgttcaacacaccatgcgaagagaaagaagttaacccagtacttgctcgcgcaatggataaaatcttcctgttgcacgcagatcacgaacaaaacgcctccacatcaactgtacgtatggctggctctactggcgccaacccatacgcatgtatcgcatctggtattgctgcactttggggccctgctcacggcggtgcaaacgaagctgtacttcgcatgcttgatgagatcggtgacgaaactcaaatcgacaaatacctagcaaaagccaaagacaagaatgatccattccgtctaatgggcttcggtcaccgcgtttataagagctacgaccctcgtgccactgtcatgaaaaagacctgtgatgaagtacttgctgagctaggtcttgaagacgatccacaacttaagatggctatgaaactggaaaaaatcgcacttgaagacgaatacttcaagtctcgcggtctgtatccaaacgtagacttctactctggcatcatcctgaaagccatcggcattccaacagaattgtttactgttatctttgccactggtcgtactccaggttggattgcacactggaacgaaatgcttgcaaacgattatcgtattgcgcgtccacgtcagctttacactggctatgcaaaacgcgattatccgaagaagtaa

SEQ ID NO: 123855 - protein, 426 aa, Oceanobacter sp. RED65
MADKKAKLTVDGLDEALELPVYEGTVGPDVIDVRSLVAKGKFTYDPGFVSTASCESKITYIDGGAGILLHRGYPIEQLAENSDFLETSYLLLHGELPTQEEKDKFVNTITHHTMVHEQLAQFFKGFRRDAHPMAVMIGVVGALSAFYHDSLDINDARHREIAAHRLIAKMPTLAAMVYKYNIGQPFMYPRNDLGYSENFLHMMFNTPCEEKEVNPVLARAMDKIFLLHADHEQNASTSTVRMAGSTGANPYACIASGIAALWGPAHGGANEAVLRMLDEIGDETQIDKYLAKAKDKNDPFRLMGFGHRVYKSYDPRATVMKKTCDEVLAELGLEDDPQLKMAMKLEKIALEDEYFKSRGLYPNVDFYSGIILKAIGIPTELFTVIFATGRTPGWIAHWNEMLANDYRIARPRQLYTGYAKRDYPKK

SEQ ID NO: 123856 - DNA, 1197 bp, Synechococcus sp. RS9916
  CDS (1)..(1197): transl_table=11
ttgggggtggcacaggcttccgcagacgagatccgccacgagcgcacgggcattgtgttccgtccgggtttggatggcgtgcctgccacccagtcatccatctgcgatatcgatggccagttgggccgtttgtcgtatcgcggctaccccctcgaagagctggcggctgaaagcacattcctggaaacggcctatttgctgatctggggcgaactgcccacggctgcgcagctccaggcctttgagcacgaggtgcaaatgcaccggcgggtgagcttccgggtgcgggacatgatgaagtgcttcccggccaccggccatcccatggatgccctccagtccagtgcggcatctctggggttgttctattcccgccgggcgattgatgaccccaaatacatctatgccgcagtggtgcggctgatcgccaaaatccccacgatggtggcggcgttccagctgatccggaaaggtcaggatccgattcagccccgggatgacctggcctattccgccaatttcctctacatgctcaccgagcgggagcctgatccctttgcagccaggatttttgaccgctgtctgatactccatgccgagcacagcctgaatgcgagcaccttcagtgcacgcgtcaccgccagcacgctgaccgatccgtacgcggtggtggcttcagctgttggcaccctggccggccccctgcatggaggggcgaatgaggatgtgctcgcgatgttggaggagatcggttcccctgatcaggctgcgtcttacctcgatgaggccattgccaacaagcgcaaggtgatgggtttcgggcacagggaatacaaggtcaaagatccgcgtgcagtgatccttcaggcgctcgccgaggagatgttcgagcgcttcggccacgacgatctgtacgacgtggcccgtgccctcgaagaggcggctgaaacccgtctcggtcccaagggcatctatccgaatgtggatttctattccgggctcgtgtaccgcaagctgggcattcctcgggatctgttcacgccggtgtttgcgatctcccgcgtggctggctggctggcccactggcgcgaacagctcggcgccaacaggattttccgcccttcgcagatctataccggcagtgaacagcgccgttggattccgctcgaaagccgccttccggctgcgggcgcctaa

SEQ ID NO: 123857 - protein, 398 aa, Synechococcus sp. RS9916
MGVAQASADEIRHERTGIVFRPGLDGVPATQSSICDIDGQLGRLSYRGYPLEELAAESTFLETAYLLIWGELPTAAQLQAFEHEVQMHRRVSFRVRDMMKCFPATGHPMDALQSSAASLGLFYSRRAIDDPKYIYAAVVRLIAKIPTMVAAFQLIRKGQDPIQPRDDLAYSANFLYMLTEREPDPFAARIFDRCLILHAEHSLNASTFSARVTASTLTDPYAVVASAVGTLAGPLHGGANEDVLAMLEEIGSPDQAASYLDEAIANKRKVMGFGHREYKVKDPRAVILQALAEEMFERFGHDDLYDVARALEEAAETRLGPKGIYPNVDFYSGLVYRKLGIPRDLFTPVFAISRVAGWLAHWREQLGANRIFRPSQIYTGSEQRRWIPLESRLPAAGA

SEQ ID NO: 123858 - DNA, 1290 bp, Vibrio sp. Ex25
  CDS (1)..(1290): transl_table=11
atggcggataagaaagcgacccttcatgttgaaggtcaagcgccaatcgaactgccaattatggacggtacgctaggtacacctgtaattgacgttcgtaagctgggagccaatggttactttacttttgacccaggttttcttgccactgcatcttgtgaatcatcaatcacgtacatcgatggcggcaaaggtattcttttgcaccgcggtttcccgattgatcaattagccaataacgcagattacttagaagtatgttacatccttctttatggtgaagcccctacccgagaacaatacgagcaattcaagacgaccgtaacgcgtcatactatggtccacgaacaaatcgcaagctttttccatggcttccgacgtgatgctcacccaatggcagtaatgtgtggtgtagtcggtgcacttgcagccttctaccacgactctcttgacatcaacaacgacgagcaccgcgagatcgcggcgtaccgtctgctatcgaagatgccgacactggctgcaatgtgttacaaatactctatcggtcagccatttatctacccacgcaacgatttgagctacgcagaaaacttcctacacatgatgttcgcaaacccttgcgaagagtatgaagtaaaccctgtcgttgctcgtgcaatggataaaatcttcacgctacacgcggatcatgaacagaatgcgtcgacgtcaactgtacgtctagctggctcttctggtgctaacccatttgcatgtattgccgctggtattgcatcactttggggacctgctcacggtggtgcaaacgaagcgtgcttgagaatgttagaagagattggcagcgtcgataacatccctgagtatgtagaccgcgcgaaagacaaagatgacccattccgcttaatgggctttggtcaccgcgtttataaaaactacgatccacgtgcgacagtaatgcgcgaaacgtgtcatgaagttctcaaagagctaaacattcaagaccctctactagatgtagcaatggaacttgagcgcattgcgctttctgatgagtacttcgtttctaagaagctgtacccgaacgtagacttctactcaggtatcattcttaaagcgattggtattccagtttctatgtttacggttatcttcgcgatttctcgtaccatcggctggattgctcactggaacgaaatgcacagcgatccactgaaccgcatcggtcgtcctcgtcagctatacactggtgagacacagcgtgagttttctccacttcacgaacgtgaatga

SEQ ID NO: 123859 - protein, 429 aa, Vibrio sp. Ex25
MADKKATLHVEGQAPIELPIMDGTLGTPVIDVRKLGANGYFTFDPGFLATASCESSITYIDGGKGILLHRGFPIDQLANNADYLEVCYILLYGEAPTREQYEQFKTTVTRHTMVHEQIASFFHGFRRDAHPMAVMCGVVGALAAFYHDSLDINNDEHREIAAYRLLSKMPTLAAMCYKYSIGQPFIYPRNDLSYAENFLHMMFANPCEEYEVNPVVARAMDKIFTLHADHEQNASTSTVRLAGSSGANPFACIAAGIASLWGPAHGGANEACLRMLEEIGSVDNIPEYVDRAKDKDDPFRLMGFGHRVYKNYDPRATVMRETCHEVLKELNIQDPLLDVAMELERIALSDEYFVSKKLYPNVDFYSGIILKAIGIPVSMFTVIFAISRTIGWIAHWNEMHSDPLNRIGRPRQLYTGETQREFSPLHERE

SEQ ID NO: 123860 - DNA, 1287 bp, Alteromonadales bacterium TW-7
  CDS (1)..(1287): transl_table=11
atggcagataaaaaagccacagttcatattgatggacttgatccaatcgaacttccaatttatcaaggcactgctggccaagatgtaatcgacgtacgtacgttaggttcacatggtcactttacctatgacccaggtttcatgtcgactggttcttgtgaatctgcaatcacctacattgatggtggtaaaggtgttttacttcaccgcggttacccaattgagcaacttgctgaagaatcagactatattgaactttgctacttacttcttaacggtgagttaccatctaaagagcaatatgatgcattcgcagagaaaattactcgcagcacaatgctagatcaaaaaattgctaatttcttccaaggtttccgctttgatgcacatccaatggcaatgctttgtggtgttgtgggtgctctgtcttctttttatcatgaagatttagatattactgatgctgaacaacgcaaaacaagtgctatcagattagttgctaaattacctacaattgctgcaatggcttataaaacaaacattggccagccttttgtttacccacgaaatgacctaagctatgcagaaaacttcttacatatgatgttctctgttccagctgaagagtacaaagtaaacccaattactgctaaagcaatggacaaaatattcatgcttcacgcagaccacgaacaaaatgcttctacatctacagttcgccttgctggttcttcaggtgcgaacccatatgcgtgtatttcagctggtatcgcttctttatggggccctgctcacggcggtgctaacgaagcatgtttaaacatgttagaagaaattggctcagttgatcgtatcgatgaatacgtagccaaagcaaaagataagtcagacccgttccgtctaatgggctttggacaccgtgtttacaaaaacttcgacccacgagcaacagtaatgcgtcaaacgtgtcacgaagtattagaagagctaaacattcaagatcctcttcttgatattgcaatgaagcttgagcaaattgcccttgaagacccatactttgttgagaagaaactataccctaacgtagatttctactcaggtattatcttaaaagcaattggtattccaacaagcatgttcactgtaatttttgcaatggcacgtactgttggttggatcactcactgggacgaaatgctttctcagcctggtcataagatcagccgccctcgtcaaatgtatactggttacactgcccgtgactacgtatctaccgacaagcgctaa

SEQ ID NO: 123861 - protein, 428 aa, Alteromonadales bacterium TW-7
MADKKATVHIDGLDPIELPIYQGTAGQDVIDVRTLGSHGHFTYDPGFMSTGSCESAITYIDGGKGVLLHRGYPIEQLAEESDYIELCYLLLNGELPSKEQYDAFAEKITRSTMLDQKIANFFQGFRFDAHPMAMLCGVVGALSSFYHEDLDITDAEQRKTSAIRLVAKLPTIAAMAYKTNIGQPFVYPRNDLSYAENFLHMMFSVPAEEYKVNPITAKAMDKIFMLHADHEQNASTSTVRLAGSSGANPYACISAGIASLWGPAHGGANEACLNMLEEIGSVDRIDEYVAKAKDKSDPFRLMGFGHRVYKNFDPRATVMRQTCHEVLEELNIQDPLLDIAMKLEQIALEDPYFVEKKLYPNVDFYSGIILKAIGIPTSMFTVIFAMARTVGWITHWDEMLSQPGHKISRPRQMYTGYTARDYVSTDKR

SEQ ID NO: 123862 - DNA, 1296 bp, marine gamma proteobacterium HTCC2080
  CDS (1)..(1296): transl_table=11
atgagtgataaaaaagccacactgtcgatagatcatggaaatggatctgttgacaccattgatttgccagttcttcaagccgaattaggcccagatgtcgttggtgtggggagcctcactggcaacgggctttttacctacgatcccggctttacctcaacggcggcctgcgaatcaaaaatcaccttcattgatggcgaaaaaggcatcctcttgcaccgaggctacccaattgagcagctggctgcagagagcaattacctagaaacttgttatctattgctgtacggagagcttccctctgccgctgaacgagacgattttgtcagcacaatgcaccagcacacgatggttcacgagcaaatacgaacgtttttcaatggtttccgccgagatgcccacccgatggcaattatgtgcggtgtggtaggcgcactatcggccttttaccacgactcaacagacatctccgacccctaccatcgaaaagtcgcagccttccggctcattgcgaagatgccgaccattgcagccatgagctataagttcagtattggccagccctttatgtaccccgataacagcatggactacgccactaattttctgcacatgatgtttggtgtgccctgcgagcccagcaaaatttcacccacgattgcacgcgctatagatcgaattttcctgctacacgccgatcacgagcaaaacgcatcaacttcaacggttagactggcaggctcatctcaggcaaacccatttgcatgcatcgccgctggaattgccgcactgtggggcccatctcatggtggtgctaacgaagcggtagtgaaaatgctggaagaaattggcaccgtcgacaacattgacaaatttatcgccaaagccaaagacaaaaatgacccattccggctcatgggctttgggcaccgggtttacaagaactttgaccctcgcgcgaaagtcatgaaacaagccgccgatgaggtgcttgctgaactgggcattcacgatgagatgctggaaattgcaaaacgactcgaagaaatcgcgctgcaagacccttatttcatcgaaaagaagctttatccaaacgttgatttctactctggaattatcctaaaagctttgggcatacccacgtcgatgtttacggtgatttttgctattggtcgaacggtgggttgggtcgcgcattggaatgaaatgatttccggtagctacagaatcggccgccctagacagctgtataccggttaccaacagcgcgattacttgccactagataagcggtaa

SEQ ID NO: 123863 - protein, 431 aa, marine gamma proteobacterium HTCC2080
MSDKKATLSIDHGNGSVDTIDLPVLQAELGPDVVGVGSLTGNGLFTYDPGFTSTAACESKITFIDGEKGILLHRGYPIEQLAAESNYLETCYLLLYGELPSAAERDDFVSTMHQHTMVHEQIRTFFNGFRRDAHPMAIMCGVVGALSAFYHDSTDISDPYHRKVAAFRLIAKMPTIAAMSYKFSIGQPFMYPDNSMDYATNFLHMMFGVPCEPSKISPTIARAIDRIFLLHADHEQNASTSTVRLAGSSQANPFACIAAGIAALWGPSHGGANEAVVKMLEEIGTVDNIDKFIAKAKDKNDPFRLMGFGHRVYKNFDPRAKVMKQAADEVLAELGIHDEMLEIAKRLEEIALQDPYFIEKKLYPNVDFYSGIILKALGIPTSMFTVIFAIGRTVGWVAHWNEMISGSYRIGRPRQLYTGYQQRDYLPLDKR

SEQ ID NO: 123864 - DNA, 1281 bp, Candidatus Desulfococcus oleovorans Hxd3
  CDS (1)..(1281): transl_table=11
atgacagaaaccgccactattgtaattaatggaaaaacatatgaattcccggtaattaccggaacagaaggcgaaaaggccatcgacattcgggagcttcgggccaaaaccggctacatcacctttgacccgggtttcagcaacagcggcagctgcaccagcaccatcacctacatggacggcgccaagggggtcctgcgttacagggggtatcctattgaacaactcgccgagacaagctgttttgtggaggtgtgttacctgctgttaaacggagacctgccctcccgggccgaataccagcgcatgagcgtcatgctcaacgaccactccctggtccatgaggacatgcagatctttttccagaattttccccggtcggcaaaccccatgggcattctctcctccatggtcaacgccctgcgcagcttttatcccgaactgatgaccacggaagaggccatagagaccacctttctgcggctgatctccaaggtgcgcaccatggcggccatgtcccaccggatctcccgtggtcacaagatcgtctatccccggcccgactactcctactgcgccaattttctgaacatgatgcacgactccccggtgcggccctatgagatcaaaaaggagtttgtggaggcgttgaacatgttctgggtgttgcatgccgaccatgagcagaactgctccacctcaacggtgcgggccgtgggcagcgcccgggccaatatctacgcggccctgtccgccggtatcgcggccctgtggggccccctgcacggcggcgccaaccgggccgttgtggagatgttcgaagatatccgcaagagcggcggggacgtgaaaaaggcggtcaagcgggccaaggacaagaacgatccgttccggctgatggggtttggccacagcgtctacaagacctatgatccacgggccaagatcatgaaaaaaatgtgcgacaaggtgctggccgtggccaacacagaggaccccctgctggatatcgccatggaactggaggaggtggccttaaaggacagttactttacggaccacaacctctatcccaacatcgatttttacagcggcatcgtgctgcggacccttggcattccggtggagatgtttaccgtgatgtttgccatcggccggctgccgggatggatcgcccagtggaaagagctgatggacgatccgttcaagaagcttttccggccccgccagatttacgtgggcgaaaccatgcgggaagtgcttcccatcgacgaacggtag

SEQ ID NO: 123865 - protein, 426 aa, Candidatus Desulfococcus oleovorans Hxd3
MTETATIVINGKTYEFPVITGTEGEKAIDIRELRAKTGYITFDPGFSNSGSCTSTITYMDGAKGVLRYRGYPIEQLAETSCFVEVCYLLLNGDLPSRAEYQRMSVMLNDHSLVHEDMQIFFQNFPRSANPMGILSSMVNALRSFYPELMTTEEAIETTFLRLISKVRTMAAMSHRISRGHKIVYPRPDYSYCANFLNMMHDSPVRPYEIKKEFVEALNMFWVLHADHEQNCSTSTVRAVGSARANIYAALSAGIAALWGPLHGGANRAVVEMFEDIRKSGGDVKKAVKRAKDKNDPFRLMGFGHSVYKTYDPRAKIMKKMCDKVLAVANTEDPLLDIAMELEEVALKDSYFTDHNLYPNIDFYSGIVLRTLGIPVEMFTVMFAIGRLPGWIAQWKELMDDPFKKLFRPRQIYVGETMREVLPIDER

SEQ ID NO: 123866 - DNA, 1128 bp, Pseudomonas putida GB-1
  CDS (1)..(1128): transl_table=11
atggccgaagcaaaagtactcagtggcgcaggcctgcgtggccaggtggccggccagactgcactgtcgaccgtgggccaggccggtgccgggctgacctatcggggttacgatgtacgtgacctggcggccggtgccgaatttgaagaagtcgcctacctgctgctgtacggcgagctgccaacccaagccgagcttgccgactacaaacgtaagctcaagggcctgcgtgacctgccgcaagcattgaaggaggtgctggagcgcatcccgcgcgacgcccacccgatggacgtgatgcgcactggctgttcggtgctgggaaccctcgaacccgaactgaccttcgaggcccagcgcgacaagaccgaccgcctgctggcgcttttcccagccgtgatgtgctactggtaccgcttcacccaccatggcgtgcgcatcgactgcaccagcgaagaagacacccttggtggccacttcctgcacctgctgcacggcaagaagccaagcgagctgcacgtcaaggtcatgaacgtgtcgctgattctctacgccgagcacgagttcaacgcctcgaccttcactgcgcgtgtctgcgcctcgaccctgtccgacctgtactcctgcattaccgctgccatcggctcgctgcgcggcccgctgcacggcggtgccaacgaagccgcgatggagctcatcgagcgcttccagagcccgcaggaagccactgccgagctgctgcgcatgctcgagcgcaaggacaagatcatgggcttcggccatgccatctacaaagagtccgacccgcgcaacgaggtgatcaagggctggtcgaagcaactggccgacgaagtgggcgacaaggtgctgtacccggtttccgaagccatcgacaagaccatgtgggagcagaagcgcctgttcccgaacgccgacttctaccatgcttcggcttaccacttcatgggcatcccgaccaagctgttcaccccgatcttcgtctgctcgcgcctgaccggctgggcggcgcacgtcttcgagcagcgcgccaacaaccgcatcatccgcccgagcgccgagtatgtcggcgtcgagcagcgccagttcgtgccgatcgagcagcgctga

SEQ ID NO: 123867 - protein, 375 aa, Pseudomonas putida GB-1
MAEAKVLSGAGLRGQVAGQTALSTVGQAGAGLTYRGYDVRDLAAGAEFEEVAYLLLYGELPTQAELADYKRKLKGLRDLPQALKEVLERIPRDAHPMDVMRTGCSVLGTLEPELTFEAQRDKTDRLLALFPAVMCYWYRFTHHGVRIDCTSEEDTLGGHFLHLLHGKKPSELHVKVMNVSLILYAEHEFNASTFTARVCASTLSDLYSCITAAIGSLRGPLHGGANEAAMELIERFQSPQEATAELLRMLERKDKIMGFGHAIYKESDPRNEVIKGWSKQLADEVGDKVLYPVSEAIDKTMWEQKRLFPNADFYHASAYHFMGIPTKLFTPIFVCSRLTGWAAHVFEQRANNRIIRPSAEYVGVEQRQFVPIEQR

SEQ ID NO: 123868 - DNA, 1275 bp, Marinobacter sp. ELB17
  CDS (1)..(1275): transl_table=11
atgaccgacaggaaagccacgctaacagtgggcaacaagtcccttgagctgccggtttactctggcaccgtcggcccagacgttattgatgtacgaagcctggttcagcaaggcgtgttcacttacgatcccggctttgtatccacagcggcctgcgagtccgccatcacctttattgatggcgacaagggcgtgctcttgcaccgcggctacccgatcgagcagctggcagaacactctgactacctggagctatgttggctgctgctgcacggggaactccccactgccgaagaaaacaaagcatttcacgaaaccatcaaaaaccacaccatgctgcatgaccaaatgcgtaatttctttaacggtttccgtcgtgacgcgcacccaatggccattatgtgcggcgtcgtgggcgccttatcggcgttctatcacgatcagatggacgtaaccgatgagcaccagcgcgaaattaccggccaccgcctgatcgcgaaaatgcccaccattgcagcttggtgttacaagtacagcatgggccaaccctttatttacccacgtaacgacttgtcttacgccgaaaactttttgcagatgatgtttgccaccccatgtgaggaatacaagccaaatccggtcctggccaacgcaatggacaaaatcttcatcctgcacgctgaccacgaacagaacgcatccacttctaccgtgcgtctggcgggctctaccggcgcgaacccttacgcttgtatggcttctggcattgcagcactgtgggggcctgctcacggcggcgccaacgaagcggttctggccatgctggccgaaattggcgatgaagccaacatcgaaaccttcatcgacaaagccaaagacaaagacgacccgttccgcctgatgggctttggtcaccgggtctacaaaaactttgatccgcgggccaaggtcatggctgaaacagctcacgaagtgttgacggaactgggcctggaaaacgatccgctgctgcgcatcgccaagcgcctggaaaaaatcgccctcgaagacgagtactttgttgagcgtaagctttatccgaacgtagacttttactctggcctgatcctcaaagcgatcggcattccaacgtccatgttcaccgttgtgtttgccatggcgcgcaccatcggctggttctctcattggaacgaaatggtcagcggcgaataccgcattggtcgtccgcgccagctttacacgggttcgcccaagcgcgattacccaaaagattga

SEQ ID NO: 123869 - protein, 424 aa, Marinobacter sp. ELB17
MTDRKATLTVGNKSLELPVYSGTVGPDVIDVRSLVQQGVFTYDPGFVSTAACESAITFIDGDKGVLLHRGYPIEQLAEHSDYLELCWLLLHGELPTAEENKAFHETIKNHTMLHDQMRNFFNGFRRDAHPMAIMCGVVGALSAFYHDQMDVTDEHQREITGHRLIAKMPTIAAWCYKYSMGQPFIYPRNDLSYAENFLQMMFATPCEEYKPNPVLANAMDKIFILHADHEQNASTSTVRLAGSTGANPYACMASGIAALWGPAHGGANEAVLAMLAEIGDEANIETFIDKAKDKDDPFRLMGFGHRVYKNFDPRAKVMAETAHEVLTELGLENDPLLRIAKRLEKIALEDEYFVERKLYPNVDFYSGLILKAIGIPTSMFTVVFAMARTIGWFSHWNEMVSGEYRIGRPRQLYTGSPKRDYPKD

SEQ ID NO: 123870 - DNA, 1299 bp, Magnetospirillum gryphiswaldense
  CDS (1)..(1299): transl_table=11
atgagcactaaggaaagcgtaacgcttatcaacaacagcaccggtaagcagatcgagatgcccctgctgtcgggcaccgtcggccccaaggtcatggatatccgcaagctttacggcgacatggacatcttcacctatgaccccggctacacctcgaccggttcctgtaagtcggccatcacctacatcgacggtgacgccggcgtgctgctgcaccgcggctatcccatcgaccagctggccgagaagtgcgacttcctggaagtggcctatctgatcctgaagggcgaactgcccaacgccgagcagaagaccaagttcgagagcgacatcacccgtcactccatgctgaacgagcagatctcgttcttcttccgcggcttccgtcgcgactcgcacccgatggcggtgatgtgcggcgtcgtcggcgccatggcggcgttctaccacgattccaccgacatcaacgacccgcaccagcgcatggtcgccagctatcgcttggtcgccaagatgccgaccatcgtcggctgggcgtacaagtactcgcagggccagccgttcatgtatccgcagaacaagctgtcctacgccgagaacttcctgcacctgatgttcgccaccccgtgcgaggaatacaagatcagcccgattctggcccgcgccatgaaccgcatcctgatcctgcacgccgatcacgagcagaacgcctcgacctccaccgtccgtctggccggttcgtcgggcgccaacccgttcgcctgtatcgccgccggtatcgcctcgttgtggggtcccgcccatggcggcgccaacgaagccgtgctggaaatgctgcatgaaatcggctcggtcgagcgtatccccgaattcatcgccaaggccaaggacaaggacgatccgttccgtctgatgggcttcggccaccgggtgtacaagaactacgacccgcgcgccaagatcatgcagcagacctgccacgaagtgctgaccgagctgggcgtcaaggacgacccgctgttgaagctggccatggaactggaacgcatcgccctggaagacgaatacttcgtccagcgcaagctgttcccgaacgtggacttctattcgggcatcatcttccgcgccatgggcatcccgacccaggtgttcacctgcctgttcgccctggcccgcaccgtcggctggatcgcccagtggaacgaaatgctgaccgacagcgaccagaagatcggtcgtccgcgccagctgtacatcggttccgacgtccgcgatgtcccgccgatcgaaaagcgctga

SEQ ID NO: 123871 - protein, 432 aa, Magnetospirillum gryphiswaldense
MSTKESVTLINNSTGKQIEMPLLSGTVGPKVMDIRKLYGDMDIFTYDPGYTSTGSCKSAITYIDGDAGVLLHRGYPIDQLAEKCDFLEVAYLILKGELPNAEQKTKFESDITRHSMLNEQISFFFRGFRRDSHPMAVMCGVVGAMAAFYHDSTDINDPHQRMVASYRLVAKMPTIVGWAYKYSQGQPFMYPQNKLSYAENFLHLMFATPCEEYKISPILARAMNRILILHADHEQNASTSTVRLAGSSGANPFACIAAGIASLWGPAHGGANEAVLEMLHEIGSVERIPEFIAKAKDKDDPFRLMGFGHRVYKNYDPRAKIMQQTCHEVLTELGVKDDPLLKLAMELERIALEDEYFVQRKLFPNVDFYSGIIFRAMGIPTQVFTCLFALARTVGWIAQWNEMLTDSDQKIGRPRQLYIGSDVRDVPPIEKR

SEQ ID NO: 123872 - DNA, 1410 bp, Nicotiana tabacum
  CDS (1)..(1410)
atggtgttctatcgcggcgtttctctgctgtcaaagctgcgttctcgagcggtccaacagacaaatcttagcaactctgtgcggtggcttcaagtccaaacctcttctggtcttgatctgcgttctgagctgcaagaattgattccagaacaacaggatcgcctaaagaagctcaagtcagagcatggaaaggttcaattgggaaacatcacagttgatatggttcttggtggaatgagaggaatgacaggattactgtgggaaacctcattacttgaccccgatgaaggaattcgctttcggggcttgtctatctatgaatgccaaaaggtattacctgcagcaaagcctgggggagagcccttgcctgaaggtcttctctggcttcttttaacaggaaaggtgccatcaaaagagcaagtggattcattgtctcaggaattgcgaagtcgtgctactgtccccgatcatgtatacaaaactattgatgccttaccagtcacagctcatccaatgactcagtttgctactggagtcatggctcttcaggttcaaagtgaatttcaaaaggcatatgagaaagggattcacaaatcaaagttatgggaaccgacatatgaggattccatgagtttgattgctcaagttccacttgttgctgcttatgtttatcgcaggatgtacaagaacggcaacactatacctaaggatgactcactggattatggtgcaaattttgctcacatgcttggtttcagtagctctgacatgcatgagcttatgaagctctatgtcacgatacacagtgatcatgaaggtggtaacgtcagtgctcacacaggtcacttggttgctagtgctttgtcagacccttacctctccttcgctgctgctttgaatggtttagctggaccacttcatggtttagccaatcaggaagttttgctatggatcaaatctgttgtagaggagtgtggggagaacatttccaaagagcagttgaaagactacgcttggaaaacattgaaaagtggcaaggttgtccctggtttcggacatggagttctgcgcaagactgatccaagatacacatgccagagagagttcgctttgaagcatttgcctgaagatccactgtttcaactggttgcaaaactctacgaagtgttcctccaattcttacagaacttggcaaagttaaacccttggccaaatgttgatgcccacagtggtgtgttgttgaactattatggtttaactgaagcaagatattatacggtcctctttggtgtatcaagagctcttggcatttgctctcagctaatttgggaccgagctcttggattgccactagagaggccaaagagtgtcacaatggagtggcttgagaaccattgcaagaaagcatga

SEQ ID NO: 123873 - protein, 469 aa, Nicotiana tabacum; identical to SEQ ID NO: 93146

SEQ ID NO: 123874 - DNA, 1425 bp, Trichoderma reesei; identical to SEQ ID NO: 93147
  CDS (1)..(1425)

SEQ ID NO: 123875 - protein, 474 aa, Trichoderma reesei; identical to SEQ ID NO: 93148

SEQ ID NO: 123876 - DNA, 1344 bp, Aspergillus oryzae
  CDS (1)..(1344)
atgactgtgactcaagaagcctctcccaagcgggaatccctacacattattgatgaccgtactggatcttattactcgattcccattgtgaacaatgccatcaatgccagcgatttcaaaaaagtgaccgcgccagaagacaaagcttaccctgccaaccaaacggagaatgggctgcgggtttacgacccaggctactccaacactgccgtcagtcacagtaagatcacctatattgatgggctcaagggcactatccagtaccgtgggtactccatcaatgacattgtcggacgcaagacgtttatcgataccgcgcatctcctgatctggggtcactggccctccaccgccgaggccgaaacccttcagcaacgcctcgaccaggttcctgtccctcaggattttgtcttcaatgtgatcaaatcctttccacgagatggttcccttatgggaatggtaatcgccggtctatcagcgctccagtccagtgatatgaatgcgatcccggctcatgtgggaaagaccatctatctgaacaatcccgagctagccgatcaacagatcattcgggtcatggcaaacatgtccatgttgacagccgcggcatactgccatcacatcggacgtgacttcactccaccccgcgcggggctatcgtacattgagaacttcctactcatgactggtcatgttgaggcagctactggcctgccaaacccgcgatacgtgaatgccattgagcgactctgggtcctcattgccgatcatgaaatgacctgctccactgcggcccttcttcaaaccgcatctgccctaccagatgttatctcctgcatggtctccgccatctcggcattgtatggtcctctccatggtggagccattgaagtcgcttacaagaatattgagagcatcggctccatctccaatgtacctgccaagatcgcccgcgtcaaagcaggaaaggaacgtctgtatggttacggccaccgagtctaccgtgtgacagatcctcgatttgtcttcatccgtgagatcctcaatgaactgtccgaggaagtggagaaggaccccttgttgaaagttgcattcgaggtcgaccgtgttgcctcagaagatgagtacttcacgtccaggaatctccgccccaacgcggatttgttcgctgcgtttgtctacaaggctcttgggttcccgcccgaattcatcctgcctctgtcgattctctcccgcacacaagggtttatggcccactggagagaggccatgggcaatcctcctcgaatctggcggccgggtcagatctataccggtgacctgaacaagtccatggatgagtga

SEQ ID NO: 123877 - protein, 447 aa, Aspergillus oryzae
MTVTQEASPKRESLHIIDDRTGSYYSIPIVNNAINASDFKKVTAPEDKAYPANQTENGLRVYDPGYSNTAVSHSKITYIDGLKGTIQYRGYSINDIVGRKTFIDTAHLLIWGHWPSTAEAETLQQRLDQVPVPQDFVFNVIKSFPRDGSLMGMVIAGLSALQSSDMNAIPAHVGKTIYLNNPELADQQIIRVMANMSMLTAAAYCHHIGRDFTPPRAGLSYIENFLLMTGHVEAATGLPNPRYVNAIERLWVLIADHEMTCSTAALLQTASALPDVISCMVSAISALYGPLHGGAIEVAYKNIESIGSISNVPAKIARVKAGKERLYGYGHRVYRVTDPRFVFIREILNELSEEVEKDPLLKVAFEVDRVASEDEYFTSRNLRPNADLFAAFVYKALGFPPEFILPLSILSRTQGFMAHWREAMGNPPRIWRPGQIYTGDLNKSMDE

SEQ ID NO: 123878 - DNA, 1425 bp, Aspergillus oryzae; identical to SEQ ID NO: 93149
  CDS (1)..(1425)

SEQ ID NO: 123879 - protein, 474 aa, Aspergillus oryzae; identical to SEQ ID NO: 93150

SEQ ID NO: 123880 - DNA, 1404 bp, Aspergillus oryzae; identical to SEQ ID NO: 93151
  CDS (1)..(1404)

SEQ ID NO: 123881 - protein, 467 aa, Aspergillus oryzae; identical to SEQ ID NO: 93152

SEQ ID NO: 123882 - DNA, 1344 bp, Chlorobium limicola
  CDS (1)..(1344): transl_table=11
atggccgatcccaatcaccgcaattcactgacgattaccgacaatcgtaccggcaaatcgtatgagcttcccatcgagaacggcaccgtccgaaccatggatcttcgacagatcaaggcgtcggaggacgatttcgggcttctcggttatgatccggcgttcctgaacacctgctcctgcaaaagccagatcaccttcatcgatggcgaaaagggcattctccgctaccggggctatccgatcgagcagcttgccgagaagagctcgttcctcgaaaccgcttacctgctcatcaagggtgaactgcctgacaaggagcggcttgcagtctggacttacaacatccgtcaccacaccatgacccatgccaacctgaccaagttcatggacgggttccgctacgacgcgcatccgatgggcattctcgttggtacggtgggggcgctctcgaccttctatcccgatgccaaacaggttagcgaggaggagtcccgtaagcttcaggtgcggcggctgatcggcaagatcccgacccttgcggccatgagcttccggcacagcctcggttttccttacgtgctgcccgacaacgatctgagctacgcgggcaattttctgtcgatgatgttccggatgacggagcagaagtacgagcccaatccagtgcttgaaaaagcactcgacgtgctcttcatcctgcacgctgaccacgagcagaactgctcgaccaacgccgtgcgctcggtcagcagctcgatggttgatccctactcagctatcgcggcaggctgtgcagcgctctatggcccgctgcatggtggggccaacgaggcggtcattcgcatgctcgaagggattggctcggtcgataatatccccgccttcatcaaatcggtcaagagcggcgaagggcggctcatgggattcggccatcgcgtctataaaaattacgacccgcgggcgcgaatcatcaagaagatcgccttcgaggtgttcgaggagaccggacggaacccgctgctcgacatcgccatcgagctggaacgaatcgcgctggaggacgactatttcgtcgggcgcaaactttatccgaatgtcgatttctactccggcctgatctaccaggcgatgggctttccaaccgacatgttcccggtgctcttcgctatcgggcgcacgccgggctggctcgcgcagtggatcgagcatgtcaaggatccggagcagagaattgcccgtccgcgccagattttcctcggcgcaccttgccgcgattacgtgccgcttgacgaacgtccgagcaggggtgatgacgaagagaagttcggtatctgcaggctctga

SEQ ID NO: 123883 - protein, 447 aa, Chlorobium limicola
MADPNHRNSLTITDNRTGKSYELPIENGTVRTMDLRQIKASEDDFGLLGYDPAFLNTCSCKSQITFIDGEKGILRYRGYPIEQLAEKSSFLETAYLLIKGELPDKERLAVWTYNIRHHTMTHANLTKFMDGFRYDAHPMGILVGTVGALSTFYPDAKQVSEEESRKLQVRRLIGKIPTLAAMSFRHSLGFPYVLPDNDLSYAGNFLSMMFRMTEQKYEPNPVLEKALDVLFILHADHEQNCSTNAVRSVSSSMVDPYSAIAAGCAALYGPLHGGANEAVIRMLEGIGSVDNIPAFIKSVKSGEGRLMGFGHRVYKNYDPRARIIKKIAFEVFEETGRNPLLDIAIELERIALEDDYFVGRKLYPNVDFYSGLIYQAMGFPTDMFPVLFAIGRTPGWLAQWIEHVKDPEQRIARPRQIFLGAPCRDYVPLDERPSRGDDEEKFGICRL

SEQ ID NO: 123884 - DNA, 1425 bp, Oryza sativa subsp; identical to SEQ ID NO: 120874
  CDS (1)..(1425)

SEQ ID NO: 123885 - protein, 474 aa, Oryza sativa subsp; identical to SEQ ID NO: 120875

SEQ ID NO: 123886 - DNA, 1503 bp, Oryza sativa subsp
  CDS (1)..(1503)
atggatcgcgcccgcctcgccgtgctctccgcccacctcgcctcccccgccgccgcctgcggggaggcggacgcggcggggccgctggagaggtcggcggcgtctgcgggggcgcgaggcggcgcgctggcggtggtggatgggaggacggggaagaggtacgaggtcaaggtgtcggacgaggggaccgtgcgcgccaccgacttcaagaagattaccactggaaaggacgacaagggtcttaagatctatgatcctggttatctcaacacagccccagttcgctcatccatctgctacattgatggggatgagggaattcttcgttacaggggatacccaattgaagagttggctgaaagcagctcatttgttgaggtggcctacctcctgatgtacggaagtttgcctacccagagccaattggctggatgggaatttgcgatttctcagcactctgctgttccccagggactcttggatatcatacaagcaatgcctcatgacgctcatcccatgggtgcccttgccagtgcaatgagcacgctttctgtcttccatccggatgcaaaccctgctcttagaggtcaagatctttacaagtcgaagcaggttagggataagcagattgtgcgagtacttgggaaggcaccaacaattgcagctgcagcgtacttgagattagctggaagacctcctatccttcctacaaatagtctctcttattcagagaacttcttgtatatgctagactctttgggtgacaaagaatacaagccaaatcctagacttgctagggttctagatatcctttttattctccatgctgaacatgaaatgaactgctctacagctgctgctaggcaccttgcttcaagtggtgttgatgtcttcactgctctttctggtgctgttggagctctatatggtccactgcatggtggtgcaaatgaggcggtacttaaaatgttaaatgaaattggaagtgtggagaatattccagatttcatcgagggagtgaaaaacaggaagagaaagatgtcaggttttgggcaccgtgtttacaagaattatgatccccgtgctaaagtcatccgaaagctagcagaggaggtcttctctattgtcggacgggatcctcttatcgaggttgctgttgcgttggagaaggcagcattgtcagatgattattttgtcaagaggaagctgtatccaaatgtggatttttactctggcttaatatatagggcaatgggattccctacagagttcttccctgttctgtttgcaattcctcgcatggctggttggttagcacattggaaagagtcacttgatgatccagacactaagattatgaggcctcagcaggtatacactggtgtttggctgaggcattacacacctgtcagagaacgagtcccagcaagccagggcgaacagcttggtcagattgctacctctaacgcaacaaggcgtcggcgtgcaggttctgccctgtaa

SEQ ID NO: 123887 - protein, 500 aa, Oryza sativa subsp
MDRARLAVLSAHLASPAAACGEADAAGPLERSAASAGARGGALAVVDGRTGKRYEVKVSDEGTVRATDFKKITTGKDDKGLKIYDPGYLNTAPVRSSICYIDGDEGILRYRGYPIEELAESSSFVEVAYLLMYGSLPTQSQLAGWEFAISQHSAVPQGLLDIIQAMPHDAHPMGALASAMSTLSVFHPDANPALRGQDLYKSKQVRDKQIVRVLGKAPTIAAAAYLRLAGRPPILPTNSLSYSENFLYMLDSLGDKEYKPNPRLARVLDILFILHAEHEMNCSTAAARHLASSGVDVFTALSGAVGALYGPLHGGANEAVLKMLNEIGSVENIPDFIEGVKNRKRKMSGFGHRVYKNYDPRAKVIRKLAEEVFSIVGRDPLIEVAVALEKAALSDDYFVKRKLYPNVDFYSGLIYRAMGFPTEFFPVLFAIPRMAGWLAHWKESLDDPDTKIMRPQQVYTGVWLRHYTPVRERVPASQGEQLGQIATSNATRRRRAGSAL

SEQ ID NO: 123888 - DNA, 1395 bp, Citrus junos
  CDS (1)..(1395)
atggcgttcttcaggagcgtaactgcgctttctcgcctccgttctcgcgttgggcaacagtctaatctcagtaattcagtgagatggcttcaaatgcaaagctcttctgatcttgaccttcattctcagctcaaggaaatgattccagaacaacaggagcgcctgaagaaagtgaagtcagaacttggaaaagcccagctgggaaatattaccgttgacatggtaatcggcgggatgagaggaatgactggcttactctgggaaacctcattacttgaccctgatgagggaattcgctttcggggtctgtctattcctgagtgccagaagttgttacctgccgctaagccagatggagaacctttgcctgagggtcttctttggcttcttttaactggaaaggtaccgagcaaagagcaggtcgatggcttgtccaaggaattgagagatcgtgccactgtcccagattatgtgtacaaggccattgatgctctacctgtaacggcacatccgatgactcaatttgctagtggggtcatggctctgcaggtgcaaagtgaatttcaggaggcttatgagaagggaattcataaatcaaagtactgggaaccaacatatgaggattctcttaatttgattgctcgtgtgccggtagtagctgcgtacgtttatcaaaggatatacaaggatggaaagattattcccaaggatgactcactggattatggtgggaacttctcgcacatgttgggattcgatgatcctaagatgctagagcttatgaggctttatgttaccattcacagtgaccacgaaggtggaaatgtcagtgctcacaccggccatctagttgcaagtgcactttcagatccttatctttcttttgctgccgcattaaatggtttagctggaccactccatggtttggctaatcaggaagttttgctttggatcaaatctgtggtggatgagtgtggtgagaacgtaacaacggagcagttgaaagattatgtctggaaaacattgaatagtggcaaggttgtccctggatttggtcatggtgttttgcgtaaaactgatccgagatacacttgtcagagggagtttgccttgaagcatttgcctgatgatccattgttccagctggtttctaagctgtttgaagtggtgcccccaatattaacaaaactaggcaaggttaaaaacccctggccaaatgttgatgctcacagtggggtgctgctgaaccattttggtttggctgaggcaagatattatactgttctttttggagtatcaaggagtcttggaatctgctctcagttgatatgggaccgagctcttgggctgccacttgagaggccaaaaagtgtaactttagattggattgagtaa

SEQ ID NO: 123889 - protein, 464 aa, Citrus junos; identical to SEQ ID NO: 93156

SEQ ID NO: 123890 - DNA, 1233 bp, Thermoproteus tenax
  CDS (1)..(1233): transl_table=11
atgagcgaacagactgtatcaattaggacgaccggcaagatcatacagtcgccttgtggccccatcattcacggccttgaggatgtactggtgaaaataaccaccataagcgatatagatggccacacgggcagactctggtatagaggatatagaattgaggatttggcagagaataccacatatgaggaggtcgtctatcttcttttatacgggaagttgccgagtgcgagagaattggccgatataaagagcaggctcagcgcaaatagggagctgaaccctgccacgatagagattcttcgcgcgctcgccaaggcgcatcccatgttcgctctggaggccgcggtcgcaagcgagggcgcgttcgatgaagataacttaaagttggccgacgcgctgagggccggccgatataagcaagaggagaaggaccttgcgttaagaatagcggagaagctgattgccaaattgcccaccatagttgcatatcattatagattgtcgagggggttagagctagtcagacctaggggcgacttagcccactcggcaaatttcctctatatgttcttcggaaaagagcctgatcctcttgcgactaaagcgatagatctctatctaatcttacatgcagaccacgagatacctgcctcaacttttacggcgttggtcatcggagccactctcagcgatctgtactctgtaatagcgggcgccataggcgccctcaagggcccgctgcacggcggagccaatgaggccgccgtcaagtcctatttggagatcgcagatccctccaaggcgaaggagatagttgaggctgctacgaaacccggcggtccccgcctgatgggcgtaggacaccgcgtttacaaggcctatgatcctcgtgccaagatcttcaaaaagttggtggaggactacacagctaaattcggcgatcctcagagactgtacgccatagcgagcaatattgagcaagcagtgatggcgcatccctacttccaacagagaaagctctatccaaacgtggacttctggtcaggtatagtgttctactatatgggtataccctacgactacttcacgcccctcttcgccatgtccagagttgcgggttggacggcgcatgtattagaatattgggagaacaaccgcctcttcaggccgcgcgcgtgctacgtagggccgcacgaccaacaatttatcccgcttgaaaatagatcttga

SEQ ID NO: 123891 - protein, 410 aa, Thermoproteus tenax
MSEQTVSIRTTGKIIQSPCGPIIHGLEDVLVKITTISDIDGHTGRLWYRGYRIEDLAENTTYEEVVYLLLYGKLPSARELADIKSRLSANRELNPATIEILRALAKAHPMFALEAAVASEGAFDEDNLKLADALRAGRYKQEEKDLALRIAEKLIAKLPTIVAYHYRLSRGLELVRPRGDLAHSANFLYMFFGKEPDPLATKAIDLYLILHADHEIPASTFTALVIGATLSDLYSVIAGAIGALKGPLHGGANEAAVKSYLEIADPSKAKEIVEAATKPGGPRLMGVGHRVYKAYDPRAKIFKKLVEDYTAKFGDPQRLYAIASNIEQAVMAHPYFQQRKLYPNVDFWSGIVFYYMGIPYDYFTPLFAMSRVAGWTAHVLEYWENNRLFRPRACYVGPHDQQFIPLENRS

SEQ ID NO: 123892 - DNA, 1236 bp, Anaplasma platys
  CDS (1)..(1236): transl_table=11
atgaaagaaaatgctgttttgatgtgcggggataagaaagtaagcttgcctatgctgtccgggactgatgggatacaattgatagacatcactacgttgtacagagaccataaggtcttgacctacgatccgggattcatgtctaccgcggcatgcagctctgagataacctttatcgacggagaaaagggtatactgcgccaccgcgggcttgacattgcagacctaataggaattaaaggtggcttttgtagtgtggcccatttactgctctatggggttttgccatcagacacagtgttcgagcaattttcggcagctataggggcgcagcatgctctgtcatccgacgttttaggcgtgatttcatccttcaggagagatgctcatcccatggcaatattgatggcatgcttttcaactttggctgcgaagtatcatggggataataggggaaatgaagagcttgctgtgctggcgatagcgcaagttccgtcgttggtggctgcgatctatcggcacagaatgggcttggaactggtcagtcctgatacaagtctgagctatacaggaaattttgttaaaatgatgtttggggccctcgaaaagacgcgtgctgacgccattgaagaagcgttggatgctattttcatcatgcatgcagatcatgaacaaaacgcttcaacagcgaccgtgcggatggcaggttctgccggaacagagctattcgcgtgtttagccgcggggactgcgaccctatgggggccagcacatggaggtgccaacgaagctgtgattcgcatgctagaaagcataggtagtcctgacaaagttgaggagttcattgggtttgttaaagataataatagtaaagttcggctcatgggtttcgggcatcgtgtctacaaaagctatgaccctagggcaaagatcttgggacagatcagccgctcagtccttgataatttaggttgcagcgatgagttattgggtgtggcagaagaattagagcgctgtgcgctgcaagatgaatattttgttgagcgcaagctatatcccaatgttgatttttactcagggatagttttaagagctatgggagtgcctgttgagatgtataccacattctttgcccttgccagaacggcgggatgggtgtcacaatggtgtgagcttttgcggggcagtgaaagcctgaagatatgtaggccgcggcagttatatgctggtaaatag

SEQ ID NO: 123893 - protein, 411 aa, Anaplasma platys
MKENAVLMCGDKKVSLPMLSGTDGIQLIDITTLYRDHKVLTYDPGFMSTAACSSEITFIDGEKGILRHRGLDIADLIGIKGGFCSVAHLLLYGVLPSDTVFEQFSAAIGAQHALSSDVLGVISSFRRDAHPMAILMACFSTLAAKYHGDNRGNEELAVLAIAQVPSLVAAIYRHRMGLELVSPDTSLSYTGNFVKMMFGALEKTRADAIEEALDAIFIMHADHEQNASTATVRMAGSAGTELFACLAAGTATLWGPAHGGANEAVIRMLESIGSPDKVEEFIGFVKDNNSKVRLMGFGHRVYKSYDPRAKILGQISRSVLDNLGCSDELLGVAEELERCALQDEYFVERKLYPNVDFYSGIVLRAMGVPVEMYTTFFALARTAGWVSQWCELLRGSESLKICRPRQLYAGK

SEQ ID NO: 123894 - DNA, 1422 bp, Saccharomyces castellii; identical to SEQ ID NO: 93157
  CDS (1)..(1422)

SEQ ID NO: 123895 - protein, 473 aa, Saccharomyces castellii; identical to SEQ ID NO: 93158

SEQ ID NO: 123896 - DNA, 1431 bp, Saccharomyces castellii; identical to SEQ ID NO: 93159
  CDS (1)..(1431)

SEQ ID NO: 123897 - protein, 476 aa, Saccharomyces castellii; identical to SEQ ID NO: 93160

SEQ ID NO: 123898 - DNA, 1440 bp, Saccharomyces bayanus; identical to SEQ ID NO: 93161
  CDS (1)..(1440)

SEQ ID NO: 123899 - protein, 479 aa, Saccharomyces bayanus; identical to SEQ ID NO: 93162

SEQ ID NO: 123900 - DNA, 1290 bp, Rhizobium fredii
  CDS (1)..(1290): transl_table=11
atgtcaggaacaaacgcgacgatctctatcgatggaaaaacagcggacctcccggtgcgatcgggctccatcggtccggacgtggtggacatctggtcgctctacaagcagaccaagatgttcacctacgatcctggcttcacgtcgacggcatcgtgtgaatccaagatcacctatatcgacggcgacgagggcgtattgctgcaccgcggctacccgatcgagcagcttgccgatcacggtgacttcctcgaagtctgctatcttctgctttacggcgaactgccgaccaaggcgcagaaggacgacttcgactatcgcgtgacgcatcacaccatgattcacgagcagatgtcgcggttcttcaccggcttccgtcgcgacgcccacccgatggccgtcatgtgcggctgcgtcggggcgctgtcggccttctatcatgactcgaccgacatcactgacccgcatcagcgcatggtcgcctcgctgcgcatgatcgccaagatgccgacgattgcggcaatggcctacaagtaccatatcggccagcccttcatttatccgaagaacgacctcgactacgcctcgaacttcctgcgcatgtgctttgccgtgccctgcgaggactatgtcgtcaatccggtcctgtcgcgcgcgatggatcgcatcttcatcctgcacgctgaccatgagcagaacgcctcgacctcgaccgttcgccttgccggctcgtcgggcgccaatccgttcgcctgtatcgctgccggcattgcctgcctatggggtcccgctcacggcggcgccaacgaagcggccctcaacatgctcgccgagatcggcagcgtcgatcgcattccggaatttatcaccagggccaaggacaagaacgacccgttccgcctgatgggcttcggtcaccgcgtctacaagaactatgatccgcgtgcgaagatcatgcagaagacgacgcatgaggtgctggccgaactcggtcacaaggacgacccgctcctcgaagtggcgatggagctcgagcgcatcgcactgacggacgagtacttcatcgagaagaagctctacccgaacatcgacttctattccggtatcacgctgaaggcgctgggcttccccaccacgatgttcaccgttctcttcgcgcttgctcgcacggtcggctggatcgcccagtggaacgagatgatcgaggatccggaacagcgcatcggtcggccgcgccagctgtatgtcggcgcaccgctgcgcgattacgtgccgctctccaagcgctga

SEQ ID NO: 123901 - protein, 429 aa, Rhizobium fredii
MSGTNATISIDGKTADLPVRSGSIGPDVVDIWSLYKQTKMFTYDPGFTSTASCESKITYIDGDEGVLLHRGYPIEQLADHGDFLEVCYLLLYGELPTKAQKDDFDYRVTHHTMIHEQMSRFFTGFRRDAHPMAVMCGCVGALSAFYHDSTDITDPHQRMVASLRMIAKMPTIAAMAYKYHIGQPFIYPKNDLDYASNFLRMCFAVPCEDYVVNPVLSRAMDRIFILHADHEQNASTSTVRLAGSSGANPFACIAAGIACLWGPAHGGANEAALNMLAEIGSVDRIPEFITRAKDKNDPFRLMGFGHRVYKNYDPRAKIMQKTTHEVLAELGHKDDPLLEVAMELERIALTDEYFIEKKLYPNIDFYSGITLKALGFPTTMFTVLFALARTVGWIAQWNEMIEDPEQRIGRPRQLYVGAPLRDYVPLSKR

SEQ ID NO: 123902 - DNA, 1371 bp, Issatchenkia orientalis; identical to SEQ ID NO: 93163
  CDS (1)..(1371)

SEQ ID NO: 123903 - protein, 456 aa, Issatchenkia orientalis; identical to SEQ ID NO: 93164

SEQ ID NO: 123904 - DNA, 1134 bp, Thermus aquaticus
  CDS (1)..(1134): transl_table=11
atggaagtggcacggggtcttgagggcgttctcttcacggaaactcggatgtgctttattgacggggaggcgggccgcctttactactacggcatccccattcaggagctggcggagaagagcacctttgaggagaccacctacttgcttctccacggcagactgcctcagcgaggggagctagaggcctttaaaaaggacctggcggccaggcgggctttgccttctcacctcctggagtccttccggcgctaccccgcctcggcccaccccatgagctttttgcgcaccgccgtctccgagctgggcatgctggaccccaccgagggagatatctcccgggaggccctgtaccagaagggcctggacctgatcgccaagttcgccaccatcgtggccgccaacaagcgcctcaaggagggtaaggagccccttcctccccgggaggacctctcccacgccgccaacttcctttacatggcgaacggcgtggagccttcccctgagcaagagcgcctcatggacgcggccctcatcctccacgccgagcacggcttcaacgccagcaccttcaccgccatcgccgccttctccacggagaccgacctctactcggccatcaccgccgccgtggcctctttgaagggccccaggcacggtggggccaacgaggcggtcatgaagatgatccaggagatcggcgcgcccgaaagggcccgggagtgggtgcgggaaaagctttccaagaaagagcggatcatgggcatgggccaccgggtctacaaggcctttgaccccagggccggggttctggagaagctggcccgccgcgtggcggagaagcacgggcactcccccgagtaccagatcctcaagatcgtggaggaggaggcggggaaggtgctgaacccgcggggcatctaccccaacgtggacttctattccggggtggtctactccgacctgggcttcgggctggagttcttcacccccatcttcgccgtggcccgcatctccggctgggtggggcacatcctggagtacaaggagcaggacaaccgcctcctgcgccccgacgccaagtacatcggggagctggaccggccctacgtgcccctggaggccaggggctga

SEQ ID NO: 123905 - protein, 377 aa, Thermus aquaticus
MEVARGLEGVLFTETRMCFIDGEAGRLYYYGIPIQELAEKSTFEETTYLLLHGRLPQRGELEAFKKDLAARRALPSHLLESFRRYPASAHPMSFLRTAVSELGMLDPTEGDISREALYQKGLDLIAKFATIVAANKRLKEGKEPLPPREDLSHAANFLYMANGVEPSPEQERLMDAALILHAEHGFNASTFTAIAAFSTETDLYSAITAAVASLKGPRHGGANEAVMKMIQEIGAPERAREWVREKLSKKERIMGMGHRVYKAFDPRAGVLEKLARRVAEKHGHSPEYQILKIVEEEAGKVLNPRGIYPNVDFYSGVVYSDLGFGLEFFTPIFAVARISGWVGHILEYKEQDNRLLRPDAKYIGELDRPYVPLEARG

SEQ ID NO: 123906 - DNA, 1522 bp, Wolbachia pipientis
  CDS (181)..(1422): transl_table=11
tttacacaaatgtgtaaataaaggtgtcattgataggaataccgctgcgcgtaaaataagtcgcttaaatgcaaaagtaaaagcattgatgaccgcttaatacggttaatgtaaagttagctgtattaatatatactcttcagtttgtatattctgtataaaatttaagtagctcaagtgatggataaaaaagcattattggaactaagtaatgggtcaaaaattgatctgcccgtattaagtggaacagtaggtcctgatgtgttaaatattaaggacttatataagaagacaggattattcacttacgatccagggtttgtttctacagcttcatgctcttctacaattacattcattgatggagatgaaggagttcttaaatataggggacataatatagctgatttggcagagaataataattttactgctgtgatttatttattgctctatggtaaattacccagttcagagcaacacaaaaaatttcttctcaaaatacaagaatcatccaaagtatcagagcaagttacaaatgtaatcaaagcatttccaaaaactgctcaccctatgtcgattttagttgcatgttttgcaaatttgtcagcgtcttaccatgaaatgcatggcaaaaatgtcaatggtgaagatttagattttggaatttctgcaatagcaaaagttcctgcaattgttgcaatgatttatagacatatcaacaatcaggaattcataaatgctaataataaattaagttatagtgagaatttcttaaatatgatatttggcagtgctgttaataataccctttttgtaaaagctctggataaaatatttactctccatgctgatcatgaacagaatgcttctacagcagctgtcagattggtagggtcagctggttctaatctatttgcaagcctgtctgcaggagttgctacactttggggtccagcacacggtggagctaatgaggcagttataaatatgttaaaagagatagagcaaagtggagatgtagatagattcattgagaaagctaaagatgataaagatccatttaagctaatgggatttggacatcgtgtttataaaaactatgatccgcgcgcgcttatattaaaggatgcttgtcatgagattttaagcaaactagagcagaacaatgaattacttgaaattgcaaaaaaacttgaagaaatagctttaaaggatgagtattttattacacgtaagttatatccaaatgttgatttttattcaggtataataatgaatgctattggtatcccttcaagtatgtttacacccatttttgcacttgcaagaaccactgggtgggttgcccagtggtatgaaatgataaacgataaagaaaccaagatttgtaggccaaggcagctataccttggcaaataaactttcattcacaattcgtcctcaaatagtctaatttcctttagctatgaaatacagcaagatgattttttactaattgatgtacgcttttttgcaacca

SEQ ID NO: 123907 - protein, 413 aa, Wolbachia pipientis
MDKKALLELSNGSKIDLPVLSGTVGPDVLNIKDLYKKTGLFTYDPGFVSTASCSSTITFIDGDEGVLKYRGHNIADLAENNNFTAVIYLLLYGKLPSSEQHKKFLLKIQESSKVSEQVTNVIKAFPKTAHPMSILVACFANLSASYHEMHGKNVNGEDLDFGISAIAKVPAIVAMIYRHINNQEFINANNKLSYSENFLNMIFGSAVNNTLFVKALDKIFTLHADHEQNASTAAVRLVGSAGSNLFASLSAGVATLWGPAHGGANEAVINMLKEIEQSGDVDRFIEKAKDDKDPFKLMGFGHRVYKNYDPRALILKDACHEILSKLEQNNELLEIAKKLEEIALKDEYFITRKLYPNVDFYSGIIMNAIGIPSSMFTPIFALARTTGWVAQWYEMINDKETKICRPRQLYLGK

SEQ ID NO: 123908 - DNA, 1119 bp, Bacillus methanolicus
  CDS (1)..(1119): transl_table=11
atgacagttacacgtggtcttgaaggggtagttgcaacaacttcttcaattagttcgataatcgatgatacactgacatatgttggctataatatcgatgatttagcggataatgctagttttgaagaagtaatctttcttttatggcaccgcaaacttcctacgaaatctgaattggaagaactaaaaatcctgctggcagaaaacgctgaacttccaaaagagattttggaccatttcaaaatgtatccgattgataaggttcatccaatggctgctcttcgttcagctgtgtcactgcttggattatatgatgaagaagctgatcttatggatgaagaggccaactatcgaaaagcaatccgccttcaggcaaagataccttcgattgtcgctgcatttgcccgtgtacgcaaagggctggagccggtcgcgccaaggaaggatttaagctttgcagcgaattttttgtatatgcttaaaggaaaagaaccggaggatattgctgttgaagcattcaataaggtgcttgttcttcatgccgatcatgagttaaatgcttctacctttactgcgagggtctgtgttgcaactttatctgatatttattccggtgtcacagcagcaattggagcgctgaaaggcccattgcacgggggtgcaaacgaagcggtaatgaaaatgctgacagaaatcggttcattggagaatgttgaaccatatattcgagaaaagcttgcgaagaaagaaaaaattatgggcttcgggcatcgggtttatcgaaaaggagatccgcgtgcaaaacacttaagggaaatgtctaaaaagctaacagagcttactggtgaacctcattggtatgaaatgtccactaagattgaagcaattgtgacaggggagaaaggtcttcctccaaatgtcgatttttattcagcgtctatatatcatagcctaggaattgaccatgatttatttacaccaatttttgctgtaagccgtatatccggttggctggcccatattttagaacaatatgaaaataaccgcttaattcgcccgcgtgccgactatatcggtcctggaatgcaaaaatttattccaattgagcaaagaggataa

SEQ ID NO: 123909 - protein, 372 aa, Bacillus methanolicus
MTVTRGLEGVVATTSSISSIIDDTLTYVGYNIDDLADNASFEEVIFLLWHRKLPTKSELEELKILLAENAELPKEILDHFKMYPIDKVHPMAALRSAVSLLGLYDEEADLMDEEANYRKAIRLQAKIPSIVAAFARVRKGLEPVAPRKDLSFAANFLYMLKGKEPEDIAVEAFNKVLVLHADHELNASTFTARVCVATLSDIYSGVTAAIGALKGPLHGGANEAVMKMLTEIGSLENVEPYIREKLAKKEKIMGFGHRVYRKGDPRAKHLREMSKKLTELTGEPHWYEMSTKIEAIVTGEKGLPPNVDFYSASIYHSLGIDHDLFTPIFAVSRISGWLAHILEQYENNRLIRPRADYIGPGMQKFIPIEQRG

SEQ ID NO: 123910 - DNA, 1212 bp, Neorickettsia helminthoeca
  CDS (1)..(1212): transl_table=11
atggacactgacgaggtcacgataaagatacaggctacggtcaaaagcagtgggggccccaatggaatattgatttcttcggagcccagaagttttatctacgatcctggttatgtctccacggcttcgtgtaaatctgagatcaccttcgtagacggtgaggagggtgtactcttgtacagaggttaccctgtagatgaacttgctactcaatgcgattttcttcgagtcgtatacctacttctgtatggtgaactcccagaccctgtccgcgcaaaagaattccgtactttcattcagaattttccacagcttccagattgcgtcctcgagaatatttgctcctttccaagggatgcacatcccatggtgattctgatttctgcttttgcagccctggcttctgctcaccatgactctgacttcgagacgcacaaagaagtgctaatcgctaatgtgccaagacttgtagcatatatttatagatatattacttctcaggacttcataccgcctgatgcatgcctttcctacgttgggaactttttttatatgatgttcggggagaaaaaacctgattatgaaagcatcttagataagattctgattctacatgcagatcatgagcagaacgcttccacatcgactgctaggatggttgtttcttctggtgcaagcccaattgctgcagtcagcgctgcaacggctacgttatggggtccactgcacggcggtgcaaatgagaaagtcctgcacatgctgggagaaatcgaaaaacaaggtgggagcgtggaggaattcattgagcgcgtcaaaagaaaagaagaaagactaatgggtttcgggcatagggtctacaagaactatgatcccagagcggtaattctgaagagtacggctcaggatattttaaagggaagttcttctattctgagtatcgcaagcaaacttgaaagtattgcttccaatgatgagtatttcataagtcgcaagctctatccgaatgtagatttctactcgggaataatactcaatgcattagggattccaacatatatgtttacacctatctttgctctcgcaaggacgtctggctgggtcgcccagataaaagagttcctaagtgacaaggagcagaaaatcgctagacctagacagatttatataggtaaacccttcaggaaagttgcctcacagagtgaaaaactctag

SEQ ID NO: 123911 - protein, 403 aa, Neorickettsia helminthoeca
MDTDEVTIKIQATVKSSGGPNGILISSEPRSFIYDPGYVSTASCKSEITFVDGEEGVLLYRGYPVDELATQCDFLRVVYLLLYGELPDPVRAKEFRTFIQNFPQLPDCVLENICSFPRDAHPMVILISAFAALASAHHDSDFETHKEVLIANVPRLVAYIYRYITSQDFIPPDACLSYVGNFFYMMFGEKKPDYESILDKILILHADHEQNASTSTARMVVSSGASPIAAVSAATATLWGPLHGGANEKVLHMLGEIEKQGGSVEEFIERVKRKEERLMGFGHRVYKNYDPRAVILKSTAQDILKGSSSILSIASKLESIASNDEYFISRKLYPNVDFYSGIILNALGIPTYMFTPIFALARTSGWVAQIKEFLSDKEQKIARPRQIYIGKPFRKVASQSEKL

SEQ ID NO: 123912 - DNA, 1323 bp, Ehrlichia risticii
  CDS (36)..(1232): transl_table=11
cattatagtactcaactggagaatattgaaagaagatgaattctgaaaaagtaaaagtaaatgtggaggaatttttaaaaagcacagctggaccctccggtgtctctgcctctttggaaccaaggggattcttttatgatccagggtatgcaaaaactgctccttgcaaatctagcattactttcatagatggtgaaaacgggatacttttgcacaggggctacccaatagaggaattggcacaaacttctgactttttgcaggttggctaccttctcattaacggcaaacttccagattccattgctacgcgagagtttgaagagaagataaagcacgtaccgcagcttcctgaatgcgtcttaaaaaatatccgttctttcccaacaagtgcacacccgatggcagttttaatctctgcacttgcttcgctcgcctcagtgtatggagaaatggactttcatgagaagaagttacttctagttgcctacacgccatggcttgtagcgtatatataccgacacatcaattctcaggagttcattgaacctgacatcaggcttccttacactgagaatttcctgtacatgatgtttggtgagaaaaagcccaaagatgcggaaatcttggacaaaatctttatcttgcatgcagaccatggtcaaactgcttctacctctgttgcacggatggttgtatcctcaggagcaagcccaattgtcgcatgttctgcggctacagctagtttatggggaccactgcacggtggcgcaaatgagcgagtcctagaaatgttgagaggtatcattgaaagcggtgagaacgtagagaactttattgagcgcgttaaaagaaaagaagagagacttatgggtttcgggcacagggtgtataaaaactatgatcctcgtgcagccatattgaagcaaaaagctcatgatgtgctaaaagccgattcacctattctaaaaactgctggcaaacttgaaacgattgcaacaagggaagagtactttctgagtcgcaaattataccctaatgtcgacttctattcgggaatagtgctggacgcactagggataccatcctgcatgttcacaccgattttcgcacttgctagaacagtaggttgggttgcacaaatcgcagaattcttgagtgacagtgaacagaaactttgtagacctagacaaatttacgtaggcgaaccaagaagaagcgtacacggttaatcagcttttagtggttctccgcatgagcgtggaaccacataaaaattcccaaaggaccactttgtaccacattttgggcgttgtacaccga

SEQ ID NO: 123913 - protein, 398 aa, Ehrlichia risticii
MNSEKVKVNVEEFLKSTAGPSGVSASLEPRGFFYDPGYAKTAPCKSSITFIDGENGILLHRGYPIEELAQTSDFLQVGYLLINGKLPDSIATREFEEKIKHVPQLPECVLKNIRSFPTSAHPMAVLISALASLASVYGEMDFHEKKLLLVAYTPWLVAYIYRHINSQEFIEPDIRLPYTENFLYMMFGEKKPKDAEILDKIFILHADHGQTASTSVARMVVSSGASPIVACSAATASLWGPLHGGANERVLEMLRGIIESGENVENFIERVKRKEERLMGFGHRVYKNYDPRAAILKQKAHDVLKADSPILKTAGKLETIATREEYFLSRKLYPNVDFYSGIVLDALGIPSCMFTPIFALARTVGWVAQIAEFLSDSEQKLCRPRQIYVGEPRRSVHG

SEQ ID NO: 123914 - DNA, 1251 bp, Ehrlichia muris
  CDS (1)..(1251): transl_table=11
atgatcaaagaagcagtattagaattggatgatcaaaggataaaattgccagtgttatatgatactaatgggaataaagctgtagatattacttctttgtataaagacacaggagtgttaacttatgatccaggctttatgtctactgctgcttgtgaatcaaagattacgtttattgatggaaataaaggtatattgtgttatagaggacataacatagtagatttagtaaatggaaataagagttttgtagaaataatatatttgctattttatggtgtttttcctagttctgaggatttacaaaattttacattacagatttctcaagaatatacacctcctcaggtagtgtatgatgttataaaggcattttcacaagattcacatcctatggctatattaatggcatgtttttctgccttagcagcatattatcatgatcgagaagctgataaagatgaattaaagtgtgctaaattagctgtagctaaaattgcaagtatagtagcgctgatttatagatatataacgaatcaggatttcattacagctgatacaaaattatcttacagtgaaaatttcgtgcatatgatgtttgatatttcttcctataaattcactcaggttgttgctaaagctttggatattatctttgtattacatgctgatcatgaacaaaatgcttctactgctactgttaggttagctggttctgcaggagcagatttatttgcttgtttagtggcaggaacagcaactttatggggtccagctcatggtggagcaaatgaagctgtaattaatatgttaatgacaattgaaaaaccaagtaatgtaaaacagtttattcaaaaagtgaaggatggtagtaagactacaagattaatgggttttggtcatagagtatataaaaattatgatccacgtgctaaaatgatgtgtgaaatttgtagagaagtgttaaatgatttaggtatagatgatccattattagaagtagcggtagaattagaaaacattgcattacaagacagctatttcattgagcgtaatttataccctaatgtagatttttattctggaattgttctaaaagctatcggaattccagtaaagatgtttactacattatttgcacttgctagaacatctggttggtctgctcaatggtatgaaatggtggcaaataaaaattataaaatatgtcgtccacgtcagttatatactggccatattacaaaaatctag

SEQ ID NO: 123915 - protein, 416 aa, Ehrlichia muris
MIKEAVLELDDQRIKLPVLYDTNGNKAVDITSLYKDTGVLTYDPGFMSTAACESKITFIDGNKGILCYRGHNIVDLVNGNKSFVEIIYLLFYGVFPSSEDLQNFTLQISQEYTPPQVVYDVIKAFSQDSHPMAILMACFSALAAYYHDREADKDELKCAKLAVAKIASIVALIYRYITNQDFITADTKLSYSENFVHMMFDISSYKFTQVVAKALDIIFVLHADHEQNASTATVRLAGSAGADLFACLVAGTATLWGPAHGGANEAVINMLMTIEKPSNVKQFIQKVKDGSKTTRLMGFGHRVYKNYDPRAKMMCEICREVLNDLGIDDPLLEVAVELENIALQDSYFIERNLYPNVDFYSGIVLKAIGIPVKMFTTLFALARTSGWSAQWYEMVANKNYKICRPRQLYTGHITKI

SEQ ID NO: 123916 - DNA, 1859 bp, Anaplasma centrale
  CDS (245)..(1498): transl_table=11
tggttatgtatgcgcgctcagagcggtgacttcgagtgatggtatgacggcaaactgttttccctttggtgaatctgacgagcaaaagtcaggatttcttgggtttttgcagagggtgagcggagctatagtaagcaaggtgcagggagtaaatagggtggtatacgacataacgtcaaagcctcctgcgactattgagtgggagtgattgagtgtccagtaaacttgttgtcgggggaactgtatggtagagaaagcgattttggagtgtggagattgcaaggttagcctacccgtgatgcgtggcaacgatgggacgctcgccatcgatgttactggtctgtacaaggatgcaaaaatccttacttatgatccggggttcctgtctactgctgcgtgcaggtctgagataacctttatagatggggacaagggtattctgcgtaccagagggtatgacattgcagatcttgtcacgacaggtggcgggttctgcagcgttgctcatctcctgttgcacggtgccctaccgcaagggcgcgagctggatgattttgcttccgctgtgggcaatgagtgccatgtacccgcgcaggtggtaaacgtgattaaatctttgcccagcagtgcgcatcccatggcgatactaatcgcgagttttgttacacttgccgcctgctaccacgccgagaattccatagatccactaaagagcgcaatagtagctatatccaaagtacccgggattgttgcagccatctataggcacacttcaggtatgcccgctgtggaggcggacccaaatctggggtacgtgcagaactttgtgaaaatgatgtttggtgatctgggtagtacgcgtcagagcgttatatgcagggcgctagagtcgatattcataatgcatgcggaccacgaacaaaacgcctctaccgctacagtgagagtaaccggttctgctggggcgaatctatttgcctgcttgagtgcaggtgctgcaactttgtgggggccagctcatgggggagctaacgaggcggtcgtcaggatgcttgaggaaattggcagccccgaaagggtgggcatgttcattcagagagtgaaggacaaaaaggatggagtgaggcttatgggctttggccatagggtctacaagaattacgatccaagagcgcttatcataagggacatttgcaaagagacactgcacgagctcggcacaagcgatcctctgttggatgttgcttttgagcttgaaagagtggccctgcaggacgagtatttcgtcaagcgcttcctgtatccgaacgttgacttttactccggtattgtccttaaggcaataggagtcccagtgaatatgttcactgcgttttttgctctagctaggactactgggtggtctgctcagtggtatgaaatggtgactgagcatggtgacagcaatagaatctgtcggccgcgccaactgtatgttggcaatatgaacgcaaagtgagagcctgctggttgcggtatgctcgcaccatgcttttattagacacctagcttctctgcgtaacttgtaacagatagtgcgcccatgtgttgcaggtgtgtgcgccgtgggttagatgcgaaccctgcatgtgcttttcggcgcctgtggcgactcggcctggttttggtgggcttgcacacgataaatttaggtggtttacgcacataaaggtagatataatcgctgccggcttcgcagttctggggttctgttttggcgtatgtcaaaatgcttgaagacgtgctcgggcgtcatgtactctattgaagactggttttccgatcggtttaccaaataccctgtggttttgagcacctct

SEQ ID NO: 123917 - protein, 417 aa, Anaplasma centrale
MVEKAILECGDCKVSLPVMRGNDGTLAIDVTGLYKDAKILTYDPGFLSTAACRSEITFIDGDKGILRTRGYDIADLVTTGGGFCSVAHLLLHGALPQGRELDDFASAVGNECHVPAQVVNVIKSLPSSAHPMAILIASFVTLAACYHAENSIDPLKSAIVAISKVPGIVAAIYRHTSGMPAVEADPNLGYVQNFVKMMFGDLGSTRQSVICRALESIFIMHADHEQNASTATVRVTGSAGANLFACLSAGAATLWGPAHGGANEAVVRMLEEIGSPERVGMFIQRVKDKKDGVRLMGFGHRVYKNYDPRALIIRDICKETLHELGTSDPLLDVAFELERVALQDEYFVKRFLYPNVDFYSGIVLKAIGVPVNMFTAFFALARTTGWSAQWYEMVTEHGDSNRICRPRQLYVGNMNAK

SEQ ID NO: 123918 - DNA, 1236 bp, Anaplasma phagocytophilum
  CDS (1)..(1236): transl_table=11
atggtagaaaaagctgttttggagtgtggagaccgtaggattagtttgccggttttacgcggcacggacgggaccccagtggttgatatcacaaccctatatagggagaacaatgtgctcacatatgacccgggttttatgtccactgctgcttgcagatcagagataactttcattgatggaaacaagggaactctacgctacaggggtattgatatagaaaatctgatcggtacacccaatagcttcagtagtatagtgtatttgttattgaagggtactctgccttctgaaactgagcatgaagagtttgcgcggattttgggcgctgaatacgatgtgcctgaacaagttatgaacgttattagatcattccctcgagattcgcatcctatggctattctcatagctagcttttctgctttagctgctaattaccacgcaagtcgcattgatccgcttacaggtgctatcatcgcaattgcgaaagtacccggcattgttgcaagtatttataggcacactgcaaatctagattttatacaagctgacgcaaacttagagtacacgcatcactttatcaggatgatgtttggcgacatggatgatgcacatcgtgatattatgcacaaagctctagatgcaatttttataatgcatgcagatcatgagcagaatgcctctacttccactgtgcgtatgtcaggatcttctggagcaggtttgtttgcatgtttgtgcgcgggagtggccactctgtgggggccagcgcatgggggcgcaaatgaggctgttataaagatgcttgctgagattggttcaccagaaaatgtttcgtcatttatcgacaaggtaaaaaacaacaagggcaaaaatcgtcttatggggtttgggcaccgtgtttataaaagctatgaccctagagcgcgtgttttacgtacaatctgtaaagatgtattagattctctaggtagagatgagaatttgctagctgttgcagaagagttagaaagtcaggctttgcgagatgagtattttattgagcgcaagttgtacccaaatgtcgacttttactcaggtatagtgctaagagctatgggggttccggtagatatgtatactgcattctttgccttggcacggacgtctggatgggcatctcaatggtatgagatgattcaaagtgatgaagggaaacggatcagccgcccacgccagttatacacaggaaaataa

SEQ ID NO: 123919 - protein, 411 aa, Anaplasma phagocytophilum
MVEKAVLECGDRRISLPVLRGTDGTPVVDITTLYRENNVLTYDPGFMSTAACRSEITFIDGNKGTLRYRGIDIENLIGTPNSFSSIVYLLLKGTLPSETEHEEFARILGAEYDVPEQVMNVIRSFPRDSHPMAILIASFSALAANYHASRIDPLTGAIIAIAKVPGIVASIYRHTANLDFIQADANLEYTHHFIRMMFGDMDDAHRDIMHKALDAIFIMHADHEQNASTSTVRMSGSSGAGLFACLCAGVATLWGPAHGGANEAVIKMLAEIGSPENVSSFIDKVKNNKGKNRLMGFGHRVYKSYDPRARVLRTICKDVLDSLGRDENLLAVAEELESQALRDEYFIERKLYPNVDFYSGIVLRAMGVPVDMYTAFFALARTSGWASQWYEMIQSDEGKRISRPRQLYTGK

SEQ ID NO: 123920 - DNA, 1236 bp, Anaplasma phagocytophilum
  CDS (1)..(1236): transl_table=11
atggtagaaaaagctgttttggagtgtggagaccgtaggattagtttgccggttttacgcggcacggacgggaccccagtggttgatatcacaaccctatatagggagaacaatgtgctcacatatgacccgggttttatgtccactgctgcttgcagatcagagataactttcattgatggaaacaagggaactctacgctacaggggtattgatatagaaaatctgatcggtacacccaatagcttcagtagtatagtgtatttgttattgaatggtactctgccttctgaaactgagcatgaagagtttgcgcggattttgggcgctgaatacgatgtgcctgaacaagttatgaacgttattagatcattccctcgagattcgcatcctatggctattctcatagctagcttttctgctttagctgctaattaccacgcaagtcgcattgatccgcttacaggtgctatcatcgcaattgcgaaagtacccggcattgttgcaagtatttataggcacactgcaaatctagattttatacaagctgacgcaaacttagagtacacgcatcactttatcaggatgatgtttggcgacatggatgatgcacatcgtgatattatgcacaaagctctagatgcaatttttataatgcacgcagatcatgagcagaatgcctctacttccactgtgcgtatgacaggatcttctggagcaggtttatttgcatgtttgtgcgcaggagtggccactctgtgggggccagcgcatgggggcgcaaatgaggctgttataaagatgcttgctgagattggttcaccagaaaatgtttcgtcatttatcgacaaggtaaaaaacaacaagggcaaaagtcgtcttatggggttcgggcaccgtgtttataaaagctatgaccctagagcgcgtgttttgcgtacaatctgtaaagatgtattagattctctaggtagagatgagaatttgctagctgttgcagaagagttagaaagtcaggctttgcaggatgagtattttattgagcgcaagttgtacccaaatgtcgacttttactcaggtatagtgctaagagctatgggggttccggtagatatgtatactgcattctttgccttggcacggacgtctggatgggcatctcaatggtatgagatgattcaaagtgatgaagggaaacggatcagccgcccacgccagttatacacaggaaaataa

SEQ ID NO: 123921 - protein, 411 aa, Anaplasma phagocytophilum
MVEKAVLECGDRRISLPVLRGTDGTPVVDITTLYRENNVLTYDPGFMSTAACRSEITFIDGNKGTLRYRGIDIENLIGTPNSFSSIVYLLLNGTLPSETEHEEFARILGAEYDVPEQVMNVIRSFPRDSHPMAILIASFSALAANYHASRIDPLTGAIIAIAKVPGIVASIYRHTANLDFIQADANLEYTHHFIRMMFGDMDDAHRDIMHKALDAIFIMHADHEQNASTSTVRMTGSSGAGLFACLCAGVATLWGPAHGGANEAVIKMLAEIGSPENVSSFIDKVKNNKGKSRLMGFGHRVYKSYDPRARVLRTICKDVLDSLGRDENLLAVAEELESQALQDEYFIERKLYPNVDFYSGIVLRAMGVPVDMYTAFFALARTSGWASQWYEMIQSDEGKRISRPRQLYTGK

SEQ ID NO: 123922 - DNA, 1422 bp, Prunus persica
  CDS (1)..(1422)
  misc_feature (435)..(435): k is g or t
  misc_feature (436)..(436): k is g or t
  misc_feature (580)..(580): w is a or t
atggtgttcttcaggagtgtcaatgcgctttccaagctccgttctcgtcttggccaacagtcgaatctcagagattccgtcagatggcttcaaacgcaaacctccacagatcttgaccttcgttctcagttgaaggaattgattccagaacaacaggaacgtctgaagaaaatcaaggcagaatatggaaaagttcaactgggcaatatcactgttgatatggttcttggggggatgagggggatgacagggttgctgtgggaaacttccttacttgacccagatgaggggattcgtttcaggggtttgtcaattccagaatgccagaaagtattaccaggtgcaaagcctggtggggaacctttgcctgagggtcttctgtggctacttttaacaggaaaggtaccaagcaaagagcaagttgatgcattatckkaggaattgaggagccgtgccgcagttccagattatgtgtataaggccattgatgctctgcctattacagcacatccaatgactcagtttaccaccggtgttatggccctccaggttcagagtgaattccagaaggcatacgatwaggggatttataaatcgaagtactgggagccaacttttgaggattcacttagcttgattgcacaactgccagtagtagcttcttatgtttaccagagaatttttaaggatggaaaagtaatacctgttgatgactccctggattatggtgcaaatttttcacacttgtggggctttgacgatcccaagatgcatgagcttatgaggctttatgtcaccattcatagtgatcacgaaggtgggaatgtcagtgctcacaccggccaccttgttgctagtgcactgtcagacccttatctttcatttgcagctgcattaaatgggttggctggcccactccatggtttggctaatcaggaagttttgctctggataaaatctgtggtagatgaagttggggagaacgtaactacagagcagttgaaagattatgtctggaaaacattaaacagtgggaaggttgttcctggttttggacacggagtcttgcgtaaaacagatccacgatactcatgtcaacgggagtttgcattaaagcacttgcctgatgatccgctgtttcagctggtctccaagctttatgaagtcgtgcctcccattcttatcgaactaggcaaggttaaaaacccctggcccaatgtagatgctcacagtggagttctgttgaaccattttggtttgaccgaggcaagattttttactgttctctttggcgtatcaaggagtatagggattggttctcagctgatatgggaccgggctcttggtttgcctcttgaaaggccaaaaagcgttacgatggaatcacttgaaaattactgcaagaaagcagcttcatcctga

SEQ ID NO: 123923 - protein, 473 aa, Prunus persica; identical to SEQ ID NO: 93166
  misc_feature (146)..(146): The Xaa at location 146 stands for Stop, or Glu.
  misc_feature (194)..(194): The Xaa at location 194 stands for Stop, or Lys.

SEQ ID NO: 123924 - DNA, 1419 bp, Oryza sativa
  CDS (1)..(1419)
atggcgttcttcaggggcctgaccgcggtgtcgaggcttcgatcccgcgtggcacaggaggccaccacgcttggtggtgtgcgatggctgcagatgcagagcgcatctgatcttgatctcaagtcccagctgcaggaattgattcctgaacaacaggaccgcttaaagaaacttaaatcggagcatggaaaggtccaacttggaaatataacagtcgatatggtccttggtgggatgagagggatgactggaatgctttgggaaacatcattgcttgacccggatgagggtattcgttttaggggtctctcgattccagagtgccagaaagtgctgccgacagcagttaaagatggggagcctttgcctgagggtctactttggcttcttttgaccggaaaggtgccaaccaaagagcaagttgatgctctatcaaaggaattggctagtcgttcgagtgttccaggtcatgtgtataaggcaatcgatgctctccctgtaactgctcatccgatgacccagtttaccacaggagtgatggcacttcaggtggagagtgagtttcaaaaagcctatgacaaaggaatgtcaaaatcaaagttctgggagcctacctatgaagattgcttaaatttgatagctcgccttccagcagtggcttcatatgtttaccggaggatattcaagggagggaaaactatagcagctgataatgcactggattatgcagcaaatttttcacacatgcttgggtttgatgatcccaaaatgcttgagttgatgcgactatatataacaatccacactgatcatgaaggtggaaacgtcagtgctcatactggacatctggttggaagtgctctgtcagacccttatctttcttttgcagctgcactgaatggtttagctggaccgttgcacggcctggctaatcaggaagtgttgttgtggatcaaatctgtaataggtgagactggtagtgacgttacaactgatcaactcaaagagtatgtgtggaagacactaaaaagtggaaaggttgttcctggctttggtcatggagttctacgtaagaccgatccacggtatacatgtcagagggagtttgctttgaagtacttgcctgaggatccacttttccaactggtctccaagttgtatgaagttgtgcctcctatcctcactgagcttggcaaggtcaaaaacccatggcctaatgttgatgctcacagcggagttctactgaaccactttggattatctgaagctcggtattacactgttcttttcggagtttcaaggagcattggaataggatctcagctcatttgggaccgtgctcttggcctgccgctcgaaagaccgaagagtgtcaccatggagtggctggagaaccactgcaagaaggttgctgcttga

SEQ ID NO: 123925 - protein, 472 aa, Oryza sativa; identical to SEQ ID NO: 93168

SEQ ID NO: 123926 - DNA, 1134 bp, Thermus thermophilus
  CDS (1)..(1134): transl_table=11
atggaagtggcacgcggtctggaaggcgttctcttcacggaaagccggatgtgctacattgacggccagcaggggaagctctactactacggcattcccatccaggagctggcggagaagagcagctttgaggaaaccaccttcctcctcctccacgggagactgccgcgaaggcaggagctggaggagttctcggccgccctcgcccggcgccgcgccatgcccgcccaccttctggagtccttcaagcgctaccccgtctccgcccaccccatgagcttcctgcgcacggcggtctccgagttcgggatgctggaccccaccgagggggacatctcccgggaggccctctacgagaaggggcttgacctcatcgccaagttcgccaccatcgtggccgccaacaagcgcctcaaggagggcaaggagcccatccctccccgggaggacctctcccacgccgccaacttcctctacatggcgaacggggtggagccctcccccgagcaggcccgcctcatggacgcggccctcatcctccacgccgagcacggcttcaacgccagcaccttcaccgccatcgccgccttctccacggagaccgacctctactcggccatcaccgccgccgtggcctccctgaaggggccgcgccacggcggggccaacgaggccgtgatgcgcatgatccaggagatcggcacccccgagcgggcccgggagtgggtgcgggagaagctggccaagaaggagcgcatcatgggcatgggccaccgggtctacaaggcctttgaccccagggccggggtcctggaaaagctcgcccggttggtggcggagaagcacggccactccaaggagtaccagatcctgaagatcgtggaggaggaggcggggaaggtcctgaaccccaggggcatctaccccaacgtggacttctactccggggtggtctactccgacctgggcttcagcctggagttcttcacccccatcttcgccgtggcccggatctcgggctgggtggggcacatcctggagtaccaggagctggacaaccgcctcctccgccccggggccaagtacgtgggggagctggacgtgccctacgtccccctcgaggcccgggagtag

SEQ ID NO: 123927 - protein, 377 aa, Thermus thermophilus
MEVARGLEGVLFTESRMCYIDGQQGKLYYYGIPIQELAEKSSFEETTFLLLHGRLPRRQELEEFSAALARRRAMPAHLLESFKRYPVSAHPMSFLRTAVSEFGMLDPTEGDISREALYEKGLDLIAKFATIVAANKRLKEGKEPIPPREDLSHAANFLYMANGVEPSPEQARLMDAALILHAEHGFNASTFTAIAAFSTETDLYSAITAAVASLKGPRHGGANEAVMRMIQEIGTPERAREWVREKLAKKERIMGMGHRVYKAFDPRAGVLEKLARLVAEKHGHSKEYQILKIVEEEAGKVLNPRGIYPNVDFYSGVVYSDLGFSLEFFTPIFAVARISGWVGHILEYQELDNRLLRPGAKYVGELDVPYVPLEARE

SEQ ID NO: 123928 - DNA, 1326 bp, Mycobacterium smegmatis
  CDS (1)..(1326): transl_table=11
gtgtgtatgctcaaacagtcccagccgaccaggcgtccgacacggcctcagcgtaccttcacctaccccggtggaaagctggagctcccgatcctgaaggccaccgaggggacagactcggtcgctctcggcaagttcctggccgagacaaacctgaccacgttcgacagtgggttcatgaacaccgcgtcgacgaagtcggccatcacctacatcgacggtgagcagggcatcctccgctaccggggcatcccgatcgagcagctcgcggagaagtcgaccttcatcgaggtgagctacctgctcatctacggcgagctcccgaccccgacccagctcgaggagttcaccaccaagatccagcggcacaccctgctgcacgaggatctcaagcgcttcttcgacggcttcccccgcaacgcgcaccccatgccggtgctgtcgagcgcggtcaacgccctgtcggcctactaccaggactcgctcgatcccaaggacgacgagcaggtcgagctgtcgaccatccgcctcctggcgaagctgccgaccatcgccgcctacgcctacaagaagtcggccggtcagcctttcctgtacccggacaactcgctgagcctcgtcgagaacttcctgcggatgaccttcggcttcccggccgagccctacgaggtcaacccggatgtcgccaaggcgctcgacatgctgttcatcctgcatgccgaccacgagcagaactgctcgacctcgaccgtccgcctcgtcggctcgtcgcaggccaacctcttcacctcgatctcgggcggcatcaacgccctctggggcccgctgcacggcggcgccaaccaggcggtcctcgagatgctcgacgccatcaaggccgacggcggcgacaccaagaagttcatggagcgggtcaagaacaaggaagccggcgtcaagctgatgggcttcggtcaccgcgtctacaagaactacgatccgcgcgccgcgatcgtgaagaagaccgccgaccagatcctggaaaccctcggtgtccaggacgatctgctcgagatcgccaagggtctcgaagaggtcgccctcaacgacgactacttcatcgagcgcaagctgtacccgaacgtggacttctacaccggtgtcatctaccgtgcgatgggcttcccgacgcgcatgttcaccgttctgttcgcgttgggtcgccttccgggctggatcgcccactggcgtgagatgcacgaggatccgaccaccaagatcggccgtccgcgtcagctctacaccggctacaccgagcgcgactacgtgccgatgagcgatcgctga

SEQ ID NO: 123929 - protein, 441 aa, Mycobacterium smegmatis
MCMLKQSQPTRRPTRPQRTFTYPGGKLELPILKATEGTDSVALGKFLAETNLTTFDSGFMNTASTKSAITYIDGEQGILRYRGIPIEQLAEKSTFIEVSYLLIYGELPTPTQLEEFTTKIQRHTLLHEDLKRFFDGFPRNAHPMPVLSSAVNALSAYYQDSLDPKDDEQVELSTIRLLAKLPTIAAYAYKKSAGQPFLYPDNSLSLVENFLRMTFGFPAEPYEVNPDVAKALDMLFILHADHEQNCSTSTVRLVGSSQANLFTSISGGINALWGPLHGGANQAVLEMLDAIKADGGDTKKFMERVKNKEAGVKLMGFGHRVYKNYDPRAAIVKKTADQILETLGVQDDLLEIAKGLEEVALNDDYFIERKLYPNVDFYTGVIYRAMGFPTRMFTVLFALGRLPGWIAHWREMHEDPTTKIGRPRQLYTGYTERDYVPMSDR

SEQ ID NO: 123930 - DNA, 1137 bp, Anabaena sp
  CDS (1)..(1137): transl_table=11
atgatggtgtgcgaatacaagcctggtttagaaggcattcccgccgcccaatcgagtatcagttatgtagatgggcaaaagggaatactagaatatcgtggcatccggattgaggatttagcccagcaaagtacttttctggagactgcttatcttttaatctggggtgagttgccaacaaaagaagaattgcaagtatttgaggaggaagtccgtcttcatcggcggattaaataccggattcgggatatgatgaagtgctttcccgaatctggtcatccaatggatgcactccaagcctctgcggcggctttaggcttgttttactcccgtcgagatttgcacaatcgctgctatattcgggatgctgtagtgcggctaatagctactattccgacgatggtagctgcattccagttgatgcggaaaggtaatgaccccgttaagccccgtgatgatttagattattccgccaattttctctacatgctcaacgagaaagaaccggatgctttggcggcaaaaatctttgatatctgcttgattctccatgtcgagcatacgatgaatgcttccacctttagtgctagggtaacagcttccaccttgactgacccgtatgcggtggttgctagcgctgtggggactttaggagggcctttacacggtggagccaatgaagaagtaatccagatgttggaagagattggttccgtggagaatgtgcgttcttatgtcgaggagaggttgcaacgtaaagacaagctcatgggctttggacatcgtgtctacaaagttaaagacccacgggcgacaattttgcaaggcctcgcagaacagttgtttgccaagttcggcgcagataagtattacgacatcgcccaagaaatggaacgggtagtcgaagagaaacttggtcataaagggatttatcccaatgttgacttctactctggtttagtgtatcggaagatgggtattcctacagacttgtttacaccaatctttgcgatcgctcgtgttgctggttggttagcccactggaaagaacaactcgaagagaaccgcattttccgtcctacccaggtttacaacggcaaacacagtgttacctacacccccattgaccaacgttaa

SEQ ID NO: 123931 - protein, 378 aa, Anabaena sp
MMVCEYKPGLEGIPAAQSSISYVDGQKGILEYRGIRIEDLAQQSTFLETAYLLIWGELPTKEELQVFEEEVRLHRRIKYRIRDMMKCFPESGHPMDALQASAAALGLFYSRRDLHNRCYIRDAVVRLIATIPTMVAAFQLMRKGNDPVKPRDDLDYSANFLYMLNEKEPDALAAKIFDICLILHVEHTMNASTFSARVTASTLTDPYAVVASAVGTLGGPLHGGANEEVIQMLEEIGSVENVRSYVEERLQRKDKLMGFGHRVYKVKDPRATILQGLAEQLFAKFGADKYYDIAQEMERVVEEKLGHKGIYPNVDFYSGLVYRKMGIPTDLFTPIFAIARVAGWLAHWKEQLEENRIFRPTQVYNGKHSVTYTPIDQR

SEQ ID NO: 123932 - DNA, 1486 bp, Arabidopsis thaliana
  CDS (1)..(1443)
atggagatttcggagagagctagagctcgattagccgttctcaatgcgcacttgacagtatctgagccgaatcaggtgttgccagcgatcgaaccatggtgcacatcggctcacataaccgctgcaccgcatggatcgcttaaaggaaatttgaagatcgtcgatgagcgtacggggaatgaatatcaggtcccagtctcagagcatggtaccgttaaaaccgttgatctcaagaagataacgacagggaaggatgacaaggggcttaacttatacgatcctggttacttaaacacggctcctgttcgatcttcgatttcttacatcgatggagatgagggaatcctacgttatcggggatacccagttgaggagttggctgagaaaagtacttatacagaggttacttatctcctaatttatgggaatctgccttctcaaagacagctagctgattgggagtttgcgatttctcagaattcagctgtgccacaaggagtattggatatgatacagtccatgcctaatgatgtacatccagtaggagctcttgtcactgcaatgagtgcactttccatcttttatcctgatgcaaatccgtctcttatgggcctaggtgtttacaagtcaaaacaagttcgtgataaacagattgttcgtgttcttggacaggccccaacaattgcagcagctgcttatttgaggaaggcaggcaagcctcctgttcaacctttgagcaacctttcttattcagagaatttcctctatatggtggaatcaatgggagataggtcttacaagcctaatcctcgtttggctcgagtgctggacatcctcttcatactgcaagctgaacatgaaatgaactgctctactgctgctgctaggcacctttcctctagtggtggtgatgtgtatactgctgtttcgggaggtgttggagccatttatggtccccttcatggtggtgcagttgaggctacgattaacatgttatcagagattgggactgttgaaaatattccagagttcattgaaagcgtgaagaataagaagaggaggttgtcgggttttggacaccgcatttacaaaaactacgatcccagaggaaaagtcgttaagaaactggcggatgaagtgttctccattcttggaagggatcctctggttgaggtaggagatgctctagagaaggcggcactttctgatgaatattttgttaagagaaagctgtacccaaatgttgatttctactctggattaatcaatagggcaatgggaatcccatcatcattcaccgcagtatcacgtatcgctggatacttgtcacactggcgtgagtctttagatgatcctgacacaaagatcatgagaccccaacaggtctatactggagcggggataaggcattacgagacagtgagagaaagaaccaagctgtgattcggatttggatcagttgggtcaggtttccatttcgaatgca

SEQ ID NO: 123933 - protein, 480 aa, Arabidopsis thaliana
MEISERARARLAVLNAHLTVSEPNQVLPAIEPWCTSAHITAAPHGSLKGNLKIVDERTGNEYQVPVSEHGTVKTVDLKKITTGKDDKGLNLYDPGYLNTAPVRSSISYIDGDEGILRYRGYPVEELAEKSTYTEVTYLLIYGNLPSQRQLADWEFAISQNSAVPQGVLDMIQSMPNDVHPVGALVTAMSALSIFYPDANPSLMGLGVYKSKQVRDKQIVRVLGQAPTIAAAAYLRKAGKPPVQPLSNLSYSENFLYMVESMGDRSYKPNPRLARVLDILFILQAEHEMNCSTAAARHLSSSGGDVYTAVSGGVGAIYGPLHGGAVEATINMLSEIGTVENIPEFIESVKNKKRRLSGFGHRIYKNYDPRGKVVKKLADEVFSILGRDPLVEVGDALEKAALSDEYFVKRKLYPNVDFYSGLINRAMGIPSSFTAVSRIAGYLSHWRESLDDPDTKIMRPQQVYTGAGIRHYETVRERTKL

SEQ ID NO: 123934 - DNA, 1440 bp, Saccharomyces cerevisiae; identical to SEQ ID NO: 93175
  CDS (1)..(1440)

SEQ ID NO: 123935 - protein, 479 aa, Saccharomyces cerevisiae; identical to SEQ ID NO: 93176

SEQ ID NO: 123936 - DNA, 1545 bp, Arabidopsis thaliana
  CDS (1)..(1545)
atggagatttcgcagagagtgaaagctagattagccgttctcaccgcgcatttggcggtgtctgataccgtcggattggaacaggtgttgccggcgatcgcgccatggtgtacatcggctcacattaccgctgcacctcatggatcactcaaaggaaacttgacgatcgtcgatgagcgtacggggaagaaatatcaggtccctgtctcagagcatggtaccgttaaagccgttgatctcaagaagataacgacggggaaggatgataaggggctgaagttgtacgatcctggttacttgaacacggctccggttcgatcttcgatttgttacatcgacggagatgaaggaatcttacgttatcggggatacccaattgaagagttggctgagagcagtacttttattgaggttgcttatctcctcatgtatggaaatctgccttctcaaagtcagctagctgattgggagttcactgtttctcagcattcagctgtgccacaaggagtattggatatcatacagtccatgcctcatgatgcacacccaatgggagttcttgtgagtgccatgagtgcactttctatctttcaccctgatgcaaatcctgctcttagtggccaagacatttacaagtcaaaacaagttcgtgataaacagattgttcgcattctcggaaaggcaccaacaattgcagcagctgcttatttgaggacggcaggcaggcctcctgttcttccttcggccaacctttcttattcagagaatttcctctatatgctggattcaatgggcaataggtcttacaagcctaatcctcgtttggctcgagtgctggacatcctcttcatactgcatgctgaacatgaaatgaactgctctactgctgctgctcggcatcttgcctctagtggtgttgatgtgtacaccgcatgtgctggagctgttggggcgctttatggtccacttcatggtggcgcgaacgaggccgtgcttaagatgttagcagagattgggactgctgaaaatattccagatttcattgaaggcgtgaagaacagaaagaggaagatgtcaggttttggacatcgtgtttacaaaaactatgacccccgagcaaaagttataaaaaaactggcagatgaagtgttctccattgttggtagggatcctctcatcgaggtagcagttgctctagagaaggcggcactgtctgatgaatattttgttaagagaaagctgtacccaaatgttgatttctactctggattaatctatagggcaatgggattcccaccagaattcttcacagtcctgttcgcagtcccgcgtatggctggatacttgtcacactggcgtgagtcgttagatgatcctgacactaggatcatgagaccccaacaggcctatactggagtgtggatgaggcattacgagccagtgagagaacgaacgttatcaagtgattcggataaggataagtttggtcaagtttccatttcgaatgcatcaagaaggcgtttagctggatcatctgccctttag

SEQ ID NO: 123937 - protein, 514 aa, Arabidopsis thaliana
MEISQRVKARLAVLTAHLAVSDTVGLEQVLPAIAPWCTSAHITAAPHGSLKGNLTIVDERTGKKYQVPVSEHGTVKAVDLKKITTGKDDKGLKLYDPGYLNTAPVRSSICYIDGDEGILRYRGYPIEELAESSTFIEVAYLLMYGNLPSQSQLADWEFTVSQHSAVPQGVLDIIQSMPHDAHPMGVLVSAMSALSIFHPDANPALSGQDIYKSKQVRDKQIVRILGKAPTIAAAAYLRTAGRPPVLPSANLSYSENFLYMLDSMGNRSYKPNPRLARVLDILFILHAEHEMNCSTAAARHLASSGVDVYTACAGAVGALYGPLHGGANEAVLKMLAEIGTAENIPDFIEGVKNRKRKMSGFGHRVYKNYDPRAKVIKKLADEVFSIVGRDPLIEVAVALEKAALSDEYFVKRKLYPNVDFYSGLIYRAMGFPPEFFTVLFAVPRMAGYLSHWRESLDDPDTRIMRPQQAYTGVWMRHYEPVRERTLSSDSDKDKFGQVSISNASRRRLAGSSAL

SEQ ID NO: 123938 - DNA, 1119 bp, Bacillus subtilis
  CDS (1)..(1119): transl_table=11
atgacagcgacacgcggtcttgaaggggttgtagcaacaacatcatctgttagttctattattgatgatacccttacatatgtggggtatgatatcgatgatttgacagagaatgcaagttttgaagaaatcatctacttgctttggcatctaaggctgccaaacaaaaaagagcttgaagagttaaagcagcagcttgcaaaggaagctgccgttccgcaagaaattattgagcacttcaaatcttattccctcgaaaatgttcatcccatggctgctcttcggacagcaatttcattactaggcctgcttgacagcgaggctgataccatgaacccggaagccaactacagaaaggcgatccgccttcaggcaaaggtgcctggcctggttgcagcgttttccagaattcgcaagggtcttgagcctgttgaaccgagagaagattacggtattgcggagaattttctttacacattaaacggtgaagagccttcaccaattgaagttgaagccttcaacaaagcattgattttacatgctgaccatgagctgaacgcgtcaacgttcacagcgagggtctgcgtcgcaacactttctgacatctattcaggcattactgcagcaatcggcgcgctgaaagggcctcttcacggcggagcgaatgaaggcgttatgaaaatgctgacagaaatcggtgaagtggaaaacgctgagccgtacatccgcgctaaacttgaaaagaaagaaaaaatcatgggattcggccaccgtgtgtataagcatggtgatccgcgcgcgaagcatctgaaagaaatgagcaagcgcctgaccaacctgacaggcgaaagcaaatggtatgagatgtcgattcgtatagaagacatcgtcacatcagagaaaaagcttccgcctaacgttgatttctattcggcttctgtatatcacagcctcggtattgaccatgatttgtttacaccgatttttgctgtaagcagaatgtccggctggctcgctcatattcttgagcagtatgacaacaaccgtctgatccgcccgcgggcagattacacaggccctgacaaacaaaaattcgttccgattgaagaaagagcctaa

SEQ ID NO: 123939 - protein, 372 aa, Bacillus subtilis
MTATRGLEGVVATTSSVSSIIDDTLTYVGYDIDDLTENASFEEIIYLLWHLRLPNKKELEELKQQLAKEAAVPQEIIEHFKSYSLENVHPMAALRTAISLLGLLDSEADTMNPEANYRKAIRLQAKVPGLVAAFSRIRKGLEPVEPREDYGIAENFLYTLNGEEPSPIEVEAFNKALILHADHELNASTFTARVCVATLSDIYSGITAAIGALKGPLHGGANEGVMKMLTEIGEVENAEPYIRAKLEKKEKIMGFGHRVYKHGDPRAKHLKEMSKRLTNLTGESKWYEMSIRIEDIVTSEKKLPPNVDFYSASVYHSLGIDHDLFTPIFAVSRMSGWLAHILEQYDNNRLIRPRADYTGPDKQKFVPIEERA

SEQ ID NO: 123940 - DNA, 1383 bp, Saccharomyces cerevisiae
  CDS (1)..(1383)
atgacagttccttatctaaattcaaacagaaatgttgcatcatatttacaatcaaattcaagccaagaaaagactctaaaagagagatttagcgaaatctaccccatccatgctcaagatgtaaggcaattcgttaaagagcatggcaaaactaaaattagcgatgttctattagaacaggtatatggtggtatgagaggtattccagggagcgtatgggaaggttccgttttggacccagaagacggtattcgtttcagaggtcgtacgatcgccgacattcaaaaggacctgcccaaggcaaaaggaagctcacaaccactaccagaagctctcttttggttattgctaactggcgaggttccaactcaagcgcaagttgaaaacttatcagctgatctaatgtcaagatcggaactacctagtcatgtcgttcaacttttggataatttaccaaaggacttacacccaatggctcaattctctattgctgtaactgccttggaaagcgagtcaaagtttgctaaggcttatgctcaaggaatttccaagcaagattattggagttatacttttgaagattcactagacttgctgggtaaattgccagttattgcagctaaaatttatcgtaatgtattcaaagatggcaaaatgggtgaagtggacccaaatgccgattatgctaaaaatctggtcaacttgattggttctaaggatgaagatttcgtggacttgatgagactttatttaaccattcattcggatcacgaaggtggtaatgtatctgcacatacatcccatcttgtgggctcagcactatcatcaccttatctgtcccttgcatcaggtttgaacgggttggctggcccacttcatgggcgtgctaatcaagaagtactagaatggttatttgcacttaaagaagaggtaaatgatgactactctaaagatacgatcgaaaaatatttatgggatactctaaactcaggaagagtcattcccggttatggtcatgctgtgctaaggaaaactgatcctcgttatatggctcagcgtaagtttgccatggaccattttccagattatgaattattcaagttagtttcatcaatatacgaggtagcacctggcgtattgactgaacatggtaaaactaaaaatccatggccaaatgtagatgctcactctggtgtcttattacaatattatggactaaaagaatcttctttctataccgttttatttggcgtttcaagggcatttggtattcttgctcaattgatcactgatagggccatcggtgcttccattgaaaggccaaagtcctattctactgagaaatacaaggaattggtcaaaaacattgaaagcaaactatag

SEQ ID NO: 123941 - protein, 460 aa, Saccharomyces cerevisiae; identical to SEQ ID NO: 93178

SEQ ID NO: 123942 - DNA, 1530 bp, Arabidopsis thaliana
  CDS (1)..(1530)
atggagatatcagagagagttcgagctcgattagctgttctctcaggtcatttatcggaaggaaaacaggattctccagcgatcgagcgatggtgcacgtcggcggatacgagtgtcgcaccgcttggatctttgaagggaacactgacgatcgtcgacgaacgcaccggaaaaaattataaagttccggtctcagatgatggtaccgttaaagccgttgatttcaaaaagatagtgacggggaaggaagacaaggggcttaagttatacgatccaggttacttgaacacggctcctgttcgatcttcgatttcttacatcgatggagatgaagggatccttcgttaccgtggctacccaattgaggaaatggctgagaacagtacttttctggaggtggcttatcttctcatgtatgggaatctgccctctgaaagtcagctatctgattgggagtttgcagtttctcagcattcagctgtgccacaaggtgtattagatattatacagtctatgcctcatgatgcacacccaatgggagttcttgtgagtgcaatgagtgcgctttccatctttcatcctgatgctaatcctgctcttaggggccaggatatttacgattcaaaacaagttagagataaacaaattatccgcattattggaaaggcaccaacaattgcagcagctgcttatctgaggatggcaggaaggcctcctgttcttccttcaggaaaccttccttatgcagataatttcctctatatgcttgattccctgggaaatagatcctacaaacctaatcctcggctggctcgggtgttggacatcctcttcatactgcatgcagagcatgaaatgaactgctccaccgctgctgctcggcatcttgcctctagcggtgttgatgtctacactgctgttgctggagctgtgggagcgctttatggtccacttcatggtggtgcaaacgaggctgtgcttaagatgttgtcagagattgggactgttgaaaatattccagagttcattgagggtgtgaagaacaggaagaggaagatgtctggttttggacaccgtgtgtacaaaaactatgaccctcgagctaaagtcatcaagaacctggctgatgaagtattttccattgttggaaaggatcctctaattgaggttgctgttgcacttgagaaggcagctctctctgacgattactttgttaagagaaagctgtatccaaatgttgacttctactctggattaatatacagggcaatgggatttccaccggagttcttcacggtcttattcgcgattcctcgcatggctggatacttgtcacattggaaagagtcactggatgatcctgacaccaagatcatgagaccacaacaggtgtacacaggcgtgtggctgaggcattacacaccagtgagagagagaatagtgacggatgactcgaaagagtcagacaaattgggtcaagtcgcgacttcaaatgcatcaagaagacgtttggctggatcttcagtttag

SEQ ID NO: 123943 - protein, 509 aa, Arabidopsis thaliana
MEISERVRARLAVLSGHLSEGKQDSPAIERWCTSADTSVAPLGSLKGTLTIVDERTGKNYKVPVSDDGTVKAVDFKKIVTGKEDKGLKLYDPGYLNTAPVRSSISYIDGDEGILRYRGYPIEEMAENSTFLEVAYLLMYGNLPSESQLSDWEFAVSQHSAVPQGVLDIIQSMPHDAHPMGVLVSAMSALSIFHPDANPALRGQDIYDSKQVRDKQIIRIIGKAPTIAAAAYLRMAGRPPVLPSGNLPYADNFLYMLDSLGNRSYKPNPRLARVLDILFILHAEHEMNCSTAAARHLASSGVDVYTAVAGAVGALYGPLHGGANEAVLKMLSEIGTVENIPEFIEGVKNRKRKMSGFGHRVYKNYDPRAKVIKNLADEVFSIVGKDPLIEVAVALEKAALSDDYFVKRKLYPNVDFYSGLIYRAMGFPPEFFTVLFAIPRMAGYLSHWKESLDDPDTKIMRPQQVYTGVWLRHYTPVRERIVTDDSKESDKLGQVATSNASRRRLAGSSV

SEQ ID NO: 123944 - DNA, 1119 bp, Bacillus subtilis
  CDS (1)..(1119): transl_table=11
atggaggagaaacagcattattctccagggttggacggtgtgattgcggcagaaactcatatttcttatcttgacacgcagtccagccagattttgataagaggctatgatttaatagaactttctgaaacaaaaagctatctggagcttgtccatttattgctggagggcaggctgccagaagaaagtgaaatggaaacgctggaacgtaaaataaacagtgcctcaagcctgcctgctgatcatctccgtctgcttgagctgctccctgaggacactcatccaatggatggtctgcgtaccggcctgtcggcacttgctggctatgatcggcaaattgatgatcggtctccttccgcaaacaaagaacgcgcctatcagcttcttgggaaaatgcctgccctcactgctgccagctacaggatcattaataagaaagaaccgattcttccgcttcaaaccctatcctacagtgcgaattttctctacatgatgacagggaaattgccgtcttcattggaagaacagatttttgaccggtcgctcgtcctgtacagtgagcatgagatgccgaattcaacctttgcggccagggtcattgcatctacacattcagatctttatggggctttgactggggctgtcgcttccctgaaagggaatcttcacggaggagcaaacgaagctgtgatgtatttgcttttggaggcaaaaacgacatctgattttgagcagcttttgcaaacaaaactgaaaagaaaagaaaaaatcatgggcttcggccaccgggtgtatatgaaaaaaatggacccgagagcactcatgatgaaagaggcgctgcagcaattatgcgataaagccggtgaccatcgtttatatgagatgtgcgaagcgggtgagcggctgatggagaaggaaaaagggctttacccgaatttggattactatgctgccccagtgtattggatgctcggcataccgattcctttatatacgccgatctttttcagcgcgagaacgtccggtttatgcgcccatgtgatcgaacagcatgccaataatcggctcttccgtccccgtgtcagttacatgggcccgcgatatcaaacaaaatcatga

SEQ ID NO: 123945 - protein, 372 aa, Bacillus subtilis
MEEKQHYSPGLDGVIAAETHISYLDTQSSQILIRGYDLIELSETKSYLELVHLLLEGRLPEESEMETLERKINSASSLPADHLRLLELLPEDTHPMDGLRTGLSALAGYDRQIDDRSPSANKERAYQLLGKMPALTAASYRIINKKEPILPLQTLSYSANFLYMMTGKLPSSLEEQIFDRSLVLYSEHEMPNSTFAARVIASTHSDLYGALTGAVASLKGNLHGGANEAVMYLLLEAKTTSDFEQLLQTKLKRKEKIMGFGHRVYMKKMDPRALMMKEALQQLCDKAGDHRLYEMCEAGERLMEKEKGLYPNLDYYAAPVYWMLGIPIPLYTPIFFSARTSGLCAHVIEQHANNRLFRPRVSYMGPRYQTKS

SEQ ID NO: 123946 - DNA, 1461 bp, Saccharomyces cerevisiae; identical to SEQ ID NO: 93091
  CDS (1)..(1461)

SEQ ID NO: 123947 - protein, 486 aa, Saccharomyces cerevisiae; identical to SEQ ID NO: 93092

SEQ ID NO: 123948 - DNA, 1425 bp, Arabidopsis thaliana; identical to SEQ ID NO: 93179
  CDS (1)..(1425)

SEQ ID NO: 123949 - protein, 474 aa, Arabidopsis thaliana; identical to SEQ ID NO: 93180

SEQ ID NO: 123950 - DNA, 1302 bp, Arabidopsis thaliana; identical to SEQ ID NO: 93181
  CDS (1)..(1302)

SEQ ID NO: 123951 - protein, 433 aa, Arabidopsis thaliana; identical to SEQ ID NO: 93182

SEQ ID NO: 123952 - DNA, 1311 bp, Acetobacter aceti
  CDS (1)..(1311): transl_table=11
atgagcgcgtcgcagaaagaaggtaagctatctaccgctaccatttcggttgatggaaaatccgccgaaatgcctgtgctttcaggcactctgggaccggatgttatcgacatccgcaaacttccggcgcaactgggcgttttcacgtttgacccaggttacggggaaacagcggcctgcaacagcaaaatcacctttattgatggtgataaaggcgttctgctgcaccgtggttaccctattgcgcagctggacgaaaatgcttcctacgaagaagttatttatctgcttttgaatggcgaactgcccaacaaggtgcagtacgacaccttcaccaacacccttacaaaccatacgctgctgcacgagcagatccgtaacttctttaacggcttccggcgtgatgcccacccaatggccattctgtgtggtacggttggggctttgtctgccttctacccagatgccaacgatattgccattcccgccaatcgggatctggccgccatgcggctgattgccaaaatcccaaccattgcggcatgggcttacaaatacacgcagggtgaagcctttatctacccgcggaatgatctgaactacgcagaaaacttcctgtccatgatgttcgcgcgcatgtccgaaccttacaaggtcaaccctgttctggcccgcgccatgaaccggattctgattctgcatgccgatcatgagcagaatgcctctacctccaccgtacgtctggctggttctacaggggccaatccgtttgcctgtattgctgcgggcattgccgctctgtggggacctgcacatggtggcgcaaacgaagctgtgctgaaaatgctggcccgtattggcaagaaagaaaatattcctgcctttatcgcacaggtgaaggacaagaacagcggcgtaaagctgatgggctttggccaccgcgtttacaagaacttcgacccacgtgcgaagatcatgcagcagacctgccacgaagtgctgacagaacttggcattaaggatgatccgctgctggatctggcggttgagctggaaaagattgctctgagcgatgattacttcgtgcagcgcaaactttacccgaatgtggatttctactctggcatcattctcaaggccatgggcatccccaccagtatgtttactgtgctgtttgccgtagcccgcaccaccggctgggtgagccagtggaaggaaatgattgaagaaccgggccagcgtatcagccgccctcgccagctttatattggcgcaccgcagcgtgactatgtgccgcttgccaaacgctaa

SEQ ID NO: 123953 - protein, 436 aa, Acetobacter aceti
MSASQKEGKLSTATISVDGKSAEMPVLSGTLGPDVIDIRKLPAQLGVFTFDPGYGETAACNSKITFIDGDKGVLLHRGYPIAQLDENASYEEVIYLLLNGELPNKVQYDTFTNTLTNHTLLHEQIRNFFNGFRRDAHPMAILCGTVGALSAFYPDANDIAIPANRDLAAMRLIAKIPTIAAWAYKYTQGEAFIYPRNDLNYAENFLSMMFARMSEPYKVNPVLARAMNRILILHADHEQNASTSTVRLAGSTGANPFACIAAGIAALWGPAHGGANEAVLKMLARIGKKENIPAFIAQVKDKNSGVKLMGFGHRVYKNFDPRAKIMQQTCHEVLTELGIKDDPLLDLAVELEKIALSDDYFVQRKLYPNVDFYSGIILKAMGIPTSMFTVLFAVARTTGWVSQWKEMIEEPGQRISRPRQLYIGAPQRDYVPLAKR

SEQ ID NO: 123954 - DNA, 1428 bp, Aspergillus niger
  CDS (1)..(1428)
atggcttccaccttgagactgggcacctctgctctccgttcctcctccattgccgctaagccggttgttcagtctgctgccttcaatggcctgcgctgctactctaccggcaaggccaagtccttgaaggagactttcgctgagaagctccctgccgagctcgagaaggtcaagaagctccgcaaggagcacggcagcaaggtcatcggcgaggtcactcttgaccaggcctatggtggtgcccgtggtgttaagtgcctcgtgtgggagggttccgtcctcgactctgaggagggtatccgtttccgtggccgtaccatccccgagtgccaggagctcctccccaaggctcccggtggtcaggagcctcttcctgagggtctcttctggctcctcttgactggcgagatccctactgagcagcaggtccgcgacctgtctgctgagtgggctgcccgctccgacctccccaagttcattgaggagctcatcgaccgctgccccagcaccctccaccccatgtcccagttctctctggccgtcaccgctcttgagcacgagtctgccttcgccaaggcctatgccaagggtatcaacaagaaggactactggaactacaccttcgaggactccatggacctcattgccaagctgcccaccatcgctgccaagatctaccgcaacgtcttcaaggatggcaaggtcgctcctatccagaaggacaaggattactcctacaacttggccaaccagctcggctacggcgacaacaacgacttcgttgagctcatgcgtctttacctgaccatccactccgaccacgagggtggcaacgtcagtgctcacaccacccaccttgttggtagcgctctgagctcccccatgctctctctcgccgctggtctgaacggtctggctggtcctctccacggattggccaaccaggaagtccttaactggctcaccaagatgaaggccgccattggcaacgacctcagcgacgaggccatcaagaactacctctggtccaccctgaacgccggccaggtcgttcccggatacggtcacgccgtccttcgtaagaccgacccccgctacgtgtctcagcgcgagtttgctcttcgcaagctgcccgatgaccccatgttcaagctggtcagccaggtctacaagatcgctcctggtgtcctgaccgagcacggcaagaccaagaacccctaccccaacgtcgatgctcactctggtgtcctccttcagtactacggcctgactgaggccaactactacaccgtcctcttcggtgtttcccgtgctctgggtgtccttccccagctgatcatcgaccgtgcccttggtgcccccattgagcgccccaagtcctacagcactgagctttcgccaagcttgttggtgctaagctgtaaatga

SEQ ID NO: 123955 - protein, 475 aa, Aspergillus niger; identical to SEQ ID NO: 93184

SEQ ID NO: 123956 - DNA, 1122 bp, Bacillus coagulans
  CDS (1)..(1122): transl_table=11
atggtgaatacgaatcaatttattccaggtctcgaaggcgtaattgcaagtgaaacgaagatttcctttttagacaccgtgaatagtgagattgtaattaaaggttacgacttacttgcactatcgaagacaaaaggatatttggacattgtccatctattattagaaggaacgattccgaatgaagcggaaaaacaacatttagaagagactttgaaacaagagtatgatgtgccagatgaaattattcaggtattatcgctgcttcctaaaacagcacatccaatggatgcattgcgtacgggagtatcggtccttgccagcttcgatacagaattattgaatcgcgagcattcgacaaacttaaaaagggcctatcaattattgggaaagattccaaacatcgttgctaacagctaccatatcctacacagcgaagagccagtacaacctctccaagacttatcctacagtgcaaactttttatacatgattaccggaaaaaaaccgacagaattagaagagaaaatttttgatcgttcattagtcttatatagcgaacatgaactgccgaattctacctttacagcaagagtgattgcttccacactatctgatttatatggtgcattaacaggagcagttgcgtcattaaaaggtcatctccatggcggagcaaatgaggctgtaatggaaatgcttcaagatgcacaaactgtcgaaggctttaagcatttattacacgataaattaagtaaaaaagaaaaaatcatgggctttggccatagggtgtatatgaaaaaaatggatcctcgtgcagcaatgatgaaggaagcattaaaagaattaagtgcggttaacggggatgatctgctcttgcaaatgtgtgaagccggagaacaaattatgagagaggaaaaaggcttgttcccaaatttagactattatgcggcgcctgtttattggaaacttggtattccgatcccgctatatacaccaatcttctttagctcaagaacggttggtttatgtgcgcatgtgatggagcagcatgaaaataatcggatattccgaccacgtgtgctttatactggtgcccgaaacttacgtgtcgaagattga

SEQ ID NO: 123957 - protein, 373 aa, Bacillus coagulans
MVNTNQFIPGLEGVIASETKISFLDTVNSEIVIKGYDLLALSKTKGYLDIVHLLLEGTIPNEAEKQHLEETLKQEYDVPDEIIQVLSLLPKTAHPMDALRTGVSVLASFDTELLNREHSTNLKRAYQLLGKIPNIVANSYHILHSEEPVQPLQDLSYSANFLYMITGKKPTELEEKIFDRSLVLYSEHELPNSTFTARVIASTLSDLYGALTGAVASLKGHLHGGANEAVMEMLQDAQTVEGFKHLLHDKLSKKEKIMGFGHRVYMKKMDPRAAMMKEALKELSAVNGDDLLLQMCEAGEQIMREEKGLFPNLDYYAAPVYWKLGIPIPLYTPIFFSSRTVGLCAHVMEQHENNRIFRPRVLYTGARNLRVED

SEQ ID NO: 123958 - DNA, 1101 bp, Bacillus subtilis
  CDS (1)..(1101): transl_table=11
atggtacattacggattaaagggaattacatgtgtagaaacatccatcagccatattgatggtgaaaaagggcgtctgatttacagaggacatcatgcaaaagacatcgcactgaatcacagctttgaagaagcggcttatttgattttatttggaaaactgccttcaactgaagaattgcaggtatttaaagataagctggctgcggaacggaatcttccggaacatattgagcgcttgattcaatcactgccaaacaacatggacgatatgtcggtcgtgagaacggttgtttcagcattgggggaaaatacgtacacattccatccgaaaacagaggaagcaatccggctgattgcaatcacgccttctatcattgcatacagaaaaagatggacgcgcggtgaacaagcaattgcaccttcttcccagtacggacatgtcgaaaactactattatatgctcacaggtgaacagccttcagaggcaaaaaagaaagcgcttgaaacctatatgattctggccacggagcacggcatgaacgcatcgactttttcggcacgagtcacgttatctacagagagtgatttagtgtcagccgtcacggctgctctcggtacgatgaaaggtccgctgcacggaggtgctccttctgcggtgacaaaaatgcttgaagacattggagaaaaggaacatgctgaagcatatctgaaagaaaaactcgaaaaaggagagcgcttgatgggattcggccacagggtgtacaaaacaaaagacccgcgggcagaagctttgagacagaaagcagaagaggtggccggcaatgaccgtgatcttgatcttgcgctgcatgtagaagcagaagcgattcgtttgctagaaatctacaaaccgggacgaaagctgtacacaaatgttgaattttacgcagctgcagtgatgagggccatcgattttgacgatgaattgtttactccgaccttttcagcaagccgaatggtagggtggtgcgcccatgtactggaacaggcagaaaacaacatgattttccggccgtcagcgcaatataccggtgccattcccgaggaagttctttcataa

SEQ ID NO: 123959 - protein, 366 aa, Bacillus subtilis
MVHYGLKGITCVETSISHIDGEKGRLIYRGHHAKDIALNHSFEEAAYLILFGKLPSTEELQVFKDKLAAERNLPEHIERLIQSLPNNMDDMSVVRTVVSALGENTYTFHPKTEEAIRLIAITPSIIAYRKRWTRGEQAIAPSSQYGHVENYYYMLTGEQPSEAKKKALETYMILATEHGMNASTFSARVTLSTESDLVSAVTAALGTMKGPLHGGAPSAVTKMLEDIGEKEHAEAYLKEKLEKGERLMGFGHRVYKTKDPRAEALRQKAEEVAGNDRDLDLALHVEAEAIRLLEIYKPGRKLYTNVEFYAAAVMRAIDFDDELFTPTFSASRMVGWCAHVLEQAENNMIFRPSAQYTGAIPEEVLS

SEQ ID NO: 123960 - DNA, 1317 bp, Bartonella quintana
  CDS (1)..(1317): transl_table=11
atgtctgagaataaagcacacattactgtgaacaataaaaaaatagaactctccgtgcggaaaggcactcttggtcctggcgtcattgaaattgcttctctctacaaagaaacagatacttttacttatgatcctggtttcacttcaaccgcttcttgtgaatcaaaaatcacttatattgatggggataaaggaatcttgctttattgcggttatcctatcgaccaattagctgaaaaaggagactttctcgaaagctgctatcttttactttacggtgaattaccaacaaaacaagaaaaaattgatttcgaccgttgtattatgcagcacatgatggtgcatgagcagtttacaaggttttttcatggctttcgtcgtgattctcaccctatggccgttatggttgcgtgtcttggagctatgtctgcattctatcacgactctattgatattaaagacgctcaacagagaatgatcgctgctattcgcttgatttcaaaggttccaactcttgctgctatggcgtataaatatagcatcggacaggcatttgtttatccacgtaatgatcttagttacgctgcaaatttcctccacatgtgtttttccgttccttgtgaagaatacaaaattaatccagtacttagtcgagctatggatcgaatctttactcttcatgcagatcatgaacaaaatgcttctacatccactgtacgtcttgtaggatcatcgggagctaatccatttgcatgtatcgcagcaggtgttgcatgcctttggggaccagctcatggtggagcgaatgaagcgtgcctaaagatgttacaaaaaataggctctgtcgaaagaattcctgagttcattgcacgagcaaaagataaaaatgatcctttccgtcttatgggttttggtcaccgagtttataaaaattatgatccacgtgcaaaaatcatgcaacaaacctgccatgaggttttaaaagaactgaacattcaagatgatccgcttcttgatatcgctatcgcacttgaaaatactgctctgaatgatgaatattttattgaaaaaaagctttatcctaatgttgatttttattctggcattacattaaaagctctaggttttccgaccgaaatgtttactgttctttttgcattagcacgcagtatcggctgggttgcgcaatggaaagaaatgattgaagatcctgcacaaaaaattggtcgaccacgccaactctacacaggctatgctgcacgtgaatatgtttctatagacaaacgtataagcaaaaataaaatgaccacccaataa

SEQ ID NO: 123961 - protein, 438 aa, Bartonella quintana
MSENKAHITVNNKKIELSVRKGTLGPGVIEIASLYKETDTFTYDPGFTSTASCESKITYIDGDKGILLYCGYPIDQLAEKGDFLESCYLLLYGELPTKQEKIDFDRCIMQHMMVHEQFTRFFHGFRRDSHPMAVMVACLGAMSAFYHDSIDIKDAQQRMIAAIRLISKVPTLAAMAYKYSIGQAFVYPRNDLSYAANFLHMCFSVPCEEYKINPVLSRAMDRIFTLHADHEQNASTSTVRLVGSSGANPFACIAAGVACLWGPAHGGANEACLKMLQKIGSVERIPEFIARAKDKNDPFRLMGFGHRVYKNYDPRAKIMQQTCHEVLKELNIQDDPLLDIAIALENTALNDEYFIEKKLYPNVDFYSGITLKALGFPTEMFTVLFALARSIGWVAQWKEMIEDPAQKIGRPRQLYTGYAAREYVSIDKRISKNKMTTQ

SEQ ID NO: 123962 - DNA, 1305 bp, Bradyrhizobium japonicum
  CDS (1)..(1305): transl_table=11
atggacgcaaaagcaagcaataagaccgccacgctgacggtcggaaacaagaactacgatctcccgatccacagcggcagcgtcgggcctgatgtcatcgatatcggcaagctctacggccagtcgggcctgttcacctatgacccgggcttcacctcgaccgcgagctgccagtccaagatcacctatatcgacggcgacgcgggcgtgctggaataccgcggctatccgatcgagcagctcgccgagaacggcgacttcctggagacctgctacctcctgctctacgggaacctgccgaccgccgcgcagaagaaggatttcgacgaccgcgtgatccatcacacgatggtgcacgagcagatggcccgcttcttccagggcttccgccgcgacgcccatccgatggccgtcatggtggcctccgtcggcgcgctcgccgcgttctaccacgactccaccgacatcaacgacccgaagcagcgcatgatcgcttccatgcgcatgatcgcgaagatcccgacgctggcggcgatggcctacaagtacacgatcggccagcccttcgtgtatccgaagaactcgctgaagttcgccgagaacttcctgcacatgtgcttcgccgtgccgtgcgaggagtacaagatcaatccggtgctggctgacgcgctggacaagatcttcatcctgcacgccgaccacgagcagaacgcctcgacctcgacggtgcgcatcgccggctcctccggcgccaacccgttcgcctgcatcgccgccggcatcgcctgcctctggggcccggcccacggcggcgccaacgaagccgcgctcgcgatgctcgccgagatcggttcggtcgacaagattccggaattcatcgccaaggtgaaggacaagaacagcgaagtccgcctgatgggcttcggtcatcgcgtctacaagaactacgatccgcgcgccaagatcatgcagaagatgtgtcacgccgtgctcaaggagaccggccatggcgacgatccgatgctgaaggtggcgatggagctcgagaagatcgcgctcagcgaccagtacttcatcgaccgcaagctgtacccgaacgtcgacttctattcgggcatcacgctgaaggcgatgggcttcccggtctcgatgttcaccgtgctgttcgcggtcgcccgcaccgtcggctggatcagccagtggagcgagatgatcgaggatccgcagcagaagattggtcgtccgcgccagctctacaccggcgtcacccgccgcgactacgtggcgatcaaggatcgcaagtaa

SEQ ID NO: 123963 - protein, 434 aa, Bradyrhizobium japonicum
MDAKASNKTATLTVGNKNYDLPIHSGSVGPDVIDIGKLYGQSGLFTYDPGFTSTASCQSKITYIDGDAGVLEYRGYPIEQLAENGDFLETCYLLLYGNLPTAAQKKDFDDRVIHHTMVHEQMARFFQGFRRDAHPMAVMVASVGALAAFYHDSTDINDPKQRMIASMRMIAKIPTLAAMAYKYTIGQPFVYPKNSLKFAENFLHMCFAVPCEEYKINPVLADALDKIFILHADHEQNASTSTVRIAGSSGANPFACIAAGIACLWGPAHGGANEAALAMLAEIGSVDKIPEFIAKVKDKNSEVRLMGFGHRVYKNYDPRAKIMQKMCHAVLKETGHGDDPMLKVAMELEKIALSDQYFIDRKLYPNVDFYSGITLKAMGFPVSMFTVLFAVARTVGWISQWSEMIEDPQQKIGRPRQLYTGVTRRDYVAIKDRK

SEQ ID NO: 123964 - DNA, 1404 bp, Candida tropicalis; identical to SEQ ID NO: 93185
  CDS (1)..(1404): transl_table=12

SEQ ID NO: 123965 - protein, 467 aa, Candida tropicalis; identical to SEQ ID NO: 93186

SEQ ID NO: 123966 - DNA, 1416 bp, Citrus maxima
  CDS (1)..(1416)
atggcgtccctcaggagcgccactgcgctctctcgcctccgctctcgcgctgggcaacagtctaatctcagtaattcagtgagatggcttcaaatgcaaagctctgctgatcttgaccttcattctcagctcaaggaaatgattccagaacaacaggagcgcctgaagaaagtgaagtcagaccttggaaaagcccagctgggaaatattaccattgacgtggtaattggcgggatgagaggaatgactggcttactttgggaaacctcattacttgaccctgatgagggaattcgctttcggggtctgtctattcctgagtgccagaagttgttacctgccgctaagccagatggagaacctttgcctgagggtcttctttggcttcttttaactggaaaggtaccgagcaaagagcaggtcgatggcttgtccaaggaattgagagatcgtgccactgtcccagattatgtgtacaaggccattgatgctctacctgtatcggcacatccgatgactcagtttgctagtggggtcatggctctgcaggtgcaaagtgaatttcaggaggcttatgagaagggaattcataaatcaaagtcatgggaaccaacatctgaggattctcttaatttgattgctcgtgtgccggtagtagctgcatacgtttatcaaaggatatacaaggatggaaagattattcccaaggatgactcactggattatggtgggaacttctcgcacatgttgggattcgatgatcctaagatgctagagcttatgaggctttatgttaccattcacagtgaccacgaaggtggaaatgtcagtgctcacaccggccatctagttgcaagtgcactttcagatccttatctttctttcttggccgcattaaatggtttagctggaccactccatggtttggctaatcaggaagttttgctttggatcaaatctgtggtggatgagtgtggtgagaacgtaacaacggagcagttgaaagattatgtctggaaaacattgaatagtggcaaggttgtccctggatttggtcatggtgttttgcgtaaaactgatccgagatacacttgtcagagggagtttgccttgaagcatttgcctgatgatccattgttccagctggtttctaagctgtatgaagtggtgcccccaatattaacaaaactaggcaaggttaaaaacccctggccaaatgttgatgctcacagtggggtgctgctgaaccattttggtttggctgaggcaagatattatactgttctttttggagtatcaaggagtcttgggatctgctctcagttgatatgggaccgagctcttgggctgccacttgagaggccaaaaagtgtaactttagattggattgagaaaaattgcaagaaagcagcttag

SEQ ID NO: 123967 - protein, 471 aa, Citrus maxima; identical to SEQ ID NO: 93188

SEQ ID NO: 123968 - DNA, 1293 bp, Coxiella burnetii
  CDS (1)..(1293): transl_table=11
atgagcaatcgtaaagctaaactttcttttgaaaatcagtcggttgaatttcctatttattcacctacccttggcaaggatgtgattgacgtaaagacattgggcaatcatggtgcctatgcgctggacgttggtttttactctacagcggcttgtgaatcaaaaattacctttatcgatggcgagaaaggtattttgctgtatcgggggtatccaattgatcaattggctgacaaatcggattatatggaagtttgttacttactgatgtatggcgagctcccgaacaaaggagaaaaggaaaaatttgttcgcacgattaaagaacacaccagcgtttatgagcaagtgacaaaatttttcaatggttttcactatgacgcgcatcctatggcgatggtgcttagcaccatcggcgctctttcagctttctatcacgatgcgttagacatcactaaaccggccgaccgcgaattatccgccatccgattaatagccaaaatgcccacgctggccgccatgagttataaatattccattggtcaaccgtttatgcaccctcgccgggcgatgaattatgcggaaaactttttacatatgctctttggcaccccttacgaagagacagaacctgaccccgtcttagctcgcgcgatggatcgtatttttatccttcacgccgatcacgaacaaaatgcgtcaacgactaccgttcgagtcgccggttctacgggagcaaatccgtttgcttgtatttcggcgggtattagtgctctctggggccctgcccacggcggtgctaatgaagcttgtttaaatatgttgagaaaaattggtgatgagaaaaatatcggccaatatattaaaaaagccaaagacaaaaatgacccttttcgtttgatgggctttggccatcgcgtttacaaaaattacgatccccgtgccaaagtcatgcagaaaacctgctatgaagtcctcgatgccgttggccgccacaatgaacctttatttaaactagcgataaaattagagaaaattgcgttagaggatgattatttcattgagaaaaaactttatccgaatgtggatttttattccggtctgacgctaaatgccattggcatcccttctaatatgtttacggtaattttcgccttatcacgaacggtgggctggatttcacattggatggaaatgatgagcagtcccgatcatcgcctcgctcgccccagacaattatacacaggcgaaacagagcgagaagtaatctcgttggataaacgtcaggcataa

SEQ ID NO: 123969 - protein, 430 aa, Coxiella burnetii
MSNRKAKLSFENQSVEFPIYSPTLGKDVIDVKTLGNHGAYALDVGFYSTAACESKITFIDGEKGILLYRGYPIDQLADKSDYMEVCYLLMYGELPNKGEKEKFVRTIKEHTSVYEQVTKFFNGFHYDAHPMAMVLSTIGALSAFYHDALDITKPADRELSAIRLIAKMPTLAAMSYKYSIGQPFMHPRRAMNYAENFLHMLFGTPYEETEPDPVLARAMDRIFILHADHEQNASTTTVRVAGSTGANPFACISAGISALWGPAHGGANEACLNMLRKIGDEKNIGQYIKKAKDKNDPFRLMGFGHRVYKNYDPRAKVMQKTCYEVLDAVGRHNEPLFKLAIKLEKIALEDDYFIEKKLYPNVDFYSGLTLNAIGIPSNMFTVIFALSRTVGWISHWMEMMSSPDHRLARPRQLYTGETEREVISLDKRQA

SEQ ID NO: 123970 - DNA, 1419 bp, Daucus carota
  CDS (1)..(1419)
atggtgttctttcggagtgtttcgctgcttaacaagctgcggtctcgggctgttcagcagtcgaacctcagtaatacagtgcgttggtttcaagtgcagacctccgcttctgatctcgatcttcgttctcaacttaaggagctgattccagaacagcaggagcggattaaaaaacttaaagcagaacatggaaaggttcagctgggaaacataactgttgatatggtacttggcggtatgagagggatgacaggacttctatgggaaacctctttacttgacccagaagagggaattcgctttagggggttgtccatacctgaatgtcagaagctattaccaggagcgaagcccggtggagaaccattgcctgagggtctgctctggcttcttttaactggaaaggtaccaactaaagagcaagtagatgcattgtccgcagagttgcgaagtcgtgctgctgtaccagagcatgtatacaaaaccatcgatgcgttacctgttacagctcatccaatgactcaatttgcaactggtgtcatggccctccaggttcaaagtgaatttcagaaggcatacgagaaagggattcacaaaacaaagtattgggagccaacatatgaggactctattactttaattgctcaattaccagttgtagcagcttatatctatcgcaggatgtacaagaatggacaaagtatatccacggatgattctctagattatggtgcaaactttgcccacatgcttggttacgatagtcccagcatgcaagagcttatgaggctttacgttactatccatactgaccatgaaggtggaaacgttagtgctcatactggtcatctagttgcaagtgccctttcagacccatatctttcttttgcagctgcattaaatggtttagcagggcctcttcatggtttggcaaatcaggaagttttgttatggatcaagtctgtggtttccgaatgcggagaaaatgtaactaaggaacaattgaaagattatatctggaaaacattaaacagcgggaaggttgttcctggatatggacatggtgttctgcgtaacacagatccaagatacatatgtcagagagagtttgctttaaagcatttacctgatgatccactctttcaattggtttcaaacctctttgaagtggtgcctcctattcttacagaacttggcaaggtaaagaacccctggccaaatgttgatgcccatagtggggtactgctgaatcattatggcctaacagaagccagatattatactgttctctttggagtatcgagggccattggtatttgttctcagctggtatgggacagagctcttggattaccacttgagaggccaaaaagtgttacaatggaatggcttgaaaaccactgcaagaaatcttcttaa

SEQ ID NO: 123971 - protein, 472 aa, Daucus carota; identical to SEQ ID NO: 93190

SEQ ID NO: 123972 - DNA, 1236 bp, Deinococcus radiodurans; identical to SEQ ID NO: 123526
  CDS (103)..(1236): transl_table=11

SEQ ID NO: 123973 - protein, 377 aa, Deinococcus radiodurans
MSNIAKGLEGVLFTESKLTFINGSEGILTHLGIPIQEWAEKSTFEELSLALLDAKLPTAEELAKFDAELKANRAIPDQLVGIIRDMPKGVHPMQALRTAVSYLGLLDPQAEDITPEARRAISTRMIAQFSTIIAAINRAQEGQDIVAPRADLTHAGNFLYMLTGNEPTPEQARLFDIALVLHADHGMNASTFTAIATSSTLSDMYSCMVSAIGALKGPLHGGANEAVMTMLDEIGTVDKAEAYITGKLDNKEKIMGVGHRVYKYFDPRSRVLRDYAEHVANKEGKSNYYQILEAIEKIIVDRMGAKGIYPNVDFYSGTVYSDLGIKKEYFTPIFALARISGWCASVIEYSQDNRLLRPDAEYTGARDQHYVDIKDRQ

SEQ ID NO: 123974 - DNA, 1395 bp, Drosophila melanogaster; identical to SEQ ID NO: 93191
  CDS (1)..(1395)

SEQ ID NO: 123975 - protein, 464 aa, Drosophila melanogaster; identical to SEQ ID NO: 93192

SEQ ID NO: 123976 - DNA, 1425 bp, Emericella nidulans; identical to SEQ ID NO: 93131
  CDS (1)..(1425)

SEQ ID NO: 123977 - protein, 474 aa, Emericella nidulans; identical to SEQ ID NO: 93132

SEQ ID NO: 123978 - DNA, 1398 bp, Glossina morsitans morsitans; identical to SEQ ID NO: 93193
  CDS (1)..(1398)

SEQ ID NO: 123979 - protein, 465 aa, Glossina morsitans morsitans; identical to SEQ ID NO: 93194

SEQ ID NO: 123980 - DNA, 1281 bp, Helicobacter pylori
  CDS (1)..(1281): transl_table=11
atgtctgtcactttagtcaataatgaaaataatgaacgctatgaatttgaaacgattgaaagcactcgtgggcctaaagcggtggatttttccaagctttttgaaacgaccgggtttttttcttacgatccagggtattcttctaccgctggatgccaatctaagatcagctatgtcaatggcaaaaaaggcgaattgtattacagagggcataggatagaagatttagtcgccaaatacaaatatgtagatgtgtgcaaattactcctcacaggggaattacccaaaaatcaagatgaaagcttggaatttgaattggaattgcgccacaggagctttgtgcatgagagcttactcaacatgttttcagccttccctagcaacgcccaccctatggcgaaactctctagcggagtgtctatcttatccaccctttattccacgcaccaaaacatgcacactgaagaagattaccaaactatggccagaaggattgtcgctaaaatccccacgcttgcggctatttgctatcgtaatgaagtgggagcgcctatcatttatccggacatcgcacgctcttatgtggaaaatatccttttcatgctgagagggtatccttatagtcgcttaaaacacaccactcaaggcgaagtggaaatcacgcccctagaagtggaagcctttgataaaatcctaaccttgcacgctgatcacagccaaaacgcctcttctaccacggtaaggaatgtcgctagcaccggcgtgcatccttatgccgccattagcgcgggcattagcgctttatgggggcatttgcatggcggagcgaatgaaaaagtccttttacaattagaagaaatcggcgatgtgaaaaatgtggataaatacatcgcgcgagtgaaagacaaaaacgacaatttcaaactcatgggctttgggcatagggtgtataaaagctacgatccgcgcgctaaaatcttaaaaggcttgaaagacgaactgcaccaaaaaggcgttaaaatggacgagaggttgagcgaaatcgccgcgaaagtggaagaaatcgcgctaaaagacgagtatttcattgaaaggaatctctaccctaatgtggatttttactccggcaccattttaagggctttaaaaatcccggtgcgttttttcacgccggtgtttgtcattggccgaaccgtaggctggtgcgctcagcttttagagcatgtcaaaagcccgcaagccaggatcacacgcccaagacaagtctatgtaggggattaa

SEQ ID NO: 123981 - protein, 426 aa, Helicobacter pylori
MSVTLVNNENNERYEFETIESTRGPKAVDFSKLFETTGFFSYDPGYSSTAGCQSKISYVNGKKGELYYRGHRIEDLVAKYKYVDVCKLLLTGELPKNQDESLEFELELRHRSFVHESLLNMFSAFPSNAHPMAKLSSGVSILSTLYSTHQNMHTEEDYQTMARRIVAKIPTLAAICYRNEVGAPIIYPDIARSYVENILFMLRGYPYSRLKHTTQGEVEITPLEVEAFDKILTLHADHSQNASSTTVRNVASTGVHPYAAISAGISALWGHLHGGANEKVLLQLEEIGDVKNVDKYIARVKDKNDNFKLMGFGHRVYKSYDPRAKILKGLKDELHQKGVKMDERLSEIAAKVEEIALKDEYFIERNLYPNVDFYSGTILRALKIPVRFFTPVFVIGRTVGWCAQLLEHVKSPQARITRPRQVYVGD

SEQ ID NO: 123982 - DNA, 1410 bp, Neurospora crassa; identical to SEQ ID NO: 93195
  CDS (1)..(1410)

SEQ ID NO: 123983 - protein, 469 aa, Neurospora crassa; identical to SEQ ID NO: 93196

SEQ ID NO: 123984 - DNA, 1134 bp, Pyrococcus furiosus
  CDS (1)..(1134): transl_table=11
atgaatacggaaaaataccttgctaaaggtctagaagatgtctacatagatcaaacaaatatatgctatatcgatggaaaagagggaaagctatactacagaggatacagtgtagaagagctagcagagttaagcacgtttgaggaagtggtgtatctcctctggtggggaaaattaccatccctaagtgaactagagaatttcaaaaaagagctagcaaaaagtagaggccttccaaaagaagttatagaaataatggaagcactacctaaaaatactcacccaatgggcgctttaagaaccataatctcatatctaggaaacattgacgatagtggagacattccagtaacccctgaagaagtttacaggataggaattagtgtaactgcaaagataccaacaatagtagctaattggtatagaattaagaatggtctcgaatatgttcctccaaaagaaaaacttagtcatgcagcaaatttcctatacatgctccacggtgaagaaccccccaaagaatgggagaaagccatggatgtggccctaattctatatgctgaacatgaaattaacgcatcgactttagcagtaatgaccgttggctctactcttagcgactactattcagccatcctcgcgggaataggagctttaaagggcccaatccatggaggtgcagtagaggaggccataaaacagtttatggaaataggatctcccgagaaagtagaagaatggttctttaaggctcttcagcagaagagaaaaataatgggtgctggtcatagggtgtataaaacctatgatccaagggctagaatatttaaaaaatatgcctccaaattaggagataaaaagctcttcgagatagctgaaagattagagaggttagtagaagaatacctaagcaaaaaaggaattagtataaatgttgactactggtcaggattagttttctatggaatgaagattccaatagagctttacacaacaatatttgcaatgggtagaattgcgggatggactgctcatttagctgagtatgtttctcacaatagaattattagacccaggttgcagtatgtaggagaaataggaaagaagtacctacccatagaattaaggaggtag

SEQ ID NO: 123985 - protein, 377 aa, Pyrococcus furiosus
MNTEKYLAKGLEDVYIDQTNICYIDGKEGKLYYRGYSVEELAELSTFEEVVYLLWWGKLPSLSELENFKKELAKSRGLPKEVIEIMEALPKNTHPMGALRTIISYLGNIDDSGDIPVTPEEVYRIGISVTAKIPTIVANWYRIKNGLEYVPPKEKLSHAANFLYMLHGEEPPKEWEKAMDVALILYAEHEINASTLAVMTVGSTLSDYYSAILAGIGALKGPIHGGAVEEAIKQFMEIGSPEKVEEWFFKALQQKRKIMGAGHRVYKTYDPRARIFKKYASKLGDKKLFEIAERLERLVEEYLSKKGISINVDYWSGLVFYGMKIPIELYTTIFAMGRIAGWTAHLAEYVSHNRIIRPRLQYVGEIGKKYLPIELRR

SEQ ID NO: 123986 - DNA, 1290 bp, Rhizobium meliloti
  CDS (1)..(1290): transl_table=11
atgtcagagaaaagcgcgacagtaacattcggcggaaaatccgcggacctgccggtgcgatcgggatcaatcggtccggacgtcgtggacatcggctcgctctacaagcagacgacgatgttcacctacgatccgggctttacctccacggcatcgtgtgaatcgaagatcacctatatcgatggcgacgagggcgtcctgcttcaccgcggatttccgatcgagcagcttgctgagcacggcgattttctcgaagtctgctacctgcttctctacggcgaactgccgacaaaggctcagaaggccgatttcgattatcgcgtcacgcatcacaccatggtccacgagcagatgtcgcggtttttcaccggcttccgccgcgatgcccatccgatggccgtcatgtgcggctgcgtcggtgccctttccgccttctaccacgactcgaccgacatcaccgatccgcatcagcggatggtcgcatcgttgcgcatgatcgccaagatgccgacgatcgccgcgatggcctacaagtaccatatcggccagcccttcgtttacccgaagaacgatctcgactacgcctcgaacttcctgcgcatgtgtttcgccgtgccttgcgaggaatatgtcgtcaatccggtcctggcgcgcgccatggaccggatcttcatcctccacgccgaccatgagcagaacgcatcgacctcgaccgttcgcctcgccggctcgtcgggtgccaatcccttcgcctgtatcgctgccggtatcgcctgcctttgggggcccgcccatggcggcgccaacgaggcggcgctcaacatgctcgccgaaatcggcacggtcgaccgcattccggaatatatcaccaaggccaaagacaagaacgatccgttccgtctgatgggcttcggccaccgggtctacaagaactacgatccgcgcgcgaagatcatgcagaagaccacgcatgaggttctcgccgaactcggccacaaggacgacccgctcctggaagtcgcgatggagctcgaacgcatcgccctgacggacgagtacttcatcgagaagaagctctacccgaacatcgacttctactccggcatcaccctgaaggccctgggcttccccaccacgatgttcacggtgctcttcgcccttgcccgcaccgtcggctggatcgcccagtggaacgagatgatcgaagatccggaacagcgcatcggccgtccgcgccagctctatgtcggcgcaccgctgcgcgactatgtgccaatctcaaagcgctga

SEQ ID NO: 123987 - protein, 429 aa, Rhizobium meliloti
MSEKSATVTFGGKSADLPVRSGSIGPDVVDIGSLYKQTTMFTYDPGFTSTASCESKITYIDGDEGVLLHRGFPIEQLAEHGDFLEVCYLLLYGELPTKAQKADFDYRVTHHTMVHEQMSRFFTGFRRDAHPMAVMCGCVGALSAFYHDSTDITDPHQRMVASLRMIAKMPTIAAMAYKYHIGQPFVYPKNDLDYASNFLRMCFAVPCEEYVVNPVLARAMDRIFILHADHEQNASTSTVRLAGSSGANPFACIAAGIACLWGPAHGGANEAALNMLAEIGTVDRIPEYITKAKDKNDPFRLMGFGHRVYKNYDPRAKIMQKTTHEVLAELGHKDDPLLEVAMELERIALTDEYFIEKKLYPNIDFYSGITLKALGFPTTMFTVLFALARTVGWIAQWNEMIEDPEQRIGRPRQLYVGAPLRDYVPISKR

SEQ ID NO: 123988 - DNA, 1308 bp, Rickettsia conorii
  CDS (1)..(1308): transl_table=11
atgaccaatgaaaataataatgattcagaatttgctgaattaaaaatcagaggaaaaatatttaaattacctatacttaaagcaagtatcggtgaggatgtaatcgatataagtagggtatctgcggaagccgattgctttacttacgacccgggttttatgtctactgcttcttgtcagtctactatcacctatatagacggtgataaaggaatcttgcggcatcgaggatatgatattaaagacttagctgagaaaagtgattttttagaagtggcatatttactgatttatggggaactaccaagtggcgagcagtataataatttcactaaacaggttgctcatcattcattagtgaatgaaagattacactatttatttcaaaccttttgtagctcttctcatcctatggctattatgcttgcggctgtcggttctctttcggcattttatcctgatttattgaattttaaggaagcagattacgaacttaccgctattagaatgattgctaagatacctaccatcgctgcaatgtcttataaatattctataggacaaccgtttatttatcctgataattcgttagattttaccgaaaattttctgcatatgatgtttgcaacgccttgtacgaaatatacagtaaatccaataataaaaaatgctcttaataagatatttatcctacatgccgatcatgagcagaatgcttctacttcaacagtccgaattgctggctcatccggagctaacccttttgcttgtattagcacgggtattgcctcactttggggacctgctcacggcggggctaatgaagcggtaataaatatgattaaagaaatcggtagttctgagtatattcctaaatatatagctaaagctaaggataaaaatgatccatttagattaatgggttttggtcatcgtgtatataaaaactatgacccgcgtgccgcagtacttaaagaaacgtgcaaagaagtattaaaggaactcgggcagctagacaacaatccgttcttacaaatagcaatagaacttgaagctatcgctcttaaagatgaatattttattgagagaaaattatatccaaatgttgatttttattcgggtattatctataaagctatgggtataccgtcgcaaatgttcacggtactttttgcaatagcaagaaccgtaggctggatggcacaatggaaagaaatgcacgaagaccctgaacaaaaaatcagcagacctagacagctttacaccggttatgtacatagagagtataagggtattcgggagaggtaa

SEQ ID NO: 123989 - protein, 435 aa, Rickettsia conorii
MTNENNNDSEFAELKIRGKIFKLPILKASIGEDVIDISRVSAEADCFTYDPGFMSTASCQSTITYIDGDKGILRHRGYDIKDLAEKSDFLEVAYLLIYGELPSGEQYNNFTKQVAHHSLVNERLHYLFQTFCSSSHPMAIMLAAVGSLSAFYPDLLNFKEADYELTAIRMIAKIPTIAAMSYKYSIGQPFIYPDNSLDFTENFLHMMFATPCTKYTVNPIIKNALNKIFILHADHEQNASTSTVRIAGSSGANPFACISTGIASLWGPAHGGANEAVINMIKEIGSSEYIPKYIAKAKDKNDPFRLMGFGHRVYKNYDPRAAVLKETCKEVLKELGQLDNNPFLQIAIELEAIALKDEYFIERKLYPNVDFYSGIIYKAMGIPSQMFTVLFAIARTVGWMAQWKEMHEDPEQKISRPRQLYTGYVHREYKGIRER

SEQ ID NO: 123990 - DNA, 1308 bp, Rickettsia felis
  CDS (1)..(1308): transl_table=11
atgaccaatgaaaatagtaatgattcagaatttgccgaattaaaaatcagaggaaaaatatttaaattacctatacttaaagcaagtattggtgaggatgtaatcgatataagcagggtatcttcggaagccgattgttttacttatgacccgggctttatgtctactgcttcttgtcagtctactatcacttatatagacggtgataaaggaatcttgcgacatcgaggatatgacattaaagatttagccgagaaaagtgattttttagaagtggcatatttgctaatctacggagaattgccaagcatcgagcagtataataatttcactaaacaggttgctcatcattcattagtgaatgaaagattacactatttatttcaaacattttgtagctcttctcatcctatggctattatgcttgcggccgttggttctctttcggcattttatcctgatttactgaattttaaagaagcagactacgaacttaccgctattagaatgattgctaagataccaactatcgccgcaatgtcctataaatattctataggacaaccgtttatttatcctgataattcgttagattttactgaaaattttctgcatatgatgtttgcaacgccttgtacaaaatataaagtaaatccaataataaaaaatgctcttaataaaatatttattctgcatgctgaccatgagcagaacgcttctacttcaacagtccgaattgccggctcatccggggctaacccttttgcttgcgtaagtacagggattgcctcactttgggggcctgcccacggcggggctaatgaagcggtaataaatatgcttaaagaaatcggtagttctgagaatattcctaaatatatagctaaagctaaggataaaaatgatccgtttaggttaatgggtttcggtcatcgtgtttataaaaactatgacccacgtgccgcagtacttaaagaaacttgcaaagaagtattaaaggaactcggacagctagaaaacaatccgcttttgcaaatagcaatagaacttgaagctatcgctcttaaagatgaatattttattgagagaaaattatatccaaatgttgatttttattcaggtattatctataaagctatgggtataccgtcgcaaatgtttacggtactttttgcaatagcaagaaccgtaggctggatggcacagtggaaagaaatgcacgaagaccctgaacaaaaaatcagcagacctagacagctttacaccggttatgtacatagagagtataagggtatcggggagaggtag

SEQ ID NO: 123991 - protein, 435 aa, Rickettsia felis
MTNENSNDSEFAELKIRGKIFKLPILKASIGEDVIDISRVSSEADCFTYDPGFMSTASCQSTITYIDGDKGILRHRGYDIKDLAEKSDFLEVAYLLIYGELPSIEQYNNFTKQVAHHSLVNERLHYLFQTFCSSSHPMAIMLAAVGSLSAFYPDLLNFKEADYELTAIRMIAKIPTIAAMSYKYSIGQPFIYPDNSLDFTENFLHMMFATPCTKYKVNPIIKNALNKIFILHADHEQNASTSTVRIAGSSGANPFACVSTGIASLWGPAHGGANEAVINMLKEIGSSENIPKYIAKAKDKNDPFRLMGFGHRVYKNYDPRAAVLKETCKEVLKELGQLENNPLLQIAIELEAIALKDEYFIERKLYPNVDFYSGIIYKAMGIPSQMFTVLFAIARTVGWMAQWKEMHEDPEQKISRPRQLYTGYVHREYKGIGER

SEQ ID NO: 123992 - DNA, 1311 bp, Rickettsia prowazekii
  CDS (1)..(1311): transl_table=11
atgactaatggcaataataataacttagaatttgcagaattaaaaattagaggtaaactatttaagttacctatacttaaagcaagtatcggtaaagatgtaatcgatataagtagggtatctgcggaagccgattactttacttatgatccgggttttatgtctactgcttcttgtcaatctactatcacatatatagacggtgataaaggcatattatggtatcgaggatatgatattaaagacttagctgagaaaagtgattttttagaagtggcatatttgatgatttatggggagctaccaagtagtgatcagtattgtaattttactaaaaaggttgctcatcattcattagtgaatgaaagattacactatttatttcaaaccttttgtagttcttctcatcctatggctattatgcttgcagctgttggttctctttcagcattctatcctgatttattaaattttaatgaaacagactatgaacttaccgctattagaatgattgctaagatacctactatcgctgcaatgtcttataaatattctatagggcaaccgtttatttatcctgataattcattagattttaccgaaaattttctacatatgatgtttgcaactccttgtactaaatataaagtaaatccaataataaaaaatgctcttaataagatatttatcttacatgcagaccatgagcagaatgcttctacttcaacagttcggattgctggctcatcaggagctaatccttttgcatgtattagcactggtattgcatcactttgggggcctgctcacggcggggctaatgaagcagtgataaatatgcttaaagaaattggcagttctgagaatattcctaaatatgtagctaaagctaaagataagaatgatccatttaggttaatgggttttggtcatcgagtatataaaagctatgacccgcgtgccgcagtacttaaagaaacttgtaaagaagtattaaatgaattaggtcagttagacaataatccgctgttacaaatagcaatagaacttgaagctctcgctcttaaagatgaatattttattgaaagaaaattatatccaaatgttgatttttattcaggcattatctataaagctatgggtataccgtcgcaaatgttcactgtactttttgcaatagcaagaaccgtaggttggatggcacaatggaaagaaatgcacgaagatcctgaacaaaaaatcagtagacctagacagctttacactggttatgtacatagagagtataagtgtattgtagaaagaaagtga

SEQ ID NO: 123993 - protein, 436 aa, Rickettsia prowazekii
MTNGNNNNLEFAELKIRGKLFKLPILKASIGKDVIDISRVSAEADYFTYDPGFMSTASCQSTITYIDGDKGILWYRGYDIKDLAEKSDFLEVAYLMIYGELPSSDQYCNFTKKVAHHSLVNERLHYLFQTFCSSSHPMAIMLAAVGSLSAFYPDLLNFNETDYELTAIRMIAKIPTIAAMSYKYSIGQPFIYPDNSLDFTENFLHMMFATPCTKYKVNPIIKNALNKIFILHADHEQNASTSTVRIAGSSGANPFACISTGIASLWGPAHGGANEAVINMLKEIGSSENIPKYVAKAKDKNDPFRLMGFGHRVYKSYDPRAAVLKETCKEVLNELGQLDNNPLLQIAIELEALALKDEYFIERKLYPNVDFYSGIIYKAMGIPSQMFTVLFAIARTVGWMAQWKEMHEDPEQKISRPRQLYTGYVHREYKCIVERK

SEQ ID NO: 123994 - DNA, 1311 bp, Rickettsia typhi
  CDS (1)..(1311): transl_table=11
atgactaatggaaataataataatttagaatttgcggaattaaaaattagaggtaaaatgtttaaattacctatacttaaagcaagtataggtaaagatgtaatagatataagtagggtatctgcggaagccgattgctttacttacgatccaggttttatgtctactgcttcttgtcaatctaccatcacatatatagacggtgataaaggaatcttatggcatcgaggatatgatattaaagacttagctgagaaaagtgattttttagaagtggcatatttgatgatttatggggaactaccaagtagtgagcagtatcataattttactacaaagattgctcatcatgcattagtaaatgaaagattacactatttatttcaaaccttttgtagttcttctcatcctatggctattatgcttgcagctgttggttctctttcagcattttatcctgatttattgaattttaatgaaacagactatgaacttaccgctattagaatgattgctaagatacctactatcgctgcaatgtcttataaatattctatagggcagccatttatttatcctgataattcattagattttaccgaaaattttctacatatgatgtttgcaactccttgtactaaatataaagtaaatccaataataaaaaatgcgcttaataagatatttatcttacatgcagaccatgagcagaatgcttctacttcaacagtacgaattgctggctcatcaggagctaatccttttgcatgtattagcactggtattgcatcactttgggggcctgctcacggtggagctaatgaagcagtgataaatatgcttaaagaaattggtagttctgagaatattcctaaatatgtagctaaagctaaagacaaaaatgatccatttaggttaatgggttttggtcatcgagtatataaaagttatgacccgcgtgctgcagtacttaaagaaacttgtaaagaagtattaaatgaactagggcagttagaaaataatccgttgttacaaatagcaatagaacttgaagctcttgctcttaaagatgaatattttattgagagaaaattatatccaaatgttgatttttattcaggcattatctataaagctatgggtataccgtcgcaaatgttcactgtactttttgcaatagcaagaaccgtaggttggatggcgcaatggaaagaaatgcacgaagatcctgaacaaaaaatcagtagacctagacaactttacactggttatgtacatagagaatataagtgtattgtagaaagaaagtga

SEQ ID NO: 123995 - protein, 436 aa, Rickettsia typhi
MTNGNNNNLEFAELKIRGKMFKLPILKASIGKDVIDISRVSAEADCFTYDPGFMSTASCQSTITYIDGDKGILWHRGYDIKDLAEKSDFLEVAYLMIYGELPSSEQYHNFTTKIAHHALVNERLHYLFQTFCSSSHPMAIMLAAVGSLSAFYPDLLNFNETDYELTAIRMIAKIPTIAAMSYKYSIGQPFIYPDNSLDFTENFLHMMFATPCTKYKVNPIIKNALNKIFILHADHEQNASTSTVRIAGSSGANPFACISTGIASLWGPAHGGANEAVINMLKEIGSSENIPKYVAKAKDKNDPFRLMGFGHRVYKSYDPRAAVLKETCKEVLNELGQLENNPLLQIAIELEALALKDEYFIERKLYPNVDFYSGIIYKAMGIPSQMFTVLFAIARTVGWMAQWKEMHEDPEQKISRPRQLYTGYVHREYKCIVERK

SEQ ID NO: 123996 - DNA, 1284 bp, Salmonella typhimurium
  CDS (1)..(1284): transl_table=11
atggctgatacaaaggcaaaaatcacccttactggtgacactactattgaactggatgtgctaaaaggtacactcggtcaagatgttattgatattcgtagtctcggttcaaaaggagtttttacttttgaccctggtttcacctctaccgcatcctgcgaatctaaaatcaccttcatcgacggcgacgaaggcattttgttgcatcgcggtttcccgattgaccagcttgctaccgattccaactatctggaagtctgttacatcctgctgtacggcgaaaaaccgacgcaggaagagtatgacgagttcagaacgacagtcacccgccatacgatgatccatgagcaaatcactcgcctgttccatgctttccgtcgcgactcacatccgatggcggtaatgtgcgggatcactggcgcgctggcagcgttctaccacgactcgctggatgtgaacaatccgcgccaccgtgaaatcgcggcgttccgcctgctgtccaaaatgccgaccatggcggcgatgtgttacaaatattcaatcggtcagccgtttgtttatccgcgcaacgacctttcctacgccggtaacttcctgaacatgatgttctccacgccgtgtgaaacctatgaagtgaatccggtactagagcgcgcgatggaccgtattctgatcctgcacgctgaccatgagcagaacgcctcaacgtcaacggtacgtaccgcaggttcaagcggcgccaacccattcgcctgcattgccgccgggatcgcctccctgtggggacccgcgcacggcggcgccaacgaagccgcgctgaaaatgctggaagaaatcagctctgttaaacacattccggaatttgttcgccgtgcgaaagacaagaatgattctttccgcctgatgggcttcggtcaccgtgtttacaaaaattacgatccgcgcgccaccgtgatgcgtgaaacctgccacgaagtgctgaaagagctgggcaccaaagacgatctgctggaagtggcgatggagcttgagcacattgcgctcaacgacccgtacttcatcgagaagaaactgtacccgaacgtagacttctactccggcatcattctgaaagcgatgggcattccgtcctccatgttcaccgtgatcttcgccatggcgcgtaccgttggctggattgcacactggaatgaaatgcacactgacggcatgaaaatcgcccgtcctcgtcagctgtataccggctacgataaacgcgattttaaatcggcgctgaagcgttaa

SEQ ID NO: 123997 - protein, 427 aa, Salmonella typhimurium
MADTKAKITLTGDTTIELDVLKGTLGQDVIDIRSLGSKGVFTFDPGFTSTASCESKITFIDGDEGILLHRGFPIDQLATDSNYLEVCYILLYGEKPTQEEYDEFRTTVTRHTMIHEQITRLFHAFRRDSHPMAVMCGITGALAAFYHDSLDVNNPRHREIAAFRLLSKMPTMAAMCYKYSIGQPFVYPRNDLSYAGNFLNMMFSTPCETYEVNPVLERAMDRILILHADHEQNASTSTVRTAGSSGANPFACIAAGIASLWGPAHGGANEAALKMLEEISSVKHIPEFVRRAKDKNDSFRLMGFGHRVYKNYDPRATVMRETCHEVLKELGTKDDLLEVAMELEHIALNDPYFIEKKLYPNVDFYSGIILKAMGIPSSMFTVIFAMARTVGWIAHWNEMHTDGMKIARPRQLYTGYDKRDFKSALKR

SEQ ID NO: 123998 - DNA, 1422 bp, Schizosaccharomyces pombe; identical to SEQ ID NO: 93197
  CDS (1)..(1422)

SEQ ID NO: 123999 - protein, 473 aa, Schizosaccharomyces pombe; identical to SEQ ID NO: 93198

SEQ ID NO: 124000 - DNA, 1416 bp, Solanum tuberosum
  CDS (1)..(1416)
atggtgttctaccgtagcgtttcgttgctgtcaaagctccgctctcgagcggtccaacagtcaaatgttagcaattctgtgcgctggcttcaagtccaaacctcttccggtcttgatctgcgttctgagctggtacaagaattgattcctgaacaacaggatcgcctgaaaaagatcaagtcagatatgaaaggttcaattgggaacatcacagttgatatggttcttggtggaatgagaggaatgacaggattactgtggaaacctcattaccttgaccctgatgagggaattcgcttccgggggttgtctatacctgaatgccaaaaggtattacctgcagcaaagcctgggggtgagcccttgcctgaaggtcttctctggcttcttttaacaggaaaggtgccatcaaaagagcaagtgaattcaattgtctcaggaattgcagagtcgggcatcatatccctgatcatcatgtatacaactattgatgccttaccagtcacagctcatccaatgacccagtttgctactggagtcatggctcttcaggttcaaagtgaatttcaaaaggcatacgagaaagggattcacaaatcaaagtattgggaaccaacatatgaggattccatgaatctgattgctcaagttccacttgttgctgcttatgtttatcgcaggatgtacaagaatggtgacactatacctaaggatgaatccctggattatggtgcaaattttgctcacatgcttggtttcagtagctctgaaatgcatgaacttcttatgaggctctatgtaacaatacacagtgatcatgaaggtggtaatgtcagtgctcacaccggtcacttggttgctagtgctttgtctgatccttacctctcctttgctgctgctttgaatggtttagccggaccacttcatggtttagccaatcaggaagttttgctatggataaaatctgttgtagaagaatgtggggagaacatttccaaagagcagttgaaagactatgtttggaaaacattgaacagtggcaaggttgtccctggttttggacatggagttctgcgaaagactgtaccaagatatacatgccagagagagttcgctatgaagcatttgcctgaagatccactgtttcaactggtttcaaaactctacgaagttttcctcctgttcttacagaacttggcaaagttaaaaccttggccaaatgttgatgcccacagtggtgtgttgttgaactattatggtttaactgaagcaagatattatacggtcctctttggcgtatcaagagctcttggcatttgctctcagctaatttgggaccgagctcttggattgccgctagagaggccaaagagtgtcacaatggagtggcttgagaaccagtgcaagaaagcatga

SEQ ID NO: 124001 - protein, 471 aa, Solanum tuberosum; identical to SEQ ID NO: 93200

SEQ ID NO: 124002 - DNA, 1119 bp, Streptococcus mutans
  CDS (1)..(1119): transl_table=11
atggcagaaacaaatggcttaaaggacatgattgcctgtgatacaagaattagtgccatcaaggataataaactctcgtatgcaggttatgatattgctgatttaatggacaataaggctcggtttgaagaggtcatttacctcctttggaatcttcatttaccaacagcaattgaactgaagcaatttgaagagaaattacgcaaaaattatgcgataagtgatgccattgaacaatgtattctcattcaatcgcgccagcacctacaccccatgagtgttttgcgttcaacggtaagtctattaggcgtttataatttaaaagctgaggaaagaagtgtagaagctacttatgaccaaagcattcagttgatggccaagataccgaccattattgcaacctttgcaagattgcgtcaggggctgtctcctatcgctcctagaaaggatcttggcttcgctgctaatttcctatatatgttaaatggccgccttccaagtgaattagagattttagctatgaatcgtgcgcttgttctacatgctgaacatgaactcaatgcctctacctttgcggctagggtttgtgcctcaactctatcagatatttactcttgtgtaacaacagctattggaaccttaaaaggtcccttgcacggtggtgccaatgagcgtgtatttgatatgctaagagagattcgtgaatacggtgatgttgacagttacttgcaagaaaaactcaactctaaagaaaaaatcatgggctttgggcatcgcgtttatcagacacaagatccacgtgaaaaatatttgcgcgaaatggcgagagaattgaccaagggaacagagcatgacatttggtatcaattatccaaaaaagttgaaatttgtatgaagcaaaagaaaaatctaattcctaatgttgatttttattcggctactgtttaccatgttttaggtattgatagttctatttttaccttaatttttgccatgagccgtgtttcgggttggattgcccatattcaagagcaacaaaaaaataacaaattaatccgtccgcgctctcactatactggtatgaggaagttacgctatattcctattgaaaggagataa

SEQ ID NO: 124003 - protein, 372 aa, Streptococcus mutans
MAETNGLKDMIACDTRISAIKDNKLSYAGYDIADLMDNKARFEEVIYLLWNLHLPTAIELKQFEEKLRKNYAISDAIEQCILIQSRQHLHPMSVLRSTVSLLGVYNLKAEERSVEATYDQSIQLMAKIPTIIATFARLRQGLSPIAPRKDLGFAANFLYMLNGRLPSELEILAMNRALVLHAEHELNASTFAARVCASTLSDIYSCVTTAIGTLKGPLHGGANERVFDMLREIREYGDVDSYLQEKLNSKEKIMGFGHRVYQTQDPREKYLREMARELTKGTEHDIWYQLSKKVEICMKQKKNLIPNVDFYSATVYHVLGIDSSIFTLIFAMSRVSGWIAHIQEQQKNNKLIRPRSHYTGMRKLRYIPIERR

SEQ ID NO: 124004 - DNA, 1134 bp, Sulfolobus solfataricus
  CDS (1)..(1134): transl_table=11
atgagtgtcgtaagtaaaggtttggagaatgttattataaaggttacaaatttaacattcatagatggggagaaaggaatactgaggtatagaggatataatattgaagatctagttaactatggcagttacgaagagactatctacttaatgctttatggaaaattacctacaaagaaagaattaaacgatttaaaggctaaacttaatgaggaatacgaggtacctcaggaagttttagacacaatataccttatgccgaaagaagcagacgcaataggtcttttagaagtaggaacagcagcattagcctctattgataagaactttaaatggaaggaaaacgataaagaaaaagcaattagcattattgctaaaatggctactctagtagcaaatgtatatagaagaaaggagggtaataagccaagaattccagagccctcagatagttttgcaaaaagctttcttttagcgagtttcgctagggaacctactacagatgagataaacgcaatggataaggcgttaatactttatactgatcatgaagtgccagcatcgacaacggcagcacttgttgcagcatccactttgtcggatatgtattcttcccttactgcagccttagctgcgttaaaaggtccattacatggtggagcagctgaagaggcttttaagcaattcattgaaataggtgatccaaatagagtacaaaactggtttaatgataaggtagtgaatcagaagaatagactaatgggatttggtcatagagtttacaagacttatgatcccagggcaaagatatttaagaaactagccttaacgctaattgaaaggaatgctgatgcaaggagatattttgagatagctcaaaaacttgaggagttgggaattaagcaattttctagcaagggaatctatcctaacactgatttctattctggaatagtcttctacgctttaggatttccagtatacatgtttactgccttatttgccttatcgagaactttaggttggttagcacatataatagaatatgtagaggaacagcacagacttattagaccaagagccttatatgttggaccagaatatcaagagtatgtttctatagataaacgataa

SEQ ID NO: 124005 - protein, 377 aa, Sulfolobus solfataricus
MSVVSKGLENVIIKVTNLTFIDGEKGILRYRGYNIEDLVNYGSYEETIYLMLYGKLPTKKELNDLKAKLNEEYEVPQEVLDTIYLMPKEADAIGLLEVGTAALASIDKNFKWKENDKEKAISIIAKMATLVANVYRRKEGNKPRIPEPSDSFAKSFLLASFAREPTTDEINAMDKALILYTDHEVPASTTAALVAASTLSDMYSSLTAALAALKGPLHGGAAEEAFKQFIEIGDPNRVQNWFNDKVVNQKNRLMGFGHRVYKTYDPRAKIFKKLALTLIERNADARRYFEIAQKLEELGIKQFSSKGIYPNTDFYSGIVFYALGFPVYMFTALFALSRTLGWLAHIIEYVEEQHRLIRPRALYVGPEYQEYVSIDKR

SEQ ID NO: 124006 - DNA, 1194 bp, Synechocystis sp
  CDS (1)..(1194): transl_table=11
gtgaattatatgatgactgataacgaagtgtttaaagaaggcctagccggagtccccgccgctaaatcgagggtgagccatgtggatggcaccgacggtattttggagtaccggggcattcgcatcgaagaattagccaaatccagtagttttatcgaagtagcctatctgctcatctggggtaaattgcccacccaggcagagatcgaagagtttgagtacgaaattcgcacccatcgacgcattaagtaccacatccgggacatgatgaaatgttttcccgaaacagggcaccccatggatgccttgcaaacttcagcggcggccttgggattgttctatgctcgacgggccttggatgaccccaaatatatccgggcggcggtggtgcgtctgttagccaaaatccccaccatggtggcagctttccacatgatccgggagggtaacgatcccattcagcccaatgataaattggattacgcttccaacttcctttacatgctgacggagaaggagccagacccctttgccgccaaagtgtttgatgtgtgtttgaccctccatgctgagcacaccatgaatgcgtccaccttttcggcccgggtaacggcttctactctcacggatccctatgcagtggttgcctcggcggtggggactttggcggggccgctccacgggggagccaacgaagaagtgctaaatatgcttgaagaaattggctcagtggaaaatgtccgcccctacgtggaaaaatgcctggccaacaaacagcgcatcatgggctttggccaccgagtttataaagtcaaagacccccgggcaattattttgcaggatttggctgaacagttatttgccaaaatgggccacgacgaatattacgaaatcgcagtggagttggaaaaagtagtggaagaatacgtgggtcaaaagggcatttaccccaatgtggacttctattccggtttggtttaccgcaagctagacatccccgccgatctgtttacgcccctatttgcgatcgccagggtggcgggttggttggcccactggaaggaacaattatcagtcaataaaatttaccgtcctacccaaatttacatcggtgaccataatttatcttatgttcccatgacagaacgggtagtttccgtggcccgcaatgaagaccccaatgcgattatttaa

SEQ ID NO: 124007 - protein, 397 aa, Synechocystis sp
MNYMMTDNEVFKEGLAGVPAAKSRVSHVDGTDGILEYRGIRIEELAKSSSFIEVAYLLIWGKLPTQAEIEEFEYEIRTHRRIKYHIRDMMKCFPETGHPMDALQTSAAALGLFYARRALDDPKYIRAAVVRLLAKIPTMVAAFHMIREGNDPIQPNDKLDYASNFLYMLTEKEPDPFAAKVFDVCLTLHAEHTMNASTFSARVTASTLTDPYAVVASAVGTLAGPLHGGANEEVLNMLEEIGSVENVRPYVEKCLANKQRIMGFGHRVYKVKDPRAIILQDLAEQLFAKMGHDEYYEIAVELEKVVEEYVGQKGIYPNVDFYSGLVYRKLDIPADLFTPLFAIARVAGWLAHWKEQLSVNKIYRPTQIYIGDHNLSYVPMTERVVSVARNEDPNAII

SEQ ID NO: 124008 - DNA, 1158 bp, Thermoplasma acidophilum
  CDS (1)..(1158): transl_table=11
atgccagaaactgaagaaattagcaaagggcttgaggatgtcaatataaagtggacaaggctcacgaccatcgacggaaataagggaatcctgcgatacgggggctattctgtcgaagatataattgcctctggggcacaggatgaggagatccagtatctgttcctgtatgggaaccttccaactgaacaggagctcagaaaatacaaggaaaccgtccagaagggttataagataccagattttgtcataaacgccataaggcagctgccaagggaatcggatgctgtggcaatgcagatggccgcggttgcagccatggcagcatcggagacaaagttcaagtggaacaaggatacggacagagacgttgcagcagaaatgatcggcaggatgtcagcgataaccgtgaacgtgtacaggcacataatgaacatgccggccgagcttccgaaaccatcagacagctacgctgagagcttcctgaacgctgcgtttggaaggaaggcaacaaaggaagagatagacgccatgaatacggcactgattctctacacagaccatgaggtgcctgcatctaccacggcaggcttggtcgcggtatcaaccctctcagacatgtactccggcataactgcagctcttgcggccctcaagggtccgctgcatggcggtgcagctgaggcagcaatagcgcagttcgatgagataaaggatcccgccatggtggagaagtggttcaacgacaacataataaacggaaagaagagactcatgggcttcggccacagggtatacaagacctacgatccaagggcaaagatattcaagggcatcgctgagaaactctccagcaagaagccagaggtgcacaaggtatatgagatcgccacgaagcttgaagactttggcatcaaggcattcggttcaaagggcatatatccgaacacggattacttctccggaatagtatacatgtccataggattcccgctgaggaacaacatatacacggcgctcttcgcgctatccagggttacagggtggcaggcacacttcatagagtacgtggaggaacagcagagactgattaggccgagagccgtttacgtcggtcctgcagagagaaagtacgtacccatcgctgaaagaaagtga

SEQ ID NO: 124009 - protein, 385 aa, Thermoplasma acidophilum
MPETEEISKGLEDVNIKWTRLTTIDGNKGILRYGGYSVEDIIASGAQDEEIQYLFLYGNLPTEQELRKYKETVQKGYKIPDFVINAIRQLPRESDAVAMQMAAVAAMAASETKFKWNKDTDRDVAAEMIGRMSAITVNVYRHIMNMPAELPKPSDSYAESFLNAAFGRKATKEEIDAMNTALILYTDHEVPASTTAGLVAVSTLSDMYSGITAALAALKGPLHGGAAEAAIAQFDEIKDPAMVEKWFNDNIINGKKRLMGFGHRVYKTYDPRAKIFKGIAEKLSSKKPEVHKVYEIATKLEDFGIKAFGSKGIYPNTDYFSGIVYMSIGFPLRNNIYTALFALSRVTGWQAHFIEYVEEQQRLIRPRAVYVGPAERKYVPIAERK

SEQ ID NO: 124010 - DNA, 1161 bp, Thiobacillus ferrooxidans
  CDS (1)..(1161): transl_table=11
atggcggaaccgaactttgcgccaggtctggagggtgtggctgcaacccagtccagcatttccaacatcgatggcgctgccggcctgctgagttaccgtggttttgccattgcggatcttgcggcgcacagcagtttcgaggaggtggcgctcttgctgctggatggtgtcctgcccggcgccgcagatctggaacggttcgaccacggtctgcgtgcgcaccgccaagtcaaatataatgtccgggaaatcatgaagttcatgcccgtgaccggacaccccatggatatgctgcactgtgccgtggccagtctgggcatgttctacccgcagcaggagctttccgatgccgaacgcggaaatacgctccatttggacgccatggcgatgcggattatcgcgcgcatgcccaccattgtcgcgatgtgggagcagatgcgtttcggcaatgatcctatttcacctcgcccggatctcagccatgcggccaactttctctatatgctgtcgggtcgcgaacctgatccggcccataccaaaatcctcgactcctgcctgattctgcatgccgagcacaccatcaatgccagtaccttctcggtactggtgaccggatccaccctgaccaatccttaccatgtcatcgggggggcgatcggaaccctggccggcccgttgcatggtggtgccaatcagaaggtggtggaaatgctggaagaaatcagctccgtccagcaggtgggtgcctatctcgacaggaagatggccaacaaggagaagatctggggtttcgggcatcgcatctacaaaacccgcgatccgcgtgcagtgattctcaaggggatgatggaggatatggccagtcatggaaatctgcggcatagcagcctctttgaaattgccatcgaagtggaacgccaggctacggagcggctcggtgcccaagggattcacgccaatgtggatttctattcgggcgtgctgtatcacgagatgggcatcaaagcggacctttttacgcctatttttgctatggctcgttctgcgggctggctggctcactggcgggagcaactggcggataaccggatcttccggcctacgcaggtgtatacaggggaacaggatcgacgctatgtgcctgtggcccaacgtacttag

SEQ ID NO: 124011 - protein, 386 aa, Thiobacillus ferrooxidans
MAEPNFAPGLEGVAATQSSISNIDGAAGLLSYRGFAIADLAAHSSFEEVALLLLDGVLPGAADLERFDHGLRAHRQVKYNVREIMKFMPVTGHPMDMLHCAVASLGMFYPQQELSDAERGNTLHLDAMAMRIIARMPTIVAMWEQMRFGNDPISPRPDLSHAANFLYMLSGREPDPAHTKILDSCLILHAEHTINASTFSVLVTGSTLTNPYHVIGGAIGTLAGPLHGGANQKVVEMLEEISSVQQVGAYLDRKMANKEKIWGFGHRIYKTRDPRAVILKGMMEDMASHGNLRHSSLFEIAIEVERQATERLGAQGIHANVDFYSGVLYHEMGIKADLFTPIFAMARSAGWLAHWREQLADNRIFRPTQVYTGEQDRRYVPVAQRT

SEQ ID NO: 124012 - DNA, 1146 bp, Corynebacterium glutamicum
  CDS (1)..(1146): transl_table=11
atgagtgacagccaagtccgcaaaggactcaacggcgtcatctctgactacacaagcatttccaaagtgatgccagagagcaactcgctgacttaccgtggctacgccgtggaggatttggtggaaaactgcagctttgaagaagtgatctacctcctgtggtttggggagctgcccaccactgaacaactccggaccttcaacacgacaggtcgaagctaccgctcactcgacgccggactgatttccctcatccactccttacccaacacctgccaccccatggacgtgctgcgcaccgcagtgtcctacatgggtacctttgatcccgatccgtttacccgcgatgccgatcatatccgaagcattggacacaacctgcttgcgcagcttcccatggtggttgccatggatatccgcaggcgaagtggggaagagatcatcgcacctgaccacaacaaaggtatcgcttcgaatttcttatccatggtgtttggcaatgatgatggttctgtagccaactccgcagatgacatccgcgattttgaacgctccctcatcctctacgccgagcactccttcaacgcctccacattctcagcccgcgtgatctcatcaacgcgatccgatacgtattcggcgatcacaggtgcgatcggtgctctcaaaggcccactgcacggaggtgccaatgagtttgtcatgcacaccatgctggatatcgacgatcccaacaatgctgccgactggatgggcaaggcgttggatcgtaaagaacgcatcatgggattcgggcaccgcgtgtacaaaaacggcgactccagggtcccctccatggagaaatccatgcgctcccttgctgctcgtcaccgtggtcaaaaatgggtgcacatgtatgagtcgatgcaagaagtcatggaggctcgcactggcattaaacccaacctcgacttcccggccggccctgcctattacatgctgggattccccgtcgacttcttcacaccactgtttgtgctggcccgagtgtcagggtggacggcacacatcgtggagcaatttgaaaacaatgcgctgatccgaccattgtctgcctacaacggagtggaagaaagggaggtggtgcccatttcggagagaacctaa

SEQ ID NO: 124013 - protein, 381 aa, Corynebacterium glutamicum
MSDSQVRKGLNGVISDYTSISKVMPESNSLTYRGYAVEDLVENCSFEEVIYLLWFGELPTTEQLRTFNTTGRSYRSLDAGLISLIHSLPNTCHPMDVLRTAVSYMGTFDPDPFTRDADHIRSIGHNLLAQLPMVVAMDIRRRSGEEIIAPDHNKGIASNFLSMVFGNDDGSVANSADDIRDFERSLILYAEHSFNASTFSARVISSTRSDTYSAITGAIGALKGPLHGGANEFVMHTMLDIDDPNNAADWMGKALDRKERIMGFGHRVYKNGDSRVPSMEKSMRSLAARHRGQKWVHMYESMQEVMEARTGIKPNLDFPAGPAYYMLGFPVDFFTPLFVLARVSGWTAHIVEQFENNALIRPLSAYNGVEEREVVPISERT

SEQ ID NO: 124014 - DNA, 1170 bp, Escherichia coli
  CDS (1)..(1170): transl_table=11
atgagcgacacaacgatcctgcaaaacagtacccatgtcattaaaccgaaaaaatctgtggcactttctggcgttccggcgggcaatacggcgctctgcaccgtgggtaaaagtggcaatgacctgcattaccgcggctacgatattcttgatctggcgaaacattgcgaatttgaagaagtggcgcatctgctgatccacggcaaactgccgacccgtgacgaactcgccgcttacaaaacgaaactgaaagccctgcgcggtttaccggctaacgtgcgtaccgtgctggaagccttaccggcggcgtcgcacccgatggatgttatgcgcaccggtgtttccgcgctcggctgcacgctgccagaaaaagaggggcataccgtctctggcgcgcgggatattgccgacaaactgctggcgtcgcttagctcgattctcctttattggtatcactacagccacaacggcgaacgcatccaaccggaaaccgatgacgactccatcggcggtcacttcctgcatctgctgcacggcgaaaagccatcgcaaagctgggaaaaggcgatgcatatctcgctggtgctgtacgccgaacacgagtttaacgcctccacctttaccagtcgggtgattgcgggcaccggctctgatatgtattccgcgattattggcgcgattggcgcactgcgcgggccaaaacacggcggggcgaatgaagtgtcgctggagatccagcaacgctacgaaacgccggacgaagccgaagcagatatccgcaagcgcgtggaaaacaaagaagtggtcattggttttggtcatccggtttacaccatcgctgacccgcgccaccaggtgattaaacgtgtggcgaagcagctctcgcaggaaggcggctcgctgaagatgtacaacatcgccgatcgcctggaaacggtgatgtgggagagcaaaaagatgttccccaatctcgactggttctctgctgtttcctacaacatgatgggcgttcccaccgagatgttcacaccactgtttgttatcgcccgcgtcaccggctgggcggcgcacattatcgaacaacgtcaggacaacaaaattatccgtccttccgccaattatgttggaccggaagaccgcccgtttgtcgcgctggataagcgccagtaa

SEQ ID NO: 124015 - protein, 389 aa, Escherichia coli
MSDTTILQNSTHVIKPKKSVALSGVPAGNTALCTVGKSGNDLHYRGYDILDLAKHCEFEEVAHLLIHGKLPTRDELAAYKTKLKALRGLPANVRTVLEALPAASHPMDVMRTGVSALGCTLPEKEGHTVSGARDIADKLLASLSSILLYWYHYSHNGERIQPETDDDSIGGHFLHLLHGEKPSQSWEKAMHISLVLYAEHEFNASTFTSRVIAGTGSDMYSAIIGAIGALRGPKHGGANEVSLEIQQRYETPDEAEADIRKRVENKEVVIGFGHPVYTIADPRHQVIKRVAKQLSQEGGSLKMYNIADRLETVMWESKKMFPNLDWFSAVSYNMMGVPTEMFTPLFVIARVTGWAAHIIEQRQDNKIIRPSANYVGPEDRPFVALDKRQ

SEQ ID NO: 124016 - DNA, 1383 bp, Emericella nidulans; identical to SEQ ID NO: 93201
  CDS (1)..(1383): transl_table=4

SEQ ID NO: 124017 - protein, 460 aa, Emericella nidulans; identical to SEQ ID NO: 93202

SEQ ID NO: 124018 - DNA, 1170 bp, Salmonella typhimurium
  CDS (1)..(1170): transl_table=11
atgacagacacgacgatcctgcaaaacaacacgcatgtcattaagcctaaaaaatcggtcgcgctttccggcgtacctgccggaaataccgctctgtgtaccgtgggaaaaagcggtaacgatctgcactatcgcggttacgacattctcgatctggcggagcactgcgaatttgaagaagtcgcgcatttactgatccacggaaaattaccgacccgcgacgagctgaacgcgtataaaagcaagttaaaagcgctgcgcggattacccgccaatgtccgtaccgttctggaagcgttaccggcggcctcgcacccgatggacgtgatgcgtaccggcgtctccgcgctgggctgcaccctgccggaaaaagagggacataccgtctccggcgcgcgcgatattgccgataagctgttggcctcgctcagctctatccttctttactggtatcactacagccacaacggcgaacgtattcagccggaaaccgacgatgattccatcggcggccatttcctgcatctgctgcacggtgaaaagccaacccaaagctgggaaaaggcgatgcatatttcgctggtgctgtatgccgagcatgagttcaacgcctcgacgtttaccagccgggtgattgccgggactggctcggatgtctactccgcgattatcggcgcgattggcgcgctgcgcggcccgaaacacggcggggcgaatgaggtgtcgctggaaattcaacagcgttatgaaacgccggacgaggcagaggcggatatccgtaaacgcgtggaaaacaaagaggtggtgattggctttggacatccggtttacaccatcgccgacccgcgccatcaggtgatcaaacgggtggcgaaacagctttcagaagaaggcggctcgctgaagatgtaccacatcgccgaccgtctggaaacggtgatgtgggagaccaaaaagatgttcccgaatctcgactggttttcggcggtctcctacaacatgatgggcgtccctaccgaaatgttcaccccgctgtttgtcatcgcccgcgttaccggctgggcggcgcacattattgaacagcgtcaggacaacaaaattattcgcccctctgccaactataccgggccggaagatcgtccgtttgtctcgatagacgatcgttgctaa

SEQ ID NO: 124019 - protein, 389 aa, Salmonella typhimurium
MTDTTILQNNTHVIKPKKSVALSGVPAGNTALCTVGKSGNDLHYRGYDILDLAEHCEFEEVAHLLIHGKLPTRDELNAYKSKLKALRGLPANVRTVLEALPAASHPMDVMRTGVSALGCTLPEKEGHTVSGARDIADKLLASLSSILLYWYHYSHNGERIQPETDDDSIGGHFLHLLHGEKPTQSWEKAMHISLVLYAEHEFNASTFTSRVIAGTGSDVYSAIIGAIGALRGPKHGGANEVSLEIQQRYETPDEAEADIRKRVENKEVVIGFGHPVYTIADPRHQVIKRVAKQLSEEGGSLKMYHIADRLETVMWETKKMFPNLDWFSAVSYNMMGVPTEMFTPLFVIARVTGWAAHIIEQRQDNKIIRPSANYTGPEDRPFVSIDDRC

SEQ ID NO: 124020 - DNA, 1419 bp, Oryza sativa; identical to SEQ ID NO: 93097
  CDS (1)..(1419)

SEQ ID NO: 124021 - protein, 472 aa, Oryza sativa; identical to SEQ ID NO: 93098

SEQ ID NO: 124022 - DNA, 1419 bp, Oryza sativa; identical to SEQ ID NO: 93095
  CDS (1)..(1419)

SEQ ID NO: 124023 - protein, 472 aa, Oryza sativa; identical to SEQ ID NO: 93096

SEQ ID NO: 124024 - DNA, 1527 bp, Brassica napus
  CDS (1)..(1527)
atggagatttctgcgagaagattggccgttctcactgcgcacttggcggtatctgatcccgtcggatcgatccaggtgttgccgccggcgatcgagccgtggtgcacatcgagtgctttaccaccgcatggatcgctcaagggaagcttgacgatcgtcgatgagcgcacggggaggaagtatcaggtcccggtatcagaggacggtaccgttaaagccgttgatctcaagaagataacgacgacggggaaggatgacaaggggcttaagttgtacgatccaggttacttgaacacggctcctgttaggtcttcgatctcttacatcgatggagatgaagggatcttacgttatcgtgggtacccaatagaagagttggctgagagcagcactttcattgaggtttcttacctcctcatgtatgggaatctgccttctcaaagtcagctagctgattgggagttcaccattcctcagcattctgctgtcccacaaggagttttggaaatcatacagtccatgcctcatgatgcacacccaatgggggttcttgtgagtgcaatgagtgcactttccatctttcatcctgatgccaaccctgctcttaggggccaagatatttacaagtcgaaacaaattcgtggtaaacagattgttcgtattcttggaaaggctccaacagttgcggcggctgcttatttgaggatggcaggcaggcctcctgttcttccttctggcaacctttcttatgctgagaatttcctctatatgctggattcaatgggcaatacgtcttacaagcctaatcctcgtctggctcgggtgctagacatcctcttcatactgcatgctgaacatgaaatgaactgctccactgctgctgctcggcatcttgcctctagtggtgttgacgtgtacaccgctgttgcgggagctgttggagcgctatacggtcctcttcatggcggtgcgaacgaggctgtccttaagatgttagcagagattgggagtgttgaaaacattccagagttcatcgaaggggtgaagagcagaaagaggaagatgtctggttttggacatcgtgtttacaaaaactacgacccgagagcaaaagtcattaagaaactggcggatgaagtgttctccatcgttggaagggatcctctgatcgaggtagcagttgctctagagaagacggcactctctgatgaatattttgtgaagagaaagctttatccaaatgtggatttctactctggattaatctatagggcaatgggattcccaccagaattcttcacagtcctgtttgcagtcccgcgtatggctgggtatttgtcacactggcgggagtctttggatgatcctgacactaagatcatgagaccccaacaggcctacactggggtgtggctaaggcattacgagccggtgagagaaagaacgttgtcaagtgattcggataagttgggtcaagtttcgatttcgaatgcatcaagaaggcgtttatctggatctgcactttag

SEQ ID NO: 124025 - protein, 508 aa, Brassica napus
MEISARRLAVLTAHLAVSDPVGSIQVLPPAIEPWCTSSALPPHGSLKGSLTIVDERTGRKYQVPVSEDGTVKAVDLKKITTTGKDDKGLKLYDPGYLNTAPVRSSISYIDGDEGILRYRGYPIEELAESSTFIEVSYLLMYGNLPSQSQLADWEFTIPQHSAVPQGVLEIIQSMPHDAHPMGVLVSAMSALSIFHPDANPALRGQDIYKSKQIRGKQIVRILGKAPTVAAAAYLRMAGRPPVLPSGNLSYAENFLYMLDSMGNTSYKPNPRLARVLDILFILHAEHEMNCSTAAARHLASSGVDVYTAVAGAVGALYGPLHGGANEAVLKMLAEIGSVENIPEFIEGVKSRKRKMSGFGHRVYKNYDPRAKVIKKLADEVFSIVGRDPLIEVAVALEKTALSDEYFVKRKLYPNVDFYSGLIYRAMGFPPEFFTVLFAVPRMAGYLSHWRESLDDPDTKIMRPQQAYTGVWLRHYEPVRERTLSSDSDKLGQVSISNASRRRLSGSAL

SEQ ID NO: 124026 - DNA, 1413 bp, Brassica napus
  CDS (1)..(1413)
atggagagggtaaacgctagattagccgttctctctgcgcacttggaggtgtcagatcccatgccggcggcgataaagccatggtgcacatcaagtgctggtgcaccgcatggatccctaatgggaaacttgacgatcgttgatgagcgtacggggaagaagtatcaggtcccagtctctgaggatggtaccgttaaatccattgatctcaagaagataacgacagggaaagatgacaagggacttaaattatacgatccaggttacttgaacacggctcctgttcgatcttccatttcttacatcgacggagatgaaggcatcctacgttatcgtggatacccaattgaagagttggctgagaattgtacttttcttgaggttgcttacctcctcatttatgggaacctgccttcacaacgccagctagctgatttggagtttgaggtttctcagcattcagctgttccacaagggcttctagatattatccagtccatgcctcaagatgcacatccatcgggtgcttttgtcagtgcggctgcaatgagtgcactttccctcttttatcctgatgcaaatccttctcatatgggccaagatatttacaagtcaaaacaagttcgtgataaacagatatttcgtattcttggacaggcacctacgattgcagcaaatgcttttctgaggacgtcaggcaagcctcctgttcttccttcaagcaacttttcttatgcagagaacgtactctatatgctggattcaatgggcgataagtcttacaaacctaatcctcggctagctcgagtgttggacatcatcttcatactgcatgccgaacatgaaatgaactgctctactgctgctgctcggcatcttgcttcgagtggtgttgatgtgtacgctgctatttccggagctgttggagccctttatggcccacttcatggtggtgcaactgatgctgtgtctaagatgttatcagagattggaactgttgaaaacattccagacttcttccaatgcgtgaagaacaagaagaggaggttgtcaggttttggacaccgtgtttacaaaaattacgaccctcgagcaaaagtggttaaaaaactggcgtatgaagtgttctcaattgttggaaaggatccgctgattgaggtagcagttgctctagagaaggcggcactctctgatgaatattttgttaagaggaagctttaccccaatgttgatttctactctggattagtctttagggcaatgggaatcccgccacaattcattgcagttccacgtatggctggatacttggcacactggcttgagtcgttagataatcctgacactaagatcatgagaccccaacaggtctatactggagtgtggctaaggcattatgctccggtgaattga

SEQ ID NO: 124027 - protein, 470 aa, Brassica napus
MERVNARLAVLSAHLEVSDPMPAAIKPWCTSSAGAPHGSLMGNLTIVDERTGKKYQVPVSEDGTVKSIDLKKITTGKDDKGLKLYDPGYLNTAPVRSSISYIDGDEGILRYRGYPIEELAENCTFLEVAYLLIYGNLPSQRQLADLEFEVSQHSAVPQGLLDIIQSMPQDAHPSGAFVSAAAMSALSLFYPDANPSHMGQDIYKSKQVRDKQIFRILGQAPTIAANAFLRTSGKPPVLPSSNFSYAENVLYMLDSMGDKSYKPNPRLARVLDIIFILHAEHEMNCSTAAARHLASSGVDVYAAISGAVGALYGPLHGGATDAVSKMLSEIGTVENIPDFFQCVKNKKRRLSGFGHRVYKNYDPRAKVVKKLAYEVFSIVGKDPLIEVAVALEKAALSDEYFVKRKLYPNVDFYSGLVFRAMGIPPQFIAVPRMAGYLAHWLESLDNPDTKIMRPQQVYTGVWLRHYAPVN

SEQ ID NO: 124028 - DNA, 1512 bp, Zea mays
  CDS (1)..(1512)
atggatcgcgccgaccccgcgcggggccgccttgccgtgctctcctcccacctccgtggtgcaggggccgaggaggcggcgaggctggagaggtcgccggtatccgcgccggcgcccgggccccgcgccggcgcgcttgccgtggtggacgggaggaccgggaagcggcacgaggtcaaggtctccgaagacggcaccgtgcgcgccaccgacttcaagaagattaccactggaaaggacgacaagggtcttaagatttatgatcctggttaccttaacactgcccctgttcgctcgtccatctgctacatcgatggagatgagggaatccttcgctataggggttatccaatcgaagaattggctgaaagcagctcgtttgttgaggtggcctaccttttaatgtatgggaacttgcctactcagagtcaattggcaggctgggaatttgctatttctcagcattctgctgttccccaaggactgttggatatcatacaatcaatgccccatgatgctcaccccatgggtgttcttgccagtgctatgagcaccctttctgtctttcatccagatgcaaaccctgctctacaaggtcaagatctttataaatcgaagcaggtgagggataaacaaattgtgcgagtacttgggaaggcaccaacaatagcagctgctgcctacttgagattagcaggaagacctcccgtccttcctttaaatactctatcttattcagagaacttcttgtacatgctggactctttgggtgacagaacatataaaccaaatcctcgacttgctcgagctctagatattctttttattctgcatgctgaacatgaaatgaactgctccactgctgctgttaggcaccttgcttcaagtggtgtggatgtatttactgctctttctggtggtgttggagctctatatggtcctctgcatggcggcgcaaacgaggcagtacttaaaatgttaaatgagattggaagcatggaaaatattccagatttcattgtaggagtgaagaacaggaagaggaagatgtccggttttgggcaccgtgtgtataaaaactatgaccctcgtgctaaagtcataaggaaattggcagatgaggtgttctcaattgttggacgggatccacttattgaggtggccattgccctagaaaaggcagcgctgtcagacgaatattttatcaagaggaagctgtatccaaatgtggatttctactctgggctaatttatagggcaatgggattccctacagaattttttcctgtgctgtttgctattcctcgcatgggtggctggctagcgcattggaaagagtcactcgatgatcctgacactaagattataaggccccaacaggtatacaccggctcctggcttaggcactatacccccgtcagagaacgagtgctatcaagccagagtgaggaacttggtcaggttgccacctcaaacgcaactaggcgccgccgtgctggttctgccctgtag

SEQ ID NO: 124029 - protein, 503 aa, Zea mays
MDRADPARGRLAVLSSHLRGAGAEEAARLERSPVSAPAPGPRAGALAVVDGRTGKRHEVKVSEDGTVRATDFKKITTGKDDKGLKIYDPGYLNTAPVRSSICYIDGDEGILRYRGYPIEELAESSSFVEVAYLLMYGNLPTQSQLAGWEFAISQHSAVPQGLLDIIQSMPHDAHPMGVLASAMSTLSVFHPDANPALQGQDLYKSKQVRDKQIVRVLGKAPTIAAAAYLRLAGRPPVLPLNTLSYSENFLYMLDSLGDRTYKPNPRLARALDILFILHAEHEMNCSTAAVRHLASSGVDVFTALSGGVGALYGPLHGGANEAVLKMLNEIGSMENIPDFIVGVKNRKRKMSGFGHRVYKNYDPRAKVIRKLADEVFSIVGRDPLIEVAIALEKAALSDEYFIKRKLYPNVDFYSGLIYRAMGFPTEFFPVLFAIPRMGGWLAHWKESLDDPDTKIIRPQQVYTGSWLRHYTPVRERVLSSQSEELGQVATSNATRRRRAGSAL

SEQ ID NO: 124030 - DNA, 1524 bp, Brassica napus
  CDS (1)..(1524)
atggagatttctgcgagaagattggccgttctcactgcgcacttggcggtatctgatcccgtcggatcgatccaggtgttgccgccggcgatcgagccatggtgcacatcgagtgctttaccaccgcatggatcgctcaagggaagcttaacgatcgttgatgagcgcacggggaagagatatcaggtcccagtttcagaggatggtaccgttaaagccgttgatctcaagaagattacgacggggaaggatgacaaggggcttaagttgtacgatccaggttacttgaacacggctcctgttcggtcttcgatctcttacatcgatggagatgaagggatcctacgttatcgtgggtacccaatagaagagttggctgagagcagcactttcattgaggtttcttatctcctcatgtatgggaatctgccttctcaaagtcagctagctgattgggagttcaccatttctcagcattctgctgtcccacaaggagtattggaaatcatacagtccatgcctcatgatgcacacccaatgggggttcttgtgagtgcaatgagtgcactttccatctttcatcctgatgccaaccctgctcttaggggccaagatatttacaagtcgaaacaaattcgtggtaaacagattgttcgtattcttggaaaggctccaacagttgcggcggctgcttatttgaggatggcaggcaggcctcctgttcttccttctggcaacctttcttatgctgagaatttcctctatatgctggattcaatgggcaatacgtcttacaagcctaatcctcgtctggctcgagtgctagacatcctcttcatattgcatgctgaacatgaaatgaactgctccactgctgctgctcggcatcttgcctctagtggtgttgatgtgtacaccgctgttgcgggagctgttggagccctatacggtcctcttcatggcggtgcgaacgaggctgtccttaagatgttagcagagattgggagtgttgaaaacattccagagttcatcgaaggggtgaagagcagaaagaggaagatgtctggttttggacatcgtgtttacaaaaactacgacccgagagcaaaagtcattaagaaactggcggatgaagtgttctccatcgttggaagggatcctctgatcgaggtagcagttgctctagagaaggcagcactctctgatgaatattttgtgaagagaaagctttatccaaatgtggatttctactctggattaatctatagggcaatgggattcccaccagaattcttcacagtcctgtttgcagtcccgcgtatggctggatatttgtcacactggcgggagtctttggatgatcctgacactaagatcatgagaccccaacaggcctacactggggtgtggctaaggcattacgagccggtgagagaaagaacgttgtcaagtgattcggataagttgggtcaagtttcgatttcgaatgcatcaagaaggcgtttatctggatctgcactttag

SEQ ID NO: 124031 - protein, 507 aa, Brassica napus
MEISARRLAVLTAHLAVSDPVGSIQVLPPAIEPWCTSSALPPHGSLKGSLTIVDERTGKRYQVPVSEDGTVKAVDLKKITTGKDDKGLKLYDPGYLNTAPVRSSISYIDGDEGILRYRGYPIEELAESSTFIEVSYLLMYGNLPSQSQLADWEFTISQHSAVPQGVLEIIQSMPHDAHPMGVLVSAMSALSIFHPDANPALRGQDIYKSKQIRGKQIVRILGKAPTVAAAAYLRMAGRPPVLPSGNLSYAENFLYMLDSMGNTSYKPNPRLARVLDILFILHAEHEMNCSTAAARHLASSGVDVYTAVAGAVGALYGPLHGGANEAVLKMLAEIGSVENIPEFIEGVKSRKRKMSGFGHRVYKNYDPRAKVIKKLADEVFSIVGRDPLIEVAVALEKAALSDEYFVKRKLYPNVDFYSGLIYRAMGFPPEFFTVLFAVPRMAGYLSHWRESLDDPDTKIMRPQQAYTGVWLRHYEPVRERTLSSDSDKLGQVSISNASRRRLSGSAL

SEQ ID NO: 124032 - DNA, 1428 bp, Brassica napus; identical to SEQ ID NO: 93203
  CDS (1)..(1428)

SEQ ID NO: 124033 - protein, 475 aa, Brassica napus; identical to SEQ ID NO: 93204

SEQ ID NO: 124034 - DNA, 1419 bp, Zea mays; identical to SEQ ID NO: 93205
  CDS (1)..(1419)

SEQ ID NO: 124035 - protein, 472 aa, Zea mays; identical to SEQ ID NO: 93206

SEQ ID NO: 124036 - DNA, 1419 bp, Glycine max; identical to SEQ ID NO: 93207
  CDS (1)..(1419)

SEQ ID NO: 124037 - protein, 472 aa, Glycine max; identical to SEQ ID NO: 93208

SEQ ID NO: 124038 - DNA, 1542 bp, Glycine max
  CDS (1)..(1542)
atgtcaaaaacaactacttcttccgaacaaactgcacgaaaccgtttggccaccctcgcagctcacttgcttccctccgacgccacctccgccaccgcgatcctccacccccaccggctctccgcccccaccggagacttgccgccggcgaacctgaagggcacccttaccgtcgtcgacgagaggaccggcaagaagtaccagatcgaagtcaccccagatggcaccgtcagagcctctgacttcaagaagatatcatctgggaaaaatgacaagggactcaaactttatgatcctggctatttgaacactgctcctgtcatctcaaggatttcttacattgatggtgatgctggaatccttagatatagaggatatcctattgaagacttggcagagaaaagcacctttacagaagtgtcatatctcatactgtatggaaatttgccttctgaaagtcagttagcggaatgggaattcgccttatctcagcattcagctgtaccacaaggagttttggatatgatagaatcaatgcctcatgatgcacatcctatgggcatgcttgtcaatgccatgagcgctttgtctgtttatcatcctgatgcaaatcctgctctcaaaggtcttgatatctacaactcaaagcaagtgagagacaagcaaatagcacgggttattggaaagataacaacaattgctgctgcaattaatcttagattggcaggaaggccacctgtgcttccatccaacaaactttcttacacagagaacttcctatacatgctagattcttttggcaatcgatcatataaacctaatcctcgactaactcaaacgctggacattatcttcgccctgcatgcagaacatgaaatgaattgctctacatctgctgtacgtcacctctcatcaagtggtgttgatgtatatactgctattgctggggctgttggagctctatatggacctcttcatggtggagccaatgaggctgtcctcaaaatgttgagtgaaattggaactgatgagaacattccagcattcattgagggtgttaaagccaggaaacggaagctcagtggttttggacatcgtgtgtacaaaaattatgatccaagagcaaaggtcttgaggaaactgacagaggaagtgttttccattgttggccgggatcctcttatagagattgctgttgccttggagaagattgcactgtctgatgagtatttcatcaagaggaagctatatccaaatgttgacttctactctggactgatttatagggccatggggtttcaacctgagtttttcactgttttatttgccatccctcgaatggccgggtacttggcacattggcgagagtccttggatgatcctgatacaaagattatgagacctcaacaggtttatgttggggagtggttgaggcattatgcaccaattaatcaaaggactgcatcaagtaacactgacaaacttggtcaattggctgtatcaaacgcctcaaagaggcgtcttgctggatctggggcttaa

SEQ ID NO: 124039 - protein, 513 aa, Glycine max
MSKTTTSSEQTARNRLATLAAHLLPSDATSATAILHPHRLSAPTGDLPPANLKGTLTVVDERTGKKYQIEVTPDGTVRASDFKKISSGKNDKGLKLYDPGYLNTAPVISRISYIDGDAGILRYRGYPIEDLAEKSTFTEVSYLILYGNLPSESQLAEWEFALSQHSAVPQGVLDMIESMPHDAHPMGMLVNAMSALSVYHPDANPALKGLDIYNSKQVRDKQIARVIGKITTIAAAINLRLAGRPPVLPSNKLSYTENFLYMLDSFGNRSYKPNPRLTQTLDIIFALHAEHEMNCSTSAVRHLSSSGVDVYTAIAGAVGALYGPLHGGANEAVLKMLSEIGTDENIPAFIEGVKARKRKLSGFGHRVYKNYDPRAKVLRKLTEEVFSIVGRDPLIEIAVALEKIALSDEYFIKRKLYPNVDFYSGLIYRAMGFQPEFFTVLFAIPRMAGYLAHWRESLDDPDTKIMRPQQVYVGEWLRHYAPINQRTASSNTDKLGQLAVSNASKRRLAGSGA

SEQ ID NO: 124040 - DNA, 1542 bp, Glycine max
  CDS (1)..(1542)
atgtcaaaaacaactacttcttccgaacaaactgcacgaaaccgtttggccaccctcgcagctcacttgcttccctccgacgccacctccgccaccgcgatcctccacccccaccggctctccgcccccaccggagacttgccgccggcgaacctgaagggcacccttaccgtcgtcgacgagaggaccggcaagaagtaccagatcgaagtcaccccagatggcaccgtcagagcctctgacttcaagaagatatcatctgggaaaaatgacaagggactcaaactttatgatcctggctatttgaacactgctcctgtcatctcaaggatttcttacattgatggtgatgctggaatccttagatatagaggatatcctattgaagacttggcagagaaaagcacctttacagaagtgtcatatctcatactgtatggaaatttgccttctgaaagtcagttagcggaatgggaattcgccttatctcagcattcagctgtaccacaaggagttttggatatgatagaatcaatgcctcatgatgcacatcctatgggtatgcttgtcaatgccatgagtgctttgtctgtttatcatcctgatgcaaatcctgctctcaaaggtcttgatatctacaactcaaagcaagtgagagacaagcaagtagcacgggttattggaaagataacaacaattgctgctgcaattaatcttagattggcaggaaggccacctgtgcttccatccaacaaactttcttacacagagaacttcctatacatgctagattcttttggcaatcgatcatataaacctaatcctcggctaactcgagcactggacattatcttcatcctgcatgcagaacatgaaatgaattgctctacatctgctgtacgacacctctcatcaagtggtgttgatgtatatactgctattgccggggctgttggagctctatatggacctcttcatggtggagccaatgaggctgtcctcaaaatgttgagtgaaattggaactgctgagaacattccagcgttcattgagggtgttaaatccaggaaacggaagctcagtggttttggacatcgtgtgtacaaaaattatgatccaagagcaaaggtcttgaggaaactgacagaggaagtgttttccattgttggccgggatcctcttatagagattgcggttgccttggagaagattgcactgtctgatgagtatttcatcaagaggaagctatatccaaatgttgacttctactctggactgatttacagggccatgggctttcaacctgagtttttcactgttttatttgccatccctcgaatggctgggtacttggcacattggcgagagtcattggatgatcctgatacaaagattatgagacctcaacaggtttatgttggggagtggttgaggcattatgcaccaatcaatcaaaggactacatcaagtaacactgacaaacttggtcaattggctgtatcaaacgcctcaaagaggcgacttgctggatctggggcttaa

SEQ ID NO: 124041 - protein, 513 aa, Glycine max
MSKTTTSSEQTARNRLATLAAHLLPSDATSATAILHPHRLSAPTGDLPPANLKGTLTVVDERTGKKYQIEVTPDGTVRASDFKKISSGKNDKGLKLYDPGYLNTAPVISRISYIDGDAGILRYRGYPIEDLAEKSTFTEVSYLILYGNLPSESQLAEWEFALSQHSAVPQGVLDMIESMPHDAHPMGMLVNAMSALSVYHPDANPALKGLDIYNSKQVRDKQVARVIGKITTIAAAINLRLAGRPPVLPSNKLSYTENFLYMLDSFGNRSYKPNPRLTRALDIIFILHAEHEMNCSTSAVRHLSSSGVDVYTAIAGAVGALYGPLHGGANEAVLKMLSEIGTAENIPAFIEGVKSRKRKLSGFGHRVYKNYDPRAKVLRKLTEEVFSIVGRDPLIEIAVALEKIALSDEYFIKRKLYPNVDFYSGLIYRAMGFQPEFFTVLFAIPRMAGYLAHWRESLDDPDTKIMRPQQVYVGEWLRHYAPINQRTTSSNTDKLGQLAVSNASKRRLAGSGA

SEQ ID NO: 124042 - DNA, 1419 bp, Zea mays; identical to SEQ ID NO: 93209
  CDS (1)..(1419)

SEQ ID NO: 124043 - protein, 472 aa, Zea mays; identical to SEQ ID NO: 93210

SEQ ID NO: 124044 - DNA, 1419 bp, Zea mays; identical to SEQ ID NO: 93211
  CDS (1)..(1419)

SEQ ID NO: 124045 - protein, 472 aa, Zea mays; identical to SEQ ID NO: 93212

SEQ ID NO: 124046 - DNA, 25 bp, Artificial sequence
  primer
atggctgatacaaaagcaaaactca

SEQ ID NO: 124047 - DNA, 26 bp, Artificial sequence
  primer
ttaacgcttgatatcgcttttaaagt

SEQ ID NO: 124048 - protein, 445 aa, Artificial sequence
  consensus sequence
  Variant (2)..(15): Xaa in position 2 to 15 is any amino acid
  Variant (17)..(19): Xaa in position 17 to 19 is any amino acid
  Variant (21)..(21): Xaa in position 21 is any amino acid
  Variant (22)..(23): Xaa in position 22 to 23 is any or no amino acid
  Variant (25)..(26): Xaa in position 25 to 26 is any amino acid
  Variant (29)..(30): Xaa in position 29 to 30 is any amino acid
  Variant (32)..(33): Xaa in position 32 to 33 is any amino acid
  Variant (35)..(41): Xaa in position 35 to 41 is any amino acid
  Variant (42)..(50): Xaa in position 42 to 50 is any or no amino acid
  Variant (52)..(55): Xaa in position 52 to 55 is any amino acid
  Variant (57)..(58): Xaa in position 57 to 58 is any amino acid
  Variant (59)..(60): Xaa in position 59 to 60 is any or no amino acid
  Variant (62)..(63): Xaa in position 62 to 63 is any amino acid
  Variant (65)..(83): Xaa in position 65 to 83 is any amino acid
  Variant (84)..(100): Xaa in position 84 to 100 is any or no amino acid
  Variant (104)..(133): Xaa in position 104 to 133 is any amino acid
  Variant (134)..(155): Xaa in position 134 to 155 is any or no amino acid
  Variant (157)..(159): Xaa in position 157 to 159 is any amino acid
  Variant (160)..(160): Xaa in position 160 is any or no amino acid
  Variant (162)..(173): Xaa in position 162 to 173 is any amino acid
  Variant (174)..(174): Xaa in position 174 is any or no amino acid
  Variant (176)..(177): Xaa in position 176 to 177 is any amino acid
  Variant (178)..(189): Xaa in position 178 to 189 is any or no amino acid
  Variant (191)..(194): Xaa in position 191 to 194 is any amino acid
  Variant (197)..(198): Xaa in position 197 to 198 is any amino acid
  Variant (200)..(216): Xaa in position 200 to 216 is any amino acid
  Variant (217)..(231): Xaa in position 217 to 231 is any or no amino acid
  Variant (234)..(235): Xaa in position 234 to 235 is any amino acid
  Variant (238)..(240): Xaa in position 238 to 240 is any amino acid
  Variant (241)..(241): Xaa in position 241 is any or no amino acid
  Variant (244)..(250): Xaa in position 244 to 250 is any amino acid
  Variant (252)..(266): Xaa in position 252 to 266 is any amino acid
  Variant (268)..(268): Xaa in position 268 is any amino acid
  Variant (271)..(271): Xaa in position 271 is any amino acid
  Variant (277)..(282): Xaa in position 277 to 282 is any amino acid
  Variant (284)..(285): Xaa in position 284 to 285 is any amino acid
  Variant (287)..(307): Xaa in position 287 to 307 is any amino acid
  Variant (308)..(318): Xaa in position 308 to 318 is any or no amino acid
  Variant (326)..(328): Xaa in position 326 to 328 is any amino acid
  Variant (329)..(329): Xaa in position 329 is any or no amino acid
  Variant (333)..(355): Xaa in position 333 to 355 is any amino acid
  Variant (356)..(366): Xaa in position 356 to 366 is any or no amino acid
  Variant (368)..(377): Xaa in position 368 to 377 is any amino acid
  Variant (378)..(384): Xaa in position 378 to 384 is any or no amino acid
  Variant (390)..(390): Xaa in position 390 is any amino acid
  Variant (393)..(398): Xaa in position 393 to 398 is any amino acid
  Variant (400)..(404): Xaa in position 400 to 404 is any amino acid
  Variant (405)..(406): Xaa in position 405 to 406 is any or no amino acid
  Variant (409)..(410): Xaa in position 409 to 410 is any amino acid
  Variant (412)..(414): Xaa in position 412 to 414 is any amino acid
  Variant (416)..(417): Xaa in position 416 to 417 is any amino acid
  Variant (420)..(424): Xaa in position 420 to 424 is any amino acid
  Variant (426)..(431): Xaa in position 426 to 431 is any amino acid
  Variant (432)..(435): Xaa in position 432 to 435 is any or no amino acid
  Variant (437)..(437): Xaa in position 437 is any amino acid
  Variant (440)..(444): Xaa in position 440 to 444 is any amino acid
GXXXXXXXXXXXXXXDXXXGXXXLXXRGXXIXXLXXXXXXXXXXXXXXXXEXXXXLXXXXGXXPXXXXXXXXXXXXXXXXXXXXXXXXXXXXXXXXXXXXHPMXXXXXXXXXXXXXXXXXXXXXXXXXXXXXXXXXXXXXXXXXXXXXXXXXXXXPXXXXAXXXXXXXXXXXXXPXXXXXXXXXXXXXXLXXXXNFXXMXXXXXXXXXXXXXXXXXXXXXXXXXXXXXXXXLHXXHEXXXXSTXXXXXXXSXXXXXXXXXXXXXXXLXGPXHGGANXXXXXXLXXIXXXXXXXXXXXXXXXXXXXXXXXXXXXXXXXXGFGHRVYXXXXDPRXXXXXXXXXXXXXXXXXXXXXXXXXXXXXXXXXXEXXXXXXXXXXXXXXXXXPNVDFXSGXXXXXXGXXXXXXXFTXXFXXXRXXGWXXXXXEXXXXXXXXXXIXRPXXXXXG

SEQ ID NO: 124049 - protein, 12 aa, Artificial sequence
  protein pattern
  Variant (3)..(3): Xaa in position 3 is any amino acid
  Variant (5)..(5): Xaa in position 5 is any amino acid
  Variant (6)..(6): Xaa in position 6 is any or no amino acid
  Variant (8)..(8): Xaa in position 8 is any amino acid
  Variant (9)..(9): Xaa in position 9 is any or no amino acid
GHXVXXKXXDPR

SEQ ID NO: 124050 - protein, 14 aa, Artificial sequence
  protein pattern
  Variant (2)..(2): Xaa in position 2 is Ala, Pro or Val
  Variant (3)..(3): Xaa in position 3 is Ile, Leu, Met or Val
  Variant (5)..(6): Xaa in position 5 to 6 is any amino acid
  Variant (7)..(7): Xaa in position 7 is Ala, Gly, Pro or Ser
  Variant (9)..(10): Xaa in position 9 to 10 is any amino acid
  Variant (12)..(13): Xaa in position 12 to 13 is any amino acid
  Variant (14)..(14): Xaa in position 14 is Ala, Gly, Pro, Ser or Thr
TXXFXXXRXXGXXX

SEQ ID NO: 124051 - DNA, 1482 bp, Escherichia coli
  CDS (1)..(1482)
atgatgaagaaaacgcccacctctacgaaagactccttacccaacaaggagatgaatgatttgccccggctggcgagcgcggtgctgccactgtgttcgcaacatcccggtcagtgtggcctttttcctctggagaaaagtctggatgcgtttgccgcccggtatcgtctggccgaaatggcagagcatacgctcgatgttcagtattacatctggcaggacgatatgtcgggtcggttactgttttccgccctgttagccgcagcaaagcgtggcgttcgcgtccgtttgttgctggacgacaacaatacgcccggacttgacgacattttacgcttgcttgacagtcatccacgcattgaagtccggctttttaatcctttctcgtttcgcttgctgcgtccgcttggttatatcaccgacttttcccgtcttaatcgccgtatgcacaataaaagtttcactgtcgatggcgtggtgaccctggtgggaggacgaaatattggtgatgcctattttggagcaggggaggagccacttttttcggatttagatgtcatggcaataggacccgtggtagaggacgttgccgatgatttcgcccgctactggtattgcaaatcggtttcacccttacagcaggtgctggatgtcccggagggtgaaatggcggatcgcatcgagttacccgcctcctggcataacgatgccatgacgcatcgttatttacgcaaaatggaatccagtccatttataaatcatctggttgatggaacattgccgcttatctgggcgaagacacgtttattaagtgatgatccggcgaaaggggagggcaaggcaaaacggcattcactgttaccgcagcgcctgttcgatatcatgggctcacccagtgaacgcatcgatattatctcttcctattttgtaccgacacgcgcaggtgtggcgcaactcttacggatggtgagaaaaggggtaaagattgcgatcctaaccaattctcttgccgctaacgatgttgctgtcgtccatgccggatacgcgcgctggcgcaaaaaattgctccgctatggcgtggaattatatgaactcaagccgacgcgtgaacaaagtagtacgttacacgatcgcggcataaccggtaattccggagccagcctgcatgctaaaacctttagcatcgatggtaaaacggtgtttatcggctctttcaatttcgatccgcgttcaacattgctcaatactgaaatgggcttcgtgatagagagcgaaacgctggcacagttaattgataaacgctttattcagagccagtatgatgcggcctggcagctccgtctggacaggtggggacggatcaactgggttgatcgtcatgcaaagaaagagattattctcaaaaaagaacccgccaccagtttctggaagcgggttatggtcagactggcgtcgatattgcccgtggaatggttattgtaa

SEQ ID NO: 124052 - protein, 493 aa, Escherichia coli
MMKKTPTSTKDSLPNKEMNDLPRLASAVLPLCSQHPGQCGLFPLEKSLDAFAARYRLAEMAEHTLDVQYYIWQDDMSGRLLFSALLAAAKRGVRVRLLLDDNNTPGLDDILRLLDSHPRIEVRLFNPFSFRLLRPLGYITDFSRLNRRMHNKSFTVDGVVTLVGGRNIGDAYFGAGEEPLFSDLDVMAIGPVVEDVADDFARYWYCKSVSPLQQVLDVPEGEMADRIELPASWHNDAMTHRYLRKMESSPFINHLVDGTLPLIWAKTRLLSDDPAKGEGKAKRHSLLPQRLFDIMGSPSERIDIISSYFVPTRAGVAQLLRMVRKGVKIAILTNSLAANDVAVVHAGYARWRKKLLRYGVELYELKPTREQSSTLHDRGITGNSGASLHAKTFSIDGKTVFIGSFNFDPRSTLLNTEMGFVIESETLAQLIDKRFIQSQYDAAWQLRLDRWGRINWVDRHAKKEIILKKEPATSFWKRVMVRLASILPVEWLL

SEQ ID NO: 124053 - DNA, 1527 bp, Neisseria meningitidis
  CDS (1)..(1527): transl_table=11
atgaaaacacgcagcctaatttcccttttatgcctccttctctgttcatgttcttcatggttgcccccactggaagaacggacggaaagccgtcatttcaatacttccaaacccgtccgcctggacaacatcctgcaaatccggcacacccctcataccaacgggctatccgatatctatctgttgaacgacccccacgaagcctttgccgcccgcgccgcccttatcgaatctgccgaacacagcctcgatttgcaatactacatctggcgcaacgacatttccggccgactgctgttcaacctcgtgtaccttgccgcagaacgcggtgtgcgcgtacgcctgctgttggacgacaacaacacgcgcggattggacgacctcctgctcgccctcgacagccatcccaatatcgaagtgcgcctgttcaaccccttcgtcttacgaaaatggcgcgcactcggctacctgaccgacttcccccgcctcaaccgccgcatgcacaacaaatcctttaccgccgacaaccgcgccaccatactcggcggacgcaatatcggcgacgaatacttcaaagtcggtgaggacaccgttttcgccgacctggacatcctcgccaccggcagcgtcgtcggcgaagtatcgcacgacttcgaccgctactgggcaagccattccgcccacaacgccacgcgcatcatccgcagcggcaacatcggcaagggtcttcaagcactcggatacaacgacgaaacgtccagacacgcgctcctgcgctaccgcgaaaccgtcgaacagtcgcccctctaccaaaaaatacagacaggacgcatcgactggcagagcgtccaaacccgcctcatcagcgacgaccctgcaaaaggactcgaccgcgaccgccgcaaaccgccgattgccgggcggctgcaagacgcgctcaaacagcccgaaaaaagcgtctatctggtttcaccctatttcgtccccacaaaatccggcacagacgcactggcaaaactggtgcaggacggcatagacgttaccgtcctgaccaactcgctacaggcgaccgacgttgccgccgtccattccggctatgtcaaataccgaaaaccgctgctcaaagccggcatcaaactctacgagctgcaacccaaccatgccgtccctgccacaaaagacaaaggcctgaccggcagctccgtaaccagcctgcatgccaaaaccttcattgtggacggcaaacgcatcttcatcggctcattcaacctcgacccccgttccgcacggctcaatactgaaatgggcgttgttatcgaaagccccaaaatcgcagaacagatggagcgcacccttgccgatacctcacccgaatacgcctaccgcgttaccctcgacaggcacaaccgcctgcaatggcacgatcccgccacccgaaaaacctacccgaacgaacccgaagccaaactttggaaacgcatcgccgcaaaaatcctatccctgctgcccatagaaagtttattatag

SEQ ID NO: 124054 - protein, 508 aa, Neisseria meningitidis
MKTRSLISLLCLLLCSCSSWLPPLEERTESRHFNTSKPVRLDNILQIRHTPHTNGLSDIYLLNDPHEAFAARAALIESAEHSLDLQYYIWRNDISGRLLFNLVYLAAERGVRVRLLLDDNNTRGLDDLLLALDSHPNIEVRLFNPFVLRKWRALGYLTDFPRLNRRMHNKSFTADNRATILGGRNIGDEYFKVGEDTVFADLDILATGSVVGEVSHDFDRYWASHSAHNATRIIRSGNIGKGLQALGYNDETSRHALLRYRETVEQSPLYQKIQTGRIDWQSVQTRLISDDPAKGLDRDRRKPPIAGRLQDALKQPEKSVYLVSPYFVPTKSGTDALAKLVQDGIDVTVLTNSLQATDVAAVHSGYVKYRKPLLKAGIKLYELQPNHAVPATKDKGLTGSSVTSLHAKTFIVDGKRIFIGSFNLDPRSARLNTEMGVVIESPKIAEQMERTLADTSPEYAYRVTLDRHNRLQWHDPATRKTYPNEPEAKLWKRIAAKILSLLPIESLL

SEQ ID NO: 124055 - DNA, 1578 bp, Neisseria gonorrhoeae
  CDS (1)..(1578): transl_table=11
atgcgcgccaaccccaaaacacaggcaatgccgtctgaaaccatatccctgatgaaaacacgcagcctaatttcccttttatgcctccttctctgttcatgttcttcatggttgcccccactggaagaacggacggaaagccgtcatttcaatacttccaaacccgtccgcctggacaacatcctgcaaatccggcacacccctcataccaacgggctatccgatatctatctgttgaacgacccccacgaagcctttgccgcccgcgccgcccttatcgaatctgccgaacacagcctcgatttgcaatactacatctggcgcaacgacatttccggccgactgctgttcaacctcgtgtaccttgccgcagaacgcggtgtgcgcgtacgcctgctgttggacgacaacaacacgcgcggattggacgacctcctgctcgccctcgacagccatcccaatatcgaagtgcgcctgttcaaccccttcgtcttacgaaaatggcgcgcactcggctacctgaccgacttcccccgcctcaaccgccgcatgcacaacaaatcctttaccgccgacaaccgcgccaccatactcggcggacgcaatatcggcgacgaatacttcaaagtcggtgaggacaccgttttcgccgacctggacatcctcgccaccggcagcgtcgtcggcgaagtatcgcacgacttcgaccgctactgggcaagccattccgcccacaacgccacgcgcatcatccgcagcggcaacatcggcaagggtcttcaagcactcggatacaacgacgaaacgtccagacacgcgctcctgcgctaccgcgaaaccgtcgaacagtcgcccctctaccaaaaaatacagacaggacgcatcgactggcagagcgtccaaacccgcctcatcagcgacgaccctgcaaaaggactcgaccgcgaccgccgcaaaccgccgattgccgggcggctgcaagacgcgctcaaacagcccgaaaaaagcgtctatctggtttcaccctatttcgtccccacaaaatccggcacagacgcactggcaaaactggtgcaggacggcatagacgttaccgtcctgaccaactcgctacaggcgaccgacgttgccgccgtccattccggctatgtcaaataccgaaaaccgctgctcaaagccggcatcaaactctacgagctgcaacccaaccatgccgtccctgccacaaaagacaaaggcctgaccggcagctccgtaaccagcctgcatgccaaaaccttcattgtggacggcaaacgcatcttcatcggctcattcaacctcgacccccgttccgcacggctcaatactgaaatgggcgttgttatcgaaagccccaaaatcgcagaacagatggagcgcacccttgccgatacctcacccgaatacgcctaccgcgttaccctcgacaggcacaaccgcctgcaatggcacgatcccgccacccgaaaaacctacccgaacgaacccgaagccaaactttggaaacgcatcgccgcaaaaatcctatccctgctgcccatagaaagtttattatag

SEQ ID NO: 124056 - protein, 525 aa, Neisseria gonorrhoeae
MRANPKTQAMPSETISLMKTRSLISLLCLLLCSCSSWLPPLEERTESRHFNTSKPVRLDNILQIRHTPHTNGLSDIYLLNDPHEAFAARAALIESAEHSLDLQYYIWRNDISGRLLFNLVYLAAERGVRVRLLLDDNNTRGLDDLLLALDSHPNIEVRLFNPFVLRKWRALGYLTDFPRLNRRMHNKSFTADNRATILGGRNIGDEYFKVGEDTVFADLDILATGSVVGEVSHDFDRYWASHSAHNATRIIRSGNIGKGLQALGYNDETSRHALLRYRETVEQSPLYQKIQTGRIDWQSVQTRLISDDPAKGLDRDRRKPPIAGRLQDALKQPEKSVYLVSPYFVPTKSGTDALAKLVQDGIDVTVLTNSLQATDVAAVHSGYVKYRKPLLKAGIKLYELQPNHAVPATKDKGLTGSSVTSLHAKTFIVDGKRIFIGSFNLDPRSARLNTEMGVVIESPKIAEQMERTLADTSPEYAYRVTLDRHNRLQWHDPATRKTYPNEPEAKLWKRIAAKILSLLPIESLL

SEQ ID NO: 124057 - DNA, 1545 bp, Pasteurella multocida subsp. multocida str. Pm70
  CDS (1)..(1545): transl_table=11
atgctgatcgtgattatcaaaaaactgtttcttttactcgccctgattctgtttagcctcgtgatacttgccctaataagctaccaacgattacccacatccgatcgtccaatcagtacgcatcctccccttaatcccaacgggctgttagcacgccatatcttgccgcaagttgcccaacatcccaacttaacgggattgtatcctttaggcgatgggaaagatgcctttctcgctcgcttggcgctcagcgaacatgccgaacatacactcgacttacagtattatatttggcataacgatgtgtctggtcacttactcttacaaagtctatataaagccgcagtccgcggagtaaaagtccgtttattattggacgacaataataccaaaggcatggacacgatcttggcttcactcaatgcacaccctaatatccaaatccgcttattcaatccctttatgcaacgtcaatatcgttggttaggctttttgagcgacttttttagactcaatcgtcgtatgcacaataagtccttcaccgcagatggcgtcatgagtattcttggcgggcgtaatattggtgatgaatattttgatgtgggtaatggtgtattatttgctgatcttgatgttgccgcaaccggcgccgtcgttacacacattcagactgattttgatcgctattggaatagcccatcaagttatcctttagaaagcattatcatacgcgatcctattacgccttttaatccgttgcctgcattagatgatgaaacccaaacttatttaaaacaactcactgaactgccctttgctaaaagcttaaaagcaggcaccttagcttttacatgggcagaggcagaattaatcagcgatgatcctaaaaaggcactaggcaaatcattgattcaagacagtgtcttagcacatattgctcccacaatgttaaatgcgaaaaacaacttaatcattgtgtcgccttattttgtaccaacccatgttggtgtggatttcttaagtcgtatcagccagactggcacacaggtttccattctaaccaattcactggaagcaaccgatgttagcattgtacattctggttatgctaaacaccgcaaaacattgttacaaaagcaaatccaactgtatgagctgaaacctcatgcaaccattcaaatggaatcctcagggcatttattaaaaggagccagtagcgccagtttacatgccaaaacatttactcttgataatcgctatttatttgttggttcctttaatatggatccgcgctctgctatgttgaatacggaaatgggattactcattgacagccctgaattggctcgcttactcagtgatggactgcaacaaaatcaagcaaattatgctttttcggttaagttaaatgaggcgcaagcactgtattgggaaacgcaagaaaatgggaaatggattcgctatgaaaatgagccacacaccagttggtttaagcgttttagtgtgtggtgtttatcttggttacctgttgaacatttgctataa

SEQ ID NO: 124058 - protein, 514 aa, Pasteurella multocida subsp. multocida str. Pm70
MLIVIIKKLFLLLALILFSLVILALISYQRLPTSDRPISTHPPLNPNGLLARHILPQVAQHPNLTGLYPLGDGKDAFLARLALSEHAEHTLDLQYYIWHNDVSGHLLLQSLYKAAVRGVKVRLLLDDNNTKGMDTILASLNAHPNIQIRLFNPFMQRQYRWLGFLSDFFRLNRRMHNKSFTADGVMSILGGRNIGDEYFDVGNGVLFADLDVAATGAVVTHIQTDFDRYWNSPSSYPLESIIIRDPITPFNPLPALDDETQTYLKQLTELPFAKSLKAGTLAFTWAEAELISDDPKKALGKSLIQDSVLAHIAPTMLNAKNNLIIVSPYFVPTHVGVDFLSRISQTGTQVSILTNSLEATDVSIVHSGYAKHRKTLLQKQIQLYELKPHATIQMESSGHLLKGASSASLHAKTFTLDNRYLFVGSFNMDPRSAMLNTEMGLLIDSPELARLLSDGLQQNQANYAFSVKLNEAQALYWETQENGKWIRYENEPHTSWFKRFSVWCLSWLPVEHLL

SEQ ID NO: 124059 - DNA, 1527 bp, Neisseria meningitidis MC58
  CDS (1)..(1527): transl_table=11
atgaaaacacgcagcctaatttcccttttatgcctccttctctgttcatgttcttcatggttgcccccactggaagaacggacggaaagccgtcatttcaatacttccaaacccgtccgcctggacaacatcctgcaaatccggcacacccctcataccaacgggctatccgatatctatctgttgaacgacccccacgaagcctttgccgcccgcgccgcccttatcgaatctgccgaacacagcctcgatttgcaatactacatctggcgcaacgacatttccggcaggctgctgttcaacctcgtgtaccttgccgcagaacgcggtgtgcgcgtacgcctgctgttggacgacaacaacacgcgcggattggacgacctcctgcttgccctcgacagccatcccaatatcgaagtgcgcctgttcaaccccttcgtcttacgaaaatggcgcgcactcggctacctgaccgacttcccccgcctcaaccgccgcatgcacaacaaatcctttaccgccgacaaccgcgccaccatactcggcggacgcaatatcggcgacgaatacttcaaagtcggtgaggacaccgttttcgccgatttggacatcctcgccaccggcagcgtcgtcggcgaagtatcgcacgacttcgaccgctactgggcaagccattccgcccacaacgccacgcgcatcatccgcagcggcgacatcggcaagggtcttcaagcactcggatacaacgacgaaacgtccagacacgcgctcctgcgctaccgcgaaaccgtcgaacagtcgcccctctaccaaaaaatacagacaggatgcatcgactggcagagcgtccgaacccgcctcatcagcgacgaccctgcaaaaggactcgaccgcgaccgccgcaaaccgccgattgccgggcggctgcaagacgcgctcaaacagcccgaaaaaagcgtctatctggtttcaccctatttcgttcccacaaaatccggcacagacgcactggcaaaactggtgcaggacggcatagacgttaccgttctgaccaactcgctgcaggcgaccgacgttgccgccgtccattccggctatgtcaaataccgaaaaccgctgctcaaagccggcatcaaactctacgagctgcaacccaaccatgccgtccccgccacaaaagacaaaggcctgaccggcagctccgtaaccagcctgcacgccaaaaccttcattgtggacggcaaacgcatcttcatcggttcgttcaacctcgacccccgttccgcgcgtctcaacaccgaaatgggcgttgttatcgaaagccccaaaatcgcagaacagatggagcgcacccttgccgataccacacccgcctacgcctaccgcgttaccctcgacaggcacaaccgcctgcaatggcacgatcccgccacccgaaaaacctacccgaacgaacccgaagccaaactttggaaacgcatcgccgcaaaaatcctatccctgctgcccatagaaggtttattatag

SEQ ID NO: 124060 - protein, 508 aa, Neisseria meningitidis MC58
MKTRSLISLLCLLLCSCSSWLPPLEERTESRHFNTSKPVRLDNILQIRHTPHTNGLSDIYLLNDPHEAFAARAALIESAEHSLDLQYYIWRNDISGRLLFNLVYLAAERGVRVRLLLDDNNTRGLDDLLLALDSHPNIEVRLFNPFVLRKWRALGYLTDFPRLNRRMHNKSFTADNRATILGGRNIGDEYFKVGEDTVFADLDILATGSVVGEVSHDFDRYWASHSAHNATRIIRSGDIGKGLQALGYNDETSRHALLRYRETVEQSPLYQKIQTGCIDWQSVRTRLISDDPAKGLDRDRRKPPIAGRLQDALKQPEKSVYLVSPYFVPTKSGTDALAKLVQDGIDVTVLTNSLQATDVAAVHSGYVKYRKPLLKAGIKLYELQPNHAVPATKDKGLTGSSVTSLHAKTFIVDGKRIFIGSFNLDPRSARLNTEMGVVIESPKIAEQMERTLADTTPAYAYRVTLDRHNRLQWHDPATRKTYPNEPEAKLWKRIAAKILSLLPIEGLL

SEQ ID NO: 124061 - DNA, 1482 bp, Escherichia coli O157:H7 EDL933
  CDS (1)..(1482): transl_table=11
  misc_feature (976)..(976): r is g or a
atgatgaagaaaacgcccacctctacgaaagactccttacccaacaaggagatgaatgatttgccccggctggcgagcgcggtgctgccactgtgttcgcaacatcccggtcagtgtggtcttttccctctggagaaaagtctggatgcgtttgccgcccggtatcgtctggccgaaatgtcagagcatacgctggatgttcagtattacatctggcaggacgatatgtcgggtcggttactgttttccgccctgttagccgcagcaaagcgtggcgttcgcgtccgtttgttgctggacgacaacaatacgcccggacttgacgacattttacgcttgcttgacagccatccccgcattgaagtccggctttttaatcctttctcgtttcgcttgctgcgtccgcttggttatatcaccgacttttcccgtctcaatcgccgtatgcacaataaaagtttcactgtcgatggcgtggtgacgttggtaggggggcgaaatattggtgatgcctattttggggcaggggaagagccacttttttcggatttagatgtcatggcaataggacccgtagtagaggacgttgccgatgatttcgcccgctactggtattgcaaatcggtttcacccttacagcaggtgctggatgtcccggaaggtgaaatggcggatcgcatcgagttacccgcctcctggcataacgatgccatgacgcatcgttacttacgcaaaatggaatccagtccgtttataaatcatctggttgatggaacgttgccgcttatctgggcgaaaacacgtttattaagtgatgatccggcgaaaggggagggcaaggcaaaacggcattcactgttaccgcagcgcctgttcgatatcatgggctcacccagtgaacgcatcgatattatctcttcctattttgtaccgacacgcgcaggtgtggcgcaactcttacggatggtgagaaaargggtaaagattgcgatcctaaccaattctcttgccgctaacgatgttgctgtcgtccatgccggatacgcgcgctggcgcaaaaaattgctccgctatggcgtggaattatatgaactcaagccgacgcgtgaacaaagtagtacgttacacgatcgcggcataaccggtaattccggtgccagcctgcatgctaaaacctttagcatcgatggtaaaacggtgtttatcggttctttcaatttcgatccgcgttcaacattgctcaatactgaaatgggcttcgtgatagagagcgaaacgctggctcagttaattgataaacgctttattcagagccagtatgatgcggcctggcagctccgtctggacaggtggggacggatcaactgggttgatcgtcatgcaaagaaagagattgttctcaaaaaagaacccgctaccagtttctggaagcgggttatggtcagactggcgtcgatattgcccgtggaatggttattgtaa

SEQ ID NO: 124062 - protein, 493 aa, Escherichia coli O157:H7 EDL933
  misc_feature (326)..(326): The Xaa at location 326 stands for Arg, or Gly.
MMKKTPTSTKDSLPNKEMNDLPRLASAVLPLCSQHPGQCGLFPLEKSLDAFAARYRLAEMSEHTLDVQYYIWQDDMSGRLLFSALLAAAKRGVRVRLLLDDNNTPGLDDILRLLDSHPRIEVRLFNPFSFRLLRPLGYITDFSRLNRRMHNKSFTVDGVVTLVGGRNIGDAYFGAGEEPLFSDLDVMAIGPVVEDVADDFARYWYCKSVSPLQQVLDVPEGEMADRIELPASWHNDAMTHRYLRKMESSPFINHLVDGTLPLIWAKTRLLSDDPAKGEGKAKRHSLLPQRLFDIMGSPSERIDIISSYFVPTRAGVAQLLRMVRKXVKIAILTNSLAANDVAVVHAGYARWRKKLLRYGVELYELKPTREQSSTLHDRGITGNSGASLHAKTFSIDGKTVFIGSFNFDPRSTLLNTEMGFVIESETLAQLIDKRFIQSQYDAAWQLRLDRWGRINWVDRHAKKEIVLKKEPATSFWKRVMVRLASILPVEWLL

SEQ ID NO: 124063 - DNA, 1557 bp, Agrobacterium tumefaciens str. C58
  CDS (1)..(1557): transl_table=11
gtgactgcatttacggtcttcatcatcattcttctcatgctcattgggccgagcctgttcgtcgtcatcggcaaacagcgggaaaaagccattcccaaacgcccctccaccgctctgccggttaccgaagacgaaacggcgctggaccggcactggcaatcgatcagaaacggctggaacgagaagaatgcactctgcctcttacattccaacctcgatgcctttgccgtgcgtgtggcggcggcgcgggccgccgggcgcagcctcgatctcatgtattacatgtggaatgccgacctgaccgggcggctgatgatgcgcgaggtcatcgccgccgctgatcgcggcgtgcgggtgcggctgctgctcgatgatctcggcgtctccatgtcagaccgcatcttccatgccatcgacagccaccccaatatcgaactccgcctgttcaatcccacccgggcacgggaaaacatcctgcatcgcagcctcgaactggtgctgcgctttcgaagcgtcaaccggcgcatgcacaacaaggcatggattgccgatggccgcgccgtgatcgtcggcggccgaaatattggcgacgcttacttcgacgccgccgaacgggcaaatttccacgatttcgacattctcggtttcggcgggatcgttgccgacgccaccgaaatcttcgacgattactggaacagcgccgtttccgtgccagtacgctcgctgctggcgcgccgaccgaacaaacttgccaaactgcggcgcgaactggacgccctgccgcaaagcgaagccgcgagaccctatctggagcgggtggagagccaatatggtcgtgatcatttcctgatgtcggaccgcctgcactgggtcgatacggcagatgtgcttgccgatccgcccgaaaaagcggcgggaaaacgccgcaagggccataatttcctgatggaaagcctattgccgctgatgcaggcggcgggagagagcctgcacattacttctccctatttcattcccggtaaacagggtgtggagatttttctcgatctcgccgaacgcggcgtgtcgctcgccatcctcaccaattcactggccgcaaccgatgtcgccgccgttcacgccggttatgcgcgttaccggaaaccgcttctctccggcggggtacgtttgcatgaattgcgttcgcaggcggatcagggcagcttcaccctgcgcggttcgggacaggcaagcctgcacaccaaggccttcacccgcgatggcgagaccggctatatcggctcactcaatttcgatccccgctccgcctcgctcaatacggaaatgggcgtggtgttcaattcagccccgctggtggcccgcatggacgagatattcgccgaagaaatccgccgcacgatgagcttcgaacttgatatcgacagcgccaaccgtatcgtctggatgacggaagaacgggggcagccaaagatctaccggcgcgaacccgacgcggcgatcagccgccggatcatcgccggcatcatgcgtgtcctgccgcttgaatctcagctttga

SEQ ID NO: 124064 - protein, 518 aa, Agrobacterium tumefaciens str. C58
MTAFTVFIIILLMLIGPSLFVVIGKQREKAIPKRPSTALPVTEDETALDRHWQSIRNGWNEKNALCLLHSNLDAFAVRVAAARAAGRSLDLMYYMWNADLTGRLMMREVIAAADRGVRVRLLLDDLGVSMSDRIFHAIDSHPNIELRLFNPTRARENILHRSLELVLRFRSVNRRMHNKAWIADGRAVIVGGRNIGDAYFDAAERANFHDFDILGFGGIVADATEIFDDYWNSAVSVPVRSLLARRPNKLAKLRRELDALPQSEAARPYLERVESQYGRDHFLMSDRLHWVDTADVLADPPEKAAGKRRKGHNFLMESLLPLMQAAGESLHITSPYFIPGKQGVEIFLDLAERGVSLAILTNSLAATDVAAVHAGYARYRKPLLSGGVRLHELRSQADQGSFTLRGSGQASLHTKAFTRDGETGYIGSLNFDPRSASLNTEMGVVFNSAPLVARMDEIFAEEIRRTMSFELDIDSANRIVWMTEERGQPKIYRREPDAAISRRIIAGIMRVLPLESQL

SEQ ID NO: 124065 - DNA, 1566 bp, Sinorhizobium meliloti 1021
  CDS (1)..(1566): transl_table=11
atgtggtcgtgggttgcactttttctcgtagcgctctgcgggctcttcctggtcgcggtcctctatgtctacggctggtttggccgcaggccgcggaccgaaccctcattcgcgctccccatcggcggagacgagacgggcatcgatcggcaattgggcccactgctgggtgccgcccaccccggcgagagcgtggtcgcgctcatttccgataacatcgaagccttcgttgcgcgggcgctttcggcgcgccgggcggggcgcagcctcgacctgcaatattactactggaaggacgacctgacggggtttctgctgacgcgcgagatcatccgggcggccgaccgcggcgttcgcgtccgcctgctgctcgacgatatcaatgcaggaatccatgatcgtctctgcatttcgctcgacgcccatccgaatgtcgacgtgcgcctcttcaatccaagccgggcacgaacggaccgcttccgccgcgggttcgaaatggcgatacgggccttcagtgcgacgcgccggatgcacaacaagctgtgggttgccgatggccggctggcgatatccggtgggcgcaacatcggtgacgcctatttcgacgcggccgaactgtcgaacttccgtgacctcgacgtctggatggcgggtccggtcgtcgaccaggcgacggccatgttcgatctctactggaacagcacgtcggtgctgccgatcgcagccctcaggacgccgcgcaagcagtaccttccggcgctgcgagaggcgctggacgggctggcgcgcacggcggccgcgcgcttctatctggaaagggtcgcagacgcggcggctgcgggtcccggctcctactggggaagccggaccctccatcgcagcgcggatgtgcgcatggcgttcgacccgccggaaaaggcgctgatgcagaagcggcagaactggctgctgcgcgaactgttcccgctgatcaagggcgccagccatgatctgcggatcatctcgccctacttcatccccggcgcagcggggacgcgcgtgctggcgctcctcgcgggaaagggcgcgagggtggcggtactgacgaattcgctcgctgcaaccgatgtcgcggcagtgcatggcggctacgtgaagtatcgcaaagggctgcttgacggcggtgtcgagctctacgagctcaaggagcgcggtgatttcttcgatcgtcaccgtatgtcgctgttcggagcgcgaaacgcgagcctccacaccaaggccttcgtcgtcgatggcctctgcggctacgtcggctccatgaatttcgatccgcgttccgcgtcgctcaacaccgagatgggcatcgtcttttccgacgaggcgctcgccgccgagctccaatcgatattcgacgaggaaacggcgccggaacggagctatcgcctgatgctgaaggacggccggcccgcatggcgggatcggacgaacggctcgctgcggctgctgcggcgcgagccggacgcaggcattctccggcggctgatcgctggcgtgatccgctttctgccgttggagtcacagctttga

SEQ ID NO: 124066 - protein, 521 aa, Sinorhizobium meliloti 1021
MWSWVALFLVALCGLFLVAVLYVYGWFGRRPRTEPSFALPIGGDETGIDRQLGPLLGAAHPGESVVALISDNIEAFVARALSARRAGRSLDLQYYYWKDDLTGFLLTREIIRAADRGVRVRLLLDDINAGIHDRLCISLDAHPNVDVRLFNPSRARTDRFRRGFEMAIRAFSATRRMHNKLWVADGRLAISGGRNIGDAYFDAAELSNFRDLDVWMAGPVVDQATAMFDLYWNSTSVLPIAALRTPRKQYLPALREALDGLARTAAARFYLERVADAAAAGPGSYWGSRTLHRSADVRMAFDPPEKALMQKRQNWLLRELFPLIKGASHDLRIISPYFIPGAAGTRVLALLAGKGARVAVLTNSLAATDVAAVHGGYVKYRKGLLDGGVELYELKERGDFFDRHRMSLFGARNASLHTKAFVVDGLCGYVGSMNFDPRSASLNTEMGIVFSDEALAAELQSIFDEETAPERSYRLMLKDGRPAWRDRTNGSLRLLRREPDAGILRRLIAGVIRFLPLESQL

SEQ ID NO: 124067 - DNA, 1563 bp, Xanthomonas axonopodis pv. citri str. 306; identical to SEQ ID NO: 98834
  CDS (1)..(1563): transl_table=11

SEQ ID NO: 124068 - protein, 520 aa, Xanthomonas axonopodis pv. citri str. 306; identical to SEQ ID NO: 98835

SEQ ID NO: 124069 - DNA, 1482 bp, Shigella flexneri 2a str. 301
  CDS (1)..(1482): transl_table=11
atgatgaagaaaacgcccacctctacgaaagactccttacccaacaaggagatgaatgatttgccccggctggcgagcgcggtgctgccactgtgttcgcaacatcccggtcagtgtggtcttttccctctggagaaaagtctggatgcgtttgccgcccggtatcgtctggccgaaatggcagagcatacgctggatgttcagtattacatctggcaggacgatatgtcggggcggttactgttttccgccctgttagccgcagcaaagcgtggcgttcgcgtccgtttgttgctggacgacaacaatacgcccggacttgacgacattttgcgcttgcttgacagtcatccacgcattgaagtccggctttttaatcctttctcgtttcgcttgctacgtccgcttggatatatcaccgacttttcccgtctcaatcgccggatgcacaataaaagtttcactgtcgatggcgtggttaccctagtgggaggacgaaatattggtgatgcctattttggtgcaggggaagagccacttttttcggatttagatgtcatggcaataggccccgtggtagaggatgttgccgatgatttcgcccgctactggtattgcaaatcggtttcacccttacagcaggtgctggatgtcccggaaggtgaaatggcggatcgcatcgagttacccgcctcctggcataacgatgccatgacgcatcgttatttacgcaaaatggaatccagtccatttataaatcatctggttgatggaacgttgccgcttatctgggcgaagacacgtttattaagtgatgatccggcgaaaggggagggcaaggcaaaacggcattcactgttaccgcagcgcctgttcgatatcatgggctcacccagtgaacgcatcgatattatctcttcctattttgtaccgacacgcgcaggtgtggcgcaactcttacggatggtgagaaaaggggtaaagattgcgatcctaaccaattctcttgccgctaacgatgttgctgtcgtccatgccggatacgcgcgctggcgcaaaaaattgctccgctatggcgtggaattatatgaactcaagccgacgcgtgaacaaagcagtacgttacacgatcgcggcataaccggtaattccggtgccagcctgcatgctaaaacttttagcatcgatggtaaaacggtgtttatcggctctttcaatttcgatccgcgttcaacattgctcaatactgaaatgggcttcgtgatagagagcgaaacgctggcacagttaattgataaacgctttattcagagccagtacgatgcggcctggcagctccgtctggacaggtggggacggatcaactgggttgatcgtcatgcaaagaaagaggttattctcaaaaaagaacccgccaccagtttctggaagcgggttatggtcagactggcgtcgatattgcccgtggaatggttattgtaa

SEQ ID NO: 124070 - protein, 493 aa, Shigella flexneri 2a str. 301
MMKKTPTSTKDSLPNKEMNDLPRLASAVLPLCSQHPGQCGLFPLEKSLDAFAARYRLAEMAEHTLDVQYYIWQDDMSGRLLFSALLAAAKRGVRVRLLLDDNNTPGLDDILRLLDSHPRIEVRLFNPFSFRLLRPLGYITDFSRLNRRMHNKSFTVDGVVTLVGGRNIGDAYFGAGEEPLFSDLDVMAIGPVVEDVADDFARYWYCKSVSPLQQVLDVPEGEMADRIELPASWHNDAMTHRYLRKMESSPFINHLVDGTLPLIWAKTRLLSDDPAKGEGKAKRHSLLPQRLFDIMGSPSERIDIISSYFVPTRAGVAQLLRMVRKGVKIAILTNSLAANDVAVVHAGYARWRKKLLRYGVELYELKPTREQSSTLHDRGITGNSGASLHAKTFSIDGKTVFIGSFNFDPRSTLLNTEMGFVIESETLAQLIDKRFIQSQYDAAWQLRLDRWGRINWVDRHAKKEVILKKEPATSFWKRVMVRLASILPVEWLL

SEQ ID NO: 124071 - DNA, 1554 bp, Pseudomonas putida KT2440
  CDS (1)..(1554): transl_table=11
ttgagactccagcgagccttgcctctgctgctggtgttgttgctcggcgttgccggttgcacaagcatcagcgcgccccgcgaaaccagccaggcgttgcctgcccacgaatcggcctttggccgctcggtgctgcgccaggccgcgccctatggcggccgctcgggctttcgcctgctgcccaacagcaacgaggcatttcgcgcccgcgccgaactgatacgcaacgcccaggcgagcatcgacctgcagtactacatcgtccacgacggtctcagtacccgcgcccttgtgcatgaactgctgcgcgctgccgaccgtggcgtgcgcgtgcgcatcctgctcgacgacaccaccagcgacggcctggacaccgtcatgggcaccctcgatgcccatccgaacatccacattcgcgtgttcaacccactgcatctggggcgcagtaccggcgttacgcgcgccgtgggccggctgttcaacttgtcgcgccagcaccggcgcatgcacaacaagctgttcctggtggacaacagcatggccatcgtcggcgggcgcaacctgggcgacgagtatttcgatgccgagcccaacctcaacttcaccgacatcgacctgctgggcgtgggcccggtagccgagcagctggggcacagcttcgaccagtactggaacagcgccctcagccggccgatcaccgatttcctctggcatgacccggatgccaacgacctgcgggctagccgccagcgcctggaagtgtcgctggccaaagccaggacccagcgcaaggccctgtacgaccgcttgatggcctatcagtcgcagccgcgcctggatgtgtggcgcaacgagctgatctgggctcacgcacaggccctatgggatgcgcccagcaaggtgttggccgaagacgaaccggacccgcaattactgctgagccagcaactggctccggacctggctaacgtgcaccgcgagttggtcctggcatcggcctactttgtaccgggcgaaccggggctgctgtacctgaccggccgcgccgacgctggcgtttcggtgaagctgctgaccaactcgctggaagccaccgacgtgccggcagtgcatggaggctatgcaccctatcgtcgtgccttgcttgagcacggggtgcagctttacgagcttcgccgccagccaggcgaccccagcgcggggcgactgagtttccgtggcagctcggattcgagcctgcacaccaaggcgatcgtgttcgaccggcgcaagaccttcatcggctcgttcaacttcgacccgcgctcagtattgtggaacaccgaggtcggggtactggtggacagcccggagctggccgaatacacccgcgaactggcccagcagggtatggcgcctgcgctgagctatcaggtgaaactgataggtaacaagctggtgtgggcgaccgaggacaatggccaacggcacgtgctgacgtctgagccgggcgggatctggcgacgcttcaatgcctggatcagcaaggcggttggcttggagaagatgctatag

SEQ ID NO: 124072 - protein, 517 aa, Pseudomonas putida KT2440
MRLQRALPLLLVLLLGVAGCTSISAPRETSQALPAHESAFGRSVLRQAAPYGGRSGFRLLPNSNEAFRARAELIRNAQASIDLQYYIVHDGLSTRALVHELLRAADRGVRVRILLDDTTSDGLDTVMGTLDAHPNIHIRVFNPLHLGRSTGVTRAVGRLFNLSRQHRRMHNKLFLVDNSMAIVGGRNLGDEYFDAEPNLNFTDIDLLGVGPVAEQLGHSFDQYWNSALSRPITDFLWHDPDANDLRASRQRLEVSLAKARTQRKALYDRLMAYQSQPRLDVWRNELIWAHAQALWDAPSKVLAEDEPDPQLLLSQQLAPDLANVHRELVLASAYFVPGEPGLLYLTGRADAGVSVKLLTNSLEATDVPAVHGGYAPYRRALLEHGVQLYELRRQPGDPSAGRLSFRGSSDSSLHTKAIVFDRRKTFIGSFNFDPRSVLWNTEVGVLVDSPELAEYTRELAQQGMAPALSYQVKLIGNKLVWATEDNGQRHVLTSEPGGIWRRFNAWISKAVGLEKML

SEQ ID NO: 124073 - DNA, 1518 bp, Vibrio parahaemolyticus RIMD 2210633
  CDS (1)..(1518): transl_table=11
ttgttacatacgctctccaaattcattttcgcatccatgttctcagtgctttcagcatgctcatcaatcgaatcaaatcagccaagtgagaaatccacaacttttcatttcggctatcaacaagattcggttctggctcattactttgaagcttatggccaagatcctaaaaccatcactggcttttacccgctcaaccaaggacacgatgcccttcttgctcgtacttctctcatcgagtccgcacaaaaaagcttggatcttcagtactatatttatcgcggtgacgaaaccagccagctgatcacttggcgtttgtacgaagcagccaaacgaggcgtcagaatccggctgctgcttgatgacatgcaaaaacgcaacgacaacgtcatggcggctctaaatgcgcaccccaatattgaaatacgcctgttcaatcctcaccaataccgctctgcacgaatctttgcgttaaccagtgacttcgaacgtctgaaccgccgaatgcacaataaatcgctgattgctgacagtgtctctgcgattgtcggtggacgaaatatcggtaacgagtatttctcttttgaatcagaagtagagttcggcgacttcgatttactactctacggggaagccgtgcagcaaacggcagatcaatttgatctttattggaacagcgtacacgccgtgccgatggagtggatatcgccacaatctcaaagcgtctccgatgccgcgattcaaaaacaagtcaccaaactgaacttgcaagagaaattctcttctggccgatacgattttaccgccttggatatgtatcaagacctcaaacaaggcaaactgaatttgtactggggtgatggacaagtttggttcgatttgccagataaagtcacgacacacgatagtcagttagtcggaaacttaaccgagctattaaaaagtgttgagcactctttcgtgctcatctcgccttatttcatcccaacagaagctggcacaaaagctctgacgaatgcagctaagcgaggtgtagacatcaccatcgtaaccaacagccttgcgtcgaatgacgtctttgccgttcatggctggtacgccaaatatcgtgaagatttgctcgaatccggcatcaaactttgggaagtgaaatccagcgcgaagctcaagagtaaatggagcttaacgggcagtagccgcgcgagcttgcacgcaaaggcaatgacgattgatgacaaaacactgttcgtcggctctatgaactgggaccctcgatctgcggctttgaataccgaaatggccgttgtgattgaacaaccggaatacgtgcaagcgttcttggcaaaattacccagccaactgaaagacaacgcttatcgactcactctacgtgacggagacattgtttggacaaacaccaaaactggtgaggaatatgattcagaacccgaagcaggcgtttttcgccgattaggcgcttggttctccggcattttaccaatagaagatcaactttaa

SEQ ID NO: 124074 - protein, 505 aa, Vibrio parahaemolyticus RIMD 2210633
MLHTLSKFIFASMFSVLSACSSIESNQPSEKSTTFHFGYQQDSVLAHYFEAYGQDPKTITGFYPLNQGHDALLARTSLIESAQKSLDLQYYIYRGDETSQLITWRLYEAAKRGVRIRLLLDDMQKRNDNVMAALNAHPNIEIRLFNPHQYRSARIFALTSDFERLNRRMHNKSLIADSVSAIVGGRNIGNEYFSFESEVEFGDFDLLLYGEAVQQTADQFDLYWNSVHAVPMEWISPQSQSVSDAAIQKQVTKLNLQEKFSSGRYDFTALDMYQDLKQGKLNLYWGDGQVWFDLPDKVTTHDSQLVGNLTELLKSVEHSFVLISPYFIPTEAGTKALTNAAKRGVDITIVTNSLASNDVFAVHGWYAKYREDLLESGIKLWEVKSSAKLKSKWSLTGSSRASLHAKAMTIDDKTLFVGSMNWDPRSAALNTEMAVVIEQPEYVQAFLAKLPSQLKDNAYRLTLRDGDIVWTNTKTGEEYDSEPEAGVFRRLGAWFSGILPIEDQL

SEQ ID NO: 124075 - DNA, 1488 bp, Salmonella enterica subsp. enterica serovar Typhi Ty2
  CDS (1)..(1488): transl_table=11
atgatgaagaaactgcccggctttacgcaagattacttactcagcaaggcgacgaccctgcctgataaaacacgcctggagcgtgccgttgaaccgctatgcgcgcgccatcccggagagtgcggcattcttgcgctggataacagtctggacgcttttgccgcccgctaccgcctgaccgaaatggcggcgcggacgctggatgtgcagtattatatttgggaagacgatatgtccgggcggctgctcttttcggttctgctgtcggcggcgaagcgcggcgttcatgttcgtctgctgctggatgataacaatacgcctggtctggatgatacgttgcgcttgctggatagccatcctaatatcgaagttcgtctgtttaatcctttctcttttcgtacgctacgcgcgctgggatatttgacggattttgcgcggctgaatcggcggatgcacaataaaagttacactgccgacggcgtagtgacgctggtcggtgggcgcaacatcggcgatgcctatttcggcgctggcgaggagccgctattttccgatctggacgtgatggccattggcccggtggtcaatgatgtcgccaatgattttgaacgttactggcgctgtagttcagtgtcgacattgcagcaagtattatccctttctgagcaggaactgacgcagcgtatcgaacttcccgaatcctggtataacgatgagatcacccgccgttatctgcataagctggaaaccagccagtttatggcggatctcgatcgcggaacgttgccgctgatttgggcaaaaacacgcttgcttagcgatgacccttctaaaggcgaggggaaggcgcagcgccattcgcttcttccgcagcgattatttgacgtgatggggtcgccgacggagcgtatcgacattatttccgcttactttgtccctacgcgcgcaggcgtggcgcagttgcttaatctggtcaggaaaggtgtgaagatcgccatcttaactaactctctggcggccaacgatgtggcggtcgttcacgcagggtacgcgcgctggcgcaagaaattactgcgctatggcgtggagctctacgaactgaaaccgacccgcgaacatgaaaccgccgtacatgatcgcggactcaccgggaactcaggttccagcttacatgctaaaacgttcagtattgatggtagtaaggtgtttatcgggtcgcttaattttgatccccgttcaacgcttttaaataccgaaatgggctttgtcattgaaagtgaaacgctggcgacgcttattcataagcgttttacgcagagccaacgcgatgcggcctggcaactgcggctggatcgctggggacgaattaactggatcgatcgtcagcaagaagaggaaaaggtgttaaagaaagaacccgctacgcgtttctggcagcgagttctggtacggttggcggcaattttacctgtggaatggttgctgtga

SEQ ID NO: 124076 - protein, 495 aa, Salmonella enterica subsp. enterica serovar Typhi Ty2
MMKKLPGFTQDYLLSKATTLPDKTRLERAVEPLCARHPGECGILALDNSLDAFAARYRLTEMAARTLDVQYYIWEDDMSGRLLFSVLLSAAKRGVHVRLLLDDNNTPGLDDTLRLLDSHPNIEVRLFNPFSFRTLRALGYLTDFARLNRRMHNKSYTADGVVTLVGGRNIGDAYFGAGEEPLFSDLDVMAIGPVVNDVANDFERYWRCSSVSTLQQVLSLSEQELTQRIELPESWYNDEITRRYLHKLETSQFMADLDRGTLPLIWAKTRLLSDDPSKGEGKAQRHSLLPQRLFDVMGSPTERIDIISAYFVPTRAGVAQLLNLVRKGVKIAILTNSLAANDVAVVHAGYARWRKKLLRYGVELYELKPTREHETAVHDRGLTGNSGSSLHAKTFSIDGSKVFIGSLNFDPRSTLLNTEMGFVIESETLATLIHKRFTQSQRDAAWQLRLDRWGRINWIDRQQEEEKVLKKEPATRFWQRVLVRLAAILPVEWLL

SEQ ID NO: 124077 - DNA, 1575 bp, Bordetella pertussis Tohama I
  CDS (1)..(1575): transl_table=11
atgcctcgtctcctctcgcgtatccgggccgcccgcgcgcgggcggccgcgctgctggcgctggccggctgcgccattctgctgggagcctgtaccttgccgccgcctgtcgaccgcaccgcctcgcacgccctggacgccacgcaggcgcgcgccacgccactgggccagggcgtcggcgagctggccgacacgcatccggggcttagcggctttcatgtgctgggcgacgcgcaggacgccttcgccgcgcgcatgctgctggcgcgcgcggccacgcgcacgctggacgtgcagtactacatctggcgcaacgacatgaccggcaccctgttgctgcaggccttgcacgcggccgccgagcgcggcgtgcgggtgcggctgctgctcgacgacaacggcatctccggcctggacgacgcgctggccgcgctggacgcgcatcccaacgccgaagtgcggctgttcaatccgtttcccacgcgctcgttcaaggcgctgggctacctgacggatttctcgcgcctgaaccggcgcatgcacaacaaatcattcaccgtcgacaaccaggccaccatcatcggcgggcgcaatatcggcgacgagtacttcggcgcgaccgacggcgtgctgttcgccgacctggacgtgctggcggtggggccggtggtgggcgatgtgtccgccgagttcgacgcctactgggccagcgagtccgcctggccggccggcccgctgctgcccgcgccgggcgcgcagacactgcgcgccctggccgagcgcgccgcgcgcatcgaacaggacccggccgccggcgactacatgagcgcgctgcgcgagttgcccttcatccgcgaattgatggccggccgcctgccgctgcaatgggcgccggcccgcatggtcagcgacgatccggccaagggcctgggcaaggcgccgccggccggcctgctgacgcagcagctcaggaacatcctgggcgagccgcgccgcacgctcgacctggtgtcgccgtatttcgtgcctgccgaggccggcacgcaggcgttcgccgcgctggcccggggcggcgcgcaggtgcgcgtgctcaccaatgcgctggaagcgaccgacgtggccgtggtgcattccggctacgccaagcgccgcaaggcgctgctgcaggcgggcgtgcggctttacgaaatgcggcgcagctacgccgggcccaagccgcagggcaggggccgattcggcagctccgggtccagcctgcacgccaagaccttcggcgtcgacggcgagcgcgtcttcataggctcgttcaacttcgatccgcgctcggccaatctcaacaccgaactgggcttcgtgatcgaaagccccgacatggcgcgccacatcgccgccacgttcgaccaggatattcccgccgccacttacgaggtgcgcctggacgacgacggcagcctgtactggctggaacagcgcgacggcgccaccgtgcggcacgacagcgagccgggcgtcagcctgtggcggcgcttcagcgtgtggctgttctcgctgctgccgctcgagccgctgctgtag

SEQ ID NO: 124078 - protein, 524 aa, Bordetella pertussis Tohama I
MPRLLSRIRAARARAAALLALAGCAILLGACTLPPPVDRTASHALDATQARATPLGQGVGELADTHPGLSGFHVLGDAQDAFAARMLLARAATRTLDVQYYIWRNDMTGTLLLQALHAAAERGVRVRLLLDDNGISGLDDALAALDAHPNAEVRLFNPFPTRSFKALGYLTDFSRLNRRMHNKSFTVDNQATIIGGRNIGDEYFGATDGVLFADLDVLAVGPVVGDVSAEFDAYWASESAWPAGPLLPAPGAQTLRALAERAARIEQDPAAGDYMSALRELPFIRELMAGRLPLQWAPARMVSDDPAKGLGKAPPAGLLTQQLRNILGEPRRTLDLVSPYFVPAEAGTQAFAALARGGAQVRVLTNALEATDVAVVHSGYAKRRKALLQAGVRLYEMRRSYAGPKPQGRGRFGSSGSSLHAKTFGVDGERVFIGSFNFDPRSANLNTELGFVIESPDMARHIAATFDQDIPAATYEVRLDDDGSLYWLEQRDGATVRHDSEPGVSLWRRFSVWLFSLLPLEPLL

SEQ ID NO: 124079 - DNA, 1479 bp, Bordetella bronchiseptica RB50
  CDS (1)..(1479): transl_table=11
ttgccgccgcccgtcgaccgcaccgcctcgcacgccctggatgcctcgcaggcgcgcgccacgccactgggccagggcatcggcgatctggccgacgcccatcccgggctcagcggtttccatgcgctgggcgatgcgcaggacgccttcgccgcgcgcatgctgctggcgcgcgcggccacccgcacgctggatgtgcagtactacatctggcgcaacgacatgaccggcaccctgttgctgcaggccctgcacgcggccgccgagcgcggcgtgcgggtgcggctgctgctcgacgacaacggcatctccggcctggacgacgcgctggccgcgctggacgcgcatcccaacgccgaagtgcggctgttcaatccgtttcccacgcgctcgttcaaggcgctgggctacctgacggatttctcgcgcctgaaccggcgcatgcacaacaaatcattcaccgtcgacaaccaggccaccatcatcggcgggcgcaatatcggcgacgagtacttcggcgcgaccgacggcgtgctgttcgccgacctggacgtgctggcggtggggccggtggtgggcgatgtgtccgccgagttcgacgcctactgggccagcgagtccgcctggccggccggcccgctgctgcccgcgccgggcgcgcagacactgcgcgccctggccgagcgcgccgcgcgcatcgaacaggacccggccgccggcgactacatgagcgcgctgcgcgagttgcccttcatccgcgaattgatggccggccgcctgccgctgcaatgggcgccggcccgcatggtcagcgacgatccggccaagggcctgggcaaggcgccgccggccggcctgctgacgcagcagctcaggaacatcctgggcgagccgcgccgcacgctcgacctggtgtcgccgtatttcgtgcctaccgaggccggcacgcaggcgttcgccgcgctggcccggggcggcgcgcaggtgcgcgtgctcaccaatgcgctggaagcgaccgacgtggccgtggtgcattccggctacgccaagcgccgcaaggcgctgctgcaggcgggcgtgcggctttacgaaatgcggcgcagctacgccgggcccaagccgcagggcaggggccgattcggcagctccgggtccagcctgcacgccaagaccttcggcgtcgacggcgagcgcgtcttcataggctcgttcaacttcgatccgcgctcggccaatctcaacaccgaactgggcttcgtgatcgaaagtcccgacatggcgcgccacatcgccgccacgttcgaccaggatattcccgccgccacttacgaggtgcgcctggacgacgacggcagcctgtactggctggaacagcgcgacggcgccaccgtgcggcacgacagcgagccgggcgtcagcctgtggcggcgcttcagcgtgtggctgttctcgctgctgccgctcgagccgctgctgtag

SEQ ID NO: 124080 - protein, 492 aa, Bordetella bronchiseptica RB50
MPPPVDRTASHALDASQARATPLGQGIGDLADAHPGLSGFHALGDAQDAFAARMLLARAATRTLDVQYYIWRNDMTGTLLLQALHAAAERGVRVRLLLDDNGISGLDDALAALDAHPNAEVRLFNPFPTRSFKALGYLTDFSRLNRRMHNKSFTVDNQATIIGGRNIGDEYFGATDGVLFADLDVLAVGPVVGDVSAEFDAYWASESAWPAGPLLPAPGAQTLRALAERAARIEQDPAAGDYMSALRELPFIRELMAGRLPLQWAPARMVSDDPAKGLGKAPPAGLLTQQLRNILGEPRRTLDLVSPYFVPTEAGTQAFAALARGGAQVRVLTNALEATDVAVVHSGYAKRRKALLQAGVRLYEMRRSYAGPKPQGRGRFGSSGSSLHAKTFGVDGERVFIGSFNFDPRSANLNTELGFVIESPDMARHIAATFDQDIPAATYEVRLDDDGSLYWLEQRDGATVRHDSEPGVSLWRRFSVWLFSLLPLEPLL

SEQ ID NO: 124081 - DNA, 1551 bp, Burkholderia vietnamiensis G4
  CDS (1)..(1551): transl_table=11
atgaccatgctgcgttcgtggggtgcgattctctcgttgctgatgcttgccgcgtgcgcgagcctgccgccgcaggtcgaccgcacgccgacgcatgcctacaccgataccggcaacacgcgcctcggcgtcgcgttccgcgcgcaggccgccacccaccctgggcaggacgcgtttcatctgctcagcgatccggtcgacgcactcgatgcgcgcgtgctgctcgccgatcgtgccgatcgttcgctcgaccttcagtactacatctggcacgacgatctgaccggtcacgcgctcgcggacgcgatcatccgggccgccgatcgcggcgtgcgcgtgcgtgtgctgctcgacgatctcggcaccaacgccgacgaccgcaagctgctcgaaatcagctcgcatccgcacatcgagatccgtctgttcaatccggtcgcgacgcgcgagttcaagaagatcggcacggtgctcgaattctcgcgggtcaaccggcgcatgcacaacaaggcgatgatcgccgacaaccaggcggcgatcatcggcggccgcaatatcggcgacgagtatttcggcgcgtcgtcgatgctcgagttcggcgatctcgacgtggtcgtgcatggccgcgtggtcaacgacatctcgaccgagttcgatacgttctggaattcgccgtatgcgtattccgtcggcgcgctggtcgggcacgacgcgacgccgggcagcctcgatcgcgaacgcgagcggctgcgcgattatctgcgtgcgatggaggacaacccgtacgtgctcgaagcgcgcgagcggctcgaccggatcgtgcatggcgaaggcacggagctgtcgtggggacgcgcgaccgtgctgtatgacgatccggcgaagatcgcacgcgcgccgaacgacagcgaagggcacctgctgccgcagctgcgcgcgctggcgctgcggcccgagcacgagctgttgatcgtgtcgccgtatctggtgccgggcgcggcgatgatcgaacggctgcgcgcgctcaccgcgcgcggcgtccgcgtgacgatcctgaccaactcgctcgcatcgaccgacgtcgcggccgtacacgccggttaccggcgctatcgacgcgaactggtggaagcgggcgtgcggctgtacgagcgccggccgtcaggcgacaagagcatttcgaagcggctgatcatcggctcgtcgcgcgcgtcgctgcatgcgaagacctatgtgttcgatcgcaagagcgtgttcatcggctcgatgaatctcgacccgcgctcgctgaggctcaataccgagatcggcgtttactgcgagagcccggcgctcgcggcacaagtcgcggcggacctggagccgcggctcgatcgcatcgcgtggcgggtcgaagcgacgaccgatccgtccggcacacggcgcctcgagtggattcagactgacgaggacggcaaggtgaccgaattcgaccacgagccggaagtgtcgacggcacgacgcgtcgaggtatggtttctcggcttgttcccgatcgaatcgcagctgtga

SEQ ID NO: 124082 - protein, 516 aa, Burkholderia vietnamiensis G4
MTMLRSWGAILSLLMLAACASLPPQVDRTPTHAYTDTGNTRLGVAFRAQAATHPGQDAFHLLSDPVDALDARVLLADRADRSLDLQYYIWHDDLTGHALADAIIRAADRGVRVRVLLDDLGTNADDRKLLEISSHPHIEIRLFNPVATREFKKIGTVLEFSRVNRRMHNKAMIADNQAAIIGGRNIGDEYFGASSMLEFGDLDVVVHGRVVNDISTEFDTFWNSPYAYSVGALVGHDATPGSLDRERERLRDYLRAMEDNPYVLEARERLDRIVHGEGTELSWGRATVLYDDPAKIARAPNDSEGHLLPQLRALALRPEHELLIVSPYLVPGAAMIERLRALTARGVRVTILTNSLASTDVAAVHAGYRRYRRELVEAGVRLYERRPSGDKSISKRLIIGSSRASLHAKTYVFDRKSVFIGSMNLDPRSLRLNTEIGVYCESPALAAQVAADLEPRLDRIAWRVEATTDPSGTRRLEWIQTDEDGKVTEFDHEPEVSTARRVEVWFLGLFPIESQL

SEQ ID NO: 124083 - DNA, 1572 bp, Bartonella quintana str. Toulouse
  CDS (1)..(1572): transl_table=11
ttgactctgctacagattgttatcagttttatcatatttttttttattgcgtctatgttagcgatctatacatatggacgttttgttaaaaatgctcggggggagtgttcttatgcattgactgttaagaaagatgaaaccaagcttgaccgtataataagtcaattggcggaggaaacggatggattgggggttgataaagatgctctttcactcatcattagcaatttggatgcattttgtgttcgtgcgataggagcagcacaggctgggcgtagtcttgatctaatgtattatatttggaatgatgacttaacagggcgcttattattaagtgaaatagtggaggcagctgatcgtggtgttcgggtgcgccttcttttagatgatattaatgctcaggcacgtgatccagcttatattgcgctggataaacatcctcgtattgaggtgagaatgtttaatccagggcgatcacgtaagggtggtttacgccgtggtttagagattatattacgggcaattactgtaacacgcagaatgcataataaagcttttattgtggatggccgagtggcttttgtaggaggacgcaatcttgcagattcttattttgacgctggtgaagaatcacattttcgagatttagatttgatgttaattggtccatcggttaaaaaggtggaaaccatctttgatgacttttggaatagcgctgtagttttaccaattcatactttggttgttcctaaaagtacaagcgaccttggttattggaaggagaaattacgaaaatttcgtgattccaaggttgcaaaggtttatctggattatgttaaggagcatattaattttgactgttttattcaaacaggaaagcgattatttttagcagataaagttgttgttctttctgatcctccggagaaagcattgcgcaaaaaagctggaaattggcttatgaaagcactttcacaggttattggagatgcccaaaaaactgttcaaattacatcaccttattttgttcctggtaaggtcggtacgcagagttttagaaatttagtttcaaaaggtgttgatgttaaaattcttacaaattccttagcggctaccgatgtggcactcgtgcatggtggttatgtaccatatcgtaaagcgcttttgaaaagtggtgttaagctctatgagttaaagccggatggaaacatgcatgggttgcgattgtttcgatcaagtaaggccattttacatactaaagcttttttggttgatcgtaaaactgcttttattggatctttaaattttgatcctcggtcagctgcgttgaatacggaaatgggcattctttttgaatgtgcaccgattacagcgaggttagatttgcttttttctgaagaaacgaccggtgaaatgagttataatctccgtcttgataataacaaccgcatttattgggattttattgaaaacgaaaagcaatacagcattgattatgagccagaaagcaacttttggcgtcgtgcctttacaagaataataagttggttgcccattgaatcacaattgtag

SEQ ID NO: 124084 - protein, 523 aa, Bartonella quintana str. Toulouse
MTLLQIVISFIIFFFIASMLAIYTYGRFVKNARGECSYALTVKKDETKLDRIISQLAEETDGLGVDKDALSLIISNLDAFCVRAIGAAQAGRSLDLMYYIWNDDLTGRLLLSEIVEAADRGVRVRLLLDDINAQARDPAYIALDKHPRIEVRMFNPGRSRKGGLRRGLEIILRAITVTRRMHNKAFIVDGRVAFVGGRNLADSYFDAGEESHFRDLDLMLIGPSVKKVETIFDDFWNSAVVLPIHTLVVPKSTSDLGYWKEKLRKFRDSKVAKVYLDYVKEHINFDCFIQTGKRLFLADKVVVLSDPPEKALRKKAGNWLMKALSQVIGDAQKTVQITSPYFVPGKVGTQSFRNLVSKGVDVKILTNSLAATDVALVHGGYVPYRKALLKSGVKLYELKPDGNMHGLRLFRSSKAILHTKAFLVDRKTAFIGSLNFDPRSAALNTEMGILFECAPITARLDLLFSEETTGEMSYNLRLDNNNRIYWDFIENEKQYSIDYEPESNFWRRAFTRIISWLPIESQL

SEQ ID NO: 124085 - DNA, 1572 bp, Bartonella henselae str. Houston-1
  CDS (1)..(1572): transl_table=11
ttgactctgttacagattgttatcagttttatcatatttttttttattgcgtctatgttagcgatttacacttatgggcgttttgttaaaaatgctcggggggagcattcttatgcgctgactgttaagaaagatgaaaccaagcttgaccgtataataagtcaattagcggagaaaaccgatgggttaggggttgataaagatgctctttcgcttatcatcagcaacttggatgcgttttgtgttcgtgcggtaggagcagcaaaggctgggcgtagtcttgatctcatgtattatatttgggacgatgatttaacaggacgcttattattaagtgaaatagtggaggctgctgatcggggtgttcgtgtgcgccttcttttagatgatattaacgctcaggcacgtgatccagcttatatggcgctagataaacatccccatattgaagtaagaatgtttaatccagggcgatcacgtaagggtggtgtacgccgtggtttagagattatattgcgggcaattactgtaacacgcagaatgcataataaggcttttattgtggatggtcgtatggcttttgtagggggacgtaatcttgcagactcttattttgacgctggtaaagaatcacattttcgagacttagatttgatgttaataggtccttcggttaaaaaggtggaaaacatctttgatgatttttggaatagcgctgtcgttttaccgattcacactttagttgttcctaaaagtgtaaatgatcttgctttttggagggaaaaattacgacaatttcgtgattccaaagctgcaaaagtttatttagattatgtcaagaagcatattagttttgactgttttattcagacaggaaagcgattatttttagcagataaagttgttgttctttctgatcctccggaaaaagtattgcgcaaaaaagcagaaaattggctcatgaaagcactctcacaggttattgaagacgcccaaaaaacggttcagattacatcaccttattttgttcctggtaaggtaggtacgcagaattttagcaatttggtttcaaaaggtgttgatgtcaaaattcttacgaattctttagcagccactgatgtggcactcgtgcatggtggttatgtaccttatcgtaagatgttattgaaaagtggtgttaagctctatgagttaaaaccaggtggaaatatgcacgggttgcgactgtttcgatcaagtaaggctagtttacataccaaagcttttttagttgatcgtaaaactgcttttattggatctttaaactttgatcctcgatcagctgcgttgaatacagaaatgggtattctttttgaatgtgcccccattacaacgcgattagatttgctttttgctgaagaaacgacgggtgaaatgagttatcatctccgtcttaatgacaacaaccgcatttattgggattttattgaaaacgaaaaacagtatagcgttaattatgagccagaaagcaatttttggcgtcgtgcgtttgcaaaaataataagttggttaccgattgaatcacaattgtaa

SEQ ID NO: 124086 - protein, 523 aa, Bartonella henselae str. Houston-1
MTLLQIVISFIIFFFIASMLAIYTYGRFVKNARGEHSYALTVKKDETKLDRIISQLAEKTDGLGVDKDALSLIISNLDAFCVRAVGAAKAGRSLDLMYYIWDDDLTGRLLLSEIVEAADRGVRVRLLLDDINAQARDPAYMALDKHPHIEVRMFNPGRSRKGGVRRGLEIILRAITVTRRMHNKAFIVDGRMAFVGGRNLADSYFDAGKESHFRDLDLMLIGPSVKKVENIFDDFWNSAVVLPIHTLVVPKSVNDLAFWREKLRQFRDSKAAKVYLDYVKKHISFDCFIQTGKRLFLADKVVVLSDPPEKVLRKKAENWLMKALSQVIEDAQKTVQITSPYFVPGKVGTQNFSNLVSKGVDVKILTNSLAATDVALVHGGYVPYRKMLLKSGVKLYELKPGGNMHGLRLFRSSKASLHTKAFLVDRKTAFIGSLNFDPRSAALNTEMGILFECAPITTRLDLLFAEETTGEMSYHLRLNDNNRIYWDFIENEKQYSVNYEPESNFWRRAFAKIISWLPIESQL

SEQ ID NO: 124087 - DNA, 1560 bp, Acinetobacter sp. ADP1
  CDS (1)..(1560): transl_table=11
atgctgacattgagtctagtcaccgtggtgggaatcaatggatgcagtacccttccaaaacatggtccagaagtaactcaatatgcgtatgatattgatacatcacagacctcactcgcacaaatcattacgccattaaaacaacaaaatctaggcttaactggataccatatgctgtatgaaccccttgaagcgctggctgctcgcctcagattaatcgataaggcagaaaaaaccctcgatctacaatattacatctgggataacgataaaattggcgcgttagcattacatgccctgatccgtgccgcagatcgtggggtaaaagtccgtctcttgatcgatgacaacaacgccaaacagatcgaaggtgtcttactcgccttgtcccagcatcagaatattgaagtcaaactgtttaatccttatcgcttccgtaaataccgtgcaatggacatgattctggatttaaaacgtatcaatcggcgtatgcataacaaaagctttattgcagacaatcaggttgcgctcattggcgggcgcaacatgaccaatcagtactacaatgttagtgataattatcagttttcagacgttgatgttttactggttggggctgctgtcgatgatatcgtcaaatcatttgatgactactggaacgatgaatatgcctattcggttcaaaacatcgtcaaccccgaacagcatcgcttacgttatcaaagtctaaagcaacagcttgatgattattatcaggaagtgaccgtacaaaattatctggatctgaccacacgctcacatgcttttgatcaatggctcaataacaatatccagcttgattgggtcaaagcgacagtggtcaaagacgctcccgataaaattcgtgccaaagccaacaaagaacaacatctcaattttcagctcatcaaacatcttgaaaagccagaagataacgtcgatctcatctctgcctattttgttccagaaaaacagggggccaaacatttgagtgatatggcacaggatggcattaaagtacgtgttctgaccaactcctttaaagccaacgatgtccctgtggtccatgcgttttatgccaaatatcgtcaggaacttctggaaaatggcgtgcaactttatgagtttttacccacacttgaaaaagaagaactggacaaatataccgatgaactggttaaaaaagccaaggtcagtattaaagggcttagccgctctagtttacatgccaagatgatggcattagatcagaaacaagtgtttattggatcctttaactttgacccacgttcggcctatctcaataccgaaataggcgtcatcctgaatagtccaccattagcgatggccgtacatcagacgatggatcaacaactgacccactatgcttataaattggtactagatgccaatcacaaaattaattggtatcggcagacatccactggtaccaaaatctataccaaagaaccccgcatgaaatggtggcaaaaagctggaattaagttgatttcatggctgcctattgaaggtttcatgtaa

SEQ ID NO: 124088 - protein, 519 aa, Acinetobacter sp. ADP1
MLTLSLVTVVGINGCSTLPKHGPEVTQYAYDIDTSQTSLAQIITPLKQQNLGLTGYHMLYEPLEALAARLRLIDKAEKTLDLQYYIWDNDKIGALALHALIRAADRGVKVRLLIDDNNAKQIEGVLLALSQHQNIEVKLFNPYRFRKYRAMDMILDLKRINRRMHNKSFIADNQVALIGGRNMTNQYYNVSDNYQFSDVDVLLVGAAVDDIVKSFDDYWNDEYAYSVQNIVNPEQHRLRYQSLKQQLDDYYQEVTVQNYLDLTTRSHAFDQWLNNNIQLDWVKATVVKDAPDKIRAKANKEQHLNFQLIKHLEKPEDNVDLISAYFVPEKQGAKHLSDMAQDGIKVRVLTNSFKANDVPVVHAFYAKYRQELLENGVQLYEFLPTLEKEELDKYTDELVKKAKVSIKGLSRSSLHAKMMALDQKQVFIGSFNFDPRSAYLNTEIGVILNSPPLAMAVHQTMDQQLTHYAYKLVLDANHKINWYRQTSTGTKIYTKEPRMKWWQKAGIKLISWLPIEGFM

SEQ ID NO: 124089 - DNA, 1578 bp, Neisseria gonorrhoeae FA 1090
  CDS (1)..(1578): transl_table=11
atgcatacagaccccaaaatacaggcaatgccgtctgaaactatatccccgatgaaaacacgcagcctcatttcccttttatgcctccttctctgttcatgttcttcatggttgcccccactggaagaacggacggaaagccgtcattttaatacttccaaacctgtcctcctggacaacatcctgcaaatccggcacacccctcataacaacgggctatccgacatctacctgctcgacgacccccacgaagcctttgccgcccgcgccgcccttatcgaatctgccgaacacagcctcgatttgcaatactacatttggcgcaacgacatttccggcaggctgctgttcaacctcatgtaccttgccgcagaacgcggcgtgcgcgtacgcctgctgttggacgacaacaacacgcgcggcttggacgatctcctgctcgccctcgacagccatcccaatatcgaagtgcgcctgttcaaccccttcgtcctacgcaaatggcgcgcactcggctacctgaccgacttcccccgcctcaaccgccgcatgcacaacaaatcctttaccgccgacaaccgcgccaccatactcggcggacgcaatatcggcgacgaatacttcaaagtcggtgaggacaccgttttcgccgacctggacatcctcgccaccggcagcgtcgtcggcgaagtatcgcacgacttcgaccgctactgggcaagccattccgcccacaacgccacgcgcatcatccgcagcggcaacatcggcaagggtcttcaagcactcggatacaacgacgaaacatccagacacgcgctcctgcgctaccgcgaaaccgtcgaacagtcgcccctctaccaaaaaatacagacgggacgcatcgactggcagagcgtccaaacccgcctgatcagcgacagccctgcaaaaggactcgaccgcgaccgccgcaaaccgccgattgccgggaggctgcaagacgcgctcaaacagcccgaaaaaagcgtctatctggtttcaccctatttcgtccctacaaaatccggcacagacgcactggcaaaactggtgcaggacggcatagacgttaccgtcctgaccaactcgctacaggcgaccgacgttgccgccgtccattccggctacgtcaaataccgaaaaccgctgctcaaagccggcatcaaactctacgagctgcaacccaaccatgccgtccccgccacaaaagacaaaggcctgaccggcagctccgtaaccagcctgcatgccaaaaccttcattgtggacggcaaacgcatcttcatcggctcattcaacctcgacccccgttccgcacggctcaataccgaaatgggcgtcgtcatcgaaagccccaaaatcgcagaacagatggagcgcaccctcgccgataccacacccgaatacgcctaccgcgttaccctcgacaaacacaaccgcctgcaatggcacgatcccgccacccgaaaaacctacccgaacgaacccgaagccaaactttggaaacgcatcgccgcaaaaatcctatccctgctgcccatcgaaggtttattatag

SEQ ID NO: 124090 - protein, 525 aa, Neisseria gonorrhoeae FA 1090
MHTDPKIQAMPSETISPMKTRSLISLLCLLLCSCSSWLPPLEERTESRHFNTSKPVLLDNILQIRHTPHNNGLSDIYLLDDPHEAFAARAALIESAEHSLDLQYYIWRNDISGRLLFNLMYLAAERGVRVRLLLDDNNTRGLDDLLLALDSHPNIEVRLFNPFVLRKWRALGYLTDFPRLNRRMHNKSFTADNRATILGGRNIGDEYFKVGEDTVFADLDILATGSVVGEVSHDFDRYWASHSAHNATRIIRSGNIGKGLQALGYNDETSRHALLRYRETVEQSPLYQKIQTGRIDWQSVQTRLISDSPAKGLDRDRRKPPIAGRLQDALKQPEKSVYLVSPYFVPTKSGTDALAKLVQDGIDVTVLTNSLQATDVAAVHSGYVKYRKPLLKAGIKLYELQPNHAVPATKDKGLTGSSVTSLHAKTFIVDGKRIFIGSFNLDPRSARLNTEMGVVIESPKIAEQMERTLADTTPEYAYRVTLDKHNRLQWHDPATRKTYPNEPEAKLWKRIAAKILSLLPIEGLL

SEQ ID NO: 124091 - DNA, 1569 bp, Pseudomonas fluorescens Pf-5
  CDS (1)..(1569): transl_table=11
ttgaaccctatacaggccttcacctggcttctgctgctgagcctcgggctgggcggctgcgctacccgcgaggtcccgtaccaacccagccaggccctgcccgcccgtgattcgggctttgcccagtcgatccgggcccaggccgcgccctaccaggggcgttccggctttcgccttctacccaacagcaccgaagcgttcatggcccgtgccgagctgatccgcaacgcgcaaagcagcctcgacctgcagtactacatcgtccacgacggcatcagcacccgcatgctggtggacgagctgctcaaggccgccgatcgtggcgtgcgggtacgcatcctgctggacgacaccaccagcgacggcctggaccagatcatcgccaccctggccgcccatccgcagatccagatccgcctgttcaaccctctgcacctgggccgcagcactggcctgacccgggccatgggccgcctgttcaacctgtcgcagcagcataggcggatgcacaacaagctctggctggcagacaacagcgtggccatcgtcggcgggcgcaacctgggggatgaatacttcgacgcccagcccaacctgaacttcaccgacatcgacatgttcagcgtggggccggtggccgagcaactgggccacagcttcgaccagtactggaacagcgccctgagccgccccatcggcgagttcctgtccagcacaccttccgccaaggcgctggacaacacccggctgcgcctcgaggaatccttgcaggacagccgccggcagaaccaggcgctgtaccggcaactgatgacctaccagacccagccgcgcatggacatctggcgcaaggaactgatctgggcctggaaccaggccctgtgggacgctccggccaaggtcctggccaagggtgaccccgacccgcacctgctgctcaccacccagctggcaccggaactgagcggggtcggcaaggagctgatcatgatctcggcctacttcgttccggggcagcccgggctggtgtacctgaccgggcgcgcggacgccggggtctcggtgagcctgttgaccaactccctggaagccaccgacgtgccagtggtgcatggcggctatgcgccctatcgcaaggcattgctggaacatggagtgaagctctacgaactgcgccgacaacccggcgagcgcggtggcagcgggccgcacctgttccacagcggctcctacaagggctccgactccagcctgcacagcaaggcgatgatcttcgaccgacgaaagagcttcatcggctcgttcaacttcgacccccgttcggtgctgtggaacaccgaggtcggggtgctggtggacagccccgagctggctgaacatgtccgcgccctggccctgcaggggatggcgccggccctgagctaccaggtcaagctgctggacggcaagctggtctgggtgaccgaggaccagggccagttgcacagcctgggccatgaacccggcaactggtggcgccgcttcaatgcctggctgagcacccgcatcggcctggaacgcatgctctga

SEQ ID NO: 124092 - protein, 522 aa, Pseudomonas fluorescens Pf-5
MNPIQAFTWLLLLSLGLGGCATREVPYQPSQALPARDSGFAQSIRAQAAPYQGRSGFRLLPNSTEAFMARAELIRNAQSSLDLQYYIVHDGISTRMLVDELLKAADRGVRVRILLDDTTSDGLDQIIATLAAHPQIQIRLFNPLHLGRSTGLTRAMGRLFNLSQQHRRMHNKLWLADNSVAIVGGRNLGDEYFDAQPNLNFTDIDMFSVGPVAEQLGHSFDQYWNSALSRPIGEFLSSTPSAKALDNTRLRLEESLQDSRRQNQALYRQLMTYQTQPRMDIWRKELIWAWNQALWDAPAKVLAKGDPDPHLLLTTQLAPELSGVGKELIMISAYFVPGQPGLVYLTGRADAGVSVSLLTNSLEATDVPVVHGGYAPYRKALLEHGVKLYELRRQPGERGGSGPHLFHSGSYKGSDSSLHSKAMIFDRRKSFIGSFNFDPRSVLWNTEVGVLVDSPELAEHVRALALQGMAPALSYQVKLLDGKLVWVTEDQGQLHSLGHEPGNWWRRFNAWLSTRIGLERML

SEQ ID NO: 124093 - DNA, 1713 bp, Psychrobacter arcticus 273-4
  CDS (1)..(1713): transl_table=11
atgtcgatgttcagtatagaacccagcaacttatcgttgagcctgacactcggtctcaccttaggtcttagtggatgccaaagcttaccaaagcagccgcacttgcctgaaagccaagcactatcagcaagggttaatgctttataccaatcagacattagcaaacaagataacatagaaaaagacgtccaaaaagatggcgattctatagataccacgaaagataccacgaatgtcagcacagacactgtcaccccaaatacggatagccttgatttggtagccgccatcagtcaacaaagtaagattcaccctgatttgtcaggctaccatccgattgtaactggtgccaatgcttttgcctcacgcagtatattgacaggtatggccacacgcaatatcgatgcccagtactatatttggcacgatgatcaggccggtcagctgatgctcaaagacttatgggatgctgcggagcgtggcgttattgtgcgcttattgcttgatgattttaataataatgctaaatttgatcagcatttattacgttttgccagtcaccctaatgtcgctgtgcgtattattaatccactcatataccgtaaatttaaaagcttaaactttttaaccggactgccgcgtatcaatagacgcatgcataataaaagcatgatttttgataagcaaatcaccatcattggtggccgtaatatcggtgatggatacttaagtaatgataaaaacagccagttcgcagacttagatgtactactgattggtaaagtcgtggcagatattgataatagctttgccagctactggtcagcgccaatatcatttgatattcaaaccttagcgactcttgataaaggagagacgactgattttgtaaaagggctcgataagttaaaaacagatgagaagagtagtagtaatggcagtttgtcgatttataaagcagccattgaagactcctctatcgatactgatttgattaacaaacgagtgccgtttcgctggacggacatgcagtttttaagtgatgatgtcggcaagctaaccaaaaccgtgccagcagacaccaatttagtgcatcaactgcgcactttgcttggcagtccatcaaagaaactcactattatctcatcttactttgtaccgactaaagacggtgttaatacgttgaacgcattggcagaatctggtatcgaaatcaaaattctaaccaattcatttgatgccaccgatgtaacggcggtacattctggctatagccaatggcgtcctagtttgctgcgcgcgggcgtaaaaatttatgagctaaaatcaaccgcttctgaagaaaagcgcgaaaacaaactttggaaaggtcgtagtcaatcctcaactagcttacatgctaaagcttttgccgttgatgactaccaagttttcattggctcatataatgttgacccacgctcggctaatatcaataccgagatgggcgtgattatcaatgatgatgagcttgctactcagttgcatgatgcactaagcgatgacttattaaaccaagcgtatgaagtgaagttactagaaaacggtaacttacaatggcataccatggaaaaagataagaaagtcatctatgattcagagccgcgcgtcgctgtcagtgaccatgtttggctgactatcatgtcatggctacctattgattggctgttatag

SEQ ID NO: 124094 - protein, 570 aa, Psychrobacter arcticus 273-4
MSMFSIEPSNLSLSLTLGLTLGLSGCQSLPKQPHLPESQALSARVNALYQSDISKQDNIEKDVQKDGDSIDTTKDTTNVSTDTVTPNTDSLDLVAAISQQSKIHPDLSGYHPIVTGANAFASRSILTGMATRNIDAQYYIWHDDQAGQLMLKDLWDAAERGVIVRLLLDDFNNNAKFDQHLLRFASHPNVAVRIINPLIYRKFKSLNFLTGLPRINRRMHNKSMIFDKQITIIGGRNIGDGYLSNDKNSQFADLDVLLIGKVVADIDNSFASYWSAPISFDIQTLATLDKGETTDFVKGLDKLKTDEKSSSNGSLSIYKAAIEDSSIDTDLINKRVPFRWTDMQFLSDDVGKLTKTVPADTNLVHQLRTLLGSPSKKLTIISSYFVPTKDGVNTLNALAESGIEIKILTNSFDATDVTAVHSGYSQWRPSLLRAGVKIYELKSTASEEKRENKLWKGRSQSSTSLHAKAFAVDDYQVFIGSYNVDPRSANINTEMGVIINDDELATQLHDALSDDLLNQAYEVKLLENGNLQWHTMEKDKKVIYDSEPRVAVSDHVWLTIMSWLPIDWLL

SEQ ID NO: 124095 - DNA, 1608 bp, Methylobacillus flagellatus KT
  CDS (1)..(1608): transl_table=11
atgatggctttatttatcaggtgggtgcacaggaggggctctctacctattggagtccgctggttacatcgcacgctgatgttgatgctggttgcgcctctgtttgcatgtgggctgccgcatgttcgggacagcgacaagccttcttctgcagcatttccgatcgatgaggttgcggagactaagttgggccagaccatgcagccgctcaaggctgcccatcctggcgagtctggcattatgccgttactggatgcgtatagcgcttttgcagctcggatgttgttgacgcattccgcagaaaaaagcctggatgtccaatattacatctggcgcaatgacaataccggcatcctgttcctcgaagcattacgcaaagcggcggagcgtggtgtcagggtacgcctgctgctggacgataatggcatcagggggcgcgaaatggacgccagattggccgcgctcaacaagcatcccaatatcgaaatccgcctgttcaacccttttcctttacgtacattcaagtcattgggttttctgacagacttttcacgtctcaaccggcgcatgcacaacaaatcattcacggccgataacatggtgaccatcattggcgggcgcaatgtcggggatgagtatttcggagcggcggatggtgtgctgttcgcagacctggatgtcatggcaattggtacggtggtggatgatacgtcacgagattttgaccgctattgggccagtccggctgcctatccattgcgtctgctgatccctgaccctagcgaccgggaattgcaggcgctgagcatggcggcggagaaagcggaaaaaaccgtcactggccaaggttatctcaaagcgctgaaggaaagccaattcatccacgatttcatcaaggggttgcgcgcattcgactgggccaaggtggagttgatcagtgatagcccgggcaagattactggtcatgcggaaaaagatgagctgatggtcttcagtttggctaagatcctgcgcaaccccagggagagcgtggatttggtgtctccttatttcgtgcctacccagacaggcgtggatggtttttccgcgctggctagacgcggtatccatatccgcatcctgaccaatgcactcgagtccaccgacgtggccgctgtgcatgcgggctatgcaaagtggcgaaaacccctgttgcaggccggtatccaattatatgaaatgcgccgccaggtagctgaaaacggcatggcaaagtacctgggtcctctgggcagctcggggtccagtttgcatgccaagacatttaccattgatcgttcacgcgtatttatcgggtcattcaattttgacccgcgctcagcccagctgaatacggaactgggatttatcatcgaaagtcaaaaattagcccaacaggtagaggaggcattcaaggcggatgtgccccaaagtgcttatgaagtcaggctggatgaacatgaccgtttgtattggcttttctaccaagacggtgtcgagcagcgattcgatgtggatccgggtaccaacatgctgcaacgattttttgtgaaaatattgtcggtgttaccgatcgactggttgttatag

SEQ ID NO: 124096 - protein, 535 aa, Methylobacillus flagellatus KT
MMALFIRWVHRRGSLPIGVRWLHRTLMLMLVAPLFACGLPHVRDSDKPSSAAFPIDEVAETKLGQTMQPLKAAHPGESGIMPLLDAYSAFAARMLLTHSAEKSLDVQYYIWRNDNTGILFLEALRKAAERGVRVRLLLDDNGIRGREMDARLAALNKHPNIEIRLFNPFPLRTFKSLGFLTDFSRLNRRMHNKSFTADNMVTIIGGRNVGDEYFGAADGVLFADLDVMAIGTVVDDTSRDFDRYWASPAAYPLRLLIPDPSDRELQALSMAAEKAEKTVTGQGYLKALKESQFIHDFIKGLRAFDWAKVELISDSPGKITGHAEKDELMVFSLAKILRNPRESVDLVSPYFVPTQTGVDGFSALARRGIHIRILTNALESTDVAAVHAGYAKWRKPLLQAGIQLYEMRRQVAENGMAKYLGPLGSSGSSLHAKTFTIDRSRVFIGSFNFDPRSAQLNTELGFIIESQKLAQQVEEAFKADVPQSAYEVRLDEHDRLYWLFYQDGVEQRFDVDPGTNMLQRFFVKILSVLPIDWLL

SEQ ID NO: 124097 - DNA, 1554 bp, Burkholderia xenovorans LB400
  CDS (1)..(1554): transl_table=11
atggcgacgtttcgtggcattgcggcaatcctgctgatcgcgttgctgtccgcctgcgcgagcctgccgccacaggccgggcgcagcgcgacacacgcgctgacggacaccgacagcacccggctcggcgccgcgttcgtgccgcaggagcgcaagcatcccgacagcagcgcattccatctgttgcccaacggcgtcgatgcccttctcgcccgtatcgtgctggcggatgcggccgagcgtacgctcgatctgcagtactacatctggcacgacgatctgaccggccgccacctggccgacgccgtgctcaaggcggccgatcgcggcgtcagggtgcgcgtgttgctggacgacctgggcaccggcgccgacgaccaggttctgctcgccatcagttcacactccaacatcgaaatacggctgttcaatccgattgccagccgcagcttcaagaagctcggcagcgcgctggagttcagccggatcaaccgccgcatgcacaacaaggcgctgatcgcggacaatcaggccgccatcctgggcggccgcaatatcggcgatgagtatttcggcgcatccagcgaggtcgatttcggcgatctcgacgtgctgactttcgggccggtggtccacaaggtctccaatgccttcgacgaattctggaactcggaggccgcctatccgattgccagtctgaccggccacgccgccggcccggacgcgctgccgggctatcgcgcgaagctcacggcattcgttgcgtccgaacacgattcgccgtacgtcacgcaggcacgggaaaggcttcgcgacactctggatgcgcgcgagaccgacttcgcctggggaaaagccacgctcctctacgacgatcccgccaagatcacgcgctcgccggacgatccacagggacacttgctgtcgcagttcgacgcgctgagtatccagcccgccaaggaagtgctgattatctcgccgtacttcgtgcccggtaaaaagggcgtggcgtggatgcgtgcacagacgcagcgcggcgtgcgcgtgacggtgctgacgaactcgctcgccgctacggacgttgcggcggtccacgcggggtatcagcgctatcgcaaggatctgctcgacgcgggcgtgcatctctacgaactgaagccggctcccggcgaagacaacggcgagaaaaagaaatcgattctgggttcctcgaaagcctcgctgcatgcaaagacctatgtattcgacaggacgagtgtcttcatcggctcgatgaatctcgatccccgttcgatcacgctcaatacggagatcggcgtgtactgcgaaagcgccccgctcgccgctcaggtggcggatggactcgaaccgagactggatcagatcgcgtggcggctggaaacccgcacggatggcaatggcacgagtcgcattgtgtggatcgacaccgcgccggacggcaaagtgaccgagagcgacgaacccggcgtgtctggcatcaagcgtgtaggtatctggtttctcggcctgttgccgatcgaatcggagttgtga

SEQ ID NO: 124098 - protein, 517 aa, Burkholderia xenovorans LB400
MATFRGIAAILLIALLSACASLPPQAGRSATHALTDTDSTRLGAAFVPQERKHPDSSAFHLLPNGVDALLARIVLADAAERTLDLQYYIWHDDLTGRHLADAVLKAADRGVRVRVLLDDLGTGADDQVLLAISSHSNIEIRLFNPIASRSFKKLGSALEFSRINRRMHNKALIADNQAAILGGRNIGDEYFGASSEVDFGDLDVLTFGPVVHKVSNAFDEFWNSEAAYPIASLTGHAAGPDALPGYRAKLTAFVASEHDSPYVTQARERLRDTLDARETDFAWGKATLLYDDPAKITRSPDDPQGHLLSQFDALSIQPAKEVLIISPYFVPGKKGVAWMRAQTQRGVRVTVLTNSLAATDVAAVHAGYQRYRKDLLDAGVHLYELKPAPGEDNGEKKKSILGSSKASLHAKTYVFDRTSVFIGSMNLDPRSITLNTEIGVYCESAPLAAQVADGLEPRLDQIAWRLETRTDGNGTSRIVWIDTAPDGKVTESDEPGVSGIKRVGIWFLGLLPIESEL

SEQ ID NO: 124099 - DNA, 1599 bp, Ralstonia metallidurans CH34
  CDS (1)..(1599): transl_table=11
atgggagacacgcgtcgattggcgggtctgtttggtcgtttcctggttgtcatgatcgcggcgttcctgacggcctgcgcgggcttgccgcagcggccggaactgcagcccgaagtggcgctgcgcgataccagcgatacggcgatagccagagaactggcgccacaactggccgcccatccgggcgagtccgtgttctatccgctggccgcaggtacggatgcgtttgccatgcgtatcgcactggctcgcgtggcgcagcgctcgctcgatatccagtactacatttacgaaacggacgataccggcctgacgctgctggccgccatcatggccgcggcagatcgtggcgtgcgggtgcggctgctgcttgatgacattcatctggccgggcaggacaagatgctgcaggtgatcgacgcgcatccgaacatcgaggtgcgggtgttcaatccgttcgccagccgaaatgtgcgcctgctcgagtacgtcaccgctttcagccggatcaaccggcggatgcacaacaagtcgatgactgccgacaaccagctcaccatcgtcggcggacgcaacgtcggcgacgagtactacggcgcggcgcaaaccgatttcagcgacctggatcttctggcggccggtccggtggtgccagaggtgtcggccgtgttcgacgattactggaacaacgaagccgcttatccgatctcgaccctggacaagccgctcacgggcaaggaggccgccgagcagcaggagaaactgcgcaacgccgtcgacgatcgcgctatcgccgtgagtgcgacgccgtatggcaaatccgtgctggagtccggggtcgtgcatgcgcttcaccagggcacgctgccgtccttctggggccgagcgacggttatcgccgacaaggcggccaagatccagttgccgcccgacgacgattccacgcacgccatcccgcagctaggcaagattctcgacagcgccaagcatgacctgacgctgatatccccgtacttcgtgccgcccgacgacgccatggactggctgaccgggatgcagaagcggggtgtccaggttcgtatcctgaccaattcgtatggcgcgacggacgtgacggcggtgcacgcgggctatgcgccgaggcgcgaggccctgctgagggcaggggtgatcctgtacgaactgaagccatcggcctacgccgaactggccaaggaaagaaagtcccaccgcagcggcccgggcggcagcagccgcgccagcctgcacgccaagacctacatggtggatcgacaccagttgtttatcggatccctgaacctggatccgcgttcggcacggctcaataccgaaatgggtatcgtggtcgacagcgcgccgctatgcgagatgttcggcaaagtgatcgacgccgcgttgctcgacgtcgcctaccaggtcgtgctcgagaccgatcccgcgaccggcaaggagcagatggtgtgggtgacccaggaggacggcgtcctgcgcacgtatcgcagcgagcccgacatgaacgcctgggaccatatcaaacagggcgtgttgcggatgttgccggtggaatcgcagttgtag

SEQ ID NO: 124100 - protein, 532 aa, Ralstonia metallidurans CH34
MGDTRRLAGLFGRFLVVMIAAFLTACAGLPQRPELQPEVALRDTSDTAIARELAPQLAAHPGESVFYPLAAGTDAFAMRIALARVAQRSLDIQYYIYETDDTGLTLLAAIMAAADRGVRVRLLLDDIHLAGQDKMLQVIDAHPNIEVRVFNPFASRNVRLLEYVTAFSRINRRMHNKSMTADNQLTIVGGRNVGDEYYGAAQTDFSDLDLLAAGPVVPEVSAVFDDYWNNEAAYPISTLDKPLTGKEAAEQQEKLRNAVDDRAIAVSATPYGKSVLESGVVHALHQGTLPSFWGRATVIADKAAKIQLPPDDDSTHAIPQLGKILDSAKHDLTLISPYFVPPDDAMDWLTGMQKRGVQVRILTNSYGATDVTAVHAGYAPRREALLRAGVILYELKPSAYAELAKERKSHRSGPGGSSRASLHAKTYMVDRHQLFIGSLNLDPRSARLNTEMGIVVDSAPLCEMFGKVIDAALLDVAYQVVLETDPATGKEQMVWVTQEDGVLRTYRSEPDMNAWDHIKQGVLRMLPVESQL

SEQ ID NO: 124101 - DNA, 1551 bp, Silicibacter sp. TM1040
  CDS (1)..(1551): transl_table=11
atgatgcggttcttaaaaacactggctttgattggccttacgcttgcggcatttgtgatgctcgcacggcttctttttcctttgcccgacatttccaatcgcgagatcagctcggcccttccggcgagcgatcagacttcgatcggggcgacagttgcagatctgaacgcggcgcatgtcggccagtcagggatcatcccgctgcgcagcgggacggatgcgcttgcaagccgggtcgaactgatccgtcgcgccgaagcctcgatcgacgcgcaatactacatttggcacgacgacacctccggggttctcctgctagaggaattgcgcaacgcggcgctgcggggcgtgcgggtccgacttctgctggacgataacggcgtgcctgggcttgacgcaacaatggctacgctcaacgcgcaacccaatttcgaaatccgactgttcaacccctcaacgatccggcgcccaaagctcttgggctacagctttgatttctttcggatgaaccggagaatgcacaacaagtcccttatcgtggacggggcggtcgcgatcattggcgggcgcaacattggtgacgagtatttcgacgtgcagcgggatgcattttatatcgacatggatgcgctggctgcgggcaaagtggtgccggaaacggccaccgtctttgatgactactggaacagcgcctccgtttttgcgctcgagacgattgtatcatccgatgggaacctgattacctttgatcaacgcgtatcagaggtgatggccacaccagaggctcaacgcctgatgggcgatctgcaaagcagtgcagataaattcgcgcgtggtgagatgccgatggagtggacaaatgttcgcgtggtggccgatgaccctgtgaaaggtcagggcagcgcgacatcagaccagttgatgatctctcgtctgggcgagatcctcggccaggtcgagacccgcttggatctagtttcggcctattttgtacccgggcagcgaggaacggagtacctcacggatttggcggctgctggcgtggatgtgcgtgtgttgaccaatgcgatgaacaccacggatgtcttgatggtgcattctggctacacgcggtaccgtcgcgcgctgctggaagcagatgtttcgctctacgagttgaaactgcgcgctcagatgtcggctgacgccaaccggcaactcaaaccctttggtctttcgggggcgagcctgcacgccaagacctttgccgtcgacggtgatcgcgtttttatcggctctttcaactttgatccgcgctcggccaccctaaattgcgagatggggtttctcatcgaaagtccgacgctcgccgggcaggtcagcgcaggctttgacggcccactcctgacggtgtcctatcaaccggcgctgacacccaaaggcaagatgatatggcgcgagccaatcgaagatggcgagacattgatctaccaagaagagcccggcgccacctggttccagcagattgcaatcgcggtgattggcgtgctgccggttgaatggcttttgtga

SEQ ID NO: 124102 - protein, 516 aa, Silicibacter sp. TM1040
MMRFLKTLALIGLTLAAFVMLARLLFPLPDISNREISSALPASDQTSIGATVADLNAAHVGQSGIIPLRSGTDALASRVELIRRAEASIDAQYYIWHDDTSGVLLLEELRNAALRGVRVRLLLDDNGVPGLDATMATLNAQPNFEIRLFNPSTIRRPKLLGYSFDFFRMNRRMHNKSLIVDGAVAIIGGRNIGDEYFDVQRDAFYIDMDALAAGKVVPETATVFDDYWNSASVFALETIVSSDGNLITFDQRVSEVMATPEAQRLMGDLQSSADKFARGEMPMEWTNVRVVADDPVKGQGSATSDQLMISRLGEILGQVETRLDLVSAYFVPGQRGTEYLTDLAAAGVDVRVLTNAMNTTDVLMVHSGYTRYRRALLEADVSLYELKLRAQMSADANRQLKPFGLSGASLHAKTFAVDGDRVFIGSFNFDPRSATLNCEMGFLIESPTLAGQVSAGFDGPLLTVSYQPALTPKGKMIWREPIEDGETLIYQEEPGATWFQQIAIAVIGVLPVEWLL

SEQ ID NO: 124103 - DNA, 1623 bp, Shewanella sp. MR-4
  CDS (1)..(1623): transl_table=11
gtgacgatattcgggatatcttcgcatcattattgcgacgttttcgccaagataaaaactaaggacgtatggctaaaatggtggggttatcctgtcaaaacaatggtatttcgtctctcacttcccttttgggggcttttgctcctgttgattaacggttgtagctcaatggcagaattacccgcaaaatcaattgaaacagcctatcccttagccgaaaactccaccttgtatcaggtggtaaaaagcgccatggcacagcatcccgatcaaacgggtgtgtttcccctcggtgatggggtcgatgccttcgtcgctcgcttgctgctgatagagtccgccgtcagtagtatcgatctgcaatattatatttatcgcaatgatgaaactggccgcttgctgacctggtttttattggatgcagcggagcgcggggtgcgagtgcgtttattgctggatgatatgacgagtgccgatatggacgagcgtttaatcgcgctggctcgtcaccccaatatcagtattagactgtttaatccgagtaccgagcgtaattaccgcggccttgccatgttgtttggttttagtcgcttaaaccataggatgcacaataagtcgttcacagtggacaatgtgatgaccattgtcggtggacgtaatattggtgatgaatattttgcggcggacaaaaatcttgaatttggcgattttgacttgttagccatgggggatgtcgtgcctcaggtgtccaatgagtttgaccgatactggaatgccgactcgacccatccgatagaagtcttgagtgaccaaaatcccacacaggcggaactggaagcgcttgctaagcgggttagcgaacagcgtgagcagtccaagtcgagtgaatatgttaaacgcttagccgagagccaactattggcgaatttgcagagcgacaacatggcttggttttggggcaaagccttagtgctggttgacccgccggataagttgcagcaaggcgataaatccacttggctgctcagccagttattaccttacctgacgcaggtggagtctgagctgtttatcatctcgccttattttgtgccgacacaatcgggaaccgatctgctcacactcttggctcaatccggcaagcgggtgcgtgtgctcactaatagtctggcggcaaccgatgtgctggcggtacatgcaggttataagcagtatcgtaaagccttgctggctgcgggcgttgaaatctacgaagtgaaagcgcaggcgggagaacgctcccatagctggcgcgggagttcaaagagtagtttacatgccaaatcatttgtgtttgataataaaaagatatttgtggggtcgtttaattttgatccccgctctgcagcggtcaataccgaacttggactgctgatcactcagccgcaattaagcgagcaagtgacaaaaaatattgaggaaaaactggcgaccagtacttatcgacttgccttggaagagggcgatctcgtctggtgggatgacgcctctaaacagcgttatgacagtgaaccagatgccggattttggcgcgtatttgtcgccgattttctagggttactgccaatagagtcacagttataa

SEQ ID NO: 124104 - protein, 540 aa, Shewanella sp. MR-4
MTIFGISSHHYCDVFAKIKTKDVWLKWWGYPVKTMVFRLSLPFWGLLLLLINGCSSMAELPAKSIETAYPLAENSTLYQVVKSAMAQHPDQTGVFPLGDGVDAFVARLLLIESAVSSIDLQYYIYRNDETGRLLTWFLLDAAERGVRVRLLLDDMTSADMDERLIALARHPNISIRLFNPSTERNYRGLAMLFGFSRLNHRMHNKSFTVDNVMTIVGGRNIGDEYFAADKNLEFGDFDLLAMGDVVPQVSNEFDRYWNADSTHPIEVLSDQNPTQAELEALAKRVSEQREQSKSSEYVKRLAESQLLANLQSDNMAWFWGKALVLVDPPDKLQQGDKSTWLLSQLLPYLTQVESELFIISPYFVPTQSGTDLLTLLAQSGKRVRVLTNSLAATDVLAVHAGYKQYRKALLAAGVEIYEVKAQAGERSHSWRGSSKSSLHAKSFVFDNKKIFVGSFNFDPRSAAVNTELGLLITQPQLSEQVTKNIEEKLATSTYRLALEEGDLVWWDDASKQRYDSEPDAGFWRVFVADFLGLLPIESQL

SEQ ID NO: 124105 - DNA, 1533 bp, Photobacterium sp. SKA34
  CDS (1)..(1533): transl_table=11
atgccaataaaaaaagtgataggtgcaagtgttatttttatcactattctgacagggtgttcgtcactgcctaaacaagcagaacatcttgatgcgccactaacaccgaaattaaccagtgatttatcgtcattaaacgatcgccacaatcaatttataacgccacaaacaccaagcgcagttctggtgcaaaatacgggctgggatgcattggcgcaacgtctagctttggttgaagctgccgaacatacgatagatattcaatactatatttggaattcagatatttctggtcgttatttagcgagtcgtttagtcgcagccgctgatcgtggtgtttatgttcgtgtgttgcttgatgatattaacctgaacgatcgtgaagcactgctaacaaaactcgatgcgcaccctaatatcgagatccgcatttttaaccctatcccaacccgtaatgctggcaaatggataagttttgtaggagacttttcacgtttaaatcgtcgtatgcataataaatcttttactgttgatggtgcttttacggttgttggtggacgtaatattggtgatgagtattttgatctttcccatgagctgaatttgcgtgatcgtgatgtattagcaagtggaaaagttgtcgctgatgttcagcacagcttttatgattattggaatagtgaatgggcatattcagttaatttattgagagataaagctaagccactaccacagttaatgcttaacactattcctgtacctgaatataaaaattatccggcattgcctcaaagccagaaggctgccatgacatacttatcaacgctgttaaagaagatgagtggagtcaaagccacatatattgcagataagccgattcctgatgatgttgataatactgataagccaaaagcaacggcgcagtatttatctcaattggcgaaaaatacaaaaaatgacatcatcattgaatcggcatatttagtctttgatgataaacagctagcgggtttacagcagcttacgcaaaagggagtggagatcaaagcgctgacaaattcaatggcatcaaatgatcttgtgacgaatcactctggttatgcaggccgtcgccaagacatgctagaaagtggtatggatttatatgaattaaagcctgacgctaaattatgcaagattgttatccaagataacgacaaatgtgcaccgaatgcggtatacggtttacacgctaaatcagcggtatttgatcatcaaatagcgacgattggctcatttaacttcaatttacgttctacctatctaaatactgagtcgctattggtgattgaaaaccctaagattgccaccgagctggctacgaccttagagggcgcaatgcaagacactaacagttggcatttaagtcttgatgatggcgatgtgtattggcattcgggtaacgaaacatgggacagtgaaccgaacactaagcaatgggatcgtatgaaatcagaattattacagttattgcctatagaaaagtatttgtaa

SEQ ID NO: 124106 - protein, 510 aa, Photobacterium sp. SKA34
MPIKKVIGASVIFITILTGCSSLPKQAEHLDAPLTPKLTSDLSSLNDRHNQFITPQTPSAVLVQNTGWDALAQRLALVEAAEHTIDIQYYIWNSDISGRYLASRLVAAADRGVYVRVLLDDINLNDREALLTKLDAHPNIEIRIFNPIPTRNAGKWISFVGDFSRLNRRMHNKSFTVDGAFTVVGGRNIGDEYFDLSHELNLRDRDVLASGKVVADVQHSFYDYWNSEWAYSVNLLRDKAKPLPQLMLNTIPVPEYKNYPALPQSQKAAMTYLSTLLKKMSGVKATYIADKPIPDDVDNTDKPKATAQYLSQLAKNTKNDIIIESAYLVFDDKQLAGLQQLTQKGVEIKALTNSMASNDLVTNHSGYAGRRQDMLESGMDLYELKPDAKLCKIVIQDNDKCAPNAVYGLHAKSAVFDHQIATIGSFNFNLRSTYLNTESLLVIENPKIATELATTLEGAMQDTNSWHLSLDDGDVYWHSGNETWDSEPNTKQWDRMKSELLQLLPIEKYL

SEQ ID NO: 124107 - DNA, 1530 bp, Photobacterium sp. SKA34
  CDS (1)..(1530): transl_table=11
atgattcgtattaaagattataagaaacttttatctcgtattattatcgcaacaagtattctaatacttgttggttgtgctcaaccgttatcaacagtaaagcaagcaagctattcgaatgttgataatttcaacactcgcttgtaccaaagctccctgccttataccagccttcatcctaataaaacaggcttctaccctcttggtgacggtcaagcggcgttacttgcacgtttagctattattgaacatgcacaaaaaacattggatgttcagtactatatttaccgtgatgatgcaacaagtggattgctgacatggtatttataccaagctgctgagcgtggtgtacgtgttcgcttattacttgatgatatgcaaaatcgtgacgatcaagcactcgcaagcctttctgatcatcctaatgtcgaagtacgcttatttaacccattttcaaaccgtagtattaagccattaagtttcttaactgactttgatcgcttaaatcgccgtatgcacaataaagccattatcgcagatggtgtgtttgccattactggtggacgtaatatcggcgacgagtatttctctgccaatagtgatgtagaattcggtgacttcgaccttattatgctaggtaaagtgatcccacaattcgcacgtcaatttgatgagtactggaacagtaaaccagcgacaccgattgaagccttagtctcatctgcacatgaaccaacgaaagagcaactggcacaatggaaagatgcccagttaaagtacatgtcatcagactatgcgagttcattgaagagccacccgatggtacagcagctaataaatgaaacattaccgctatactggacggatgcagaactgctttacgatactccgtataaaattgcgaataataaagatgatttattgttacataagctatcggagatgattgcaaaagcagagcatgatttcttcttggtttcaccgtattttgtcccaacagaagaaggggcaaaattgcttgccaaagcggcacagaacggtaaaaacattgctattgtaaccaattcattagcttctaatgacgttttcgctgtacatggctggtatgccaaataccgtaaaattatgctagaaggtggtgttaagctatacgaagtaaaagtagaaccgggccataaaacaaaacataaatggctaagtcgctctcgtacaagtttgcacgcgaaaacctttattcttgataaatctaaaattttcgtcggctcatttaactttgatccacgctctgcatacttaaatacagagttaggtgtgattgttgattcaccagaattttcaggtgaagtttataacacgatcagtaactccctagctaaagatgcttaccgtctttcattagacgaaaacggcgacatcgtatggaatgatgatataacgggcaagcagtactcatcagagccagacagcagtatttggctgaagatgggcgcttgggcggcaggtatcttaccgattgaaaaacagttataa

SEQ ID NO: 124108 - protein, 509 aa, Photobacterium sp. SKA34
MIRIKDYKKLLSRIIIATSILILVGCAQPLSTVKQASYSNVDNFNTRLYQSSLPYTSLHPNKTGFYPLGDGQAALLARLAIIEHAQKTLDVQYYIYRDDATSGLLTWYLYQAAERGVRVRLLLDDMQNRDDQALASLSDHPNVEVRLFNPFSNRSIKPLSFLTDFDRLNRRMHNKAIIADGVFAITGGRNIGDEYFSANSDVEFGDFDLIMLGKVIPQFARQFDEYWNSKPATPIEALVSSAHEPTKEQLAQWKDAQLKYMSSDYASSLKSHPMVQQLINETLPLYWTDAELLYDTPYKIANNKDDLLLHKLSEMIAKAEHDFFLVSPYFVPTEEGAKLLAKAAQNGKNIAIVTNSLASNDVFAVHGWYAKYRKIMLEGGVKLYEVKVEPGHKTKHKWLSRSRTSLHAKTFILDKSKIFVGSFNFDPRSAYLNTELGVIVDSPEFSGEVYNTISNSLAKDAYRLSLDENGDIVWNDDITGKQYSSEPDSSIWLKMGAWAAGILPIEKQL

SEQ ID NO: 124109 - DNA, 1611 bp, marine gamma proteobacterium HTCC2080
  CDS (1)..(1611): transl_table=11
gtgtttttaactgcgcaactctggaccagcctaagccagcttgtgcaccgacagattacggtgtcttttgtgcaagtttgtagaagcgcggccgccgcaatgtatcggttttttgtaggagggttactggcttcgctattagtcggttgcgctacggcaccctcattacctgataaacccaaaagctattttgatgatttagagctcacagcatctcctttgataacgctggcgcaatcccgggcgggttcaggggtggcgttactagcagatccagaggaggccttgcaggcgagactgcacttggcagagctcgcccagacaacgctcgatttacaatattatctgtggcaaggcgacgatagcggtctgagtttaagtcatgaggttttaaccgccgctgatcgtggagtacgcgtccgtattttgcttgatgatatttatcactcaggaagggattcagcctatcagacgcttaattcacaccccaatgtgcaggttcgtttgtttaatcctatcggcaatcggggtgccgccaaaatgcctaactacgcctttcaaaaatcgacttttaactatcgtatgcacaataaaatctttcttgtcgatggtgtggctgcggtgttggggggccgtaatattggcgatgaatattttggtcgaaacaccagctttaattttcaagatattgatgccatcacagtgggtgcagtggtgaaccatgtgggggaggcttttgatcttttttggaactcagagtttgccattcccgtggaggttttgcgtcaaaagggtttgaaattaatcgacgcgacgcaacgaagcaggttgtcggcagccagagagcaagtacgttctggtgatggcgagcatgctgccggagcctctcatcttacttggctggatacgctttcaaatggcctactgtggacgaacgcgcgaatcattgttgatcgccctgaccgcggtggtgagtatcctgattcggcttttacagcgtttacggaagaccctgaattaacgccttccagcacagttcagattcaaacggcctacttgattcccaatggccctatgttggggaatctcacagctctcagcacgaaaggtgttgatgttcgcatactgacaaattcagccgcatctacgaaccatggggttgttcacgcctactactcgaagtaccgaaagcagctcttgtcagaaaacattgagctgtatgaagtacagggcacaggtgctcttgcaacttacctcgatcgagtgggtgaggatgcccatgcaggattgcacactaaggcgatggtggtggatgagcgcctcagcgttattggttcatacaatatggatccacgttcacgggtatggaattcagagattgcgttagtagtagacgacgccaattttgcagctgaggtgctgcaagaaatggaacgggatttttctccggaggcagcctggcgattgtctcttgatgagaaggaatcggtggtttggaccggagagtccgagggcgctgaaacgcagtttcatcgtgacccgggcagtacttggtgggaccgactagtttggggcatatttagaattttgccgctggaaaacgagctctaa

SEQ ID NO: 124110 - protein, 536 aa, marine gamma proteobacterium HTCC2080
MFLTAQLWTSLSQLVHRQITVSFVQVCRSAAAAMYRFFVGGLLASLLVGCATAPSLPDKPKSYFDDLELTASPLITLAQSRAGSGVALLADPEEALQARLHLAELAQTTLDLQYYLWQGDDSGLSLSHEVLTAADRGVRVRILLDDIYHSGRDSAYQTLNSHPNVQVRLFNPIGNRGAAKMPNYAFQKSTFNYRMHNKIFLVDGVAAVLGGRNIGDEYFGRNTSFNFQDIDAITVGAVVNHVGEAFDLFWNSEFAIPVEVLRQKGLKLIDATQRSRLSAAREQVRSGDGEHAAGASHLTWLDTLSNGLLWTNARIIVDRPDRGGEYPDSAFTAFTEDPELTPSSTVQIQTAYLIPNGPMLGNLTALSTKGVDVRILTNSAASTNHGVVHAYYSKYRKQLLSENIELYEVQGTGALATYLDRVGEDAHAGLHTKAMVVDERLSVIGSYNMDPRSRVWNSEIALVVDDANFAAEVLQEMERDFSPEAAWRLSLDEKESVVWTGESEGAETQFHRDPGSTWWDRLVWGIFRILPLENEL

SEQ ID NO: 124111 - DNA, 1554 bp, Pseudomonas putida GB-1
  CDS (1)..(1554): transl_table=11
ttgacactccagcgagccttgcctctgctgctggtgctgtcgctcggccttgccggctgcgccagcgtcagtgcgccccgcgaaaccagccaggcgctgcccgccaacgactcggcattcggccgttcggtgctacgccaggccgcgccatacggcggccgctcgggctttcgcctgctgcccaacagcaacgaggcattccgcgcccgtgccgagctgatccgcaacgcccaggcgagcatcgacctgcagtactacattgtccacgacggcctcagcacccgcgccctggtgcatgagctgctgcgcgccgccgaccgtggcgtgcgcgtgcgcatcctgctggacgacaccaccagcgatggcctggacaccatcatgggcaccctcgatgcccacccgaacatccagattcgtgtgttcaacccgctgcacctgggccgcagcaccggttttacgcgcgctgccggccggctgttcaacctgtcgcgccagcaccggcgcatgcacaacaagctgttcctggtggacaacagcatggccatcgtcggcgggcgcaacctgggcgacgagtatttcgatgccgagcccaacctcaacttcaccgacatcgacttgctaggtgtgggcccggtggccgagcagctggggcacagcttcgaccagtactggaacagcgcccttagccggccgatcaccgacttcctctggtatgacccggatgccaacgacctgcgtgccagccgccaccgcttggaagtgtcgctggccgaagccagaacccggcgcaaggccctgtacgatcgcttgatggcctaccagtcgcagccgcgcctggacgtctggcgcaatgagctcatctgggcccacgcccaggcgctatgggatgcgccaagcaaggtgctggccgacgacgaaccagacccgcaactgctgctgagccagcaactggcgccggacctggccagcgtgcaccgcgagctgatcctgatgtcagcctacttcgtaccgggcgaaccgggcctgctgtacctgaccggccgcgccgacgccggcgcctcggtgaagctgttgaccaattcgctggaggcaaccgatgtgccggcggtgcatggcggttatgcgccctatcgccgtgccttgctcgagcatggcgtgcaactgttcgaactgcgccgccagccgggcgaccccagcgcgagacggctgagcttgcgtggcagttcagattcaagcttgcacaccaaggcaatcgtgttcgaccggcgcaagacgttcatcggctcgttcaacttcgacccacgttcagtgctgtggaacactgaagttggggtactggtggacagcccggagctggctgaatacacccgcgagctggcccaacagggtatggcgcctgcgttgagctaccaggtgaagctggtaggcgacaagctggtgtgggcaaccgaggaccatggccagcggcatatgctgacctctgagccaggggggatctggcggcggttcaatgcctgggtcagcaaggcggttggcttggagaagatgctgtag

SEQ ID NO: 124112 - protein, 517 aa, Pseudomonas putida GB-1
MTLQRALPLLLVLSLGLAGCASVSAPRETSQALPANDSAFGRSVLRQAAPYGGRSGFRLLPNSNEAFRARAELIRNAQASIDLQYYIVHDGLSTRALVHELLRAADRGVRVRILLDDTTSDGLDTIMGTLDAHPNIQIRVFNPLHLGRSTGFTRAAGRLFNLSRQHRRMHNKLFLVDNSMAIVGGRNLGDEYFDAEPNLNFTDIDLLGVGPVAEQLGHSFDQYWNSALSRPITDFLWYDPDANDLRASRHRLEVSLAEARTRRKALYDRLMAYQSQPRLDVWRNELIWAHAQALWDAPSKVLADDEPDPQLLLSQQLAPDLASVHRELILMSAYFVPGEPGLLYLTGRADAGASVKLLTNSLEATDVPAVHGGYAPYRRALLEHGVQLFELRRQPGDPSARRLSLRGSSDSSLHTKAIVFDRRKTFIGSFNFDPRSVLWNTEVGVLVDSPELAEYTRELAQQGMAPALSYQVKLVGDKLVWATEDHGQRHMLTSEPGGIWRRFNAWVSKAVGLEKML

SEQ ID NO: 124113 - DNA, 1485 bp, Salmonella typhimurium
  CDS (1)..(1485): transl_table=11
atgaagaaactgcccggctttacgcaagattacttactcagcaaggcgacgaccctgcctgataaaacacgcctggagcgtgccgttgaaccgctatgcgcgcgccatcccggagagtgcggcattctcgcgctggataacagtctggacgcttttgccgcccgctaccgcctgaccgaaatggcggcgcggacgctggatgtgcagtattatatttgggaagacgatatgtccgggcggctgctcttttcggtactgctgtcggcggcgaagcgcggcgttcatgttcgtctgctgctggatgataacaatacgcctggtctggatgatacgttgcgcttgctggatagccatcctaatatcgaagttcgtctgtttaatcctttctcttttcgtacgctacgcgcgctgggatatttgacggattttgcgcggctgaatcggcggatgcacaataaaagttacactgccgacggcgtagtgacgctggtcggtgggcgcaacatcggcgatgcctatttcggcgctggcgaggagccgctattttccgatctggacgtgatggccattggcccggtggtcaatgatgtcgccaatgattttgaacgttactggcgctgtagttcagtgtcgacattgcagcaagtattatccctttctgagcaggaactgacgcagcgtatcgaacttcccgaatcctggtataacgatgagatcacccgccgttatctgcataagctggaaaccagccagtttatggcggatctcgatcgcggaacgttgccgctgatttgggcaaaaacacgcttgcttagcgatgacccttctaaaggcgaggggaaggcgcagcgccattcgcttcttccgcagcgattatttgacgtgatggggtcgccgacggagcgtatcgacattatttccgcttactttgtccctacgcgcgcaggcgtggcgcagttgcttaatctggtcaggaaaggcgtgaagatcgccatcttaactaactctctggcggccaacgatgtggcggtcgttcacgcagggtacgcgcgctggcgcaagaaattactgcgctatggcgtggagctctacgaactgaaaccgacccgcgaacatgaaaccgccgtacatgatcgcggactcaccgggaactcaggttccagcttacatgctaaaacgttcagtattgatggtagtaaggtgtttatcgggtcgcttaattttgatccccgttcaacgcttttaaataccgaaatgggctttgtcattgaaagtgaaacgctggcgacgcttatccataagcgttttacacagagccaacgcgatgcggcctggcaactgcggctggatcgctggggacgaattaactggatcgatcgtcagcaagaagaggaaaaggtgttaaagaaagaacccgctacgcgtttctggcaacgagttctggtacggttggcggcaattttacctgtggaatggttgctgtga

SEQ ID NO: 124114 - protein, 494 aa, Salmonella typhimurium
MKKLPGFTQDYLLSKATTLPDKTRLERAVEPLCARHPGECGILALDNSLDAFAARYRLTEMAARTLDVQYYIWEDDMSGRLLFSVLLSAAKRGVHVRLLLDDNNTPGLDDTLRLLDSHPNIEVRLFNPFSFRTLRALGYLTDFARLNRRMHNKSYTADGVVTLVGGRNIGDAYFGAGEEPLFSDLDVMAIGPVVNDVANDFERYWRCSSVSTLQQVLSLSEQELTQRIELPESWYNDEITRRYLHKLETSQFMADLDRGTLPLIWAKTRLLSDDPSKGEGKAQRHSLLPQRLFDVMGSPTERIDIISAYFVPTRAGVAQLLNLVRKGVKIAILTNSLAANDVAVVHAGYARWRKKLLRYGVELYELKPTREHETAVHDRGLTGNSGSSLHAKTFSIDGSKVFIGSLNFDPRSTLLNTEMGFVIESETLATLIHKRFTQSQRDAAWQLRLDRWGRINWIDRQQEEEKVLKKEPATRFWQRVLVRLAAILPVEWLL

SEQ ID NO: 124115 - DNA, 1509 bp, Helicobacter pylori J99
  CDS (1)..(1509): transl_table=11
ttgaaaatctttttagttattctaagcgtctttttttttaatgggtgttttgggctagcctataagactcccatttcaaacccccctatctcttatgacccctacactaccaccattgggagcttgtatgctaaaaatttaaaagaaaaccctaaacatagtgcggccattcttttagaagacggctttgatgccttgttgcacagagtgggtcttattagaatgagccaaaaaagcattgacatgcaaacttatatctataaaaacgacctttcttctcaagtgatcgctaaagaacttttaaacgcggccaatcgtggggtaaaagtgcgcatccttttagatgacaacgggttagattcagatttttcagacatcatgcttttaaatttccacaaaaacattgaagtgaaaatctttaacccctactatatccgcaataaaggcttgcgttattttgaaatgcttgcggattatgaacgcattaaaaaacgcatgcacaacaagcttttcatcgtggataatttcgctgtcattataggggggcgcaacattggggacaattattttgataacgatttagacacgaattttttagatttagacgctttgttttttgggggggttgcttcaaaggccaaagaaagctttgaaaattattggcgattccaccgctctatccctgtttcattattaagaacccataaaagactcaaaaacaacgttaaagaaatcgctaagctccatgaaaaaatccctatcagcgctgaagacgcaaacgaatttgaaaaaaaagtcaatgattttatagaacgcttccaaaaataccaataccccatttattatgggaatgccatttttctagccgatttgcccgccaaaattgacacgcccttgtattcgcccatcaaaatcgcttttgaaaaagcccttaaaaacgctaaagactccgtttttatcgcttcatcgtattttattccaggtaaaaagataatgaaaatctttaaaaatcaaatttctaaggggattgaattgaatattcttaccaattccctttcatctacggacgctatcgtggtctatggggcgtgggaaaggtatcgcaataaattagtgcgaatgggcgcgaatgtctatgaaatacgaaacgattttttcaaccgccagattaaagggcgctttagcaccaaacattccttacacggcaagacaattgtttttgacgatgccctaacgcttctagggagttttaatattgatccgcgctctgcatatattaacactgaaagtgcggtcttgtttgacaacccgtcttttgccaaaagggtgcgtttgtcgcttaaagatcatgcccaacaatcatggcatttagtcttgtatcggcatagagtgatttgggaagctacagaagaaggcatcttaatccatgaaaaaaactcgcctgatacctctttctttttgcgtttgattaaagaatggtctaaagtccttcctgaaagagaactttaa

SEQ ID NO: 124116 - protein, 502 aa, Helicobacter pylori J99
MKIFLVILSVFFFNGCFGLAYKTPISNPPISYDPYTTTIGSLYAKNLKENPKHSAAILLEDGFDALLHRVGLIRMSQKSIDMQTYIYKNDLSSQVIAKELLNAANRGVKVRILLDDNGLDSDFSDIMLLNFHKNIEVKIFNPYYIRNKGLRYFEMLADYERIKKRMHNKLFIVDNFAVIIGGRNIGDNYFDNDLDTNFLDLDALFFGGVASKAKESFENYWRFHRSIPVSLLRTHKRLKNNVKEIAKLHEKIPISAEDANEFEKKVNDFIERFQKYQYPIYYGNAIFLADLPAKIDTPLYSPIKIAFEKALKNAKDSVFIASSYFIPGKKIMKIFKNQISKGIELNILTNSLSSTDAIVVYGAWERYRNKLVRMGANVYEIRNDFFNRQIKGRFSTKHSLHGKTIVFDDALTLLGSFNIDPRSAYINTESAVLFDNPSFAKRVRLSLKDHAQQSWHLVLYRHRVIWEATEEGILIHEKNSPDTSFFLRLIKEWSKVLPEREL

SEQ ID NO: 124117 - DNA, 23 bp, Artificial sequence
  primer
atgatgaagaaaacgcccacctc

SEQ ID NO: 124118 - DNA, 24 bp, Artificial sequence
  primer
ttacaataaccattccacgggcaa

SEQ ID NO: 124119 - protein, 479 aa, Artificial sequence
  consensus sequence
  Variant (2)..(6): Xaa in position 2 to 6 is any amino acid
  Variant (8)..(10): Xaa in position 8 to 10 is any amino acid
  Variant (12)..(13): Xaa in position 12 to 13 is any amino acid
  Variant (15)..(17): Xaa in position 15 to 17 is any amino acid
  Variant (19)..(22): Xaa in position 19 to 22 is any amino acid
  Variant (24)..(24): Xaa in position 24 is any amino acid
  Variant (29)..(31): Xaa in position 29 to 31 is any amino acid
  Variant (33)..(34): Xaa in position 33 to 34 is any amino acid
  Variant (36)..(37): Xaa in position 36 to 37 is any amino acid
  Variant (39)..(44): Xaa in position 39 to 44 is any amino acid
  Variant (47)..(47): Xaa in position 47 is any amino acid
  Variant (51)..(51): Xaa in position 51 is any amino acid
  Variant (54)..(54): Xaa in position 54 is any amino acid
  Variant (59)..(63): Xaa in position 59 to 63 is any amino acid
  Variant (64)..(66): Xaa in position 64 to 66 is any or no amino acid
  Variant (68)..(72): Xaa in position 68 to 72 is any amino acid
  Variant (74)..(75): Xaa in position 74 to 75 is any amino acid
  Variant (78)..(81): Xaa in position 78 to 81 is any amino acid
  Variant (83)..(83): Xaa in position 83 is any amino acid
  Variant (87)..(89): Xaa in position 87 to 89 is any amino acid
  Variant (91)..(105): Xaa in position 91 to 105 is any amino acid
  Variant (106)..(109): Xaa in position 106 to 109 is any or no amino acid
  Variant (116)..(119): Xaa in position 116 to 119 is any amino acid
  Variant (121)..(126): Xaa in position 121 to 126 is any amino acid
  Variant (131)..(131): Xaa in position 131 is any amino acid
  Variant (134)..(134): Xaa in position 134 is any amino acid
  Variant (137)..(142): Xaa in position 137 to 142 is any amino acid
  Variant (143)..(143): Xaa in position 143 is any or no amino acid
  Variant (145)..(145): Xaa in position 145 is any amino acid
  Variant (147)..(147): Xaa in position 147 is any amino acid
  Variant (149)..(152): Xaa in position 149 to 152 is any amino acid
  Variant (154)..(154): Xaa in position 154 is any amino acid
  Variant (157)..(162): Xaa in position 157 to 162 is any amino acid
  Variant (164)..(165): Xaa in position 164 to 165 is any amino acid
  Variant (168)..(229): Xaa in position 168 to 229 is any amino acid
  Variant (230)..(240): Xaa in position 230 to 240 is any or no amino acid
  Variant (242)..(242): Xaa in position 242 is any amino acid
  Variant (244)..(244): Xaa in position 244 is any amino acid
  Variant (246)..(256): Xaa in position 246 to 256 is any amino acid
  Variant (257)..(261): Xaa in position 257 to 261 is any or no amino acid
  Variant (263)..(276): Xaa in position 263 to 276 is any amino acid
  Variant (278)..(278): Xaa in position 278 is any amino acid
  Variant (283)..(285): Xaa in position 283 to 285 is any amino acid
  Variant (287)..(296): Xaa in position 287 to 296 is any amino acid
  Variant (298)..(302): Xaa in position 298 to 302 is any amino acid
  Variant (308)..(310): Xaa in position 308 to 310 is any amino acid
  Variant (313)..(314): Xaa in position 313 to 314 is any amino acid
  Variant (317)..(317): Xaa in position 317 is any amino acid
  Variant (320)..(322): Xaa in position 320 to 322 is any amino acid
  Variant (324)..(325): Xaa in position 324 to 325 is any amino acid
  Variant (328)..(329): Xaa in position 328 to 329 is any amino acid
  Variant (331)..(332): Xaa in position 331 to 332 is any amino acid
  Variant (336)..(349): Xaa in position 336 to 349 is any amino acid
  Variant (350)..(363): Xaa in position 350 to 363 is any or no amino acid
  Variant (365)..(366): Xaa in position 365 to 366 is any amino acid
  Variant (370)..(370): Xaa in position 370 is any amino acid
  Variant (372)..(375): Xaa in position 372 to 375 is any amino acid
  Variant (377)..(380): Xaa in position 377 to 380 is any amino acid
  Variant (385)..(385): Xaa in position 385 is any amino acid
  Variant (387)..(387): Xaa in position 387 is any amino acid
  Variant (392)..(394): Xaa in position 392 to 394 is any amino acid
  Variant (398)..(398): Xaa in position 398 is any amino acid
  Variant (400)..(426): Xaa in position 400 to 426 is any amino acid
  Variant (427)..(431): Xaa in position 427 to 431 is any or no amino acid
  Variant (433)..(437): Xaa in position 433 to 437 is any amino acid
  Variant (438)..(440): Xaa in position 438 to 440 is any or no amino acid
  Variant (442)..(451): Xaa in position 442 to 451 is any amino acid
  Variant (452)..(455): Xaa in position 452 to 455 is any or no amino acid
  Variant (458)..(462): Xaa in position 458 to 462 is any amino acid
  Variant (463)..(463): Xaa in position 463 is any or no amino acid
  Variant (465)..(472): Xaa in position 465 to 472 is any amino acid
  Variant (475)..(475): Xaa in position 475 is any amino acid
  Variant (477)..(478): Xaa in position 477 to 478 is any amino acid
LXXXXXAXXXRXXLXXXAXXXXDXQYYIXXXDXXGXXLXXXXXXAAXRGVXVRXLLDDXXXXXXXXDXXXXXLXXHPXXXXRXFNPXXXRXXXXXXXXXXXXXXXXXXXRRMHNKXXXXDXXXXXXGGRNXGDXYFXXXXXXXFXDXDXXXXGXVVXXXXXXFXXYWXXXXXXXXXXXXXXXXXXXXXXXXXXXXXXXXXXXXXXXXXXXXXXXXXXXXXXXXXXXXXXXXXXXXXXXXXDXPXKXXXXXXXXXXXXXXXXLXXXXXXXXXXXXXXSXYFVPXXXGXXXXXXXXXXGXXXXXLTNSLXXXDVXXVHXGYXXXRXXLLXXGXXLYEXXXXXXXXXXXXXXXXXXXXXXXXXXXXSXXSLHXKXXXXDXXXXFIGSXNXDPRSXXXNTEXGXXXXXXXXXXXXXXXXXXXXXXXXXXXXXXXXLXXXXXXXXWXXXXXXXXXXXXXXEPXXXXXXRXXXXXXXXLPXEXXL

SEQ ID NO: 124120 - protein, 30 aa, Artificial sequence
  protein pattern
  Variant (2)..(2): Xaa in position 2 is any or no amino acid
  Variant (7)..(9): Xaa in position 7 to 9 is any amino acid
  Variant (10)..(10): Xaa in position 10 is Ala or Val
  Variant (12)..(12): Xaa in position 12 is Gly or Asn
  Variant (13)..(14): Xaa in position 13 to 14 is any amino acid
  Variant (15)..(15): Xaa in position 15 is Ala, Ser, Thr or Val
  Variant (16)..(16): Xaa in position 16 is Ile, Leu or Val
  Variant (17)..(17): Xaa in position 17 is any amino acid
  Variant (22)..(22): Xaa in position 22 is Ile, Leu or Val
  Variant (25)..(25): Xaa in position 25 is Ala, Glu or Asn
  Variant (28)..(29): Xaa in position 28 to 29 is any amino acid
  Variant (30)..(30): Xaa in position 30 is Ala, Asp, Glu, Gly, Asn, Gln, Ser or Thr
RXMHNKXXXXDXXXXXXGGRNXGDXYFXXX

SEQ ID NO: 124121 - protein, 40 aa, Artificial sequence
  protein pattern
  Variant (2)..(3): Xaa in position 2 to 3 is any amino acid
  Variant (7)..(7): Xaa in position 7 is Ala, Ser or Thr
  Variant (9)..(11): Xaa in position 9 to 11 is any amino acid
  Variant (12)..(12): Xaa in position 12 is Phe, Ile, Leu or Val
  Variant (14)..(17): Xaa in position 14 to 17 is any amino acid
  Variant (19)..(19): Xaa in position 19 is Ile or Val
  Variant (22)..(22): Xaa in position 22 is any amino acid
  Variant (24)..(24): Xaa in position 24 is any amino acid
  Variant (29)..(31): Xaa in position 29 to 31 is any amino acid
  Variant (33)..(33): Xaa in position 33 is Cys or Thr
  Variant (35)..(35): Xaa in position 35 is Ile, Leu, Met or Val
  Variant (36)..(36): Xaa in position 36 is Ala or Gly
  Variant (37)..(37): Xaa in position 37 is Phe, Ile, Leu or Val
  Variant (38)..(39): Xaa in position 38 to 39 is any amino acid
  Variant (40)..(40): Xaa in position 40 is Asp, Glu, Asn or Thr
SXXSLHXKXXXXDXXXXFXGSXNXDPRSXXXNXEXXXXXX

SEQ ID NO: 124122 - protein, 34 aa, Artificial sequence
  protein pattern
  Variant (3)..(3): Xaa in position 3 is Ala or Ser
  Variant (4)..(4): Xaa in position 4 is any amino acid
  Variant (5)..(5): Xaa in position 5 is Ala, Asp, Glu, Gly, Asn or Gln
  Variant (6)..(6): Xaa in position 6 is Ala, Ser or Thr
  Variant (7)..(7): Xaa in position 7 is Asn or Thr
  Variant (10)..(11): Xaa in position 10 to 11 is any amino acid
  Variant (14)..(14): Xaa in position 14 is any or no amino acid
  Variant (16)..(16): Xaa in position 16 is any or no amino acid
  Variant (18)..(20): Xaa in position 18 to 20 is any amino acid
  Variant (22)..(23): Xaa in position 22 to 23 is any amino acid
  Variant (26)..(27): Xaa in position 26 to 27 is any amino acid
  Variant (28)..(28): Xaa in position 28 is Asp, Gly or Gln
  Variant (29)..(29): Xaa in position 29 is Ile or Val
  Variant (30)..(30): Xaa in position 30 is any amino acid
  Variant (31)..(31): Xaa in position 31 is Ile or Leu
  Variant (32)..(32): Xaa in position 32 is Phe, His, Trp or Tyr
  Variant (34)..(34): Xaa in position 34 is Leu, Met or Val
TNXXXXXDVXXVHXGXYXXXRXXLLXXXXXXXEX

SEQ ID NO: 124123 - protein, 53 aa, Artificial sequence
  protein pattern
  Variant (2)..(2): Xaa in position 2 is Phe or Leu
  Variant (3)..(4): Xaa in position 3 to 4 is any amino acid
  Variant (6)..(7): Xaa in position 6 to 7 is any or no amino acid
  Variant (9)..(11): Xaa in position 9 to 11 is any amino acid
  Variant (12)..(12): Xaa in position 12 is any or no amino acid
  Variant (14)..(15): Xaa in position 14 to 15 is any amino acid
  Variant (16)..(16): Xaa in position 16 is Asn, Ser or Thr
  Variant (17)..(17): Xaa in position 17 is Ile or Leu
  Variant (19)..(19): Xaa in position 19 is Ala, Ile, Leu or Val
  Variant (23)..(25): Xaa in position 23 to 25 is any amino acid
  Variant (26)..(26): Xaa in position 26 is Ala, Asp, Gly, Asn, Ser or Thr
  Variant (27)..(27): Xaa in position 27 is Asp or Gly
  Variant (28)..(29): Xaa in position 28 to 29 is any amino acid
  Variant (30)..(30): Xaa in position 30 is Gly, Ser or Thr
  Variant (31)..(36): Xaa in position 31 to 36 is any amino acid
  Variant (37)..(37): Xaa in position 37 is Ile, Leu, Met or Val
  Variant (38)..(39): Xaa in position 38 to 39 is any amino acid
  Variant (42)..(42): Xaa in position 42 is any amino acid
  Variant (46)..(46): Xaa in position 46 is any amino acid
  Variant (47)..(47): Xaa in position 47 is Ile or Val
  Variant (49)..(49): Xaa in position 49 is Ile, Leu or Val
  Variant (51)..(51): Xaa in position 51 is Ile or Leu
AXXXRXXLXXXXAXXXXDXQYYXXXXXXXXXXXXXXXXXAAXRGVXXRXLXDD

SEQ ID NO: 124124 - protein, 27 aa, Artificial sequence
  protein pattern
  Variant (2)..(2): Xaa in position 2 is any amino acid
  Variant (4)..(7): Xaa in position 4 to 7 is any amino acid
  Variant (9)..(9): Xaa in position 9 is any amino acid
  Variant (11)..(11): Xaa in position 11 is Ala, Ile or Val
  Variant (12)..(17): Xaa in position 12 to 17 is any amino acid
  Variant (19)..(20): Xaa in position 19 to 20 is any amino acid
  Variant (21)..(21): Xaa in position 21 is Phe or Tyr
  Variant (23)..(26): Xaa in position 23 to 26 is any amino acid
  Variant (27)..(27): Xaa in position 27 is Ala, Ser, Thr or Val
DXDXXXXGXVXXXXXXXFXXXWXXXXX

SEQ ID NO: 124125 - protein, 16 aa, Artificial sequence
  protein pattern
  Variant (3)..(3): Xaa in position 3 is any amino acid
  Variant (4)..(4): Xaa in position 4 is Ala, Ile or Val
  Variant (5)..(5): Xaa in position 5 is Asp, Glu, Gln or Ser
  Variant (6)..(6): Xaa in position 6 is Ile, Leu or Val
  Variant (8)..(8): Xaa in position 8 is Ile, Leu, Met or Val
  Variant (12)..(14): Xaa in position 12 to 14 is any amino acid
  Variant (15)..(15): Xaa in position 15 is any or no amino acid
HPXXXXRXFNPXXXXR

SEQ ID NO: 124126 - protein, 14 aa, Artificial sequence
  protein pattern
  Variant (2)..(2): Xaa in position 2 is any or no amino acid
  Variant (5)..(5): Xaa in position 5 is Ile or Val
  Variant (7)..(7): Xaa in position 7 is Glu, Gly or Thr
  Variant (8)..(9): Xaa in position 8 to 9 is any amino acid
  Variant (11)..(13): Xaa in position 11 to 13 is any amino acid
  Variant (14)..(14): Xaa in position 14 is Phe, Ile, Leu or Met
SXYFXPXXXGXXXX

SEQ ID NO: 124127 - DNA, 930 bp, Escherichia coli
  CDS (1)..(930): transl_table=11
atgacgcaatttgcatttgtgttccctggacagggttctcaaaccgttggaatgctggctgatatggcggcgagctatccaattgtcgaagaaacgtttgctgaagcttctgcggcgctgggctacgacctgtgggcgctgacccagcaggggccagctgaagaactgaataaaacctggcaaactcagcctgcgctgttgactgcatctgttgcgctgtatcgcgtatggcagcagcagggcggtaaagcaccggcaatgatggccggtcacagcctgggggaatactccgcgctggtttgcgctggtgtgattgatttcgctgatgcggtgcgtctggttgagatgcgcggcaagttcatgcaagaagccgtaccggaaggcacgggcgctatggcggcaatcatcggtctggatgatgcgtctattgcgaaagcgtgtgaagaagctgcagaaggtcaggtcgtttctccggtaaactttaactctccgggacaggtggttattgccggtcataaagaagcggttgagcgtgctggcgctgcctgtaaagcggcgggcgcaaaacgcgcgctgccgttaccagtgagcgtaccgtctcactgtgcgctgatgaaaccagcagccgacaaactggcagtagaattagcgaaaatcacctttaacgcaccaacagttcctgttgtgaataacgttgatgtgaaatgcgaaaccaatggtgatgccatccgtgacgcactggtacgtcagttgtataacccggttcagtggacgaagtctgttgagtacatggcagcgcaaggcgtagaacatctctatgaagtcggcccgggcaaagtgcttactggcctgacgaaacgcattgtcgacaccctgaccgcctcggcgctgaacgaaccttcagcgatggcagcggcgctcgagctttaa

SEQ ID NO: 124128 - protein, 309 aa, Escherichia coli [sequence omitted]

SEQ ID NO: 124129 - DNA, 1436 bp, Arabidopsis thaliana; identical to SEQ ID NO: 59335
  CDS (52)..(1233)

SEQ ID NO: 124130 - protein, 393 aa, Arabidopsis thaliana
MRSLLHCTILLTSPSHSLIRRTSLSAMATTASSSLLLPSISLNNLSSSKNASFGFAAKNLSRSRISMSVSAGSQSTTVHDSLFADYKPTSAFLFPGQGAQAVGMGKEAQSVGAAGELYKKANDILGYDLLDICVNGPKEKLDSTVISQPAIYVTSLAAVELLRVREGGEQIINSVDVTCGLSLGEYTALAFAGAFSFEDGLKLVKLRGEAMQAAADAAKSAMVSIIGLDSEKVQQLCDAANQEVDEADKVQIANYLCPGNYAVSGGLKGIEVVEAKAKSFKARMTVRLAVAGAFHTSFMEPAVSRLEAALAATEIRSPRIPVISNVDAQPHADPDTIKKILARQVTSPVQWETTVKTLLSKGLQSSYELGPGKVIAGIFKRVDKSASFENISA

SEQ ID NO: 124131 - DNA, 1436 bp, Arabidopsis thaliana; identical to SEQ ID NO: 59335
  CDS (250)..(1233)

SEQ ID NO: 124132 - protein, 327 aa, Arabidopsis thaliana
MSVSAGSQSTTVHDSLFADYKPTSAFLFPGQGAQAVGMGKEAQSVGAAGELYKKANDILGYDLLDICVNGPKEKLDSTVISQPAIYVTSLAAVELLRVREGGEQIINSVDVTCGLSLGEYTALAFAGAFSFEDGLKLVKLRGEAMQAAADAAKSAMVSIIGLDSEKVQQLCDAANQEVDEADKVQIANYLCPGNYAVSGGLKGIEVVEAKAKSFKARMTVRLAVAGAFHTSFMEPAVSRLEAALAATEIRSPRIPVISNVDAQPHADPDTIKKILARQVTSPVQWETTVKTLLSKGLQSSYELGPGKVIAGIFKRVDKSASFENISA

SEQ ID NO: 124133 - DNA, 1357 bp, Arabidopsis thaliana; identical to SEQ ID NO: 59167
  CDS (79)..(1182)

SEQ ID NO: 124134 - protein, 367 aa, Arabidopsis thaliana; identical to SEQ ID NO: 59168

SEQ ID NO: 124135 - DNA, 1357 bp, Arabidopsis thaliana; identical to SEQ ID NO: 59167
  CDS (199)..(1182)

SEQ ID NO: 124136 - protein, 327 aa, Arabidopsis thaliana; identical to SEQ ID NO: 59170

SEQ ID NO: 124137 - DNA, 921 bp, Streptococcus pneumoniae
  CDS (1)..(921): transl_table=11
atgactaaaacagcctttttatttgctggtcaaggtgcccagtatctagggatgggacgggatttctatgatcagtatccgattgtcaaagaaacgattgatcgagcgagtcaggtgctcggttatgatttacgttatctcatcgatacggaagaagacaaactcaatcagacccgctatacgcaaccagccattctagcgacttcggttgctatctaccgtttattgcaagaaaagggctatcagcctgatatggttgctggtttgtctcttggagaatactctgccttggtggcaagcggcgccttggattttgaagatgcggttgccttggtagctaagcgtggagcctatatggaagaagcggctcctgctgactctggcaagatggtagcagttctcaatacgccagtagaggtcattgaagaagcctgtcaaaaagcttctgaacttggagtggttactccagccaactataacacacctgcacaaatcgtcattgctggagaagtggttgcagttgatcgagcggttgaacttttgcaagaagcaggtgccaaacgcttgattcctcttaaggtgtcaggtccctttcacaccgctctccttgagcctgctagccagaaactagctgaaactctagctcaggtaagtttttcagattttacttgtcccctagtcggcaatacagaagctgctgtgatgcaaaaagaggacattgctcagctcttgacgcgtcaggtcaaggaacccgttcgtttctatgaaagtattggggtcatgcaagaagcaggcataagcaactttatcgagattggaccggggaaagtcttgtcaggttttgttaaaaaaattgatcaaactgctcacttagctcatgtggaagatcaagcgagtttagtagcacttttagaaaaatag

SEQ ID NO: 124138 - protein, 306 aa, Streptococcus pneumoniae
MTKTAFLFAGQGAQYLGMGRDFYDQYPIVKETIDRASQVLGYDLRYLIDTEEDKLNQTRYTQPAILATSVAIYRLLQEKGYQPDMVAGLSLGEYSALVASGALDFEDAVALVAKRGAYMEEAAPADSGKMVAVLNTPVEVIEEACQKASELGVVTPANYNTPAQIVIAGEVVAVDRAVELLQEAGAKRLIPLKVSGPFHTALLEPASQKLAETLAQVSFSDFTCPLVGNTEAAVMQKEDIAQLLTRQVKEPVRFYESIGVMQEAGISNFIEIGPGKVLSGFVKKIDQTAHLAHVEDQASLVALLEK

SEQ ID NO: 124139 - DNA, 921 bp, Streptococcus pneumoniae
  CDS (1)..(921): transl_table=11
atgactaaaacagcctttttatttgctggtcaaggtgcccagtatctagggatgggacgggatttctatgatcagtatccgattgttaaagaaacgattgatcgagcgagtcaggtgctaggttatgatttgcgttatctcatcgatacggaagaagacaaactcaatcagacccgctatacgcaaccagccattctagcgacttcggttgctatctaccgtttattgcaagaaaagggctatcagcctgatatggttgctggtttgtctcttggagaatactctgccttggtggcaagcggcgccttggattttgaagatgcggttgccttggtagctaagcgtggagcctatatggaagaagcggctcctgctgactctggcaagatggtagcagttctcaatacgccagtagaggtcattgaagaagcctgtcaaaaagcttctgaacttggagtggttactccagccaactataacacacctgcacaaatcgtcattgctggagaagtggttgcagttgatcgagcggttgaacttttgcaagaagcaggtgccaaacgcttgattcctcttaaggtgtcaggtccctttcacacctctctccttgaacctgctagccagaaactagctgaaactctggctcaggtaagtttttcagattttacttgtcccctagtcggcaatacagaagctgctgtgatgcaaaaagaggacattgctcagctcttgacgcgtcaggtcaaggaacccgttcgtttctatgaaagtattggggtcatgcaagaagcaggcataagcaactttatcgagattggaccggggaaagtcttgtcaggttttgttaaaaaaattgatcaaactgctcacttagctcatgtggaagatcaagcgagtttagtagcacttttagaaaaatag

SEQ ID NO: 124140 - protein, 306 aa, Streptococcus pneumoniae
MTKTAFLFAGQGAQYLGMGRDFYDQYPIVKETIDRASQVLGYDLRYLIDTEEDKLNQTRYTQPAILATSVAIYRLLQEKGYQPDMVAGLSLGEYSALVASGALDFEDAVALVAKRGAYMEEAAPADSGKMVAVLNTPVEVIEEACQKASELGVVTPANYNTPAQIVIAGEVVAVDRAVELLQEAGAKRLIPLKVSGPFHTSLLEPASQKLAETLAQVSFSDFTCPLVGNTEAAVMQKEDIAQLLTRQVKEPVRFYESIGVMQEAGISNFIEIGPGKVLSGFVKKIDQTAHLAHVEDQASLVALLEK

SEQ ID NO: 124141 - DNA, 927 bp, Lactococcus lactis; IL1403
  CDS (1)..(927)
atgactaaaacagcatttttattctcaggtcaaggggcacaaaagcttggaatggcacgtgacttatatgaccaatatgaaacagttaaagcaacttttgatgaagcaagtcaagctttaggatatgatttgcgagctttgattgataatgatgaagaaaaactaaatgaaacaaagtacactcaacctgcaattttaacaacctctgttgctattttacgtttgttaagtgagaatgggattaaacctgaccttgttgctggtcttagtcttggtgaatattctgccttggtagcatcaggaatcattgattttcaagaagcagttaagcttgtagctaaacgtggtcaatatatgacagaagctgcaccgactggttctggtaaaatggtcgctgtaatgaacacagacccagccttgattgaagaaatttgccagaaagcggccgaatttaaaggcggtattgtgagtccagcaaattataacacgcccgcacaaattgttattggtggtgaagttgaggcggttgattatgctgttgagttgctaaaagaagccggagttcgtaaacttattgaattaaaagtttcaggacctttccatacagcaattttaaaaccagcatctgaaaaattggctttggagcttgataaaattgattttagaccttttgaattaccattaatctcaaatacgagtgctaaagtaatggaaaatgatgaagtcaaaggacttttgacgcgtcaagtcatggaaccagttcgtttttatgaatcggttgaaacaatgcaaaaactaggggcgactcgctttattgaagttggtcctgggagagtactttcaggtttcattaaaaaaattgataaaaatgcagaaattgctaatgttgaaaatttagcttcatttgaagctttgattaatcagtaa

SEQ ID NO: 124142 - protein, 308 aa, Lactococcus lactis; IL1403
MTKTAFLFSGQGAQKLGMARDLYDQYETVKATFDEASQALGYDLRALIDNDEEKLNETKYTQPAILTTSVAILRLLSENGIKPDLVAGLSLGEYSALVASGIIDFQEAVKLVAKRGQYMTEAAPTGSGKMVAVMNTDPALIEEICQKAAEFKGGIVSPANYNTPAQIVIGGEVEAVDYAVELLKEAGVRKLIELKVSGPFHTAILKPASEKLALELDKIDFRPFELPLISNTSAKVMENDEVKGLLTRQVMEPVRFYESVETMQKLGATRFIEVGPGRVLSGFIKKIDKNAEIANVENLASFEALINQ

SEQ ID NO: 124143 - DNA, 942 bp, Myxococcus xanthus
  CDS (1)..(942): transl_table=11
atgtcgaaggtcgcgttcgtgttccccgggcaaggcagccaggccgtggggatgggcaaggacctgtatgagaagttccccgaggcccgggccgtgttcgacgcggttgatgccgccctgggggagaagctctccaccctctgtttcgagggcccggacgaggcgctgaagctcacggccaacacccagccggccatcctcacggtgtcgctggcggcgcacgcggtgttcgcgaagcggggaccggcgccgtccttcgtggcggggcactcgctgggcgagtactcggcgctggtggcggcgggcgccatggacctgggcgacgcggtccgggtggtgcgcgcgcgcggcaccttcatgcaggaggcggtgcccgcgggcgtgggcgccatggccgcggtgctgggcctggttccggagaaggtgaaggcaccctgtgacgcggcggccgaggggcaggtggtgtcgccggcgaactacaactcgcccgagcagacggtcatcgccggtgacgcggcggccgtggagcgcgccggggtgaagtgcaaggaggccggcgccaagcgcgtgatgcccctgccggtatccgcccccttccactgcgcgctgatggcgccggtgcagccccggctggcggaggtgctgggcggcatccaggtgtccgcgccgtccgtgccggtggtgaccaacgtggaggcccgtcccaacgcggacgcgtcgcgggtggtgccgctgctcctggagcaggtgagctcgccggtgcgctggattgagtgcgtggaggcgctgaaggccgaaggcgtcacccgcatcatcgagctggggccgggcaaggtgctggtgggcctggtcaagcgcatcaccaaggacatcgagctgttcaacgtcgaggactccgcgagcctggacaaggcgctcgcggcactgggggtggcagcatga

SEQ ID NO: 124144 - protein, 313 aa, Myxococcus xanthus
MSKVAFVFPGQGSQAVGMGKDLYEKFPEARAVFDAVDAALGEKLSTLCFEGPDEALKLTANTQPAILTVSLAAHAVFAKRGPAPSFVAGHSLGEYSALVAAGAMDLGDAVRVVRARGTFMQEAVPAGVGAMAAVLGLVPEKVKAPCDAAAEGQVVSPANYNSPEQTVIAGDAAAVERAGVKCKEAGAKRVMPLPVSAPFHCALMAPVQPRLAEVLGGIQVSAPSVPVVTNVEARPNADASRVVPLLLEQVSSPVRWIECVEALKAEGVTRIIELGPGKVLVGLVKRITKDIELFNVEDSASLDKALAALGVAA

SEQ ID NO: 124145 - DNA, 939 bp, Pseudomonas aeruginosa
  CDS (1)..(939): transl_table=11
atgtctgcatccctcgcattcgtcttccctggccagggttcgcaatccctcggcatgctggccgagctgggcgcccagcaggcgctggtgccggataccttcgccgaggcctccgaggcgctcggttacgacctttgggcgctggtccagaatggtcctgaagagcgcctgaaccagaccgacaagacccagccggccatcctcacggtttcgatcgcgctctggcgcctctggctggccgagggcggtgcgcgcccagcgttcgtcgccgggcacagcctgggcgaatattccgcgctggtcgcggccgaaagcctggcgttcgccgatgcggtcaagctggtcgagcgtaggggccaactgattcagcaggcggttccggcggggcagggcggcatggccgcgatccttggcctggaagacgccgatgtattggcggcctgtgccgaggcggcccagggcgaggtggtcagcgcggtcaacttcaacgcgccggggcaggtagtgatcgccggtgccgcggctgccgttgagcgtgccatcgaggcatgcaaggcacgcggcgccaagcgcgcggtggcgctgccagtcagtgtgccgtcgcattgcgaactgatgcgtccggccgccgagcagttcgccgcctcggtcgaaagcctgcagtggcaggcgccgaagattgcgctggtgcagaacgtcagcgccgccgtgccggctgatctcgatacgctgcgccgcgacctgctggcacagctgtacagcccggttcgctgggtggagagcatccagctgctggcggaaaagggcgtcaccgagctggtcgagtgcgggccgggcaaggtcctggcaggcctcaacaggcgctgcgcgaagggcatcaatacccatggcctggatggcgtcgaggcgttcgccgccacgcgcgccgccctggcctga

SEQ ID NO: 124146 - protein, 312 aa, Pseudomonas aeruginosa
MSASLAFVFPGQGSQSLGMLAELGAQQALVPDTFAEASEALGYDLWALVQNGPEERLNQTDKTQPAILTVSIALWRLWLAEGGARPAFVAGHSLGEYSALVAAESLAFADAVKLVERRGQLIQQAVPAGQGGMAAILGLEDADVLAACAEAAQGEVVSAVNFNAPGQVVIAGAAAAVERAIEACKARGAKRAVALPVSVPSHCELMRPAAEQFAASVESLQWQAPKIALVQNVSAAVPADLDTLRRDLLAQLYSPVRWVESIQLLAEKGVTELVECGPGKVLAGLNRRCAKGINTHGLDGVEAFAATRAALA

SEQ ID NO: 124147 - DNA, 1164 bp, Oryza sativa (japonica cultivar-group); identical to SEQ ID NO: 59173
  CDS (1)..(1164)

SEQ ID NO: 124148 - protein, 387 aa, Oryza sativa (japonica cultivar-group); identical to SEQ ID NO: 59174

SEQ ID NO: 124149 - DNA, 948 bp, Mesorhizobium loti MAFF303099; identical to SEQ ID NO: 59175
  CDS (1)..(948): transl_table=11

SEQ ID NO: 124150 - protein, 315 aa, Mesorhizobium loti MAFF303099; identical to SEQ ID NO: 59176

SEQ ID NO: 124151 - DNA, 981 bp, Aquifex aeolicus VF5
  CDS (1)..(981): transl_table=11
atggacgccaccctcataattggtttattatctaaagacatgggcaagctcgcttacgtttttcccggacaaggttcccaatacgtgggtatgggatacgagttttacaagcagttccacgagaccgctgacgtggttcacgcggttgaacactccctcagaatgtctttagacgatatcgttgacgttatgttcaagggtccagaagagaaactgaacaaaaccgtatacacccaacctgcactctttgcgatttctctcggtatatacaaagcccttgagagtatgggatttccaaagccagactttgtagcggggcactccctcggagagtatacagcccttgctgttgcgggcgggatagacgttcagctcggggcaagactcacctattacaggggaaagtacatgcaggaggctgttcccgaaggaaagggagctatggtggcgattctgaaactccctcctgaaaaggtagaagaagcgtgtgaaagggcgaaggacgtcggggtggttgaaccggcaaactacaactcatctacccaaaccgtgatatcgggggaaaagcctgcggttgaaaaggccgcccagatagcaaaggaaatgggtggaagggcaatcccgttgaaggtttcagttccctcccactgctcactgatgaaacccgcggcggacgcctttaggcttaaactcgctcaagctccgattcaaaatattaaaatccctctggttcagaactacaccgcaaaggctcacaccatggcacacgagataaggaacaacctttaccatcagatattttccccggtaaagtggtatcagagtgttatatggatgcacgaacagggagttgataccttcgtagaaataggtccaaagaacgttctctcaaaactcatacagcaaacgctcccgaacgtgagggtgtttaacgttgaaaaaccagaagatgcggaaagcgttttaaaggcgataacatga

SEQ ID NO: 124152 - protein, 326 aa, Aquifex aeolicus VF5
MDATLIIGLLSKDMGKLAYVFPGQGSQYVGMGYEFYKQFHETADVVHAVEHSLRMSLDDIVDVMFKGPEEKLNKTVYTQPALFAISLGIYKALESMGFPKPDFVAGHSLGEYTALAVAGGIDVQLGARLTYYRGKYMQEAVPEGKGAMVAILKLPPEKVEEACERAKDVGVVEPANYNSSTQTVISGEKPAVEKAAQIAKEMGGRAIPLKVSVPSHCSLMKPAADAFRLKLAQAPIQNIKIPLVQNYTAKAHTMAHEIRNNLYHQIFSPVKWYQSVIWMHEQGVDTFVEIGPKNVLSKLIQQTLPNVRVFNVEKPEDAESVLKAIT

SEQ ID NO: 124153 - DNA, 882 bp, Thermotoga maritima MSB8
  CDS (1)..(882): transl_table=11
gtgagagcgtttgtctttcccggacagggatcgcagtactctggaatggcgaaggatttttccgtttacgagtcttcgaaagaaatattcgaaagatcgaaaaaggtactgggctttgatatcacggagatcatgaacggtgacgaagaaacattgaaactcacagagaacgcccagccttcgatctacataacgagttacatcgcttttctcgagctggagaagagaggtatcctgcccgatgttgtggcaggacacagcctcggagagtacaccgccctggcagtggcaggagtctacgatttcgagacggggctttatcttgtgagaaaaaggggagagtacatgtcgaaggcactggaaccggggaaaggcacgatggccgctgtcatagggctcaacattgaaaccatagaagaagtggtgaactctatcgaaggggtttacatagcgaactacaattcccacgatcaggttgtgatcagtgggttgaaggaatcggtggaaaaggcaatggagattctcaaagagaaaggagctcgccgtgtcgtggaactcatggtttcaagcccgtttcacacaccgtttctggagtacgccagggagaaaatgaaggaagaagtggagaaggtggacttcaaaaagccgagatggcccatcgttatgaactcgacagcaaaaccaacggaaaatcctgaagagataaagaggaacataatcgaacagattacagggccggttctgtggaaacagtcggttgacaccatgaaaaaaatgggagtaaccgagttcgttgaagttggtccaaagaccgttttgaaaaacctgtgtagaagaatgggagcgaacgcaaagcacttcacggaaattctttcagaatga

SEQ ID NO: 124154 - protein, 293 aa, Thermotoga maritima MSB8
MRAFVFPGQGSQYSGMAKDFSVYESSKEIFERSKKVLGFDITEIMNGDEETLKLTENAQPSIYITSYIAFLELEKRGILPDVVAGHSLGEYTALAVAGVYDFETGLYLVRKRGEYMSKALEPGKGTMAAVIGLNIETIEEVVNSIEGVYIANYNSHDQVVISGLKESVEKAMEILKEKGARRVVELMVSSPFHTPFLEYAREKMKEEVEKVDFKKPRWPIVMNSTAKPTENPEEIKRNIIEQITGPVLWKQSVDTMKKMGVTEFVEVGPKTVLKNLCRRMGANAKHFTEILSE

SEQ ID NO: 124155 - DNA, 939 bp, Vibrio cholerae O1 biovar eltor str. N16961
  CDS (1)..(939): transl_table=11
atgaaggaaagatttatgagtaagtttgctatcgtatttccaggtcagggctcgcaagcagtaggtatgctggctgaccttgccgagcagtatgctgtggtaaaacaaacattcgccgaagcttcagaagtgcttggttacgatctgtgggcgctggttcaagatggccctgtggaagatctcaaccaaactttccgtactcaacctgcgttgcttgccgcctctgttgcgatttggcgtgtatggcagcaactgggtcttgagcaacctgcggttttagctggtcacagcttgggtgaatattcagcactggtatgtgcgggcgtgattgattttaaacaagcgatcaagctggttgagctgcgtggtcaattgatgcaacaagcggtgcctgccggtacgggtgcaatgtacgcgatcatcggtctagaagatgaagcgattgctaaagcctgtgctgacgcggcgcaaggtgaagtggtttctcctgtaaactttaactcaccaggccaagtggttattgctggtcaaaaagatgcggttgagcgtgcgggcgttctgtgtaaagaagcgggcgcgaaacgtgcgctgcctctgccagtttccgtaccatcacactgcgcgttgatgaagcctgctgccgatgaattggcaaaaactctagcagagcttgaattcaatgcaccacaaattccggtcatcaataacgttgatgttgtggctgaaacggatccggtaaaaattaaagatgcgttgattcgtcaactctatagcccagttcgttggactgaatgcgttgaacaaatgagcgcacaaggtgtcgaaaagctgattgaaatggggccgggtaaagtattgactggtctaacaaaacgtattgtaaaaaccctagaaggtgtcgcagtcaatgacgtggcttctttggatgcggtgaaataa

SEQ ID NO: 124156 - protein, 312 aa, Vibrio cholerae O1 biovar eltor str. N16961
MKERFMSKFAIVFPGQGSQAVGMLADLAEQYAVVKQTFAEASEVLGYDLWALVQDGPVEDLNQTFRTQPALLAASVAIWRVWQQLGLEQPAVLAGHSLGEYSALVCAGVIDFKQAIKLVELRGQLMQQAVPAGTGAMYAIIGLEDEAIAKACADAAQGEVVSPVNFNSPGQVVIAGQKDAVERAGVLCKEAGAKRALPLPVSVPSHCALMKPAADELAKTLAELEFNAPQIPVINNVDVVAETDPVKIKDALIRQLYSPVRWTECVEQMSAQGVEKLIEMGPGKVLTGLTKRIVKTLEGVAVNDVASLDAVK

SEQ ID NO: 124157 - DNA, 942 bp, Bacillus halodurans C-125
  CDS (1)..(942): transl_table=11
atggcaaaagtagcatttctattcccaggtcaaggctcacagtctgtcggcatggggagcgaattactttcagaggaaaaagcaaaagagatttttgacgaggcggatgaaagactcggctattccctttcaagcattatgtttgaagggccagaagaaaaattgcgccggacggaaaatacgcaaccggccttgttgacgatgagcacggccgttttatcgctcgtgcgtgaatatggaatcaaacctgattatacagccggtcatagtctaggggagtacagtgcccttgtggcttcaggctctttaacgtttgccgatgctgtgtacgctgttcatcaccgtggattgtttatggaagaagcggtaccattcggcgaaggagcaatggctgccatccttggcatggagcgggacgaattagaacaagtaacgaagcgcgtaacagaagcaggggctgtcgttgaacttgcaaacttaaactgtcctggacaaattgtcatctcaggttctgctgagggtgtcgaacaagcatcagaggaagcaaaggaagcaggggcgaagcgagtgatcccattgcaagtgagcggaccgtttcattcatcgcttatgaaaccggctgccgaaaagcttgaagccgtgttagccgatttggcaatcgctgatgccgctccacctgttattgccaatgtgacagcagatctcgttcaaaaagccgctgacattcgctcatctctcattgagcaagtgtactctccagttcgttgggaggacactgttcgtcgcatgcttgagctcggagtggatacgttcgtggaaatcggatcaggaaatgtgctctcaggcctcgtccgcaaagtacagcgccgggttaatgttttttctgtgagtgatcgggcaagcattgaagcgatggtaaaaaaattggaacaggaggcataa

SEQ ID NO: 124158 - protein, 313 aa, Bacillus halodurans C-125
MAKVAFLFPGQGSQSVGMGSELLSEEKAKEIFDEADERLGYSLSSIMFEGPEEKLRRTENTQPALLTMSTAVLSLVREYGIKPDYTAGHSLGEYSALVASGSLTFADAVYAVHHRGLFMEEAVPFGEGAMAAILGMERDELEQVTKRVTEAGAVVELANLNCPGQIVISGSAEGVEQASEEAKEAGAKRVIPLQVSGPFHSSLMKPAAEKLEAVLADLAIADAAPPVIANVTADLVQKAADIRSSLIEQVYSPVRWEDTVRRMLELGVDTFVEIGSGNVLSGLVRKVQRRVNVFSVSDRASIEAMVKKLEQEA

SEQ ID NO: 124159 - DNA, 939 bp, Pasteurella multocida subsp. multocida str. Pm70; identical to SEQ ID NO: 59177
  CDS (1)..(939): transl_table=11

SEQ ID NO: 124160 - protein, 312 aa, Pasteurella multocida subsp. multocida str. Pm70; identical to SEQ ID NO: 59178

SEQ ID NO: 124161 - DNA, 939 bp, Pseudomonas aeruginosa PAO1; identical to SEQ ID NO: 59179
  CDS (1)..(939): transl_table=11

SEQ ID NO: 124162 - protein, 312 aa, Pseudomonas aeruginosa PAO1; identical to SEQ ID NO: 59180

SEQ ID NO: 124163 - DNA, 927 bp, Neisseria meningitidis MC58
  CDS (1)..(927): transl_table=11
atgtcttttgccttcttttttcccggacaaggttcccaaagcctcggtatgatgaacggctttgccgaacacgccatcgtcaaaaacacctttgccgaagcctccgccatattggggcaggacttgtgggcgatgataaacggcagcgatgccgaaatcatcggtcaaaccgtcaacacccagcccattatgctcgccgccggcgttgccgtttaccgcgcctatttagaagcgggcggcaaaacgcctgccgccgttgccggacacagcctcggcgaatacaccgcactcgttgccgccggcgcattgaattttgccgacgcggtcaaactcgtgcgcctgcgcgccgaactgatgcagtccgccgtaccgcaaggcgtgggcgcaatggcggcgattctcggcttggaagatgagcaggttaaagccatttgtgccgaagccgcccaaagcgaagtggtcgaagccgtcaacttcaactcacccggacaaatcgtgattgcaggcaacgccgccgccgtcggacgcgccatggctgccgccaaagaagccggtgccaaacgcgccctgccgctgcccgtgtccgtaccttcccattgcagcctgatgaaacccgccgccgacaaacttgccgaagccctgaaaaccgttgaaatcaagcagccgcaaatccgcgttatccacaacgccgacgttgccgcctacgatgatgccgacaaaatcaaagacgcgctcgtccgccagctttacagccccgtacgctggacggaaaccgtcaacgccctcgtttcagacggcattgccgaatccgccgaatgcggcccgggcaaagtgttggcgggcttggcaaaacgcatcaacaaagccgccgcgtgcagcgcactgaccgatgccggacaggttgccgcctttatcgaagcgcactga

SEQ ID NO: 124164 - protein, 308 aa, Neisseria meningitidis MC58
MSFAFFFPGQGSQSLGMMNGFAEHAIVKNTFAEASAILGQDLWAMINGSDAEIIGQTVNTQPIMLAAGVAVYRAYLEAGGKTPAAVAGHSLGEYTALVAAGALNFADAVKLVRLRAELMQSAVPQGVGAMAAILGLEDEQVKAICAEAAQSEVVEAVNFNSPGQIVIAGNAAAVGRAMAAAKEAGAKRALPLPVSVPSHCSLMKPAADKLAEALKTVEIKQPQIRVIHNADVAAYDDADKIKDALVRQLYSPVRWTETVNALVSDGIAESAECGPGKVLAGLAKRINKAAACSALTDAGQVAAFIEAH

SEQ ID NO: 124165 - DNA, 921 bp, Campylobacter jejuni subsp. jejuni NCTC 11168
  CDS (1)..(921): transl_table=11
atgaatgctgcgtttatatttccaggtcaaggctctcaaagtcttggcatgggaaaagatttttatgaaaactctataaaagccaaagaactccttcaaaacgcaagtgatttttgtaagattgattttaaacatttgctttttgaagaaaacgaaaaactcaatcaaagtgaatttactcaacccgccatcgttttaaattccttaatggcttatagtgttttacttgaaaaaaaacctgatttaagttcgaaatttgctttagggcattctttgggagaattttcagccttagctgtcaatggtgcttttgattttttagaggctctttctttggtcaataaaagagggcttttcatgcaagaagattgtgcaaaagttgaagcaggtatgatggtggttttggggcttgatgatgaaaaggttgaagagctttgtcaaaaagcacaaaaagaaaacaagcaaattttcgctgcaaattataactgcgatggacaaatcgttgtagcaggtttaaaacctgatttagcaagttatgaaagtgtatttaaagaagcaggagctaaaagagctatgcttttaaatatgagcgtggcaagtcattgtcctcttttggaaaatgcttcagctaagctttgtgtggagcttgaaaaggtgttaaaaccaaattttaaagccgtaatttctaatgcaaatgccaaaatttatacaagcaaagaagaagcccttgagcttttaaaagcacaacttatctctcctgtgctttataaacaaagcattaaggcatgtgaaaatgaagtagattatttcatagaatttggcgcaagtgtgcttaagggtttgaataaaaaaatcacttcaaaagaaacttatgctttaacaaatatgaatgatattgatgaatttttaaaggttgtatga

SEQ ID NO: 124166 - protein, 306 aa, Campylobacter jejuni subsp. jejuni NCTC 11168
MNAAFIFPGQGSQSLGMGKDFYENSIKAKELLQNASDFCKIDFKHLLFEENEKLNQSEFTQPAIVLNSLMAYSVLLEKKPDLSSKFALGHSLGEFSALAVNGAFDFLEALSLVNKRGLFMQEDCAKVEAGMMVVLGLDDEKVEELCQKAQKENKQIFAANYNCDGQIVVAGLKPDLASYESVFKEAGAKRAMLLNMSVASHCPLLENASAKLCVELEKVLKPNFKAVISNANAKIYTSKEEALELLKAQLISPVLYKQSIKACENEVDYFIEFGASVLKGLNKKITSKETYALTNMNDIDEFLKVV

SEQ ID NO: 124167 - DNA, 927 bp, Neisseria meningitidis Z2491
  CDS (1)..(927): transl_table=11
atgtcttttgccttcttttttcccggacaaggttcccaaagcctcggtatgatgaacggctttgccgaacacgccatcgtcaaaaacacctttgccgaagcctccgccatattggggcaggacttgtgggcgatgattaacggcagcgatgccgaaatcatcggacaaaccgtcaatacccagcccatcatgctcgccgccggcgttgccgtttaccgcgcctattcggaagcgggcggcaaaacgcctgccgccgttgccggacacagcctcggcgaatacaccgcactcgttgccgccggcgcattggattttgccgacgcggtcaaactcgtgcgcctgcgcgccgaactgatgcagtccgccgtaccgcaaggcgtgggcgcaatggcggcgattctcggcttggaagatgaacaggtaaaacaaatttgcgccgaatccgcacaggatgaagtggttgaagccgtcaacttcaactcgcccggacaagtcgtgattgcaggcaatgccgccgccgtcgagcgcgctatgcttgccgccaaagaagccggcgccaaacgcgccctgccgctgcccgtgtccgtaccttcccattgcagcctcatgaaacccgccgccgacaaactcgccgaagccctgaaaaccgttgaaatcaagcagccgcaaatccgcgtcatccacaacgccgacgttgccgcctacgatgatgccgacaaaatcaaagacgcgctcgtccgccagctttacagccccgtacgctggacggaaaccgtcaacgcccttgtttcagacggcattgccgaatccgccgaatgcggcccgggcaaagtgttggcaggtctggcaaaacgcatcaacaaggccgccgcgtgcagcgcgctgaccgatgccggacaggttgccgcctttatcgaagcacactga

SEQ ID NO: 124168 - protein, 308 aa, Neisseria meningitidis Z2491
MSFAFFFPGQGSQSLGMMNGFAEHAIVKNTFAEASAILGQDLWAMINGSDAEIIGQTVNTQPIMLAAGVAVYRAYSEAGGKTPAAVAGHSLGEYTALVAAGALDFADAVKLVRLRAELMQSAVPQGVGAMAAILGLEDEQVKQICAESAQDEVVEAVNFNSPGQVVIAGNAAAVERAMLAAKEAGAKRALPLPVSVPSHCSLMKPAADKLAEALKTVEIKQPQIRVIHNADVAAYDDADKIKDALVRQLYSPVRWTETVNALVSDGIAESAECGPGKVLAGLAKRINKAAACSALTDAGQVAAFIEAH

SEQ ID NO: 124169 - DNA, 918 bp, Deinococcus radiodurans R1
  CDS (1)..(918): transl_table=11
ttgagcgcttccaagattgccgcgttgtttcccggtcagggttcgcacgccgtcggcatgggcgcggacctggcaggcgagtttccgcaggcgggggagacctacgcggccctggacgccacgctgcccggcctgcgttcgctgattgagggaggcccgctcgacgacctcacccgcactgccaaccagcagcctgcgctcgtcgccgcgtcggtggcggcctaccgggcgtggcaggcgcacaccggcctgacgccgatggtggccgccgggcactcgctgggcgaatactcggcgctggtggcggcgggcgtgctgacgctggaagacgcgctgcgcctgacccgcaagcgcggcgagctgatgcagcaggccgtgcccgaaggcgtcggtgccatgagcgcggtgatgggcgacccggcggtggtggccgaagtctgcgccgcgcaagctggcgtcgtgcagcccgccaacttcaacgcgcccacccagacggtcatctcaggtgaaaaagccgctgtggacgccgccagcgccgaactcaagacgcgcggcctcaaggccatcccgctcaaggtgtctgccccgttccactgcgccctgatgcgccccgccgccgaggggctgtccgccgagttgcacgccgccgcttacggcccctacctgtttccagtggtcgccaacgtgagcgccgagttggtggacagccccacccacaccgccgacctgctcgaacgtcaaatcaccggcagcgtgcgctgggtcgagacggtgcagacgctggccgaactcgggaccgaggttttcatcgaatttggccccggcagcgtgctgagcggactggtcaaacgcattgtgcccggcgcccgaaccctaaatgtcggctcaaccgaacaggtgcgggcttttgccctctga

SEQ ID NO: 124170 - protein, 305 aa, Deinococcus radiodurans R1
MSASKIAALFPGQGSHAVGMGADLAGEFPQAGETYAALDATLPGLRSLIEGGPLDDLTRTANQQPALVAASVAAYRAWQAHTGLTPMVAAGHSLGEYSALVAAGVLTLEDALRLTRKRGELMQQAVPEGVGAMSAVMGDPAVVAEVCAAQAGVVQPANFNAPTQTVISGEKAAVDAASAELKTRGLKAIPLKVSAPFHCALMRPAAEGLSAELHAAAYGPYLFPVVANVSAELVDSPTHTADLLERQITGSVRWVETVQTLAELGTEVFIEFGPGSVLSGLVKRIVPGARTLNVGSTEQVRAFAL

SEQ ID NO: 124171 - DNA, 927 bp, Clostridium acetobutylicum ATCC 824
  CDS (1)..(927): transl_table=11
gtgggaaagattgcatttgttttttcaggacagggttcgcagtatgttggaatgggaaaggatctatacgataattaccaaagcgcaaaggaaacttttgataaagctgatgaagtgcttggctttaaaatcagtgaattatgcttcgaaggaaaagatgaagaattaaatttaactgagaacactcagccagcagttttaattactagtatagctgctttaagagcacttgaagaagaaaaaggaataaaacctgatgttgttgcaggtctaagcttaggagagtattctgcacatgtttgcagtgggagtttttcatttgaggatgcagtaagattagtgaaaaaaagaggaagatatatgcaagaagcagtaccaaaaggaataggtactatggctgctataatcggacttgaaggtgatgtagttagaggtatatgcgctgagcaatcaaaagaaggaatagtagaggtagcaaattataattgtccaggacaaattgttatagcaggagaagttaaagctgttgaaagcgcctgtactaagttaaaggaaagcggagcaagaagaacagtaatgctttcagtaagtggaccatttcacacatctatgctaaagagtgctgctgaaaaattagaagaagaattaaagaatataaatatagaagatatgaaggtaccagttattacaaatgtaacaggagactatgtagaagataaggatcagataaaaggtttattgaaaaagcaagtcatgagctctgttagatgggaagatacaataagaagaatgatggatgatggagtagatacatttatagagcttggaccaggtaagaccttaagttcatttataaagaaaataaatagaaaaatgactatatttaatattgaaaaagctgaagatttaaataaaattcagttatag

SEQ ID NO: 124172 - protein, 308 aa, Clostridium acetobutylicum ATCC 824
MGKIAFVFSGQGSQYVGMGKDLYDNYQSAKETFDKADEVLGFKISELCFEGKDEELNLTENTQPAVLITSIAALRALEEEKGIKPDVVAGLSLGEYSAHVCSGSFSFEDAVRLVKKRGRYMQEAVPKGIGTMAAIIGLEGDVVRGICAEQSKEGIVEVANYNCPGQIVIAGEVKAVESACTKLKESGARRTVMLSVSGPFHTSMLKSAAEKLEEELKNINIEDMKVPVITNVTGDYVEDKDQIKGLLKKQVMSSVRWEDTIRRMMDDGVDTFIELGPGKTLSSFIKKINRKMTIFNIEKAEDLNKIQL

SEQ ID NO: 124173 - DNA, 945 bp, Sinorhizobium meliloti 1021
  CDS (1)..(945): transl_table=11
atgagcatcgcattcacgttccccggccagggcagccaggccgtgggcatgggcaaggatctggccgaagcatttccggaggccgcggctgtctttgccgaggtcgacgacgcgctcagcgaaaagctttccgacatcatgtggaacgggcctgaggagacgttgacgctgacggcgaatgcgcaaccggcgctgatggcagtgtccatggcggtaatccgcgtgctagaagccaagggcctcgacctcaagagcaaggtttccttcgtcgcgggccactcgctcggggagtattcggcgctctgtgccgccggtacgttctcgctcgccgacacggcgcgtcttctgcgcattcgcggcaatgcgatgcaggcggccgtccccgtcggcaagggcgcgatggcggcgatcatcggtctggagcatgacgatgtcgaagcggtctgccgtgacgcatcatcgttcggctcgtgccagatcgccaacgacaacggcggcggccagctggtgatctcgggcgagaagcctgctgtggagaaggccgcggccctcgcttcggaaaagggtgccaagcgcgcgcttatgctgcccgtgtccgcccccttccattccgccttgatgacgccggccgccgaggccatgcgcaaggcgctcgcgacggtcgagaagcgcgatcccgtggttccggtcgtcgcgaacgtgcttgctgcgccggtaagcgatgcgggcgagatcgcgcgcctgcttgtcgagcaggtgaccgggcaggtgcgctggcgcgagacggtcgagtggtttgcggcccatgaagttacgacgctttacgagatcggctcgggcaaggtcctgacgggacttgcccggaggatcgacaagaccgtcacgggcatcgccgtcaattcgcccgccgatatcgatgcggcgcttgccgtcctcttggcctga

SEQ ID NO: 124174 - protein, 314 aa, Sinorhizobium meliloti 1021
MSIAFTFPGQGSQAVGMGKDLAEAFPEAAAVFAEVDDALSEKLSDIMWNGPEETLTLTANAQPALMAVSMAVIRVLEAKGLDLKSKVSFVAGHSLGEYSALCAAGTFSLADTARLLRIRGNAMQAAVPVGKGAMAAIIGLEHDDVEAVCRDASSFGSCQIANDNGGGQLVISGEKPAVEKAAALASEKGAKRALMLPVSAPFHSALMTPAAEAMRKALATVEKRDPVVPVVANVLAAPVSDAGEIARLLVEQVTGQVRWRETVEWFAAHEVTTLYEIGSGKVLTGLARRIDKTVTGIAVNSPADIDAALAVLLA

SEQ ID NO: 124175 - DNA, 945 bp, Caulobacter crescentus CB15; identical to SEQ ID NO: 59185
  CDS (1)..(945): transl_table=11

SEQ ID NO: 124176 - protein, 314 aa, Caulobacter crescentus CB15; identical to SEQ ID NO: 59186

SEQ ID NO: 124177 - DNA, 942 bp, Listeria monocytogenes EGD-e; identical to SEQ ID NO: 59187
  CDS (1)..(942): transl_table=11

SEQ ID NO: 124178 - protein, 313 aa, Listeria monocytogenes EGD-e; identical to SEQ ID NO: 59188

SEQ ID NO: 124179 - DNA, 942 bp, Listeria innocua Clip11262
  CDS (1)..(942): transl_table=11
atgactaaaatcgcattcgtatttcctggtcaaggagcacaaaaaattggcatggggcaagatgtagctgcagaatatccagaagcaaaaaaaatctatgatgatgctgatgaaagattaggcttttccatcacagatgttattacagaaggaccaatcgaattattaacgaaatccgaaaatgcacaaccagcattagtttcaacaagtgtagctattttacgcgcattagaaacatatggtgttaaagcggattacgtagcaggacatagccttggcgaatatagcgcgcttgttgctggcggatttttagaagcaagtgatgcgatttatcttgttcgtaaacgcggagaattaatggaagccgctgtaccaaatggtgccggcgcaatggctgcggttcttggcgtagaccgtgaaacattaaaaaaagtaaccgaagaagtaacagctgaaggggatgcagttcaacttgctaacctgaactgtccaggacaaatcgttatctctggaacaactgctggcgttgaaaaagcaggcgaaaaagcaaaagaaaatggtgcgaaacgcgtattaccacttgctgttagcggacctttccactcaagtttaatggaaccagctgcacttgctttccgtgatattttagcagaggttaaaatttctgatggtcaaattccagtagttaataacgtggatgctaaagaaactacggataaatccgaaattagcgataaactaatcaagcaaatttattccccagtattatgggaagatattgtcgaagaattaattaaaaacggcgtagatacttttgttgaaattggttctggaaaagtcttagctggtttaattaagaaaatcaatcgtgatgtaaccgtactgtccgcaggtgatgttgagtcagtgaaaagtgttgccgcgacattgaaaggagaataa

SEQ ID NO: 124180 - protein, 313 aa, Listeria innocua Clip11262
MTKIAFVFPGQGAQKIGMGQDVAAEYPEAKKIYDDADERLGFSITDVITEGPIELLTKSENAQPALVSTSVAILRALETYGVKADYVAGHSLGEYSALVAGGFLEASDAIYLVRKRGELMEAAVPNGAGAMAAVLGVDRETLKKVTEEVTAEGDAVQLANLNCPGQIVISGTTAGVEKAGEKAKENGAKRVLPLAVSGPFHSSLMEPAALAFRDILAEVKISDGQIPVVNNVDAKETTDKSEISDKLIKQIYSPVLWEDIVEELIKNGVDTFVEIGSGKVLAGLIKKINRDVTVLSAGDVESVKSVAATLKGE

SEQ ID NO: 124181 - DNA, 879 bp, Nostoc sp. PCC 7120; identical to SEQ ID NO: 59189
  CDS (1)..(879): transl_table=11

SEQ ID NO: 124182 - protein, 292 aa, Nostoc sp. PCC 7120; identical to SEQ ID NO: 59190

SEQ ID NO: 124183 - DNA, 930 bp, Ralstonia solanacearum GMI1000
  CDS (1)..(930): transl_table=11
atgacattcgctttcgtttttcccggccagggttcgcaatcggtcggcatgctcaatgcgtttgccgatcatcctgtcgtcgccgccacgctggcggaggcctccgatgcactgggccaggatatcggcaagctgatcgctgaaggcccggccgatgagctgaacctgaccaccaatacgcagccggtcatgctgaccgccgccgtggcggtgtaccgcgcctggcaggctgccggcggtccgacgccggccgtggtggccggtcacagcctgggcgagtattctgcactggtcgccgccggagcgatcgcgttcaaggatgccgtgccgctggtgcgtttccgcgccaaggcgatgcaggaggccgtgccggtcggcgagggcggcatggccgcgattctcggcctgtcggatgacgacgtgcgtgccgcctgtgccgaggcatcgagcgccggcgtggtggaggccgtcaatttcaatgcgccggctcaggtggtgatcgcgggggccaaggctgcggtcgagaaggcttgtgagatcgccaaggctaagggcgccaagcgcgcgctgccgctgcccgtgtccgcgccgttccactcctcgctgctgaagccggcgtcggaccgtctgcgggaatacctgtccggcgtggcggtcggcgcgccggccatcccggtcatcaacaacgtcgatgtggcgttggtgagcgatcccgccgccatcaaggatgcgctggtacgccaggccgcttccccggtgcgctgggtcgagaccgtgcagaagatgaaggccgacggcatcgcccgcgtggtcgaatgcgggccgggcaaggtgctcgcaggtctcaccaagcgcatcgacggcgacattgtcggcgatgcgatcttcgatccggcttcgctggaagccgtgctggttcaactcaaataa

SEQ ID NO: 124184 - protein, 309 aa, Ralstonia solanacearum GMI1000
MTFAFVFPGQGSQSVGMLNAFADHPVVAATLAEASDALGQDIGKLIAEGPADELNLTTNTQPVMLTAAVAVYRAWQAAGGPTPAVVAGHSLGEYSALVAAGAIAFKDAVPLVRFRAKAMQEAVPVGEGGMAAILGLSDDDVRAACAEASSAGVVEAVNFNAPAQVVIAGAKAAVEKACEIAKAKGAKRALPLPVSAPFHSSLLKPASDRLREYLSGVAVGAPAIPVINNVDVALVSDPAAIKDALVRQAASPVRWVETVQKMKADGIARVVECGPGKVLAGLTKRIDGDIVGDAIFDPASLEAVLVQLK

SEQ ID NO: 124185 - DNA, 996 bp, Agrobacterium tumefaciens str. C58; identical to SEQ ID NO: 59181
  CDS (1)..(996): transl_table=11

SEQ ID NO: 124186 - protein, 331 aa, Agrobacterium tumefaciens str. C58; identical to SEQ ID NO: 59182

SEQ ID NO: 124187 - DNA, 1182 bp, Arabidopsis thaliana; identical to SEQ ID NO: 59193
  CDS (1)..(1182)

SEQ ID NO: 124188 - protein, 393 aa, Arabidopsis thaliana; identical to SEQ ID NO: 59194

SEQ ID NO: 124189 - DNA, 900 bp, Fusobacterium nucleatum subsp. nucleatum ATCC 25586
  CDS (1)..(900): transl_table=11
atgggaaaagttgcttttgtttacccaggtcaaggtacacagtatattggaatggggaaagaactatatgaaaataataataaagcaaaagaattatttgataaaatctttaattctttggatattgatttaaaaaatgttatgtttgaagggccagaagatttattgaaaagaacagattatacccaacctgcaatagttagtttaagtttagttttaactgaacttttaaaagaaaaaggaatagaagctgattatgttgcaggacattctgttggagagtttgcagcttttggtggagcaaattatctttcaatagaagatgcagtaaaacttgttgcagcaagagggagaataatgagagaagttgctgaaaaagtaaatggaagtatggcagctgttcttggtatggatgcagaaaaaataaaagaagttttaaaatcagttgatggagtggttgaagcagtaaactttaatgaacctaatcaaacagttattgctggagaaaaagaagcagtagaaaatgcttgtatggctttaaaagaagcaggcgctaaaagagcattaccacttgcagtatctggacctttccattcatcacttatgaaggaagcaggagaacaattaaaagaagaagcaaaaaaatatacttttaatgtaggaaaaataaaaataattgcaaacacaactgctgaacctttagaaactgattcagaagtaaaagatgaaatttatagacaaagttttggacctgtgaaatgggtagatactattaataaattaaaatcattaggtgttacaaaaatttatgaaataggacctggaaaagttttatcaggacttatcaaaaaaattgataaagaaatagaagtagaaaatattgaattaattgaagcataa

SEQ ID NO: 124190 - protein, 299 aa, Fusobacterium nucleatum subsp. nucleatum ATCC 25586
MGKVAFVYPGQGTQYIGMGKELYENNNKAKELFDKIFNSLDIDLKNVMFEGPEDLLKRTDYTQPAIVSLSLVLTELLKEKGIEADYVAGHSVGEFAAFGGANYLSIEDAVKLVAARGRIMREVAEKVNGSMAAVLGMDAEKIKEVLKSVDGVVEAVNFNEPNQTVIAGEKEAVENACMALKEAGAKRALPLAVSGPFHSSLMKEAGEQLKEEAKKYTFNVGKIKIIANTTAEPLETDSEVKDEIYRQSFGPVKWVDTINKLKSLGVTKIYEIGPGKVLSGLIKKIDKEIEVENIELIEA

SEQ ID NO: 124191 - DNA, 930 bp, Thermoanaerobacter tengcongensis MB4
  CDS (1)..(930): transl_table=11
atgaaaatagcttttatatacccgggccaaggtgcccagtacgcagggatgggaaaggaaatatacgaaaaatacgaagaagcgaaagaaatttttgaaagagcagatgaggctttaggttttaacatatctaaactgtgctttgaagggcctgaagaagagcttatgaagacggagaacacacagccggccattttgacagtttcagtggccttgacaagggttttgcagaaaagaggtgtaaaacctgatgtgacagcaggtttaagtttaggagagtattcatctcttgtactggcagaagctttagattttgaggatgcagtgagacttgtcaaaaagagaggaaagtacatgcaggaagtggtcccagaaggagtcggcacaatggcagcaatacttggacttcccaatgaggaagttgaggaaatatgccggattgcatcagaggtcggtgtggtagaacctgctaactacaactgtccgggtcaattagtggtctctggggaagttaaggctgtagaaagagctgtggaactagcgaaggagagaggagctaagaaagcagtagtgcttgcagtaagtgcgcctttccactgcagcatgttgaaagaagctggagaacttctagcaaaggaattggataaagtagagataaaggacttgaaggttcctgtgatatcaaatgttactgccgattacgtgcaaaaagataaggttaaagaattactcataaaacaggtgagtcatcccgtcctctgggagcagtctgtgagaaaaatgatagaagacggtgtggatactttcatagaaataggacctggaaagactttgagcggatttgtcaagaaaattgatagaagcaggactgttttgaattttgaggatgaggagtctctcatgaaggctctctcagctttgggggtatag

SEQ ID NO: 124192 - protein, 309 aa, Thermoanaerobacter tengcongensis MB4
MKIAFIYPGQGAQYAGMGKEIYEKYEEAKEIFERADEALGFNISKLCFEGPEEELMKTENTQPAILTVSVALTRVLQKRGVKPDVTAGLSLGEYSSLVLAEALDFEDAVRLVKKRGKYMQEVVPEGVGTMAAILGLPNEEVEEICRIASEVGVVEPANYNCPGQLVVSGEVKAVERAVELAKERGAKKAVVLAVSAPFHCSMLKEAGELLAKELDKVEIKDLKVPVISNVTADYVQKDKVKELLIKQVSHPVLWEQSVRKMIEDGVDTFIEIGPGKTLSGFVKKIDRSRTVLNFEDEESLMKALSALGV

SEQ ID NO: 124193 - DNA, 951 bp, Streptomyces coelicolor A3(2); identical to SEQ ID NO: 59195
  CDS (1)..(951): transl_table=11

SEQ ID NO: 124194 - protein, 316 aa, Streptomyces coelicolor A3(2); identical to SEQ ID NO: 59196

SEQ ID NO: 124195 - DNA, 945 bp, Xanthomonas axonopodis pv. citri str. 306
  CDS (1)..(945): transl_table=11
gtgaccgaatccactctcgccttcgtgtttcccggccagggctcgcagtccttaggcatgctggccgaactgtccgaactgcacccgcagattcgcgaaacgttcgccgaagcctccgagggcgctggcgtcgacttgtgggcgttgtcccagggcggcccggaagaaatgctcaatcgcaccgaatacacccagcccgccttgttggctgcgggcgttgcggtgtggcgtctgtggactgcccagcgcgggcagcgcccggtgctgctggcgggacacagcctgggcgaatacaccgcgctggtcgcggctggcgccttgtcgctgcacgacggtgcgcatctggtgcggttgcgcggccagttcatgcaggctgcggcaccggcgggcgtcggcgcgatggctgcggtgctgggcgccgaagacgccgtggtgcaggaggtctgtgaccaggcgtccggcagcgacgtggtggtgccggccaacttcaattcgcccggtcagatcgtgatcggcggccacgctgcggcggtggatcgcgcgctggggctgctggccgagcgcggcgtgcgcaaggcggtcaagctggcagtgagcgtgccctcgcacaccccgctgatgcgcgaagccgccaatcagctcggcgaggcgatggccgggctgacctggcacgccccgcagattccggtggtgcagaacgtggacgcgcgcgtgcatgagggcagcaccgccatccgccaggccttggtggaacagctctacctgccggtgcaatggaccggctgcgtgcaggcgctcgccagccagggcatcacccgcattgccgaatgcggcccgggcaaggtgctgagcgggctgatcaagcgcatcgacaagagcctggatgcgcggccgctggcaacgcccgccgactatgccggcgcgctcgacgcgtgggcgcactga

SEQ ID NO: 124196 - protein, 314 aa, Xanthomonas axonopodis pv. citri str. 306
MTESTLAFVFPGQGSQSLGMLAELSELHPQIRETFAEASEGAGVDLWALSQGGPEEMLNRTEYTQPALLAAGVAVWRLWTAQRGQRPVLLAGHSLGEYTALVAAGALSLHDGAHLVRLRGQFMQAAAPAGVGAMAAVLGAEDAVVQEVCDQASGSDVVVPANFNSPGQIVIGGHAAAVDRALGLLAERGVRKAVKLAVSVPSHTPLMREAANQLGEAMAGLTWHAPQIPVVQNVDARVHEGSTAIRQALVEQLYLPVQWTGCVQALASQGITRIAECGPGKVLSGLIKRIDKSLDARPLATPADYAGALDAWAH

SEQ ID NO: 124197 - DNA, 918 bp, Chlorobium tepidum TLS
  CDS (1)..(918): transl_table=11
atgaaagcatttgttttccccggtcagggttcgcagtactgcggcatgggccgcgatctgtacgagcgcttcccggaagcgcaggagctcatggacaaggccgactcaattctcggattctcgatcaccaatatcatgttcaacggcagcgaggatgagctgaaacagacacgctatacccagctcgctatcttcctgcacagcttcgcggcggccacccttctcggacgtgagggcgttaagatggcagcgggccacagccttggcgaatacacggcgctctgcttctcgggtgcgatttcgttcgaggatgcggtgaggctcgtggccaagcgcggcgaactgatgcagaacgccggacagcagaatcccggcacgatggccgcgatcatcggcatggccgacgacgcgctcgacgcgctcctggaagaggcgagtgcaagcggcatcgtgcaggcggcaaacttcaactcgcccggccagattgtcatctccggcgacgtcgatgcagtacgcaaggcggtcgaactcgcgtcgtcgaaaggcgcgcgcatggccaaggagctggtcgtctcaggcgctttccactcgccgctgatgaaacccgccgaaaaggagtttgccgaaacgctcgacaccatcgcgatccgcgacgccgaaattccggtctgcatgaacgtggtcgccaaaccggtcacggcggcaacggaaatccgcgcgaacctcatcagccagctcaccagctcggtgctctggagccagtcggtgcaggcgatggtggacgcgggcatcaccgaatttgtcgaggtcggcccccagaaagtgctgcagggcctcattaaaagaatcagcaaatccactatgtgctcgggagtcgataccgccgatcaggtggatgcgatgcgcactccggcctaa

SEQ ID NO: 124198 - protein, 305 aa, Chlorobium tepidum TLS
MKAFVFPGQGSQYCGMGRDLYERFPEAQELMDKADSILGFSITNIMFNGSEDELKQTRYTQLAIFLHSFAAATLLGREGVKMAAGHSLGEYTALCFSGAISFEDAVRLVAKRGELMQNAGQQNPGTMAAIIGMADDALDALLEEASASGIVQAANFNSPGQIVISGDVDAVRKAVELASSKGARMAKELVVSGAFHSPLMKPAEKEFAETLDTIAIRDAEIPVCMNVVAKPVTAATEIRANLISQLTSSVLWSQSVQAMVDAGITEFVEVGPQKVLQGLIKRISKSTMCSGVDTADQVDAMRTPA

SEQ ID NO: 124199 - DNA, 897 bp, Thermosynechococcus elongatus BP-1; identical to SEQ ID NO: 59199
  CDS (1)..(897): transl_table=11

SEQ ID NO: 124200 - protein, 298 aa, Thermosynechococcus elongatus BP-1; identical to SEQ ID NO: 59200

SEQ ID NO: 124201 - DNA, 939 bp, Oceanobacillus iheyensis HTE831; identical to SEQ ID NO: 59201
  CDS (1)..(939): transl_table=11

SEQ ID NO: 124202 - protein, 312 aa, Oceanobacillus iheyensis HTE831; identical to SEQ ID NO: 59202

SEQ ID NO: 124203 - DNA, 945 bp, Brucella suis 1330
  CDS (1)..(945): transl_table=11
atggcggtagcattcactttcccagggcagggcagccaggcggttggcatgggcaaggctctggccgaacaatttgccgaagcgcgcgccgttttcgatgaagtggatgaggcgctgggcgaaaagctttccgccaccatgttcgaggggccggaagatgtgctgacgctgacggccaatgcgcagcctgcgctgatggcggtttccatggcggtccagcgcatcatggaagcgcgcggcttttcgctgaaggacaaggtttcttatgtcgccggtcattcgcttggcgaatattcggctctgtgcgctgctggcacgttttcacttgccgacacggcgcgtctcttgcgcattcgcggcaatgccatgcagaaggcggttccggtcggcgaaggcgctatggcggcgatcatcggtctggaacacggcgatgtggaggctgtctgcatggaagcaaaggcttccggcccggtccagatcgccaatgacaatggcggcggccagcttgtcatatccggggccagggcggccgttgaactggccgcgaagcttggctctgaaaagggtgcaaagcgcgccatcatgctgccggtatccgctcccttccattcgaccctgatggcaccggcggctgatgccatgcgcgaggcgcttgcagcggttgaaaagcatgatccggtcgtgccgcttatcgccaatgtgcgcgcggcccccgtgaccgacgctaacgagatcgccgccctgctggtcgagcaggtgacgggccaggtgcgctggcgcgaaactatcgagtggttttctgccaatggtgtaaccacgctttatgaagtaggctgcggcaaggttctgacgggtttggcgcggcgcatctccaaggatgtatccggcgctaccgttggttcggctgaggaaatcgaagcagcgcttgctgctcttaacgcttga

SEQ ID NO: 124204 - protein, 314 aa, Brucella suis 1330
MAVAFTFPGQGSQAVGMGKALAEQFAEARAVFDEVDEALGEKLSATMFEGPEDVLTLTANAQPALMAVSMAVQRIMEARGFSLKDKVSYVAGHSLGEYSALCAAGTFSLADTARLLRIRGNAMQKAVPVGEGAMAAIIGLEHGDVEAVCMEAKASGPVQIANDNGGGQLVISGARAAVELAAKLGSEKGAKRAIMLPVSAPFHSTLMAPAADAMREALAAVEKHDPVVPLIANVRAAPVTDANEIAALLVEQVTGQVRWRETIEWFSANGVTTLYEVGCGKVLTGLARRISKDVSGATVGSAEEIEAALAALNA

SEQ ID NO: 124205 - DNA, 927 bp, Shewanella oneidensis MR-1; identical to SEQ ID NO: 59205
  CDS (1)..(927): transl_table=11

SEQ ID NO: 124206 - protein, 308 aa, Shewanella oneidensis MR-1; identical to SEQ ID NO: 59206

SEQ ID NO: 124207 - DNA, 939 bp, Pseudomonas putida KT2440; identical to SEQ ID NO: 59207
  CDS (1)..(939): transl_table=11

SEQ ID NO: 124208 - protein, 312 aa, Pseudomonas putida KT2440; identical to SEQ ID NO: 59208

SEQ ID NO: 124209 - DNA, 924 bp, Vibrio vulnificus CMCP6
  CDS (1)..(924): transl_table=11
atgagcaagtttgctatcgtatttccaggtcaaggttctcaagcagttggtatgctggcagatcttggcgaacagtatgaaatcgttaaacaaacatttgcacaagcgtcagaagcgcttggctacgatttatgggcactggtacaaaacggtcctgcggaagatttgaatcagacgttccgcactcaaccggcattgctggcttcgtcggtagcgatctggcgagtgtggcaagaattaggtcttgctcaaccagaaaacttggcaggccatagcttgggtgagtactcagcattagtgtgtgctggcgtgattgatttccaagaagcgatcaaacttgtcgagcttcgtggtcaacttatgcaagaagccgtaccagcagggactggcgcgatgtacgcgatcatcggcctagatgatgaagcgattgccaaagcttgtgaagaagcagcgcaaggcgaggtggtctctccagtgaacttcaactctcctggccaagtggtgattgcaggcagcaaagacgcagtagagcgtgcgggtgcactgtgtaaagaagcgggcgctaaacgtgctcttcctcttccagtttctgtgccttcacactgtgcactaatgaaaccagcagcagagaaacttgcggttgcactggaatctatcgaattcaaagccccacagctgccagtgatcaataacgtggatgtggttgcagaaaccgacccagcgaaaatcaaagatgccctagttcgtcaactgtacagcccagttcgttggactgaaagtgtggaactaatgagttcacagggtgtcgaaaaattgcttgaaatgggccctggtaaagtattgacaggtttgacaaaacgtattgtcaaatcactagaagcagcggcagtaaacgatgttgcatcgcttgacgctgtaaagtaa

SEQ ID NO: 124210 - protein, 307 aa, Vibrio vulnificus CMCP6
MSKFAIVFPGQGSQAVGMLADLGEQYEIVKQTFAQASEALGYDLWALVQNGPAEDLNQTFRTQPALLASSVAIWRVWQELGLAQPENLAGHSLGEYSALVCAGVIDFQEAIKLVELRGQLMQEAVPAGTGAMYAIIGLDDEAIAKACEEAAQGEVVSPVNFNSPGQVVIAGSKDAVERAGALCKEAGAKRALPLPVSVPSHCALMKPAAEKLAVALESIEFKAPQLPVINNVDVVAETDPAKIKDALVRQLYSPVRWTESVELMSSQGVEKLLEMGPGKVLTGLTKRIVKSLEAAAVNDVASLDAVK

SEQ ID NO: 124211 - DNA, 927 bp, Staphylococcus epidermidis ATCC 12228
  CDS (1)..(927): transl_table=11
atgggtaaaatagcagttgtattcccaggccaaggtgcacaaaaagtagggatggctagtgacttatataatgaagaggaacgctcgactcgagtattaaatttagctcaagagacagtagactttgatttgctagaaacgatgtttactgataatgatgggaaattaggagaaacagaaaatacacaacctgcactattaacacatagtgttgcgttactagaatcattaaatcatttaaaagtagattatactatgggacatagcttaggagaatattcaagcttagttgctagtggtgtattatcttttgaagatgcggttagaattgtgcgtaaacgtggccaacttatggctcgagcgtttcctaacggtgttggaggtatggcagcagtattaggtttggattatgatgatgttgataagatatgtcaaacgttatctacaaaagaacagttaattgaacctgctaatattaactcaccaggtcaaatcgtggtgtctggacataaatctttaattgatgaattagtaaaaaagggcaaagaacttggtgctaaacgcgttcttccattagctgtttccggtccttttcattcttcaatgatgaaagttattgaagaggattttgctaatttcattaatcaatttgaatggcataatgctaattatccagttgttcagaatgttaatgcaaagggagaaaccgatgctgaagtaattaaacgcaatatggttaaacaattatattcacctgttcaatttattcaatcaacgaagtggttgattaatcaaggtgtcgatcactttattgaaattggaccgggaaaagtattatctgggcttatcaaaaaaataaatcgagatgtaaaaatcacttcaattcaaacactcgaagatgtgaaaggatggaataatcatgaataa

SEQ ID NO: 124212 - protein, 308 aa, Staphylococcus epidermidis ATCC 12228
MGKIAVVFPGQGAQKVGMASDLYNEEERSTRVLNLAQETVDFDLLETMFTDNDGKLGETENTQPALLTHSVALLESLNHLKVDYTMGHSLGEYSSLVASGVLSFEDAVRIVRKRGQLMARAFPNGVGGMAAVLGLDYDDVDKICQTLSTKEQLIEPANINSPGQIVVSGHKSLIDELVKKGKELGAKRVLPLAVSGPFHSSMMKVIEEDFANFINQFEWHNANYPVVQNVNAKGETDAEVIKRNMVKQLYSPVQFIQSTKWLINQGVDHFIEIGPGKVLSGLIKKINRDVKITSIQTLEDVKGWNNHE

SEQ ID NO: 124213 - DNA, 960 bp, Bradyrhizobium japonicum USDA 110
  CDS (1)..(960): transl_table=11
atgacggcagcattcacatttccggggcaggggtcccaggcggttggcatgggcaaggcgttggccgacgccttcccggtggcgcgcgccgtgttcgacgaggtcgatgcagcgcttggggagaagctgacggccaccatctgggatggcccggccgaaaccctccagctcaccgaaaacgcccagccggcgctgatggccgtttctgttgcgaccctgcgggtgcttgaggctgaagccggtttttccgtggggcgggacgcggcctttgtcgccggccactcgcttggtgaatattcggggctggccgcggccggcagcctgacggtttccgataccgcgcggctgcttcgcacccgcggtctcgcaatgcaaaaagccgtgccggtcggcgccggtgcgatggccgctctgctgggcctcgattacgaggccgccatggaggtcgccaatgaggcggctcaggggcaggtctgccaggccgccaacgacaatggcggcgggcaggtggtcgtctccggcgacaaggcagcggtcgatcgcgccgtcgagatcgccaagaccaagggcgccaagcgcgcgatgctgctgccggtgtccgcaccgttccattgcaagctgatgcagccggctgccgacgcgatggcggaggcgctggccaaggtcacgatcaaggctccggcagctccgctggtgtcgaacgtgctggcaaccgccatcaccgatcccgacgagatccgccgccgtctggtcgagcaagtcaccggaacggtgcgctggcgcgagtcggttgcctatatggccgggcagggcgttacccgtttcttcgagatcggtgccggcaaggtgctgacgggtctcgtcaagcgtatcgccgacggcgccgtcggtgtcgcggtgggcggaccgaacgacatagcggccgccaaggatgcgctggccgctgcgaagcaggcctga

SEQ ID NO: 124214 - protein, 319 aa, Bradyrhizobium japonicum USDA 110
MTAAFTFPGQGSQAVGMGKALADAFPVARAVFDEVDAALGEKLTATIWDGPAETLQLTENAQPALMAVSVATLRVLEAEAGFSVGRDAAFVAGHSLGEYSGLAAAGSLTVSDTARLLRTRGLAMQKAVPVGAGAMAALLGLDYEAAMEVANEAAQGQVCQAANDNGGGQVVVSGDKAAVDRAVEIAKTKGAKRAMLLPVSAPFHCKLMQPAADAMAEALAKVTIKAPAAPLVSNVLATAITDPDEIRRRLVEQVTGTVRWRESVAYMAGQGVTRFFEIGAGKVLTGLVKRIADGAVGVAVGGPNDIAAAKDALAAAKQA

SEQ ID NO: 124215 - DNA, 954 bp, Xylella fastidiosa Temecula1
  CDS (1)..(954): transl_table=11
atgatgcccgtgacagagtctattttcgctttcgtttttccaggtcagggttctcagtctcttggcatgctttccgagtttgctgtgctctatccggagattctcgatactttcgctgaggcatctgagggagctggtgtggatctttggacgttgtcgcaacgtgggcctgaggagatgttgaaccgtactgagtacactcagccagcgttgttggccgccagtgtggcgctatggcggctttggcaggctcgcggtggccgtgcaccggatctgtttgctggtcacagtttgggggagtacagcgctttggtagcggctggtgcattgtcattgaaggatggtgcttatttggtaaggttgcgcggtcagttaatgcaggatgcggttgctgtgggtgtcggtgcgatggccgcggtcctgggtgctgaggatgctttggtggctgaggtttgtgcgcaggttgcgggaagcgagattgtcgtcccagccaattttaattcgccggtgcaggtggtgattggtggtcatgccacggcggttgatcgtgcgctggtgttgttggcagaacgtggtgtgtctaaaacagtcaagttggcagtgagtgtgccgtcgcatacgccactaatgcgtgatgctgcgcatcgtctcgctgaggcgatgcttgggttggtttggaaggtgccgcagattccggtagtgcagaatgttgatggcagagtgcatgacggtgttgaagcgatccgtgaggctctggtcaagcagctttatctgccagttcagtggacggattgtgtgagagagttggctacgtgtggtgtggtacatatcgctgaatgtggtcctggtaaggtgcttatgggactcattaggcgtatcgataaaacattggatgtgcgttcgttggcgactccaacggggttctctgatgtcttggacgagtgggttttttga

SEQ ID NO: 124216 - protein, 317 aa, Xylella fastidiosa Temecula1
MMPVTESIFAFVFPGQGSQSLGMLSEFAVLYPEILDTFAEASEGAGVDLWTLSQRGPEEMLNRTEYTQPALLAASVALWRLWQARGGRAPDLFAGHSLGEYSALVAAGALSLKDGAYLVRLRGQLMQDAVAVGVGAMAAVLGAEDALVAEVCAQVAGSEIVVPANFNSPVQVVIGGHATAVDRALVLLAERGVSKTVKLAVSVPSHTPLMRDAAHRLAEAMLGLVWKVPQIPVVQNVDGRVHDGVEAIREALVKQLYLPVQWTDCVRELATCGVVHIAECGPGKVLMGLIRRIDKTLDVRSLATPTGFSDVLDEWVF

SEQ ID NO: 124217 - DNA, 924 bp, Vibrio parahaemolyticus RIMD 2210633
  CDS (1)..(924): transl_table=11
atgagcaagtttgctatcgtatttccaggtcaaggttctcaagctgtaggtatgcttgctgatctaggcgaacaatatgacgtagtaaaacaaacatttgcagaagcatctgacgcactaggttacgatctatgggcgcttgttcaaaatggccctgctgaagatctaaaccaaactttccgtactcagcctgcattgcttgcttcttctgtcgctatttggcgcgtatggcaagagcttggtctagaacaaccagcaaacctagcgggtcacagtctcggtgaatactcagcgcttgtgtgcgctggcgtgattgactttaaagaagcaatcaaattggttgaactacgtggcaagctaatgcaagaagcggttcctgcgggtactggcgcaatgtatgcaatcatcggtctagatgatgatgtgattgcaaaggcgtgtgaagaagcagcgcaaggcgatgtcgtttctccagtaaacttcaattctcctggtcaagttgttatcgcaggtagtaaagatgcagtagagcgcgctggcgcactgtgtaaagaagctggcgcgaaacgtgctcttcctctgcctgtgtcagtgccttcacactgcgcgttaatgaaaccagcagcagataaactagcagtagcactagagtctatcgaattcaacacaccacaacttccagttatcaataacgttgatgtggcagctgaaactgaccctgcaaaaatcaaagacgcgcttgttcgtcagctatacagcccagttcgttggactgaaagcgtacagctaatgagtgaacaaggtgtagaaaaccttcttgaacttggcccgggcaaagttctgacaggtctaacaaaacgtatcgtgaaaacactaagtgcagcagcagttaacgatgtggcgtcgttagaagccgctaaataa

SEQ ID NO: 124218 - protein, 307 aa, Vibrio parahaemolyticus RIMD 2210633
MSKFAIVFPGQGSQAVGMLADLGEQYDVVKQTFAEASDALGYDLWALVQNGPAEDLNQTFRTQPALLASSVAIWRVWQELGLEQPANLAGHSLGEYSALVCAGVIDFKEAIKLVELRGKLMQEAVPAGTGAMYAIIGLDDDVIAKACEEAAQGDVVSPVNFNSPGQVVIAGSKDAVERAGALCKEAGAKRALPLPVSVPSHCALMKPAADKLAVALESIEFNTPQLPVINNVDVAAETDPAKIKDALVRQLYSPVRWTESVQLMSEQGVENLLELGPGKVLTGLTKRIVKTLSAAAVNDVASLEAAK

SEQ ID NO: 124219 - DNA, 930 bp, Salmonella enterica subsp. enterica serovar Typhi Ty2
  CDS (1)..(930): transl_table=11
atgacgcaatttgcatttgtgttccccggtcagggttctcagagcgttgggatgttggccgagatggcggcaaattaccctatcgtagaagaaacgtttgctgaagcttctgcggctctgggatatgatctgtgggcgctcacccagcaaggtccagcggaagaactgaataaaacttggcagacgcagccggcgctattaaccgcttccgtcgcgctttggcgcgtttggcagcagcagggcggtaaaatgcctgcgttaatggcaggtcacagcctgggcgaatattccgcgctggtttgcgctggcgtcatcaactttgctgatgccgttcgtctggtggaaatgcgcggtaaattcatgcaggaagcggttccggaaggtactggcggcatgtctgcgatcatcggtctggatgatgcctctattgctaaagcctgtgaagaatctgccgaagggcaggttgtttcgccggttaactttaactcgccgggacaggtggttatcgccgggcataaagaggcggtagaacgcgcgggcgcagcctgtaaagccgctggcgcgaaacgcgcgctgccgctgccggtgagcgtgccgtcgcactgcgcgctgatgaaaccaacggcagataagctggcggttgaattagccaaaattacctttagcgcgccaacggtgccggtagtaaacaacgttgacgtgaaatgtgaaaccgatgccgccgctatccgcgatgcgctggttcgccagttgtacaatccggtacagtggacgaagagcgtggaatttatcgcggcgcagggcgttgaacatctttatgaagtgggtccaggtaaagtcctcactggtctgacgaaacgtattgtcgacaccctgacagcgtcggcgctgaacgagccggcggcgctgtctgcggcacttacgcaataa

SEQ ID NO: 124220 - protein, 309 aa, Salmonella enterica subsp. enterica serovar Typhi Ty2
MTQFAFVFPGQGSQSVGMLAEMAANYPIVEETFAEASAALGYDLWALTQQGPAEELNKTWQTQPALLTASVALWRVWQQQGGKMPALMAGHSLGEYSALVCAGVINFADAVRLVEMRGKFMQEAVPEGTGGMSAIIGLDDASIAKACEESAEGQVVSPVNFNSPGQVVIAGHKEAVERAGAACKAAGAKRALPLPVSVPSHCALMKPTADKLAVELAKITFSAPTVPVVNNVDVKCETDAAAIRDALVRQLYNPVQWTKSVEFIAAQGVEHLYEVGPGKVLTGLTKRIVDTLTASALNEPAALSAALTQ

SEQ ID NO: 124221 - DNA, 930 bp, Enterococcus faecalis V583
  CDS (1)..(930): transl_table=11
atgaaaacagcgattttatttagtggacaaggagcccagtatcaagggatgggtgaagaattatatcaccaagaagcgattgttcgggaaactttcgatgaagcaagtcatatcttaggttatgagatggcagaactttgttttactgaaaatgaacgtttaaatgaaacagaatatacgcaacctgctattttaacagtcagtgtcgcattttaccgtcttttgcaacaaaaaggactaacgcctgatgtcgtagcgggtttaagcttaggggaatacagtgctttggttgccagcggggctttgcgcttttcagaagcagtggccttggtccaaaagcgcggtcagtacatgacagaagcagcaccacaaggaactggcaaaatggttgctgttatgaatgctgagcgtgaagtaattgagaaagcctgccaagaagccagtgctttcggaattgtggctccagcaaattataatacaccacaacaaatcgtgattggtggtgaggttgctgctgttgatcaagcgatgacacttctcaaagaagctggtgtgaagcgaatgattccgttaaatgtgagtggccctttccatacggcgctgttacaaccagcatcaaaaaaattggctcaggatttagcaaaattgaactttcaaacgatgcaaattcctgtcattagtaatacgactgccgaaattatgccccaagaggcaattcaagcgttattggaaaagcaagtcatgtctgcggtacgttttgaagacagtatcgaaacgatgaaggctatgaacgtaggaacgatgattgaagttggtccagggaaaacattaactggttttgttaaaaaaattgacaaaacaattgaaatgcaccgtgtggaagatgttgcaacattaacagaaacgttaacagcgcttactgggaggtaa

SEQ ID NO: 124222 - protein, 309 aa, Enterococcus faecalis V583
MKTAILFSGQGAQYQGMGEELYHQEAIVRETFDEASHILGYEMAELCFTENERLNETEYTQPAILTVSVAFYRLLQQKGLTPDVVAGLSLGEYSALVASGALRFSEAVALVQKRGQYMTEAAPQGTGKMVAVMNAEREVIEKACQEASAFGIVAPANYNTPQQIVIGGEVAAVDQAMTLLKEAGVKRMIPLNVSGPFHTALLQPASKKLAQDLAKLNFQTMQIPVISNTTAEIMPQEAIQALLEKQVMSAVRFEDSIETMKAMNVGTMIEVGPGKTLTGFVKKIDKTIEMHRVEDVATLTETLTALTGR

SEQ ID NO: 124223 - DNA, 942 bp, Coxiella burnetii RSA 493
  CDS (1)..(942): transl_table=11
atgccgcaatcttttgcctttgtctttcctggccaagggtcccagcatttggggatgctggccgagttagggcttcagcaaccgatagtcctcgaaacctttcaacaggcctcttccgcgctggcttatgacctctgggcgttggttcagcatggcccgcaagagaggctagatcaaacccaatttacgcagccggcgttgttaaccgccgatgtcgctattttccgttgttgggaagctctaggggggccaaaaccgcaagtgatggcgggccacagcttaggggaatacgcagcccttgtttgcgcgggggctttgaaatttgaagaggccgtcaaattggtggagaagcggggccagtatatgcaagaagcggtgcctgtcggtgagggggctatgggggctatcatcggtttaaatgaggcggaaatcgaatccatttgcgaaaatgcggcgctagggcaagttgttcagccggccaatttaaattcaacagaccaaaccgtgatatccggtcacagtgaagcggtggatcgtgctcttaatatggcaaagacagaaggcgcaaaaatcgcgaagcgaattccggtcagtgtcccttcccattgccccctcatgcaacccgccgcagaccgtttagcgcaggacattgctaaaatttcgattgattctcctaaagtcccggtgatccataacgtagacgtggttgatcacaatgaggcgaacatcattcgcggcgctttaattaaacaactagtgaggcccgttcgatgggtagaaaccataaagtatattgaagaacaagggatcaaggttttcatggaatgcggtcccgataataaattagccggtttaattaagcgcattgatcgccagagcgagatactgccgctcaccacaacggaattaattttaaccgctataaagcgactaactcactaa

SEQ ID NO: 124224 - protein, 313 aa, Coxiella burnetii RSA 493
MPQSFAFVFPGQGSQHLGMLAELGLQQPIVLETFQQASSALAYDLWALVQHGPQERLDQTQFTQPALLTADVAIFRCWEALGGPKPQVMAGHSLGEYAALVCAGALKFEEAVKLVEKRGQYMQEAVPVGEGAMGAIIGLNEAEIESICENAALGQVVQPANLNSTDQTVISGHSEAVDRALNMAKTEGAKIAKRIPVSVPSHCPLMQPAADRLAQDIAKISIDSPKVPVIHNVDVVDHNEANIIRGALIKQLVRPVRWVETIKYIEEQGIKVFMECGPDNKLAGLIKRIDRQSEILPLTTTELILTAIKRLTH

SEQ ID NO: 124225 - DNA, 927 bp, Chlamydophila caviae GPIC
  CDS (1)..(927): transl_table=11
atgacgaaaaaaataggattcttatttccaggccaaggtagccaatatgttggcatgggtaaagatttagtagaaaattatccagaagctgctgaagtgttttctttggctgatgaaacattgggattttctttgtcttcaatcatgttcgacggtcccgaagaaaaacttcttgaaacagcatacagccaattagctatatatctacatagtttggctgtagtaaaaattctagcttcacggacttctataacacccgctgcagtttctggactaagtttaggggaatatactgctttagttgcttctgggcgtatttctccgatcgatggttttaatatcattagcaaacgtgcgcagtttatgaatcaagcttgccaacaaagtcctggagctatggctgcgattcttggattgactgcagatgttgttgaacaaaatctggaaagtttaggagagggtatttgggttgctaactacaatgctcctaaacaacttgtgattgcaggtttgcgagaaaaaatagaagaagctgtagctttgtttacagatttaggagcaaaacgagcgattttattaaaagtatttggtgcttttcatacgccattgatgcaaacagcagaagatgaactatctccttatttacataatttagatatgaatagttctgaagtgccatttgtatcgaatgtcgtggcagattttttaacaaacaatgatgaaattcgtcagtgtttagtaaaacagatgacttctcctacattatggtatcaaagttgttctaagatagatttagaagttgatgaatttttagaaataggcccaggcaaggttcttgcaggcttgaatcgttccatagggttaaaaaaacccattaaaagtttaggtacagtagaaagcatcaataattttttagcggagctatag

SEQ ID NO: 124226 - protein, 308 aa, Chlamydophila caviae GPIC
MTKKIGFLFPGQGSQYVGMGKDLVENYPEAAEVFSLADETLGFSLSSIMFDGPEEKLLETAYSQLAIYLHSLAVVKILASRTSITPAAVSGLSLGEYTALVASGRISPIDGFNIISKRAQFMNQACQQSPGAMAAILGLTADVVEQNLESLGEGIWVANYNAPKQLVIAGLREKIEEAVALFTDLGAKRAILLKVFGAFHTPLMQTAEDELSPYLHNLDMNSSEVPFVSNVVADFLTNNDEIRQCLVKQMTSPTLWYQSCSKIDLEVDEFLEIGPGKVLAGLNRSIGLKKPIKSLGTVESINNFLAEL

SEQ ID NO: 124227 - DNA, 945 bp, Bacillus cereus ATCC 14579
  CDS (1)..(945): transl_table=11
atgggaaaaatagcatttctttttccgggccaaggttcacaggcagttggaatgggtaaacaattagcagagaataataaagaggttgcaaaagtgtttgcaaaagcagatgaggtgttggaagattcactttcagaagtgatttttgaaggaccgcaggaaaagcttacattaacaacaaatgcgcagcctgcattattaacaacgagttttgctattttgacagctttgaaagagtatgacattacacctgactttgtcgctggtcatagtttaggtgaatatagtgctcttgtagcagctggtgcattaacttttgaagatgctgtatatgctgtaaggaaacgtggcgaatatatggaagaagctgttccgggcggggaaggcgcaatggcagctatattaggtgctgacccacatatgctgaaacaagttacagaagaagtaacaagtgaaggatatgcagtgcaaatcgctaatatgaatagtacgaagcaaattgtgatttctggaacgaagcaaggcgtagaggttgcttctcaaagagcgaaagaaaatggtgcaaagagagcaattccactaaaagtaagtgggccattccattcttcacttatgaagccggcagctgagaagttccaaagtgttttaaatgaaattacaattcatgacacgaatattcctgttattgcaaatgttacggcggaagttattacacgtggtgcagacattcaagaaaagttaatcgaacagctttattcgcctgtattatggtacccgtctattgaatatatggtgaaccagggagtagatacatttattgaaattggacctggaaaagtacttgctggacttatgaagtcaattgattcatcagtaaaagcatatgcgatatacgatgaagagacattaaaagataccatttcaaatttgagaggagaaaactga

SEQ ID NO: 124228 - protein, 314 aa, Bacillus cereus ATCC 14579
MGKIAFLFPGQGSQAVGMGKQLAENNKEVAKVFAKADEVLEDSLSEVIFEGPQEKLTLTTNAQPALLTTSFAILTALKEYDITPDFVAGHSLGEYSALVAAGALTFEDAVYAVRKRGEYMEEAVPGGEGAMAAILGADPHMLKQVTEEVTSEGYAVQIANMNSTKQIVISGTKQGVEVASQRAKENGAKRAIPLKVSGPFHSSLMKPAAEKFQSVLNEITIHDTNIPVIANVTAEVITRGADIQEKLIEQLYSPVLWYPSIEYMVNQGVDTFIEIGPGKVLAGLMKSIDSSVKAYAIYDEETLKDTISNLRGEN

SEQ ID NO: 124229 - DNA, 939 bp, Nitrosomonas europaea ATCC 19718; identical to SEQ ID NO: 59209
  CDS (1)..(939): transl_table=11

SEQ ID NO: 124230 - protein, 312 aa, Nitrosomonas europaea ATCC 19718; identical to SEQ ID NO: 59210

SEQ ID NO: 124231 - DNA, 930 bp, Rhodopirellula baltica SH 1
  CDS (1)..(930): transl_table=11
gtgagtctcgacgcagcgaaaccagcgatcctgtttcccggccaaggtgctcagacgcccggcatgggaacatggttgtgcgcggaataccccatcgccaacgaactgtttgacgaagccgccgatgtcctgggatacgacctgaaatccctttgcgcagatggccccgctgaaaaactgaacgaaaccgttcacagtcaaccagctttgttcgtcgtcggagtcgcggccgctcgggttcacgatgatctgaatccggaacttgcgaaaaagatcgtggccgccgcgggtctcagtttgggtgaatacaccgccgtttgctacgccggcggagtttcctttgccgatggtttgaaactggttcaaaagcgaggcgaagccatgcaggcttgtgccgacgcaacggactcgggcatggcaagcgtgctggggctggacctcgagaaactgacatcggtttgcgaagagtgccgcagcggggacgaaatcctgcaaccggccaaccttctgtgcccaggcaacatcgccgtgtcaggacatcggtcagctctggaacgactcgaacccgcagcttccgctgccggtgcgatgaaggtcgtgccactcagtgtcgccggtgcttttcacactcccatcatggatggcgcagtggaacaactcacacgggctctagaagaggtcgagttgtcggacacgcgaattccggtgtacagcaacgtcgacgcgaaaccacacacctccgctgatgaaattcgccagttgctggcacgccaagtcgtcaatccagtccgctgggacgactccatcaacgcgatgctcggtgacggagtggatggtttcttggaagcaggaaccggtcgcgtgttgcgaggaacgatcaaacggatcgctcgcaaaacacccaccgacggtttcggcgaccagccctga

SEQ ID NO: 124232 - protein, 309 aa, Rhodopirellula baltica SH 1
MSLDAAKPAILFPGQGAQTPGMGTWLCAEYPIANELFDEAADVLGYDLKSLCADGPAEKLNETVHSQPALFVVGVAAARVHDDLNPELAKKIVAAAGLSLGEYTAVCYAGGVSFADGLKLVQKRGEAMQACADATDSGMASVLGLDLEKLTSVCEECRSGDEILQPANLLCPGNIAVSGHRSALERLEPAASAAGAMKVVPLSVAGAFHTPIMDGAVEQLTRALEEVELSDTRIPVYSNVDAKPHTSADEIRQLLARQVVNPVRWDDSINAMLGDGVDGFLEAGTGRVLRGTIKRIARKTPTDGFGDQP

SEQ ID NO: 124233 - DNA, 945 bp, Wigglesworthia glossinidia endosymbiont of Glossina brevipalpis
  CDS (1)..(945): transl_table=11
atgaaacttttttcaatggtatttccaggacaaggatctcaatttgttggaatgttgaaatcactttcagattcctttattatagtcaaagaagtttttgaagaaagttcagaaatattaaaatatgatttatggaaattagcacaagaaggtccattaaatattttaaataaaacagaaataacacaaccagccatattgactgcgtcttttgcaatttggaaagtatggaattctttatctaatataaatcctatattcatggcaggacatagcttaggagagtattctgcgttagtttgtgcaaaaagcttgaatttttctgatgcaataaaaataacatctttacgcggtaaatttatgcaagaatctttaaaaaaagaatgtgctatggctgcaatcataggattgccttgtactataatagataaaatttgtaaaagaatatctatatatgaatttgttgaaatagcaaattttaattctcccatgcaaataataatatcaggatataaaaactcagttataaaagtaattaaaaaatctaaaaaattaggagcgaaatatgcaaaattattatctgtaaatgttcctgctcattcagttttgatgaagcctgcatcaaaaaaactttcttatgctttgaataaaataaaaatttttactcctaaaattaaagttattagcagtttaaatgttaaagttcaaaaaaatcctaaagaaattaaaaaaaatttaataaaacaaatttataaaccagtattatggaataatactataaagtatttaatagaaaaaaaaataaaaatttttttagaggttgggccaggaaatattttatctaaattgcttaaaagtttttcacaaaatacaaatatatatggaatatcaatacaacatcctgaaataattataaaagaatctggaagatataataaattatga

SEQ ID NO: 124234 - protein, 314 aa, Wigglesworthia glossinidia endosymbiont of Glossina brevipalpis
MKLFSMVFPGQGSQFVGMLKSLSDSFIIVKEVFEESSEILKYDLWKLAQEGPLNILNKTEITQPAILTASFAIWKVWNSLSNINPIFMAGHSLGEYSALVCAKSLNFSDAIKITSLRGKFMQESLKKECAMAAIIGLPCTIIDKICKRISIYEFVEIANFNSPMQIIISGYKNSVIKVIKKSKKLGAKYAKLLSVNVPAHSVLMKPASKKLSYALNKIKIFTPKIKVISSLNVKVQKNPKEIKKNLIKQIYKPVLWNNTIKYLIEKKIKIFLEVGPGNILSKLLKSFSQNTNIYGISIQHPEIIIKESGRYNKL

SEQ ID NO: 124235 - DNA, 936 bp, Haemophilus ducreyi 35000HP
  CDS (1)..(936): transl_table=11
atgtcaaattttgcaatggtattcccaggtcaaggttcacaagcggttggtatgttagcagaacttgcaacggaatttcctattgttgaacaagtatttgccgaagccagtgaggttttgggctatgatttatgggcgcttgttcagcatggtacagcagaagaattaagtcaaacacaacgcacacaacctgcattattagccgcatcagttgcaatttatcgtgtttggcaacaaaaataccctgagttgaaacccgctatgatggctggacatagtttaggcgagtattcagctttggtgtgtgctggcgtattgaatttccaagatgccatcaaattagttgaattacgtggtaatgctatgcaacaggcagtgcctgcaggtagcggcgctatgtatgcgattattggtttagagaataatttgattattaatgcttgccaacaagcacagcttgaattgggcgaagtggtttcagcggttaattttaatagtccaggtcaagtggctattgctgggagtaaaactgcggtagaaaaagcggcggaattatgtaaaacagcgggtgcgaaacgggcattaccattagcagtaagtgtgccttcacattgctcactcatgaagcctgctgcagaagagctagccgctgcattgcaaaatatttcattaaatccaccgcgtatacctgttattcataatgtgaatgtcgctgttgaaacagatgtagatgctattcgcgagcggttggttgaacagctttatagtcccgttcgttggagcgaaactattgaaaaaatggctgaacaaggtatagataccctctttgaaatggggccgaataaagtattaaccggtttagctggacggattgctaaacaattaacggcaaaagcaatcaatgatattgcctcattagcggctgtacaggcttaa

SEQ ID NO: 124236 - protein, 311 aa, Haemophilus ducreyi 35000HP
MSNFAMVFPGQGSQAVGMLAELATEFPIVEQVFAEASEVLGYDLWALVQHGTAEELSQTQRTQPALLAASVAIYRVWQQKYPELKPAMMAGHSLGEYSALVCAGVLNFQDAIKLVELRGNAMQQAVPAGSGAMYAIIGLENNLIINACQQAQLELGEVVSAVNFNSPGQVAIAGSKTAVEKAAELCKTAGAKRALPLAVSVPSHCSLMKPAAEELAAALQNISLNPPRIPVIHNVNVAVETDVDAIRERLVEQLYSPVRWSETIEKMAEQGIDTLFEMGPNKVLTGLAGRIAKQLTAKAINDIASLAAVQA

SEQ ID NO: 124237 - DNA, 897 bp, Prochlorococcus marinus subsp. marinus str. CCMP1375; identical to SEQ ID NO: 59213
  CDS (1)..(897): transl_table=11

SEQ ID NO: 124238 - protein, 298 aa, Prochlorococcus marinus subsp. marinus str. CCMP1375; identical to SEQ ID NO: 59214

SEQ ID NO: 124239 - DNA, 966 bp, Candidatus Blochmannia floridanus
  CDS (1)..(966): transl_table=11
atgattgcacataatgatatatttgctgtagtatttcctggtcaagcatcgcaacatataggaatgctatcagatcttgctaattcttatcatgcgataagggacacgttttatgaagcatcagaaattttaaattatgatgtatggaatttggttcagttcgggcctatcagcgaattaaataaaacttattattctcagcctgctattttaacggcttcagtagctatttggaaagtatggatgcaacaaatagggaaattaccaaatgtaatggcagggcatagtttaggagaatattctgccttggtatgttcaggtagtatagattttttatctgcgataaaattggtaacaacaagaagtgttttgatgcaagaaatttctcctgatggatatggagctatgtctattattattggattaagtgatgatgttgttcgtgaattatgtcaaattgtagaatctatagatgatcaaattgttgctcctgctggttttaatacttcagataacatagttatatctggtcataaagcagcagtaaatcatgttaatttactttgtaaaaaggcaggagcgaaatatgttacaacattaccgattagcgtaccatctcattgttctataatgaaaaaaatggttagtagattccagaagattatagaaaatacagttatttcttctcctaaaatacctgtaataaataatgttgatgtatctattgaacaagaacctcaatttattcgtgattcattaatacgacaattatataatccggtgcgttggaacgaaattatgcaagaatttattaataaggatataaaaatagttttagaaatgggtcctggaaaagtattaacaagattaatacagagatctgtatatagtgatagtttatttagtttatcgataaatgatgttgattcattatcaaaagctatacaatgtattattcgtaattaa

SEQ ID NO: 124240 - protein, 321 aa, Candidatus Blochmannia floridanus
MIAHNDIFAVVFPGQASQHIGMLSDLANSYHAIRDTFYEASEILNYDVWNLVQFGPISELNKTYYSQPAILTASVAIWKVWMQQIGKLPNVMAGHSLGEYSALVCSGSIDFLSAIKLVTTRSVLMQEISPDGYGAMSIIIGLSDDVVRELCQIVESIDDQIVAPAGFNTSDNIVISGHKAAVNHVNLLCKKAGAKYVTTLPISVPSHCSIMKKMVSRFQKIIENTVISSPKIPVINNVDVSIEQEPQFIRDSLIRQLYNPVRWNEIMQEFINKDIKIVLEMGPGKVLTRLIQRSVYSDSLFSLSINDVDSLSKAIQCIIRN

SEQ ID NO: 124241 - DNA, 936 bp, Bordetella bronchiseptica RB50
  CDS (1)..(936): transl_table=11
atgaagctggcgtttgtctttcccggtcaaggctcccaatctgtcggcatgctcgatgcatgggccggcaatgccgccgtggccgacgtcgtggcgcgtgccagcgccgcgctgggccaggacctgggcgccctgatggcgcaaggcccggccgagcaactcaatctcaccaccaacacccagccggccatgctgaccgccggtgcggcctgctttgccgcctggcgcgcggcgggcgggcccatgcccgaggtgatggccggccatagcctgggcgaatacgccgcgctgacggccgccggcgcgctggcgctggaagatgccgtgcgcctggtgcgcgtgcgcgccgacgccatgcaggccgcggtgccggtgggcgccggcgccatggcggcggtgctcggcctggacgacgacgccgtgcgtgccgcctgccagcaggctgcccagggcgaagtggtcgaggccgtcaatttcaatgcgccggcacaagtcgtcatcgcgggccacaaggccgcggtcgagcgcgcctgcgaagccgccaaggcggccggcgccaagcgcgcgctgttgctgccggtgtcggcgccgtttcactccagcctgctcaagcccgccgccgaggtgctgcagggcgcgctggccggcgtggcggtgtctgcgccgcaagtgccggtgctcaacaatgtcgacgtcgccacgcctgccgaaccggcggccatccgcgacgcgctggtgcgccaggcatggcatcctgtacgctgggtcgagacgctgcgcgccatgaaggaacttggcgtcacccacgtgatcgaatgcggtccgggcaaggtgctgaccggcctgaccaaacgcatcgatgccgacctgacgggcatcgccatcaccgacccggcctcgctggaagcggcgctggcggctgtaaacgggaactga

SEQ ID NO: 124242 - protein, 311 aa, Bordetella bronchiseptica RB50
MKLAFVFPGQGSQSVGMLDAWAGNAAVADVVARASAALGQDLGALMAQGPAEQLNLTTNTQPAMLTAGAACFAAWRAAGGPMPEVMAGHSLGEYAALTAAGALALEDAVRLVRVRADAMQAAVPVGAGAMAAVLGLDDDAVRAACQQAAQGEVVEAVNFNAPAQVVIAGHKAAVERACEAAKAAGAKRALLLPVSAPFHSSLLKPAAEVLQGALAGVAVSAPQVPVLNNVDVATPAEPAAIRDALVRQAWHPVRWVETLRAMKELGVTHVIECGPGKVLTGLTKRIDADLTGIAITDPASLEAALAAVNGN

SEQ ID NO: 124243 - DNA, 897 bp, Prochlorococcus marinus str. MIT 9313; identical to SEQ ID NO: 59215
  CDS (1)..(897): transl_table=11

SEQ ID NO: 124244 - protein, 298 aa, Prochlorococcus marinus str. MIT 9313; identical to SEQ ID NO: 59216

SEQ ID NO: 124245 - DNA, 930 bp, Chromobacterium violaceum ATCC 12472
  CDS (1)..(930): transl_table=11
atggcttttgcttttctttttccgggacagggctcgcaaagcctgaaaatgatggacggcttcgccgacctgcccgtggtgcagcatacattcgaagaggcgtccgacacgctgtcgctggatctgtgggcgatgctgcgggcggatagcgccgacgcgatcaacgccaccgtgaatacccagcccatcatgctggccgccggctatgccacttacctggcatggcaggagctgaacggcaagcagccgtcggtggtggccggccatagcctgggcgagtacaccgcgctggtggccgccggcgcgctgccgttcgccgaggcggtgaagctggttcgcctgcgcgccgaggcgatgcaggccgcggtgccggccggcgccggcgcgatggccgccattctcaacctgcctgacgacgacatccgcgccgcctgcgcggaggccgcccaaggcgaggtggtggaggccgtcaacttcaattccccgggccaggtggtgatcgccggcaacaagggcgcggtggagcgcgcgatggacctgtgcaaggagaagggcgccaagcgcgcgctgccgctgccggtgtcggtgccttcgcactgctcgctgatgcgcccggccgccgagcgcttggccgaggcgctgcgggacgtgcatctgagcgcgcccgccgttccggtgctgcacaatgccgacgtggccagctacaacgatgccgcgcagatccgcgacgcgctgacccgccagctgttcatgccggtgcgctggaccgaaaccattcagaagctggccgccgaaggcgtgaccctgatggccgagtgcggtccgggcaaggtgctgacgggcctcgccaagcgcatcgacggcaacgtcaagtgcctggcgctgactgaccgcgccgcgctggaagccgcgcgcgaagagctggtctga

SEQ ID NO: 124246 - protein, 309 aa, Chromobacterium violaceum ATCC 12472
MAFAFLFPGQGSQSLKMMDGFADLPVVQHTFEEASDTLSLDLWAMLRADSADAINATVNTQPIMLAAGYATYLAWQELNGKQPSVVAGHSLGEYTALVAAGALPFAEAVKLVRLRAEAMQAAVPAGAGAMAAILNLPDDDIRAACAEAAQGEVVEAVNFNSPGQVVIAGNKGAVERAMDLCKEKGAKRALPLPVSVPSHCSLMRPAAERLAEALRDVHLSAPAVPVLHNADVASYNDAAQIRDALTRQLFMPVRWTETIQKLAAEGVTLMAECGPGKVLTGLAKRIDGNVKCLALTDRAALEAAREELV

SEQ ID NO: 124247 - DNA, 882 bp, Porphyromonas gingivalis W83
  CDS (1)..(882): transl_table=11
atgaaagcatttgtattccccggtcagggagcacagttcgtaggaatgggaaaagacctgtacgaacagaaccccgaggccaaagcatattttgaaaaagccaatgagatattaggctttcgcattacggacatcctcttcaacggcacggcagaggagctgaaacaaaccaaagtgacccagccggcgatcttcctccactcggtgattctggccaagacgatgggcgaagacttccgtcccgatatggtggcaggccattcgctcggagagttttcggcattggttgcagcaggtgccatgaccttcgaagatggtcttcgtctcgtatcgaaacgtgccatggccatgcagaaagcatgcgaagtacgcccctcgactatggcggctgtactgggtctgcctgatgaaaaggtggaagaaatctgtgcccaagtgaccgatgaagttgtcgtaccggccaactacaactgcccgggacagatcgttatatccggttcggtagaaggagtggacagagcttgcgaactgctcaaggaagccggagccaagcgtgctcttaagctcgctgtcggtggagcattccattcccctctgatggaaccggctcgtgaagagctggcaaaagccatcgaggagactacgatcagtcagccgatctgccccatctatcagaacgtaacggcttctgccgtcaccgatccggcagagattaaaaagaacctgatagcacagctgacggcaccggttcgctggacacagagtgtgctgaatatgacagccgatggtgccgaccactttatggagttaggccccggaaatgtattgcagggtttggtgaagaaaattgctcctgaagcgacaacggaaggacgtcagtaa

SEQ ID NO: 124248 - protein, 293 aa, Porphyromonas gingivalis W83
MKAFVFPGQGAQFVGMGKDLYEQNPEAKAYFEKANEILGFRITDILFNGTAEELKQTKVTQPAIFLHSVILAKTMGEDFRPDMVAGHSLGEFSALVAAGAMTFEDGLRLVSKRAMAMQKACEVRPSTMAAVLGLPDEKVEEICAQVTDEVVVPANYNCPGQIVISGSVEGVDRACELLKEAGAKRALKLAVGGAFHSPLMEPAREELAKAIEETTISQPICPIYQNVTASAVTDPAEIKKNLIAQLTAPVRWTQSVLNMTADGADHFMELGPGNVLQGLVKKIAPEATTEGRQ

SEQ ID NO: 124249 - DNA, 888 bp, Gloeobacter violaceus PCC 7421; identical to SEQ ID NO: 59219
  CDS (1)..(888): transl_table=11

SEQ ID NO: 124250 - protein, 295 aa, Gloeobacter violaceus PCC 7421; identical to SEQ ID NO: 59220

SEQ ID NO: 124251 - DNA, 933 bp, Photorhabdus luminescens subsp. laumondii TTO1; identical to SEQ ID NO: 59221
  CDS (1)..(933): transl_table=11

SEQ ID NO: 124252 - protein, 310 aa, Photorhabdus luminescens subsp. laumondii TTO1; identical to SEQ ID NO: 59222

SEQ ID NO: 124253 - DNA, 924 bp, Vibrio vulnificus YJ016; identical to SEQ ID NO: 59223
  CDS (1)..(924): transl_table=11

SEQ ID NO: 124254 - protein, 307 aa, Vibrio vulnificus YJ016; identical to SEQ ID NO: 59224

SEQ ID NO: 124255 - DNA, 960 bp, Rhodopseudomonas palustris CGA009
  CDS (1)..(960): transl_table=11
atgaccgcagcattcacctttccggggcaggggtcccaggccgtgggtatgggcaaggcgctcgccgaagcctttccggcggcacgggcggtgttcgacgaagtcgacgctgcgctcggcgaaaagctgacctcgatcatttgggaaggccccgctgaaacgctgcagctcaccgagaatgcgcagccggcgctgatggcggtgtcgctggcgacgatgcgcgtgctggagaccgaagccggcgtgtcggtcggcaaagatgccgccttcgtggccggtcattcgctcggcgaatattccgcgctggccgctgcgggcagcctgagcgtgagcgacacggcgcggctgctgcggatccgtggtcaggcgatgcagaaggcggtgccggtcggcgtcggggcgatggccgcgctgctcgggctcgattacgacaccgcggtcgcggtggcggccgaagccgcgcagggccaggtctgccaggccgccaatgataatggcggcggtcaggtcgtcgtctccggtcataaggacgcggtggagcgcgcggtcgagatcgccaagggcaagggtgccaagcgcgcgatgctgctgccggtgtccgctcccttccattgttctctgatgcagccggcggccgaagcaatggccgaggcgcttgcgggcgtgaccatcaaggcgccggccgcgccgttggtcgccaacgtcctggcctcgccgatcaccgatccgcatgaaatccgccgccgtctggtcgagcaggtcaccgggaccgtgcgctggcgcgagtcggtcgccttcatggcgtcgcagggcgtgaatcagtttctggagatcggcgccggcaaggtgctgagcggcttggtgaagcgcatcgctgatggcgcgattggtatttccgtaggtggccccaacgacatcgtgtcggcgaaagacgcgctggcggccggacgctcggcttaa

SEQ ID NO: 124256 - protein, 319 aa, Rhodopseudomonas palustris CGA009
MTAAFTFPGQGSQAVGMGKALAEAFPAARAVFDEVDAALGEKLTSIIWEGPAETLQLTENAQPALMAVSLATMRVLETEAGVSVGKDAAFVAGHSLGEYSALAAAGSLSVSDTARLLRIRGQAMQKAVPVGVGAMAALLGLDYDTAVAVAAEAAQGQVCQAANDNGGGQVVVSGHKDAVERAVEIAKGKGAKRAMLLPVSAPFHCSLMQPAAEAMAEALAGVTIKAPAAPLVANVLASPITDPHEIRRRLVEQVTGTVRWRESVAFMASQGVNQFLEIGAGKVLSGLVKRIADGAIGISVGGPNDIVSAKDALAAGRSA

SEQ ID NO: 124257 - DNA, 924 bp, Geobacter sulfurreducens PCA
  CDS (1)..(924): transl_table=11
atgagcaagcgagctttcatattccccggccaagggtcccagtatgccggaatgggcaaggatctggccgatacctttccggttgcccgtcaggtcttcgaggaagctgatgatgccctcggcagctccctttcccgactctgctttgaaggtcccgaagagcagttgaagctcaccgccaatactcagcccgccatcctgaccacaagtgttgccgcattcagggtgcttcaggctgaaacgggactcaccgcagacttcctggcaggacactctctcggcgagtactcggcgcttgtggctgccggagcacttggctttgcggatgctgtccggacggttcgagcccgcggcaccttcatgcaggaggctgtgccggttggagagggggcaatggccgcgatgctcggaatcgaaccggctgtccttgccgaaatatgcgccgaagcggcccagggtgaggtcgtttctcccgcaaacttcaattcgcccggccagatcgtcattgccggaaacaccggtgcggtcaaccgtgccatcgagattgccaaggcaaaggggttccgcaaggcgatgctcctgccggtgagcgctcccttccattcgagcctcatggtgcctgccggtgaacggcttgccgaggttctggcagcggttgcggtcggcgatctggtcgctcccgtggtgaccaacgtggaggcaacgcccaactccgacaagggaagggtaaaagaactcctggtcagacaggtaagcgctccggtgctctgggatgcctcggtgagggaaatggtttcgctcggcgtcacccggtttgtggagatcgggccgggcaaagttctgtcggggctggtcaagcggatcgagaaggaagcgggtaccgccaacgtcgaggatacggccggtatcaggggcctcgcctaa

SEQ ID NO: 124258 - protein, 307 aa, Geobacter sulfurreducens PCA
MSKRAFIFPGQGSQYAGMGKDLADTFPVARQVFEEADDALGSSLSRLCFEGPEEQLKLTANTQPAILTTSVAAFRVLQAETGLTADFLAGHSLGEYSALVAAGALGFADAVRTVRARGTFMQEAVPVGEGAMAAMLGIEPAVLAEICAEAAQGEVVSPANFNSPGQIVIAGNTGAVNRAIEIAKAKGFRKAMLLPVSAPFHSSLMVPAGERLAEVLAAVAVGDLVAPVVTNVEATPNSDKGRVKELLVRQVSAPVLWDASVREMVSLGVTRFVEIGPGKVLSGLVKRIEKEAGTANVEDTAGIRGLA

SEQ ID NO: 124259 - DNA, 975 bp, Bdellovibrio bacteriovorus HD100
  CDS (1)..(975): transl_table=11
atgtttacacttgtattcccaggacaaggcagccagcaacctggcatgggccgctttttgtttgaaaacttcaagatcgctcaagaaactttcgaagaaggttctgaagctttgaaacaagacatgaaaaaactgtgcttcgagggctctgaagccgacttggctttgaccgagaacacacagccggcactgctgctggtttccacagccactcaacgtgtgctgacgaaagagttcggcgtaaaagcctctgtggcggccggtcactctatcggtgaatacgcggcccttgttgcagccggtgtgactcgttttgacgaatccatgcgtgctgtgaaaacccgtggtcaggcgatgcagtctgcagttcctgtgggtcaaggcggaatggtcgctgtcttgggccttgagcctgatcaggtcgagacactgtgtaactacgttgtgaaaaactccggcgtgggccctctgtcagctgccaacttcaattctccaggacaaatcgttatctctggttctcaaaaagccatcaactggctgaaggacaatttcaagccagaagcgatttttgcggaagcgccaaaacgcgcaaagctcatcccactgacggtttcagcgcctttccattgtgaaatgatgaagccggccgaagacaagatgagagaagtcctgaccgcgatgaaatttgaaacggcggccttcccgatcattcaaaacttccacgccaaagctgaaaccgatggttccatcttgcgtgaaaatctgattcgtcaggtgtcagcccctgtgcgctggactcagagcatggaagttcttaaaggcatgggtcactctcaagttatcgagtgtggcgctggtaaagtccttcaaggtctgcttaaaaaaattgatggagatttcttcaaagtcatgaccacaacttccatcgaagatgtgaaaattattgaagaatttctgaaagctacgagtcattaa

SEQ ID NO: 124260 - protein, 324 aa, Bdellovibrio bacteriovorus HD100
MFTLVFPGQGSQQPGMGRFLFENFKIAQETFEEGSEALKQDMKKLCFEGSEADLALTENTQPALLLVSTATQRVLTKEFGVKASVAAGHSIGEYAALVAAGVTRFDESMRAVKTRGQAMQSAVPVGQGGMVAVLGLEPDQVETLCNYVVKNSGVGPLSAANFNSPGQIVISGSQKAINWLKDNFKPEAIFAEAPKRAKLIPLTVSAPFHCEMMKPAEDKMREVLTAMKFETAAFPIIQNFHAKAETDGSILRENLIRQVSAPVRWTQSMEVLKGMGHSQVIECGAGKVLQGLLKKIDGDFFKVMTTTSIEDVKIIEEFLKATSH

SEQ ID NO: 124261 - DNA, 945 bp, Bacillus cereus ATCC 10987
  CDS (1)..(945): transl_table=11
atgggaaaactagcatttctttttccgggccaaggttcacaggcagttggaatgggtaaacagttagcagagaataataaagaggttgcaaatgtatttgcaaaagcagatgaggtgttgcaagactcactttcagaagtgatttttgaagggccgcaggaaaagcttacgttaacaacaaatgcgcaacctgctttattaacgacgagttttgctattttgacagctttaaaagagtatgatattacaccagactttgtcgcagggcatagtttaggtgagtatagcgctcttgtagcagcgggtgcattaacttttgaggatgcagtatatgctgtaaggaaacgtggggaatatatggaagaagctgttcctggcggagaaggtgcaatggcggctattttaggtgctgatccacatatgctgaaacaagttacagaagaagtaacaagtgaaggacatgcagtacaaattgctaatatgaatagtacgaagcaaattgtgatttctggaacaaagcaaggagtcgagattgcttctcaaagagcgaaagaaaatggtgcaaagagagcaattccgcttaaagtaagtggaccgtttcactctgcgcttatgaagccagcggcggagaaattccaaagtgtcttaaatgaaattacaattcaagatacgaatattccggtaatcgcaaatgtaacagcagacgttattacaagtggtgcacatattcaagaaaagttaatcgagcagctctattcgcctgtcttatggtatccatccattgaatatatggtgagtcaaggggtagatacatttattgagattggacctgggaaagtacttgctggacttatgaagtcaattgattcatcagtgaaagcatacgcgatatacgatgaagagacattacaagataccatttcgaatttgagaggagaaagttga

SEQ ID NO: 124262 - protein, 314 aa, Bacillus cereus ATCC 10987
MGKLAFLFPGQGSQAVGMGKQLAENNKEVANVFAKADEVLQDSLSEVIFEGPQEKLTLTTNAQPALLTTSFAILTALKEYDITPDFVAGHSLGEYSALVAAGALTFEDAVYAVRKRGEYMEEAVPGGEGAMAAILGADPHMLKQVTEEVTSEGHAVQIANMNSTKQIVISGTKQGVEIASQRAKENGAKRAIPLKVSGPFHSALMKPAAEKFQSVLNEITIQDTNIPVIANVTADVITSGAHIQEKLIEQLYSPVLWYPSIEYMVSQGVDTFIEIGPGKVLAGLMKSIDSSVKAYAIYDEETLQDTISNLRGES

SEQ ID NO: 124263 - DNA, 1245 bp, Apis mellifera
  CDS (1)..(1245)
atgtttcagcaattattatttaaaaaaatattttcttatggaccaaaatattattggttaaatcgaataaatcagatttcaaatgattcaataaaagatgggaataataaagatgggaattgtgaaccaaaaacaaatgtatttgaaaaagttcccttgcaaaattcatataacaaacaagaagtgttgcatttacttgaagaagctgcaacatttgaagatgctaaagataaaaattggatgacaactccatatcctaaggatatttcaataaaaaaagaaacagaaccaagtattaatccaaaaactacttctattttattatttcctggtcaaggaactatcaaagttggtatgattaaaaaatacttgcgttattctggtactaaggaactttttgaaatagctaatgaaataatcaattataatttattgaaactttgtttggatggtgcacaagagaaattaaatagaactgaatttaatcaagctgctacagtagtatcatctttagccgcactagaaaaaattaaagaagaaaaacctcatgtatttgaaagttgtgttgctacagctggatatagtgtaggagagataactgctttaattctctctggtatactaacttttgaagatggaatacgattagcatggactagaggaaaagctatgcaatatgctgcagataaagtacctcaaggaatgttatccattatttgtacaccaaaaacaaaactttcacaagtttgtcaagaagcaaagaactgggcaatgaacattggtattgaaaaaccaatatgcagaattgctatttttttatgtacagaaagaaaaataatagcaggaaatatagaagcattagaatatattgaaaaaaataaaacagaatttaatttagaaaatgtatctagattacctgtatctggagcttttcatacaccattgatggaacctgctctaaaatcagtttctgaaatgttaaaatccataacaataaatgaacctagatgtaaagtatattccaattataaaggttatccatatagtaatttacgatatgtgaaaaaatatatattgaaacaaattgtctcaccagttaaatgggaacaatgtttgcaaaatatatataacagacctaagggaacatcatttccagaaacatatgatataggatcagaaggaagaatgagaactattttaaaattaattaatgcaaaagcaagtagatcatgtacagtaatttaa

SEQ ID NO: 124264 - protein, 414 aa, Apis mellifera
MFQQLLFKKIFSYGPKYYWLNRINQISNDSIKDGNNKDGNCEPKTNVFEKVPLQNSYNKQEVLHLLEEAATFEDAKDKNWMTTPYPKDISIKKETEPSINPKTTSILLFPGQGTIKVGMIKKYLRYSGTKELFEIANEIINYNLLKLCLDGAQEKLNRTEFNQAATVVSSLAALEKIKEEKPHVFESCVATAGYSVGEITALILSGILTFEDGIRLAWTRGKAMQYAADKVPQGMLSIICTPKTKLSQVCQEAKNWAMNIGIEKPICRIAIFLCTERKIIAGNIEALEYIEKNKTEFNLENVSRLPVSGAFHTPLMEPALKSVSEMLKSITINEPRCKVYSNYKGYPYSNLRYVKKYILKQIVSPVKWEQCLQNIYNRPKGTSFPETYDIGSEGRMRTILKLINAKASRSCTVI

SEQ ID NO: 124265 - DNA, 1017 bp, Debaryomyces hansenii CBS767
  CDS (1)..(1017)
atgtttaaatcagcagctcaatgtcaaaggaccttatgggtggggccaagatggttatcatcaactaacaaggcatgtgtatatgcaattacatgccctggacaagggattatcaaggatgggttattagttccgtatgcgaaattccagcatcatttccaagacagtcttgagatcatcgatgaaagtttgaacgaaaaatttagtgataaattgttgaatagccaagtaggattcggaaaggaatggctcatacacacctctaatgcacagccagcgatattggcaacaacctacataatatgtgagataatacgcaaggaatacggtattgatttaccccagaatgataaggtgaagtttttgttaggccattcgctaggtgaatatacagctctcttgcttgcgggagtgttggacttgaccggagcaataaggctagtacgagaaagaggacggttaatggaagagttggttaccaacaacgattattcgatggttgcgttgatgttcaagcccagtttttttaccgaaattctcttgatgagtcaggaggcggaagtgctcgcaaacgtcaactcgtaccagcaaatagttttgtcgggcaagtcgtcaaaaattgataagactatagctgagataaatagtgaatcaaagaaaatattgaagacagtcaaattgccggtcaagatcccgtttcataatacgattttgcatgaaatagagcctaaattattacaattagctacacctctacaaaagcctacaaaacctatagttgcaaacttgcaaggtgaggtatcacctgatccatttacatgcacgataagggccaattcgaaacctgttcaatggacaaagtcaatggaatacctagtaacaaacaatgtaaccgatgttataaatttaggtcctggggatgttttgcagggactcaattcgaaattcaaggttagaaactatagtgttgattctgtggaatctatgaatgagttacggaatttatttagtgcataa

SEQ ID NO: 124266 - protein, 338 aa, Debaryomyces hansenii CBS767
MFKSAAQCQRTLWVGPRWLSSTNKACVYAITCPGQGIIKDGLLVPYAKFQHHFQDSLEIIDESLNEKFSDKLLNSQVGFGKEWLIHTSNAQPAILATTYIICEIIRKEYGIDLPQNDKVKFLLGHSLGEYTALLLAGVLDLTGAIRLVRERGRLMEELVTNNDYSMVALMFKPSFFTEILLMSQEAEVLANVNSYQQIVLSGKSSKIDKTIAEINSESKKILKTVKLPVKIPFHNTILHEIEPKLLQLATPLQKPTKPIVANLQGEVSPDPFTCTIRANSKPVQWTKSMEYLVTNNVTDVINLGPGDVLQGLNSKFKVRNYSVDSVESMNELRNLFSA

SEQ ID NO: 124267 - DNA, 921 bp, Yarrowia lipolytica CLIB122
  CDS (1)..(921)
atgtctttgcgagcagcattcttccccggacagggactgcagagaccccgaatgctgcagaaactgtggcaacaatcggccataagagaaacgctcaaaccggcactggatcagctgaagaccgaggtccaggaggtgctactgggcaacagcagtctgggcgaagacgaacaaatgaagctgattacacagacacaaaacgcccagccggggatccttctctcgtcttacgccagcttcctagccaatcagggcgccagcaaaaactactcccatctgctgggccactccctcggagagtactcggctctggtgtgtggaggctacctgactctcgagcagggagtgcaattggtccagaagcggggctactacatgcaacgagccaacgacgagagtggcaaggaaacagccatggtagcattgttgttgcatcgcacggttgacatcaaccggttggtccaagcctgcgagggctggaacggagccaatgtggccaatatcaacagcagcggccaggtggttctcagtggcgaacggtccgccatcaacgagctagttgcgcatctcaaagcctccaaactgcgggttctgaaggcaatccccctgaacgtttcagcgccgttccattccgccatcatggctccggtggtgtccgagctcgatgcggtttgtcagcagctcaagatccgtcccgatttcagcgctgacaagccgcaggtggtatccaacgcctcgggcaagccgttcggctctgccgacgagatgtacgagtccatgatcgggtctccagtgcatacagtcaattggctggctagtgtggaatacctaaaacacgtcggagtggtagaatcggacggctacggtcctggatgtgtcgacattggcaagatggtgctgccaggagagagatatgactaa

SEQ ID NO: 124268 - protein, 306 aa, Yarrowia lipolytica CLIB122
MSLRAAFFPGQGLQRPRMLQKLWQQSAIRETLKPALDQLKTEVQEVLLGNSSLGEDEQMKLITQTQNAQPGILLSSYASFLANQGASKNYSHLLGHSLGEYSALVCGGYLTLEQGVQLVQKRGYYMQRANDESGKETAMVALLLHRTVDINRLVQACEGWNGANVANINSSGQVVLSGERSAINELVAHLKASKLRVLKAIPLNVSAPFHSAIMAPVVSELDAVCQQLKIRPDFSADKPQVVSNASGKPFGSADEMYESMIGSPVHTVNWLASVEYLKHVGVVESDGYGPGCVDIGKMVLPGERYD

SEQ ID NO: 124269 - DNA, 1026 bp, Candida albicans SC5314; identical to SEQ ID NO: 59227
  CDS (1)..(1026): transl_table=12

SEQ ID NO: 124270 - protein, 341 aa, Candida albicans SC5314; identical to SEQ ID NO: 59228

SEQ ID NO: 124271 - DNA, 1251 bp, Strongylocentrotus purpuratus; identical to SEQ ID NO: 59229
  CDS (1)..(1251)

SEQ ID NO: 124272 - protein, 416 aa, Strongylocentrotus purpuratus; identical to SEQ ID NO: 59230

SEQ ID NO: 124273 - DNA, 1221 bp, Tribolium castaneum; identical to SEQ ID NO: 59231
  CDS (1)..(1221)

SEQ ID NO: 124274 - protein, 406 aa, Tribolium castaneum; identical to SEQ ID NO: 59232

SEQ ID NO: 124275 - DNA, 897 bp, Prochlorococcus marinus str. NATL1A
  CDS (1)..(897): transl_table=11
atgactattgcctgggtctttcctggacaaggctctcaaaaattaggaatggcaaattcgttactagatttgcctggttcgagagatagatttgaattggcatctcaaattcttcgaagagatctttggaaaatctgttgtggcgaagggcttccaaacgaagaaatatatgatttaaatgatacgagaaatactcaacctgcactttttgttgttgagtcactattggttgatgatttaaaaagacaagaaagggagaccaaaataattgcaggacacagtctaggagagatagttggtctttattcagcagatgttttagatgcgaagacggcgttattgctattaaagaaaagatctgaattgatggcagctgcaggaggaggagcaatgattgctgttttgggctttgatcgaaatgaattagacgatttgattagagaaactgagggggctgcaatagctaacgacaatagtgaatctcaagttgttttatctggttctccagaagcagtgaggaaagtggctgataatttaaaatgtaaaagagcaattcctttacaagtttcaggtgcttttcactccaaatttatgactgaagcatctcaaagttttgctgaagaacttgatcaggtaacttttcaagatgctcaaattccagttcttagcaatgttgatcctactccagctgtaaatggtgacatattgaaggatcgccttaagaaacaaatgactacgggagttaggtggcgcgagactatgcataaaatgcaaaatgaaggaataactacaatggtcgagattggacctgggaatgtgcttagtggtcttgctaaacgatcaatgaaaggtgtactgacaagtcaaatatcaaattcaagtgatttgggttattga

SEQ ID NO: 124276 - protein, 298 aa, Prochlorococcus marinus str. NATL1A
MTIAWVFPGQGSQKLGMANSLLDLPGSRDRFELASQILRRDLWKICCGEGLPNEEIYDLNDTRNTQPALFVVESLLVDDLKRQERETKIIAGHSLGEIVGLYSADVLDAKTALLLLKKRSELMAAAGGGAMIAVLGFDRNELDDLIRETEGAAIANDNSESQVVLSGSPEAVRKVADNLKCKRAIPLQVSGAFHSKFMTEASQSFAEELDQVTFQDAQIPVLSNVDPTPAVNGDILKDRLKKQMTTGVRWRETMHKMQNEGITTMVEIGPGNVLSGLAKRSMKGVLTSQISNSSDLGY

SEQ ID NO: 124277 - DNA, 897 bp, Prochlorococcus marinus str. MIT 9303
  CDS (1)..(897): transl_table=11
atgtcgattgcttgggtgttccctggtcagggctcacaaaagctgggcatggctgaaccgatcatcagcttgcccggtgccgaagagcgctttgccctcgcctctcaactaatgggacgtgatctccttgcgatttgccgtggtagcgaccaaaccaatcatgacccggccgacctcaatgacacccgcaatacccaaccggcactttttgtcgttgaatcattactggtggatgaactgcgcaggcagggtcgtgaggcatcgctaatcgcagggcacagcctgggtgaacttgtagccctctacgcggctgaggtttttgacgtaaacaccgccctgctgctgctgcgacgccgctcagaactgatggcctcagccggtggtggggccatgacagccatattgggctttgaccgcacacagctagaagctctggtggcagacacagaaggagtcgtgatcgccaatgacaacagtgctgcccaggtggtgttatccggcaccccagaggctgttagcaaggtcagcagccagctgacctgcaagcgagcgattccgttgccagtctcgggagccttccattcgccttgcatggccacagcggccacagaatttgcagctgaactggatcaagtgactttcaaagacgcccgtgtccccgttctctgcaatgccgatccaatcccaacctgcgatgccaacttgctgaagcaacggctaaaagatcaaatgacaacaggcgtccgttggcgcgaaacgatggataccatggccagccaaggggtcaacacagtggtcgaaatcggccctggcaatgtgctgagtggtctcgtcaagcgttctcttccaggagttgcgaccatccagctgagctctgctgcagacctggggaattga

SEQ ID NO: 124278 - protein, 298 aa, Prochlorococcus marinus str. MIT 9303
MSIAWVFPGQGSQKLGMAEPIISLPGAEERFALASQLMGRDLLAICRGSDQTNHDPADLNDTRNTQPALFVVESLLVDELRRQGREASLIAGHSLGELVALYAAEVFDVNTALLLLRRRSELMASAGGGAMTAILGFDRTQLEALVADTEGVVIANDNSAAQVVLSGTPEAVSKVSSQLTCKRAIPLPVSGAFHSPCMATAATEFAAELDQVTFKDARVPVLCNADPIPTCDANLLKQRLKDQMTTGVRWRETMDTMASQGVNTVVEIGPGNVLSGLVKRSLPGVATIQLSSAADLGN

SEQ ID NO: 124279 - DNA, 954 bp, Desulfovibrio vulgaris subsp. vulgaris str. Hildenborough
  CDS (1)..(954): transl_table=11
atgtaccacgataccaccacggcagtcctctttcccgggcaaggttcgcaagaaccgggcatggggcgcgacctcgccgaagcctcggcagaggccatggccctctggaaaaaggccgagaacatcagcggccttccgctgcgcgagatatactgggatggcgatgatgcggccatggccgacacgcgcaacctgcaacctgcgctgaccgtcgtcaatctcgccctgtggcagcatgtggcagggcggctgcgccccgcctgcatggccgggcacagcctcggggaatacagtgcgctggcggctgcgggtgccatcgcggcagatgccgccatcgaactcgtctctttgcgcggcaggctcatggccgaggccgacccgtccggcgagggcggcatggcggccgtactcaagctttcgctggccgacgtcgaagacgtggtgcgcgaagcccgcgaggccaccggagcatgtctcatcgtggccaactacaacactcctgcacaattcgtcgtgagcggggccaagtcggctgtgaccgacgcggccgcacgcgtcaaggaacgcaagggtcgtgctgtgcccctcgctgtgagcggcgccttccacagccctctcatggacgaggcggcccgcgaactggccagggccctcgcccgcgtgacgtggaaccgcccgcgctacgccgtctactgcaatgtcaccgccacggcacagaccgacggcgcctctctcgccgacatcatgccccgtcagatgacctcgtcggtgcgctggatagagaccatatcctcgcagtggaccgatggcatccgctcatgggtcgaagtcggccccaagggtgtgctgaccaagatggtcaagcccatcctctctacctgcggagtcaccgacgacgcctacatggtggcgggcatcgccaatctcgaacaggctcagacattctttgcatga

SEQ ID NO: 124280 - protein, 317 aa, Desulfovibrio vulgaris subsp. vulgaris str. Hildenborough
MYHDTTTAVLFPGQGSQEPGMGRDLAEASAEAMALWKKAENISGLPLREIYWDGDDAAMADTRNLQPALTVVNLALWQHVAGRLRPACMAGHSLGEYSALAAAGAIAADAAIELVSLRGRLMAEADPSGEGGMAAVLKLSLADVEDVVREAREATGACLIVANYNTPAQFVVSGAKSAVTDAAARVKERKGRAVPLAVSGAFHSPLMDEAARELARALARVTWNRPRYAVYCNVTATAQTDGASLADIMPRQMTSSVRWIETISSQWTDGIRSWVEVGPKGVLTKMVKPILSTCGVTDDAYMVAGIANLEQAQTFFA

SEQ ID NO: 124281 - DNA, 942 bp, Listeria monocytogenes str. 4b F2365
  CDS (1)..(942): transl_table=11
atgactaaaattgcatttgtatttcccggtcaaggagcacaaaaaattggcatgggacaagatgtagcagcagaatatcctgaagcaaaaaaaatctatgatgatgctgacgaaagactcgggttttcaatcacagaaattattacagaaggtccaattgaattattaacgaaatccgaaaacgcacaaccagctttagtttccacaagtgttgctattttacgcgctttagaaacatatggtgtgaaagctgattacgtagcgggacatagccttggtgaatatagtgcgcttgttgctggcggatttttagaagcaagtgatgcgatttaccttgtacgtaagcgcggtgaattaatggaagcagctgtaccaaatggtgctggcgcaatggctgcagttcttggtgtagaccgggaaacattaaaaacaatcaccgaagaagtaactaaagaaggcgatgcagtacaacttgctaaccttaactgcccaggacaaatcgttatttctggaacaacagctggcgttgaaaaagcaggcggaaaagcaaaagaaagtggcgcaaaacgcgtattaccacttgctgttagcggacctttccactctagcttaatggaaccagccgcacttgctttccgtgatgttttagcagaggttaaaatttctgatggtcagattccagtggttaataacgtggacgctaaagaaactacggataaatccgaaattagcgataaactaatcaagcaaatctattctccagtattatgggaagatatcgtcgaagaattaattaaaaacggcgtagatacgtttgtcgaaattggttctggaaaagtcttagtaggcttaattaaaaaaattaatcgtgatgtaactgtactgtcagcaggtgacgctgaatcagtgaaaagcgttgcagcgacattgaaaggagaataa

SEQ ID NO: 124282 - protein, 313 aa, Listeria monocytogenes str. 4b F2365
MTKIAFVFPGQGAQKIGMGQDVAAEYPEAKKIYDDADERLGFSITEIITEGPIELLTKSENAQPALVSTSVAILRALETYGVKADYVAGHSLGEYSALVAGGFLEASDAIYLVRKRGELMEAAVPNGAGAMAAVLGVDRETLKTITEEVTKEGDAVQLANLNCPGQIVISGTTAGVEKAGGKAKESGAKRVLPLAVSGPFHSSLMEPAALAFRDVLAEVKISDGQIPVVNNVDAKETTDKSEISDKLIKQIYSPVLWEDIVEELIKNGVDTFVEIGSGKVLVGLIKKINRDVTVLSAGDAESVKSVAATLKGE

SEQ ID NO: 124283 - DNA, 945 bp, Bartonella quintana str. Toulouse
  CDS (1)..(945): transl_table=11
atggtggcagcttttacttttccagggcaggggagtcagcttattggtatgggcaaagcgcttacagagcaatttgttgcagcgcggatggtttttgaggaggtggacgatgctttaggtgagaaattatcagatatcatttttgaagggccagcagatgttttaacgttaacagcaaatgcgcaacccgcattgatggctgtgtccatagcagttattcgtgtgatggaacaattagggcttaatatagaaacaaaggtaaaatttgttgcaggccattctttaggcgaatattcagctctttgtgctgttggtacatttagtcttactgatacggcaagacttttgcgaattcgtggaaatgccatgcaggctgcggttgctattggtgaaggctctatggcagcacttattggtttggatgagaaagatgtggaaaagatttgccaaactgtttctggggaaggaatctgccaaattgctaatgataatggtggtggacaaattgtgatttcaggtaaaacaaaagcggttgaaaaagcgatagaggttgcgtcaaaaaaaggtgctaaacgtgcacttcttcttccagtttctgcgccttttcattcagacttaatgcaacctgctgctgttgccatgaagaatgcacttttgactgttaacaaaaccgctccaattgttcctctcgttgccaatgtttctgttacaccagagagtgatccagagcgtattgttgcgcttcttgtccatcaagtgaccgggagagtgcgatggcgtgagacgatagagtggattggtgctaatggggttgatacgctttttgaagttggttctgggaaggtattaaccggtttagcgcgtcgtattaataaagatataaagggattaacagttgggacagcagaggaaatagaagcagcactaaaggtgcttggtgtttaa

SEQ ID NO: 124284 - protein, 314 aa, Bartonella quintana str. Toulouse
MVAAFTFPGQGSQLIGMGKALTEQFVAARMVFEEVDDALGEKLSDIIFEGPADVLTLTANAQPALMAVSIAVIRVMEQLGLNIETKVKFVAGHSLGEYSALCAVGTFSLTDTARLLRIRGNAMQAAVAIGEGSMAALIGLDEKDVEKICQTVSGEGICQIANDNGGGQIVISGKTKAVEKAIEVASKKGAKRALLLPVSAPFHSDLMQPAAVAMKNALLTVNKTAPIVPLVANVSVTPESDPERIVALLVHQVTGRVRWRETIEWIGANGVDTLFEVGSGKVLTGLARRINKDIKGLTVGTAEEIEAALKVLGV

SEQ ID NO: 124285 - DNA, 945 bp, Bartonella henselae str. Houston-1
  CDS (1)..(945): transl_table=11
atgggtgcagcttttacttttccagggcaggggagtcagcttattggtatgggaaaagttcttacagagcaatttgttgcagcgcgaatggtttttgaggaagtggatgatgctttaagtgaaaaattatcagatatcatttttgaagggccagcagatgttttaacgttaacagcaaatgcgcaaccagctttaatggctgtatccatggcagttattcgtgtgatggaacaattggggcttaatgtagaaaaaaaggtaaaatttgttgcaggccattctttaggggaatattcggctctttgtgctgccggtacatttagtcttactgatacggcaaggctcttgcggattcgtggaaacgctatgcaggctgctgttgctgttggtgaaggatctatggcagcacttattggtttggatgaaaaagatgtggaagaaatttgtgaaattgttgctgaggaaggactctgccagatagccaatgataatggtggtgggcaaattgttatttcaggtgaagcaaaagcagttgagacagcggtagaggttgcatcacaaaaaggtgctaaacgtgctgttctccttcctgtttctgcaccttttcattcggctttaatgcaacctgctgccaatgctatgaagaatgcacttttgactgttaacaaaacagctcctattgttcctctcattgccaatgtatctgttataccagaaagtgatccagagcgtattgtgtcgcttcttgtccaacaagtaaccgggagagtgcgatggcgtgaaacgattgagtggatcagtgccaatggagttaatacactttttgaaattggttctgggaaggtattaacaggtttagcgcgtcgtattaataaggatataaaggcattgacagttgggacagcagaggaaatagaagcagcactacgggtgcttggtgtttag

SEQ ID NO: 124286 - protein, 314 aa, Bartonella henselae str. Houston-1
MGAAFTFPGQGSQLIGMGKVLTEQFVAARMVFEEVDDALSEKLSDIIFEGPADVLTLTANAQPALMAVSMAVIRVMEQLGLNVEKKVKFVAGHSLGEYSALCAAGTFSLTDTARLLRIRGNAMQAAVAVGEGSMAALIGLDEKDVEEICEIVAEEGLCQIANDNGGGQIVISGEAKAVETAVEVASQKGAKRAVLLPVSAPFHSALMQPAANAMKNALLTVNKTAPIVPLIANVSVIPESDPERIVSLLVQQVTGRVRWRETIEWISANGVNTLFEIGSGKVLTGLARRINKDIKALTVGTAEEIEAALRVLGV

SEQ ID NO: 124287 - DNA, 945 bp, Bacillus thuringiensis serovar konkukian str. 97-27
  CDS (1)..(945): transl_table=11
atgggaaaactagcatttctttttccgggccaaggttcacaggcagttggaatgggtaaacagttagcagagaataataaagaggttgcaaatgtatttgcaaaagcagatgaagtgttgcaagattcactttcagaagtgatttttgaagggccgcaggaaaagcttacgttaacgacaaatgcgcaaccggctttattaacaacgagttttgctattttgacagctttaaaagagtatgatattacaccagactttgtcgcagggcatagtttaggtgagtatagcgctcttgtagcagcgggtgcattaacttttgaggatgcagtatatgctgtaaggaaacgtggggaatatatggaagaagctgttcctggcggagaaggtgcaatggcggctattttaggtgctgatccacatatgctgaaacaagttacggaagaggtaacaggtgaagggtatgcagtacaaatcgctaatatgaatagtacgaagcaaattgtaatttctggaacaaagcaaggggtcgagattgcttctcaaagagcgaaagaaaatggtgcaaagagagcgattccgcttaaagtaagtggaccgttccactctgcgcttatgaagccagcagcggagaaattccaaagtgtcttaaatgaaattacaattcaagatacaaatattccggtaatcgcaaatgtaacagcagacgttattacaagtggtgcgcatattcaagaaaagctaatcgaacagctctattcgcctgtcttatggtacccatccattgaatatatggtgaatcaaggggtcgatacatttattgaaattggacctgggaaagtacttgctggacttatgaagtcaattgattcatcagtgaaagcatacgcgatatacgatgaagagacattaaaagataccatttcaaatttgagaggagaaaactga

SEQ ID NO: 124288 - protein, 314 aa, Bacillus thuringiensis serovar konkukian str. 97-27
MGKLAFLFPGQGSQAVGMGKQLAENNKEVANVFAKADEVLQDSLSEVIFEGPQEKLTLTTNAQPALLTTSFAILTALKEYDITPDFVAGHSLGEYSALVAAGALTFEDAVYAVRKRGEYMEEAVPGGEGAMAAILGADPHMLKQVTEEVTGEGYAVQIANMNSTKQIVISGTKQGVEIASQRAKENGAKRAIPLKVSGPFHSALMKPAAEKFQSVLNEITIQDTNIPVIANVTADVITSGAHIQEKLIEQLYSPVLWYPSIEYMVNQGVDTFIEIGPGKVLAGLMKSIDSSVKAYAIYDEETLKDTISNLRGEN

SEQ ID NO: 124289 - DNA, 987 bp, Acinetobacter sp. ADP1; identical to SEQ ID NO: 59233
  CDS (1)..(987): transl_table=11

SEQ ID NO: 124290 - protein, 328 aa, Acinetobacter sp. ADP1; identical to SEQ ID NO: 59234

SEQ ID NO: 124291 - DNA, 930 bp, Erwinia carotovora subsp. atroseptica SCRI1043; identical to SEQ ID NO: 59235
  CDS (1)..(930): transl_table=11

SEQ ID NO: 124292 - protein, 309 aa, Erwinia carotovora subsp. atroseptica SCRI1043; identical to SEQ ID NO: 59236

SEQ ID NO: 124293 - DNA, 930 bp, Yersinia pseudotuberculosis IP 32953
  CDS (1)..(930): transl_table=11
atgtcgaaatttgcaatggtatttccaggtcagggttctcagtccctcggcatgctggccgatttggccgcacaatttccgatagttgaagcgaccttcagtgaagcgtcgtctgtcctgggctatgatctctggcaattagtacaacaaggccctgcagaagagctgaataaaacgtggcaaacacagcccgcattgctgaccgcatctgtggcaatttggcgtatctggcagcatcaggggggcaaattgccatcactgatggcgggtcatagtttgggtgaatattcagcgttggtttgtgccggtgttctggattttaaacaggccgttagcttggttgaactgcgtgggaaactcatgcaggaggcggtacctgaaggtaccggtgccatgtatgccattattggtttggataatgaatccattgccaaagcgtgtgaagaatcagcccagggccaggtcgtgtcaccggtaaactttaattcacccggtcaggtggttattgctggcaacaaagacgctgtcgaacgtgctggcgcagcatgtaaagccgctggcgcaaagcgggctttgccattgcctgtcagtgtgccttcccattgtgcgctaatgaaacctgcggccgacaagctggcagtcgcacttgagaagattgattttcaggagccgctcttcccagtggtgaacaacgtcgatgtgaaagctgaggtgtccccagtcgctatccgtagcgcattggtccgtcagctgtataatccggtacgttggactgaaagtgttgaatttattgcagctgaaggtgttgaactgctgttagagattgggccaggtaaagtattgaccggcctgaccaagcgtatcgttgattcattggctgcagcggcagtcaacgatgttgtcacgctgaacagtgcgcttgaacactaa

SEQ ID NO: 124294 - protein, 309 aa, Yersinia pseudotuberculosis IP 32953; identical to SEQ ID NO: 59198

SEQ ID NO: 124295 - DNA, 945 bp, Symbiobacterium thermophilum IAM 14863
  CDS (1)..(945): transl_table=11
atggcgaagatcgcgttcctcttcccggggcagggcgcccagtacgtcggcatggggctggagctcgcccgggagttcccggaggtggcccgccggttcgagcagatgaacgagctggtggggtttgacctgcgcaagctgtgctgggaggggcccgaggaggagctgaagaagaccgccaatcagcagccggccatcctggccctctcggtggcctgcctggagctgctgctccgggagggcatccggccggacgtcacggcgggcctctccctgggggagtacagcgcgctggtggcggccggggtgctgaccttcgaggaggcggtgccgctggtgcgccggcgcggcacgtacatgcaggaggcggtgcccctgggcaccggtggcatggcggcgctgctcggacttacggccgagcaggtggacgagctgtgcgcccgggcggcccgggagacgggccgccacgtggagggggccaactacaactgccccggtcaggtggttgtggcgggccacaccgaggcgctggagcggtgcatggccctggccgtggaggccggggggcgcgccgtccggctctcggtgaccgcgcccttccactcccggctgctcacgccggccggcgagcggctggccgaggccctggcggccgtcccgctgcgggaggcgcaggtgcccgtggtgtccaacgtcaccgccgactacgtcacgcagcccggagagatccggcggctgctgatcgagcaggtctcacggcccgtgctgtgggaggcgtcaatccggcgcatgatcgccgacggcgtcgacacctttgtggaggtaggcccctccaggacgctcaccggcttcctccggaaaatcgacaagggcgtgcgggccctgcatgtggaggaccccgggtccctggcccgagtgcttgattccctggggagggtttgctaa

SEQ ID NO: 124296 - protein, 314 aa, Symbiobacterium thermophilum IAM 14863
MAKIAFLFPGQGAQYVGMGLELAREFPEVARRFEQMNELVGFDLRKLCWEGPEEELKKTANQQPAILALSVACLELLLREGIRPDVTAGLSLGEYSALVAAGVLTFEEAVPLVRRRGTYMQEAVPLGTGGMAALLGLTAEQVDELCARAARETGRHVEGANYNCPGQVVVAGHTEALERCMALAVEAGGRAVRLSVTAPFHSRLLTPAGERLAEALAAVPLREAQVPVVSNVTADYVTQPGEIRRLLIEQVSRPVLWEASIRRMIADGVDTFVEVGPSRTLTGFLRKIDKGVRALHVEDPGSLARVLDSLGRVC

SEQ ID NO: 124297 - DNA, 960 bp, Bacillus licheniformis ATCC 14580; identical to SEQ ID NO: 59239
  CDS (1)..(960): transl_table=11

SEQ ID NO: 124298 - protein, 319 aa, Bacillus licheniformis ATCC 14580; identical to SEQ ID NO: 59240

SEQ ID NO: 124299 - DNA, 939 bp, Mannheimia succiniciproducens MBEL55E; identical to SEQ ID NO: 59237
  CDS (1)..(939): transl_table=11

SEQ ID NO: 124300 - protein, 312 aa, Mannheimia succiniciproducens MBEL55E; identical to SEQ ID NO: 59238

SEQ ID NO: 124301 - DNA, 948 bp, Legionella pneumophila subsp. pneumophila str. Philadelphia 1
  CDS (1)..(948): transl_table=11
atggtaaaatcagcatttgtatttcctggacagggatcgcagtctatcggcatgttgtctgactttatgccacagtatactgttgtcaccgatgcttttgcagaggcctcagatgctttgggctatgatttgtgggatttggttcaaaatgggccagagacaaagctaaatcagactgaatacacgcaggctgccatgttaactgctgatgttgcaatttatcgtttattaatgcaattaggcgtacctcagcctcaagtaatggctggtcatagtttgggggaatacgctgctttggtttgcgctaattctttatctttaaaggatgctgcgcagttagttgctcgtagaggacaggtgatgcaaaacgcgatccctctgggagagggggctatggctgccatagtaggcttatctgatgaacaggttcgttcattgtgtgagcaggccagcacagccaatcatcttgttaccccggcgaattataatgctctgggccaaattgttgttgctggacatcgagtagccgttgataaactaatacaattggctgaagaggctggagccagactggcaatgataattcctgtaagtgtgccttgtcattgccccttattaaaaaatgctgccgaattatttgctgaagatcttgctcaaattgaatttcaagttccttcagtcgatgtaataagcaatgttgatttaagtatttatcattccactcaacatataagagataaactcaaagagcaactatacagccctgtgcgctgggttgaaacagttcagttaattcaacagcgcggaattgatctggttgtggagtgtgggccaggaaaagttctgaacggtttgataaaaagaattgagagaaatttaactacgattagcgtttatgacaccattagtcttgatcaagtcatagagcgtttacatatcccagtttga

SEQ ID NO: 124302 - protein, 315 aa, Legionella pneumophila subsp. pneumophila str. Philadelphia 1
MVKSAFVFPGQGSQSIGMLSDFMPQYTVVTDAFAEASDALGYDLWDLVQNGPETKLNQTEYTQAAMLTADVAIYRLLMQLGVPQPQVMAGHSLGEYAALVCANSLSLKDAAQLVARRGQVMQNAIPLGEGAMAAIVGLSDEQVRSLCEQASTANHLVTPANYNALGQIVVAGHRVAVDKLIQLAEEAGARLAMIIPVSVPCHCPLLKNAAELFAEDLAQIEFQVPSVDVISNVDLSIYHSTQHIRDKLKEQLYSPVRWVETVQLIQQRGIDLVVECGPGKVLNGLIKRIERNLTTISVYDTISLDQVIERLHIPV

SEQ ID NO: 124303 - DNA, 1185 bp, Burkholderia mallei ATCC 23344
  CDS (1)..(1185): transl_table=11
atgctgaatactttcatgtttccgggccaaggttcgcaagcgaagggaatgggcggcgccctgttcgatcgcttcgccgatctcaccgcgcaggccgacgccgtgctcggttattcgatccgcgcgctgtgcgtcgacgatccgcgcgacgagctcggccgcacgcaattcacgcagccggcgctatacgtcgtcaatgccttgacgtactacgcgaaatgcgaggacagcggcgagacgcccgattttctcgccggccacagcctgggcgaattcaacgcgctgctcgcggcgggctgcttcgacttcgaggccggcctgaagctcgtcgcccggcgcgcagagttgatgagccaggcccgcgacggcgcgatggccgcgatcgtcaacgcgagccgcgagcagatcgagcgcacgctcgacgagcacggcctcgtcgataccgcgatcgcgaacgacaacacgccgtcgcaactcgtcatctccggccccgcccacgaaatcgcgcgggccgaggcgctgttccagcacgatcgggtgcggtatctgcggctcaataccagcggcgcgttccactcgaaattcatgcggcccgcgcagcaggcattcgccgcgcatctacagtcgttccggctcgcggacccggcgatcccggtgatctcgaacgtatcggcgcgcccttacgagaacggccgcgtgagcgaagggctcgcgcagcagatcgcaagcccggtgcgatggtgcgagagcattcgctatctgctcgcgctggccgccgagcgcggagaagcgatcgaattcaccgagctcggacacggcgacgtactgacacggctcgtccatacgatccggcggcagacaccggccccggcagcggccccggcggcggccgcgacgccggcgcgcgctcgcccgacgccgcccggcgagcccgagcggctcgcgcagcagacggcggccgcgccgcgcgcatccgactccgcatccgcatcgctcggcgcggccgaacgggtcgccgcgtggaatcgggactaccccgtcggcacccgcgttcgctcgtcgctgatacacgacgacgttctcgaaacgcggaccccggcaaccgtgctgttcggccatcgcgccgcggtgtacatgaagggctacaacggctacttcgatctcgccgaagtgacgcccgcctga

SEQ ID NO: 124304 - protein, 394 aa, Burkholderia mallei ATCC 23344
MLNTFMFPGQGSQAKGMGGALFDRFADLTAQADAVLGYSIRALCVDDPRDELGRTQFTQPALYVVNALTYYAKCEDSGETPDFLAGHSLGEFNALLAAGCFDFEAGLKLVARRAELMSQARDGAMAAIVNASREQIERTLDEHGLVDTAIANDNTPSQLVISGPAHEIARAEALFQHDRVRYLRLNTSGAFHSKFMRPAQQAFAAHLQSFRLADPAIPVISNVSARPYENGRVSEGLAQQIASPVRWCESIRYLLALAAERGEAIEFTELGHGDVLTRLVHTIRRQTPAPAAAPAAAATPARARPTPPGEPERLAQQTAAAPRASDSASASLGAAERVAAWNRDYPVGTRVRSSLIHDDVLETRTPATVLFGHRAAVYMKGYNGYFDLAEVTPA

SEQ ID NO: 124305 - DNA, 957 bp, Methylococcus capsulatus str. Bath; identical to SEQ ID NO: 59241
  CDS (1)..(957): transl_table=11

SEQ ID NO: 124306 - protein, 318 aa, Methylococcus capsulatus str. Bath; identical to SEQ ID NO: 59242

SEQ ID NO: 124307 - DNA, 930 bp, Azoarcus sp. EbN1
  CDS (1)..(930): transl_table=11
atggtttttgcgctggtttttccgggacaggggtcgcaatcggtcggcatgatgtcggcctacggtgagcgggccgagattcgcgacacctttgccgaagcatcggatgctctcggcgaggatttgtggcagatggtgagcgaggggccggcagagcggctcgcgctgacggtgaatacccagccgctgatgctcaccgccggggtcgccgcgtaccgcgcgtggctggccgccggcgggccgaagccctcgctcgtcgccggccacagcctcggcgaatattccgcgctggtcgccgccggagcgctgagcttcaaggacgctgtgccgctggtgcgctttcgcgcgcaggcgatgcaggaggcggttccggcaggcgaaggggcaatggcagcgctgctcggcctcgacgtcgatgcggtccgcgaagcatgcgccgaggcctcccgcggcgaggtcgtcgaagcggcgaacctgaacgcgccggggcagatcgtcatcgccggagcgaaaggtgcagtcgaacgcgcgatcgaggcagcgaaggggcgcggcgcgaagcgcgcgatgctgttgccggtcagcgctccgttccactgcgcgctgatgaggccggcagccgagcggttggccgagcgcctcgcgacggtcgcgatcgcgtcgcccgagatcgcggtgctgaacaacgtcgatgtcgcagtgtgcaacgatccggcagcaatccgcgacgcgctggtcaggcaggcgttctcgccggtgcgctggatcgagatcgtgcaggaaatttcccgtcgtggcgtcggccacgtcttcgaatgcggccccggcaaagtgctcgcggggatgaccaagcggatcgcaggcgatctccagggcggctcgattcacgacgccgccagtctcgaactctcgatcgcggcggtcaaatga

SEQ ID NO: 124308 - protein, 309 aa, Azoarcus sp. EbN1
MVFALVFPGQGSQSVGMMSAYGERAEIRDTFAEASDALGEDLWQMVSEGPAERLALTVNTQPLMLTAGVAAYRAWLAAGGPKPSLVAGHSLGEYSALVAAGALSFKDAVPLVRFRAQAMQEAVPAGEGAMAALLGLDVDAVREACAEASRGEVVEAANLNAPGQIVIAGAKGAVERAIEAAKGRGAKRAMLLPVSAPFHCALMRPAAERLAERLATVAIASPEIAVLNNVDVAVCNDPAAIRDALVRQAFSPVRWIEIVQEISRRGVGHVFECGPGKVLAGMTKRIAGDLQGGSIHDAASLELSIAAVK

SEQ ID NO: 124309 - DNA, 939 bp, Silicibacter pomeroyi DSS-3
  CDS (1)..(939): transl_table=11
atgacgaccgcattcgtgtttcccgggcagggcgcccagaccatcggcatgggcaaggcgctggccgaggcctatccggccgcgcaggccgtgttcgacgaggtcgacgcggcgctgggagagaagctgagcgcgctgatctgggagggcgatatcgagaccctgacgctgacgcagaatgcgcaaccggcgctgatggcgacctcgatggcggcgatgcgcgcgctcgaggccgagggcgtggcgatcacccaagccgcctttgtcgccggtcactcgctgggcgagtattcggcgctggccgctgccggggcgctgagcgtcggtgacaccgcgcggctgctgcgcacccgtgggcaagcgatgcaaagcgcggtgccggtcgggcagggtgccatggcggcgatcctggggcttgaccttgcagcggtgcgcgaggtggctgccgaggccgcgcagggtgaggtctgtcaggccgccaatgacaacgaccccactcaggtggtggtctcgggcgccaaggcggcggtcgaacgcgccgccgagatcgccaaggccaagggcgccaagcgcgcggtcatgctgccggtcagcgccccgttccactgcgccctgatgcagcccgccgccgatgccatggccgaggcgctggccgcggtcgaaatcaaggcccccgccgtgccgctggtcgccaatgtgcgcgccgaggcggtgagcgatcccgacctgatccggcagttgctggtcgaacaggtcaccggctcggtccgctggcgtgaaagcgtcgaatacatggccgcccagggcgtgaccgagatctgggagatcggcgcgggcaaggcgctgtcgggtatggtgcgcaagatcaaccgcgagatcgcgtgcaaaccggcgggcacacctgaagatgtgcaaaaaatccttgctggcgacgcctga

SEQ ID NO: 124310 - protein, 312 aa, Silicibacter pomeroyi DSS-3
MTTAFVFPGQGAQTIGMGKALAEAYPAAQAVFDEVDAALGEKLSALIWEGDIETLTLTQNAQPALMATSMAAMRALEAEGVAITQAAFVAGHSLGEYSALAAAGALSVGDTARLLRTRGQAMQSAVPVGQGAMAAILGLDLAAVREVAAEAAQGEVCQAANDNDPTQVVVSGAKAAVERAAEIAKAKGAKRAVMLPVSAPFHCALMQPAADAMAEALAAVEIKAPAVPLVANVRAEAVSDPDLIRQLLVEQVTGSVRWRESVEYMAAQGVTEIWEIGAGKALSGMVRKINREIACKPAGTPEDVQKILAGDA

SEQ ID NO: 124311 - DNA, 954 bp, Bacillus clausii KSM-K16
  CDS (1)..(954): transl_table=11
gtggggaaaattgcctttttatttcctggacaaggatcacaaaaagttggcatgggagcaacgctttttgctgaagattcattggcaaaggaagtgcttgaacgggctgacaaagcgcttggttttcctctttcagagatcatcgagcatggaccagaagaaaagctgaaacaaacggcttatgcccaacctgctttagtcacaatgagcactgcagtcctccaattgttccgcgacgctggcattcaagcagattttgttgcaggccatagcctaggggagtattctgctttagtggcatgtaagtcccttacatttgaagatgcggtcacacttgttcatcaacgggggacactcatggaggaagctgtgccacaaggacaaggggcgatggcagcggtactcgggttaaataaagaggagcttgaagaagtggcttccgaaattgcagcggacggcgaagttgccgaacttgccaatttgaattgcccagggcaaattgtcctgtcagggactgcgaaagggattgaacaagcagcggtgttagcaaaacaaaaaggggccaagcgtgtcttgcctcttgccgtcagcgggccattccattcgtcattgatgaagcctgcggccgatcaatttaaacaagcattagagcaagcgccatttgccaatccgactgttccactgatcgcgaacgtgaccgctgaagtgacagatgcccctgaagtcattcgcgaacagcttgctgaacaaatttattcaccagtacgttttgaagagagcgttcgccgcatgattgaactcggtgtcgacacatttattgaaattggcgcaggcaatgtattatgcggattggttcgtaaaattgaccgcaacttgcggacatttgccgtcagcgaccgtgagtcatttgaaaagatggcggctgcgctgaaaggagacaagcattcatgttaa

SEQ ID NO: 124312 - protein, 317 aa, Bacillus clausii KSM-K16
MGKIAFLFPGQGSQKVGMGATLFAEDSLAKEVLERADKALGFPLSEIIEHGPEEKLKQTAYAQPALVTMSTAVLQLFRDAGIQADFVAGHSLGEYSALVACKSLTFEDAVTLVHQRGTLMEEAVPQGQGAMAAVLGLNKEELEEVASEIAADGEVAELANLNCPGQIVLSGTAKGIEQAAVLAKQKGAKRVLPLAVSGPFHSSLMKPAADQFKQALEQAPFANPTVPLIANVTAEVTDAPEVIREQLAEQIYSPVRFEESVRRMIELGVDTFIEIGAGNVLCGLVRKIDRNLRTFAVSDRESFEKMAAALKGDKHSC

SEQ ID NO: 124313 - DNA, 933 bp, Dehalococcoides ethenogenes 195
  CDS (1)..(933): transl_table=11
atgactgagattaaaacagcttatgtcttccccggtcagggtgcccaattcgtgggcatgggccgggacttgtattcggagtttcattccgccagagagctttttgacctggcggataaagctttgggattttcactgtcaaaactgtgttttgaagggccggaagaagaccttaaggacacccgcaactcccaaagcgccattgtcggccacagcctgtgcgcccttgctgcttttatagagagcggcaagtcaaatctcctgccagagccttcttttgtagccgggcattcgctgggtgaatattcggctttgggagcaggcggcatactcccctacccgcaggctattttgcttgcccgcaaacggggggaactgatggcggaagcagccgccaaaacacccggtgctatggctgccgttctcggcctttcggaagaaatactggcggatatctgccttaaaacaggctgttacatagcgaattacaactcccccggacagctggttatcagcggcctgaaagagactgtagaaaaagcttctgcccaagccgcagagagcggtgctatgaaggtggtacccctgcaggtaagcggagggtttcataccccgcttatgtcaccggcttctgccggtttaaaagcagtactggattctaccgggtttgatacggccagaatacctctggtagccaataccagcgccagcccgcttaccaatccgcaggatataaaaagcgaactggtcaaccagctgaccggcggtgtccagtggcaaaaaagcatagaaaacatgattgctgccggggtaaatacctttgttgagattgggccgggcaaagtgctggccggactgattaaaagaattaaccgcagtgtcagtatctacaatataaacgatgccgcttctatccaaaattttagcgtataa

SEQ ID NO: 124314 - protein, 310 aa, Dehalococcoides ethenogenes 195
MTEIKTAYVFPGQGAQFVGMGRDLYSEFHSARELFDLADKALGFSLSKLCFEGPEEDLKDTRNSQSAIVGHSLCALAAFIESGKSNLLPEPSFVAGHSLGEYSALGAGGILPYPQAILLARKRGELMAEAAAKTPGAMAAVLGLSEEILADICLKTGCYIANYNSPGQLVISGLKETVEKASAQAAESGAMKVVPLQVSGGFHTPLMSPASAGLKAVLDSTGFDTARIPLVANTSASPLTNPQDIKSELVNQLTGGVQWQKSIENMIAAGVNTFVEIGPGKVLAGLIKRINRSVSIYNINDAASIQNFSV

SEQ ID NO: 124315 - DNA, 930 bp, Staphylococcus epidermidis RP62A
  CDS (1)..(930): transl_table=11
atgggtaaaatagcagttgtattccctggtcaaggtgcacaaaaagtagggatggctagtgatttatataacgaagaagaacgctcgactcgagtattaaatttagctcaagagacagtagactttgatttgttagaaacgatgtttaatgataatgatgggaaattaggagaaacagaaaatacacaacctgcactattaacacatagtattgcgttactagaatctttaaatcatttaaaagtagattatactatgggacatagcttaggagaatattcaagtttagttgctagtggtgtattagcttttgaagatgcagttagaattgtacgtaaacgtggccaacttatggctcaagcgtttcctaacggtgttggaggtatggcagcagtattaggtttggactatgatgatgttgataagatatgtcaaacgttatctacaaatgaacagttaattgaacctgctaatattaactcaccaggtcaaatcgtggtgtctggacataaacctttaattgatgaattagtagaaaagggcaaagaacttggagctaaacgcgttcttccgttagctgtttccggtccttttcactcttcaatgatgaaagttattgaagaggattttgctaatttcattaatcaatttgagtggcataatgctaattatccaattgttcagaatgttaatgcaaagggagaaaccgatgccgaagtaattaaacgcaatatggttaaacaattatatttacctgttcaatttattcaatcaacggagtggttgattaatcaaggtgtcgatcactttattgaaattggacctggaaaagtattatctgggctcatcaaaaaaattaatcgagatgtaaaaatcacttcaattcaaacacttgaagatgtgaaaggatggaataataatcatgaataa

SEQ ID NO: 124316 - protein, 309 aa, Staphylococcus epidermidis RP62A
MGKIAVVFPGQGAQKVGMASDLYNEEERSTRVLNLAQETVDFDLLETMFNDNDGKLGETENTQPALLTHSIALLESLNHLKVDYTMGHSLGEYSSLVASGVLAFEDAVRIVRKRGQLMAQAFPNGVGGMAAVLGLDYDDVDKICQTLSTNEQLIEPANINSPGQIVVSGHKPLIDELVEKGKELGAKRVLPLAVSGPFHSSMMKVIEEDFANFINQFEWHNANYPIVQNVNAKGETDAEVIKRNMVKQLYLPVQFIQSTEWLINQGVDHFIEIGPGKVLSGLIKKINRDVKITSIQTLEDVKGWNNNHE

SEQ ID NO: 124317 - DNA, 888 bp, Bacteroides fragilis NCTC 9343
  CDS (1)..(888): transl_table=11
atgaaagcatttgtattccccggtcaaggtgcccaattcgtaggtatgggtaaggacctgtatgaaacttcagctttagcaaaagaattgtttgaaaaagcaaatgatatcctgggatatcgcattacagatattatgttcaacggtacggacgaagatcttcgtcagaccaaggttactcagcctgctgtattccttcactctgttatttctgcactttgcatgggtgatgacttcaaacctgaaatgactgccggacactcactgggtgagttttctgcattggttgctgccggcgctctgtcttttgaagacggcttaaaattggtttatgcacgtgctatggctatgcagaaagcttgtgaggcaactccttctacaatggctgctattatagctttaccggatgagaaagtagaagaaatctgtgcttctgttaccgctgaaggagaagtttgtgtacctgccaattacaactgtccgggacagattgtaatttccggatctgtaccgggtatcgaaaaagcttgtgaactgatgaaagcagccggagctaagcgtgcgcttccgttgaaagtaggcggtgcattccattctcctctgatggatcctgccaaagtagaattggaagctgccattaacgcgactgagttccacacaccgaaatgtccggtttatcagaatgtagatgccctgccccatacagacccgcaggaaatcaagaagaatctggttgctcagttgactgcttctgtacgttggacacagaccgtaaaaaatatggttgccgatggtgctaccgacttcacagaatgtggaccgggtgccgtattgcagggattgatcaagaagatcgactctacagtttcggctcacggaatagcataa

SEQ ID NO: 124318 - protein, 295 aa, Bacteroides fragilis NCTC 9343
MKAFVFPGQGAQFVGMGKDLYETSALAKELFEKANDILGYRITDIMFNGTDEDLRQTKVTQPAVFLHSVISALCMGDDFKPEMTAGHSLGEFSALVAAGALSFEDGLKLVYARAMAMQKACEATPSTMAAIIALPDEKVEEICASVTAEGEVCVPANYNCPGQIVISGSVPGIEKACELMKAAGAKRALPLKVGGAFHSPLMDPAKVELEAAINATEFHTPKCPVYQNVDALPHTDPQEIKKNLVAQLTASVRWTQTVKNMVADGATDFTECGPGAVLQGLIKKIDSTVSAHGIA

SEQ ID NO: 124319 - DNA, 927 bp, Chlamydophila abortus S26/3
  CDS (1)..(927): transl_table=11
atgacgaaaaaaataggatttttatttccaggtcaaggtagtcaatacgttggtatgggtaaagatttagtagagaactatccagaagcagaaaaagtttttgctttggcggatgagactttagggttttctttatcctcaattatgtttcatgggcctgaagagaagttgcttgaaactgcatatagccaactcgccatatacttacatagtttagctgtggttgaaattttatcttccagaacttctataacccctgcagcggttacaggtttaagtctgggagagtatactgctctcgtggcttctggacgcatttctccagttgatggctttgatattattagtaaacgtgctcaatttatgaatcaggcctgtcaagaaaatcctggtgctatggcagcagttttgggattgaccgcagacgttattgagcagaatttagaaagtttgggagaggggatttgggttgccaactacaatgctcctaaacaactagttattgctggtctaagagaaaaaatagaagaagctgttaaattatttacagatttaggagccaaaagggcgatactattaaaagtatttggagcttttcataccccactgatgcagtcagctgaagataagttagcgccgtacttatataatttgcatatgcatagttctgaaattccttttgtatctaatgttacagctagctttctaaggaataacgatgaaattcttcagtgtttggtcaagcaaatgacttctcccacgttatggtatcagagttgttctaaaatagatttggaagttgatgaatttttagaacttggtccgggtaaagttcttgctggattgaatcgttctataggattaaataaacccattaaaagtttaggtacagtagaaagcatcaataattttttatcagggctatag

SEQ ID NO: 124320 - protein, 308 aa, Chlamydophila abortus S26/3
MTKKIGFLFPGQGSQYVGMGKDLVENYPEAEKVFALADETLGFSLSSIMFHGPEEKLLETAYSQLAIYLHSLAVVEILSSRTSITPAAVTGLSLGEYTALVASGRISPVDGFDIISKRAQFMNQACQENPGAMAAVLGLTADVIEQNLESLGEGIWVANYNAPKQLVIAGLREKIEEAVKLFTDLGAKRAILLKVFGAFHTPLMQSAEDKLAPYLYNLHMHSSEIPFVSNVTASFLRNNDEILQCLVKQMTSPTLWYQSCSKIDLEVDEFLELGPGKVLAGLNRSIGLNKPIKSLGTVESINNFLSGL

SEQ ID NO: 124321 - DNA, 936 bp, Pseudomonas syringae pv. syringae B728a
  CDS (1)..(936): transl_table=11
atgagcagcctgtgggtgtttcccggccagggttcgcagcaaaccggcatgctgcatcagttgccggacgaggccgtggtgcgcgactgcctgcaggaagccgccgatgcgctgggcgaagacgtgctggcgctggacaccgccggggcgctgcaagccacgcgtgccgttcagctttgcctgttgatcgcgggcgtcgcatgcgcacgcgtgctgcaggcgcgtgattgtgtgccggactacctggccgggctgtccatcggtgcttatccggcagcggtggtttcgggggcgctggcctttgacgacgccgtgcgcctggtcgcgttgcgtggcgagctgatgcaaagcgcctggccgcagggttacggcatgaccgcgctcatcggcctggaccagacacaggtagaagcgctgatcgggcaggtacacagcgcgaagacaccggtatttctcgccaatatcaacgccgacaaccagatggtgatctccggcagtgccgaggcgatgcatcaggtcggtcagttggccaaggctgccggagcggcagcggtcaagcgtcttgcggtcagcgtaccgtcacattgcgccttgctggacgctcccgcgcaacaactggccgaggccttttcaagggtcgcgctgcaggcacccacgctacgttacctcagcggcagcacggcgcggccggtgctgagtgccgagaagctgcgtgacgacctggccttcaacatgtgccgggtcatcgactggcgcagcaccgtggaaaccgcctgggagcggggcgtgcgcctgcacatcgaattgccgcccggcagtgtgctgaccgggctggcacgcaaagtattccagcagggcagcgcgctggcttttcaggctgcgcgcctggacagcctggtcgcgctgtcgcgcgaggagggtcgccgcaccccatag

SEQ ID NO: 124322 - protein, 311 aa, Pseudomonas syringae pv. syringae B728a
MSSLWVFPGQGSQQTGMLHQLPDEAVVRDCLQEAADALGEDVLALDTAGALQATRAVQLCLLIAGVACARVLQARDCVPDYLAGLSIGAYPAAVVSGALAFDDAVRLVALRGELMQSAWPQGYGMTALIGLDQTQVEALIGQVHSAKTPVFLANINADNQMVISGSAEAMHQVGQLAKAAGAAAVKRLAVSVPSHCALLDAPAQQLAEAFSRVALQAPTLRYLSGSTARPVLSAEKLRDDLAFNMCRVIDWRSTVETAWERGVRLHIELPPGSVLTGLARKVFQQGSALAFQAARLDSLVALSREEGRRTP

SEQ ID NO: 124323 - DNA, 939 bp, Pseudomonas syringae pv. syringae B728a
  CDS (1)..(939): transl_table=11
atgtctgcatccctcgcattcgtctttccgggtcaaggatcgcaatcgctcggtatgctcgccgagcaaggcgcgcaccacccgctgatcctcgacactttcgagcaggcttccgaagccctcggctatgacctgtgggcattgactcagaacggtcctgccgagctgctcaaccagaccgacaagacccagccggccattctgaccgcatccgttgccttgtggcacgtgtggctggccgagggcggtgcggttcctgcattcgtcgccggtcacagtctgggtgaatacagcgcactggtagccgcgcaaagcctgagcctggccgacgccgtaaagcttgtcgagcgtcgcggccagttgatgcaggaagcggtgccggcgggtcagggcggcatggccgccattctgggtctggatgatgccgacgttattgcagcctgcgccgaagcggcacagggtgaagtcgtcagcgcggtgaatttcaactcgccgggtcaggtggtgatcgccggttccgccgaggccgtcaagcgtgccatggagctgtgcaaggcccgtggcgccaagcgcgccttgccattgccggtcagcgtgccatcgcactgcgaactgatgcgcccggccgccgagcgtttcgccgaggccgttgaagccatcgaatggcaagcgccggaaattgcgctggtacagaacgtcagcgccagtgccgtcagtgatctggcgacgctcaagcgtgatttgctggagcagttgtacaagccggtgcgttgggtcgagtccattcaatgcctggcgagccgcggtgcgacccagctcgtggaatgcggtccgggcaaagtgctggccggtctgaacaaacgttgcgccgacggcgtgatgacctacaaccttgataccccggacgcctttgccgccgcgcgcgcggcactggcctga

SEQ ID NO: 124324 - protein, 312 aa, Pseudomonas syringae pv. syringae B728a
MSASLAFVFPGQGSQSLGMLAEQGAHHPLILDTFEQASEALGYDLWALTQNGPAELLNQTDKTQPAILTASVALWHVWLAEGGAVPAFVAGHSLGEYSALVAAQSLSLADAVKLVERRGQLMQEAVPAGQGGMAAILGLDDADVIAACAEAAQGEVVSAVNFNSPGQVVIAGSAEAVKRAMELCKARGAKRALPLPVSVPSHCELMRPAAERFAEAVEAIEWQAPEIALVQNVSASAVSDLATLKRDLLEQLYKPVRWVESIQCLASRGATQLVECGPGKVLAGLNKRCADGVMTYNLDTPDAFAAARAALA

SEQ ID NO: 124325 - DNA, 939 bp, Haemophilus influenzae 86-028NP; identical to SEQ ID NO: 59245
  CDS (1)..(939): transl_table=11

SEQ ID NO: 124326 - protein, 312 aa, Haemophilus influenzae 86-028NP; identical to SEQ ID NO: 59246

SEQ ID NO: 124327 - DNA, 939 bp, Pseudomonas fluorescens Pf-5
  CDS (1)..(939): transl_table=11
atgtctgcatccctcgcattcgtctttccaggacagggctcgcagtccctcggcatgttggccgagctgggcgcgcagtacccactgatcctcgatacgttcaaagaagcctccgatgctctgggctacgacctctgggctctgacccaggaaggtcctgcagagctgctcaatcaaaccgacaagacccagccggccatcctcaccgcgtccatcgccctgtggcgtgtatggctggccgaaggtggcgcgcgcccggctttcgtcgccggtcacagcctgggtgaatacagtgccctggtcgccgctggcagcctgaccctgggtgaagcggccaagctggtcgagcgtcgtggccagttgatgcaggaagccgtgccggcagggcagggcggcatggctgcaattctcggcctggaagatgccgatgtggtcgccgcctgtgctgaagccgcgcagggcgaggtggtcagcgccgtgaactacaactcccctggccaggtggtgatcgccggggccaaggcggctgtggatcgcgccatcgagggctgcaaggcgcggggcgccaagcgcgccatgccgctgccggtcagcgtgccttcccactgtgagctgatgcgcccggccgccgagcgctttgccgagtcgatcgctgcgatcaactggcaggcaccgcagattccattggtacagaacgtcagtgccgctgtggccgccgacctggacaccctcaagcgcgacctgctggagcagttgtacaagccggtgcgttgggtcgagtcggtccagactctggcagccaatggcgccaccgagctggtcgagtgcggcccgggcaaggtcctggccggcctcaacaagcgctgcgccgaaggcgtgtcgacctctaacctgaacaccccagatgctttcgctgccgcccgtgcagcgttggcctga

SEQ ID NO: 124328 - protein, 312 aa, Pseudomonas fluorescens Pf-5
MSASLAFVFPGQGSQSLGMLAELGAQYPLILDTFKEASDALGYDLWALTQEGPAELLNQTDKTQPAILTASIALWRVWLAEGGARPAFVAGHSLGEYSALVAAGSLTLGEAAKLVERRGQLMQEAVPAGQGGMAAILGLEDADVVAACAEAAQGEVVSAVNYNSPGQVVIAGAKAAVDRAIEGCKARGAKRAMPLPVSVPSHCELMRPAAERFAESIAAINWQAPQIPLVQNVSAAVAADLDTLKRDLLEQLYKPVRWVESVQTLAANGATELVECGPGKVLAGLNKRCAEGVSTSNLNTPDAFAAARAALA

SEQ ID NO: 124329 - DNA, 969 bp, Psychrobacter arcticus 273-4; identical to SEQ ID NO: 59247
  CDS (1)..(969): transl_table=11

SEQ ID NO: 124330 - protein, 322 aa, Psychrobacter arcticus 273-4; identical to SEQ ID NO: 59248

SEQ ID NO: 124331 - DNA, 945 bp, Colwellia psychrerythraea 34H
  CDS (1)..(945): transl_table=11
atgcaaaataaattagcattcgtttttccaggacagggctcacaaactgttgccatgctcagtgactttgcagaaaacagtatcgtacaagcaacctttgaagaagcctctaaagccttaggttatgacttatggcaattagttaacgaaggtccagcagaaaaactaaatcaaactaactttactcaaccagcattgttaacggctagtgttgctttatggcgtgtttggcaagcagagtcgactgtgacccctgatattatggctggccacagtttaggtgaatattcagcactagtgtgtgccggtgtgttttccctaagtgacgcggtagtattagttgaaaaacgtggtgaattcatgcaagcctgtgttccggcaggtgttggcgccatggcagctgttattggcttagctgatgaagatattattaatgcctgtaatgaagcaatggaaacgcaagttgtttcagcggttaattttaattctccaggtcaggttgttattgcgggtcataaagaagctgttgagcgtgctggagtgctttgtaaagccgcaggggcaaaacgtgttttaccattgccagtgagcgtaccatcacattgtgctttaatgagtgatgctgcagctaaattggctatagagctggagtgtatcacttttaaccagccgaaaattgccgttgtaaataatgtggatgtcgctgaagagatcgcaggtgaagcaataaaagctgcattagttaagcaattatattcgcctgtacgttggagcgaaactattagtttgctagcaaatgacggtatagaaaaagtggttgaagtaggtccaggtaaagtattacaaggcttgaataagcgtataaataaatcactacgcagtgttagtttcaatacaatggattcattgcagcaagcaaaagatttagtgactagtgaaatctaa

SEQ ID NO: 124332 - protein, 314 aa, Colwellia psychrerythraea 34H
MQNKLAFVFPGQGSQTVAMLSDFAENSIVQATFEEASKALGYDLWQLVNEGPAEKLNQTNFTQPALLTASVALWRVWQAESTVTPDIMAGHSLGEYSALVCAGVFSLSDAVVLVEKRGEFMQACVPAGVGAMAAVIGLADEDIINACNEAMETQVVSAVNFNSPGQVVIAGHKEAVERAGVLCKAAGAKRVLPLPVSVPSHCALMSDAAAKLAIELECITFNQPKIAVVNNVDVAEEIAGEAIKAALVKQLYSPVRWSETISLLANDGIEKVVEVGPGKVLQGLNKRINKSLRSVSFNTMDSLQQAKDLVTSEI

SEQ ID NO: 124333 - DNA, 939 bp, Pseudomonas syringae pv. phaseolicola 1448A
  CDS (1)..(939): transl_table=11
atgtctgcatccctcgcattcgtctttccgggtcaaggatcgcaatcgctcggcatgctcgccgagcaaggcgcgcaacatccgttgattctcgatactttcgagcaggcttccgaagcccttgactatgacctgtgggcgttgacccagagcggtcctgtcgagttgctcaatcagaccgacaagacccagcctgccattctgactgcttccatagccttgtggcatgtgtggctggccgagggcggcgccgttcctgcgttcgtcgcaggtcacagtctgggtgaatacagtgcgctggtagctgcgcaaagcctgagcctggctgatgcggtaaagctcgtcgagtgtcgtggccagttgatgcaggaagcggtgccggccggtcaaggcggcatggccgctattctgggtcttgatgacgccgacgttatcgctgcctgtgccgaagcagcgcagggcgaagttgtcagtgcggtgaatttcaactcgccgggccaggtggtgatcgccggttccgccgaggccgtcaagcgcgccatggagctgtgcaaggcgcggggtgccaagcgtgcattgtcgttgccggtcagcgtgccgtcgcactgcgaactgatgcgcccggccgccgagcgtttcgccgaggctgttgaagccattgaatggcaggcacctgaaatcgcattggtacagaacgtcagcgccagcgcggtcagtgatctggcgacgctcaagcgtgacttgctggaacagttgtacaagccggttcgctgggttgaatccattcaatgcctggcgagccgtggtgcgacccagcttgtggaatgtgggccgggcaaagtcctggccggtctgaacaagcgttgcgccgaaggcgtgattacttacaaccttgataccccggacgcctttgccgccgcgcgcgcggcactggcctga

SEQ ID NO: 124334 - protein, 312 aa, Pseudomonas syringae pv. phaseolicola 1448A
MSASLAFVFPGQGSQSLGMLAEQGAQHPLILDTFEQASEALDYDLWALTQSGPVELLNQTDKTQPAILTASIALWHVWLAEGGAVPAFVAGHSLGEYSALVAAQSLSLADAVKLVECRGQLMQEAVPAGQGGMAAILGLDDADVIAACAEAAQGEVVSAVNFNSPGQVVIAGSAEAVKRAMELCKARGAKRALSLPVSVPSHCELMRPAAERFAEAVEAIEWQAPEIALVQNVSASAVSDLATLKRDLLEQLYKPVRWVESIQCLASRGATQLVECGPGKVLAGLNKRCAEGVITYNLDTPDAFAAARAALA

SEQ ID NO: 124335 - DNA, 927 bp, Dechloromonas aromatica RCB; identical to SEQ ID NO: 59249
  CDS (1)..(927): transl_table=11

SEQ ID NO: 124336 - protein, 308 aa, Dechloromonas aromatica RCB; identical to SEQ ID NO: 59250

SEQ ID NO: 124337 - DNA, 897 bp, Prochlorococcus marinus str. NATL2A; identical to SEQ ID NO: 59251
  CDS (1)..(897): transl_table=11

SEQ ID NO: 124338 - protein, 298 aa, Prochlorococcus marinus str. NATL2A; identical to SEQ ID NO: 59252

SEQ ID NO: 124339 - DNA, 930 bp, Ralstonia eutropha JMP134
  CDS (1)..(930): transl_table=11
atgaaatttgcattcgtatttcctggccagggctcgcagtcggtcggcatgctcaatgcgttcgccgacaacgccgtggtgcgcgctaccctggaggaagcttcgacggcactcggccaggacatcggccgcctgatcgccgaaggcccggctgaagaactgaacctgaccaccaacacgcagccggtcatgctgaccgccgccgtggcggtctaccgcgcatggctcgacgccggcggtccggcgcccgcaatggtggctggccacagcctgggcgaatactcggcactggtcgcggccggcgtgattccgttcgccgaagccgtaccgctggtgcgtttccgtgcacaagccatgcaggaggcggtaccggtgggccagggcggcatggccgccatcctgggcctgtccgacgatgacgtgcgtgctgcctgcgccgaagcgtcggctgctggcgtggtcgaggccgtcaatttcaacgcaccgtcgcaggtcgtgatcgctggtagcaaggccggcgtcgagaaggcctgcgaagtcgcgaaggccaagggcgccaagcgtgcgctgccgctgccggtgtcggcgccgttccactcgtcgctgctcaagccggcgtcggaccgcctgcgcgagcgcatggccggcctgacgttctcggcaccgaccattccgctggtcaacaacgtggacgtcgccatcgtcaacgatccggaagcgatcaaggacgcgctcgttcgccaggccgccgcgccggtgcgctgggtggagtgcgtgcagaagatggccgccgaaggcgtcacgcacgtgatcgaatgcggcccgggcaaggtcctggccggcatgaccaagcgtatcgacggcagcctgaccggcggcgcggtgttcgatccggcctcgctgcaggaaaccctggcgctgctgaagtaa

SEQ ID NO: 124340 - protein, 309 aa, Ralstonia eutropha JMP134
MKFAFVFPGQGSQSVGMLNAFADNAVVRATLEEASTALGQDIGRLIAEGPAEELNLTTNTQPVMLTAAVAVYRAWLDAGGPAPAMVAGHSLGEYSALVAAGVIPFAEAVPLVRFRAQAMQEAVPVGQGGMAAILGLSDDDVRAACAEASAAGVVEAVNFNAPSQVVIAGSKAGVEKACEVAKAKGAKRALPLPVSAPFHSSLLKPASDRLRERMAGLTFSAPTIPLVNNVDVAIVNDPEAIKDALVRQAAAPVRWVECVQKMAAEGVTHVIECGPGKVLAGMTKRIDGSLTGGAVFDPASLQETLALLK

SEQ ID NO: 124341 - DNA, 981 bp, Ehrlichia canis str. Jake
  CDS (1)..(981): transl_table=11
atgtataagatgattttgatgttccctggtcagggctctcaatttgtatctatggggaaagatatatatgacaactttgctgttgctcgttatgtctttcatgaggtagatgacatattgaataaaaagttatctaaaataatgttcgaaggttctatcgaaaatttaacttcaactgataatgcgcaattagcattaatggtgacttctatagcaacattgcgggctatagagtatgtcttaggtaagccaatacatttatttaataaggtaaagtacatggcaggacattcagttggtgaatgtgtagcgttatgtgcatctggcgcattaactttatatgaagttacacaacttctgctaataagaagccaagctatgtatgatgcagtgcctctaggatatggaggaatgtgtgcattaataggtggtagcttagaagatgtagaaaatgttgtgaaaatggcacaagagtatggagtttgtgaaattgctaatgataactgtgatggtcaagttgttgttagtggcgttaaagcagctcttgagcaattaccagacttgataaaagatactggtataaaaaaagttataaagttacaagtcagtggaccattccattcatcattgatgaactctgcatgtgataaattacagcaatttattgagcgtattgaagatatgaaaatgccattagtcaaagttatatctaatgtatctgcaacagaatatactgattgtctcatgatcaaagatttaatagctaaacagctaataagtagagttcgttggcgtgaaagtattttgtatatgataaaacaagggtgcacgtgctttattgaagttggtgctggtactacgctatcagggttggtgaaaaggattagtccaaatgtttctgctgttagtgtgaacacggcaagttgtattgattctataacgcagcattttgctgtaaatgccggttttgttaatgcgtag

SEQ ID NO: 124342 - protein, 326 aa, Ehrlichia canis str. Jake
MYKMILMFPGQGSQFVSMGKDIYDNFAVARYVFHEVDDILNKKLSKIMFEGSIENLTSTDNAQLALMVTSIATLRAIEYVLGKPIHLFNKVKYMAGHSVGECVALCASGALTLYEVTQLLLIRSQAMYDAVPLGYGGMCALIGGSLEDVENVVKMAQEYGVCEIANDNCDGQVVVSGVKAALEQLPDLIKDTGIKKVIKLQVSGPFHSSLMNSACDKLQQFIERIEDMKMPLVKVISNVSATEYTDCLMIKDLIAKQLISRVRWRESILYMIKQGCTCFIEVGAGTTLSGLVKRISPNVSAVSVNTASCIDSITQHFAVNAGFVNA

SEQ ID NO: 124343 - DNA, 933 bp, Dehalococcoides sp. CBDB1
  CDS (1)..(933): transl_table=11
atgactgagattaaaacagcttatgtcttccccggtcagggtgctcagttcgtgggcatgggacgggatttatactcggagtttcattccgccagagagctttttgacctggcggataaagctttggggttttcgttgtctaaattatgttttgaaggacctgaagaagacctgaaggacacccgccactcccagagtgccattgtctgccacagcctgtctgccctttcggcttttatagaaagcggcaaatcaaagcttctgcctgaaccctcttttgtagcagggcattcactgggtgaatattcggcgctgggtgcaagcggaatactcccttacgtacaagctattttgcttgcccgcaaacggggagaactcatggctgaagcagccgccaaaacccccggtgccatggccgccgttataggcatatcccaagaaatactgtctgatatctgcctgaaaacaggctgttacatagctaatttcaattctcccgggcagctggttatcagcggtctgaaagaggctgtagaccaagcatctgcccaagccacagccagcggagctatgaaagtagtaaccctgcaggtaagcggcggtttccatacccctctcatgtcgcctgcttccacaggtttaaaagaaatgctgaactctatggattttaagaccgcccgaataccgctggtggccaataccagtgcttgcccagtttctaccccgcaggatgtaaaagccgaactttattgccaactgaccggtggtgtccagtggcaaaaaagcatagagaatatgattgcaagcggggtaaatacctttgttgagattgggccgggtaaagtactggccggactgataaaaagaattaaccgcagtgtcagtatctacaatataaatgatgccgcttctatccagaattttagcgtataa

SEQ ID NO: 124344 - protein, 310 aa, Dehalococcoides sp. CBDB1
MTEIKTAYVFPGQGAQFVGMGRDLYSEFHSARELFDLADKALGFSLSKLCFEGPEEDLKDTRHSQSAIVCHSLSALSAFIESGKSKLLPEPSFVAGHSLGEYSALGASGILPYVQAILLARKRGELMAEAAAKTPGAMAAVIGISQEILSDICLKTGCYIANFNSPGQLVISGLKEAVDQASAQATASGAMKVVTLQVSGGFHTPLMSPASTGLKEMLNSMDFKTARIPLVANTSACPVSTPQDVKAELYCQLTGGVQWQKSIENMIASGVNTFVEIGPGKVLAGLIKRINRSVSIYNINDAASIQNFSV

SEQ ID NO: 124345 - DNA, 933 bp, Thiobacillus denitrificans ATCC 25259
  CDS (1)..(933): transl_table=11
atggatacaacaatgaagcttgcattcgtgtttcccggacagggctcgcagtcggtcggcatgatgcagggctggggcgcgcgcgccgacatacgtgccaccttcgccgaggcctccgacgcgttgggccaggacctttgggcactcgtgaccgaggggccggccgagcttctgaaccagaccgtgaacacccagcccgcgatgttggcagcggacgtcgccgcctggcgggcgtggcagacccagggcggggcgaagccggtggtgctcgcagggcacagtctcggcgaatacgcggcgctggtcgctgccgacgccttgagtttcgtcgacgcgatcaagctcgtgcgctttcgtgccgaggccatgcagtccgccgtgcccgaaggcgtcggcgcgatggccgcgattctcggtctggacgatgatgccgtgcgtgcggtgtgcgccgatgcggcggcgggggaagtggtcgaggcggtgaatctcaattcgcccggacaggtcgtcatcgccggcaacaagggcgcggtcgagcgtgcaatggcgctcgccaaggagcggggcgcgaagcgggccttgccgctgccggtcagcgtgccgtcgcactcttccctgatgcgcccggcagccgagaagctgctggcctaccttgagaacgtggcgatttccgcgccgcgtattccggtgcttcacaataccgacgtgcaatcccatgacgaggcggcggcgatccgcgccgccctcgccaagcaactgcatacgccggtccggtgggtcgaaaccgtgcgggcgctcaaggcggcgggtgtcgagcgcgtcattgaatgcggccccggcaaggtgctggccgggctcaacaaacgtatcgacgacagcctcgccgcgctcgcgctcgtcgacgaagcgagcctgcaggccgcactcaactaa

SEQ ID NO: 124346 - protein, 310 aa, Thiobacillus denitrificans ATCC 25259
MDTTMKLAFVFPGQGSQSVGMMQGWGARADIRATFAEASDALGQDLWALVTEGPAELLNQTVNTQPAMLAADVAAWRAWQTQGGAKPVVLAGHSLGEYAALVAADALSFVDAIKLVRFRAEAMQSAVPEGVGAMAAILGLDDDAVRAVCADAAAGEVVEAVNLNSPGQVVIAGNKGAVERAMALAKERGAKRALPLPVSVPSHSSLMRPAAEKLLAYLENVAISAPRIPVLHNTDVQSHDEAAAIRAALAKQLHTPVRWVETVRALKAAGVERVIECGPGKVLAGLNKRIDDSLAALALVDEASLQAALN

SEQ ID NO: 124347 - DNA, 939 bp, Pseudomonas fluorescens PfO-1
  CDS (1)..(939): transl_table=11
atgtctgcttccctcgcattcgtctttccaggacagggttcgcagtccctcggcatgctggccgagctgggcgcgcaacatccactgatcctcgaaaccttcaaagaagcatccgatgctctgggctatgacctgtgggcgctgacccagcagggtccggaagagctgctcaatcaaaccgacaaaacccagccggccattctgaccgcttcggtcgccttgtggcgtctgtggctggcggaaggtggcgcgcgtccggccttcgttgccggtcacagcctgggtgaatacagcgcgctggtcgctgccggcagtctgagcctggctgacgcggtaaaactcgtcgagcgccgtggccagttgatgcaggaagccgttccggccggtcagggcggcatggctgccatcctcggtctggaagatgccgacgtgctggcggcctgtgctgaagcggcgcaaggcgaagtggtcagtgcggtgaacttcaactccccgggccaggtggtgatcgccggtgccaaggcagccgttgagcgcgccatcgaaggctgcaaggcccgtggcgccaagcgtgccatgccgctgccggtcagcgtgccgtcgcactgtgaactgatgcgcccggctgccgagcgtttcgccgagtccatcgctgccatcgactggcaggcgccgcagatcccggtggtacagaacgtaagcgcccaggtgccggcggatctggaaaccctcaagcgtgatctgctggagcagctttacaagccggtccgctgggtcgagtccgtacagaccctggccgccaaaggcgcgaccaatctggtcgagtgcggccctggcaaggtgctggccggtctgaacaaacgttgcgccgaaggcgtttcgacttccaacctcaataccccagacgctttcgctgctgctcgcgcagcggctgtctga

SEQ ID NO: 124348 - protein, 312 aa, Pseudomonas fluorescens PfO-1
MSASLAFVFPGQGSQSLGMLAELGAQHPLILETFKEASDALGYDLWALTQQGPEELLNQTDKTQPAILTASVALWRLWLAEGGARPAFVAGHSLGEYSALVAAGSLSLADAVKLVERRGQLMQEAVPAGQGGMAAILGLEDADVLAACAEAAQGEVVSAVNFNSPGQVVIAGAKAAVERAIEGCKARGAKRAMPLPVSVPSHCELMRPAAERFAESIAAIDWQAPQIPVVQNVSAQVPADLETLKRDLLEQLYKPVRWVESVQTLAAKGATNLVECGPGKVLAGLNKRCAEGVSTSNLNTPDAFAAARAAAV

SEQ ID NO: 124349 - DNA, 933 bp, Rhodobacter sphaeroides 2.4.1
  CDS (1)..(933): transl_table=11
atgagccgcgcattcgtgttccccgggcagggcgctcagaccatcggcatgggccgcgcgctcgccgaagcctatcctgcggcgcgggcggtattcgacgaggtggacgaggcgctcggcgagaaactctcggcgctgatctgggacggatccatcgaggagctcacgctgacgcagaacgcgcagcccgcgctgatggcgacctcgatggcggccctcgcggcgctcgaggtcgaaggcctgggcatcgccaccgcctccttcgtggcgggtcactcgctcggcgaatattccgccctgtgcgcggcgaagtcgctgaagctctcggatacggcgcggcttctgcgcatccgcgggcaggccatgcaggaggcggtgccggtgggcgtgggcgcgatggccgcgctcctcgggctcgattacgacaccgcggtcgaggtcgcgcacgaggcggcgcagggcgaagtgtgccaggccgccaacgacaacgatccggcgcaggtggtggtctcgggccacaaggcggccgtcgagagggcagtggagatcgccaagggccgcggcgccaagcgggccatcctgctgccggtgagcgcccccttccattgcgcactgatgcagcatgccgcgagcgtcatgtccgaagctctcgccgcggtggtgatcgaggcgccggtctgcccggtcgtcgtgaacgtgcgcgccgaggcggtgtcggagccggaccggatccgtgcgctcctcgtggcacaggtgacgggggccgtccgctggcgcgagagcgtgatgtggatggaaaatgcgggcgtggacgagttctgggaaatcggtgccggcaaggcgctgtcgggcatgatcaagcggatcgccaagggcgcggcgacccgggccatcggcacgcccgaggatgtggcggctgccgccacggcctga

SEQ ID NO: 124350 - protein, 310 aa, Rhodobacter sphaeroides 2.4.1
MSRAFVFPGQGAQTIGMGRALAEAYPAARAVFDEVDEALGEKLSALIWDGSIEELTLTQNAQPALMATSMAALAALEVEGLGIATASFVAGHSLGEYSALCAAKSLKLSDTARLLRIRGQAMQEAVPVGVGAMAALLGLDYDTAVEVAHEAAQGEVCQAANDNDPAQVVVSGHKAAVERAVEIAKGRGAKRAILLPVSAPFHCALMQHAASVMSEALAAVVIEAPVCPVVVNVRAEAVSEPDRIRALLVAQVTGAVRWRESVMWMENAGVDEFWEIGAGKALSGMIKRIAKGAATRAIGTPEDVAAAATA

SEQ ID NO: 124351 - DNA, 939 bp, Carboxydothermus hydrogenoformans Z-2901
  CDS (1)..(939): transl_table=11
atgagtaaaactgcttttgtttttccaggtcaaggttcccagtatgttggtatgggcaaagatttatatgatgaactaccagtggtacgaaaatactttaatttagccaatgaaattttaggttatgacttaactaaaattatttttgaaggacccgaagaggaactcaataaaaccgaaaatacccagccggcaatcttaactttaagctatgctctgtatgtaactttagaagaaaagggaataaaagctaaaatttatggcggtcatagtttaggagagtttactgcccttaccgctgccggagtaataaattttgccgatgcagttagacttgtacatgtcaggggaaaactgatgcaggaagctgttcctttggggcaaggggtaatgcttgcggttatgggcatagaaaaagaagaacttgtggctacggtaaaaaaactccaggaatatggtatcatggaaatcgtgaactttaacggtgggggccagtacgtattggccggtgaaagtaaaataaaagagcttacaaaaacccaattaaaggaagtgggggctcgaaagattgtagaacttccggtttcagcaccttttcattcgtccctgatgagggctgccgcgttaaagtttcaggagtacttagaaaaggttgagtttttacctcctaaagtaccggttatcagtaatgttaccgctgaaatcttaactgatcctgtgaaaataaaggatttactatctaagcaaatggcttctccggttttatgggagcagtcggtgctggaaatggttaaggtcgaagttacgaaatttattgaaataggtcctggcaaggtattaactaacttaattaagcgcatagtcccggttgccacttttagtgtaaataatcttgaaagtttgcggtttttacttgataaccccggggaggttggataa

SEQ ID NO: 124352 - protein, 312 aa, Carboxydothermus hydrogenoformans Z-2901
MSKTAFVFPGQGSQYVGMGKDLYDELPVVRKYFNLANEILGYDLTKIIFEGPEEELNKTENTQPAILTLSYALYVTLEEKGIKAKIYGGHSLGEFTALTAAGVINFADAVRLVHVRGKLMQEAVPLGQGVMLAVMGIEKEELVATVKKLQEYGIMEIVNFNGGGQYVLAGESKIKELTKTQLKEVGARKIVELPVSAPFHSSLMRAAALKFQEYLEKVEFLPPKVPVISNVTAEILTDPVKIKDLLSKQMASPVLWEQSVLEMVKVEVTKFIEIGPGKVLTNLIKRIVPVATFSVNNLESLRFLLDNPGEVG

SEQ ID NO: 124353 - DNA, 897 bp, Synechococcus sp. CC9605; identical to SEQ ID NO: 59255
  CDS (1)..(897): transl_table=11

SEQ ID NO: 124354 - protein, 298 aa, Synechococcus sp. CC9605; identical to SEQ ID NO: 59256

SEQ ID NO: 124355 - DNA, 927 bp, Geobacter metallireducens GS-15
  CDS (1)..(927): transl_table=11
atgagtagacgagcattcatattccccggccagggttcgcaatatcccggcatgggaaaggatcttgcggataacttcgcactagcccggaagacattcgaggaggctgatgacgcccttggggacaacttgtctcgcctctgtttcgatggtcccgaagaccaattgaagctcaccgccaacacgcagccctctatcctcaccgttagtgtggctgccctgcgggtccttcaagaggagaccggcttgagtgcacagtattttgccggtcactctcttggagagtattccgcattggtggctgccggcgtcattcagttcgcagacgcggttagaacggttcgtgctcgcgggacctttatgcaggaggctgtgcctgtcggcgttggagccatggcagccatgttgagtatcgagcccgacgtccttgccgctatctgcgctgaggctgcccaaggcgaagaggtctcccctgccaacttcaattcgcctggacagattgtcattgcaggccacacgggggccgtcaatcgggccatagagattgccaaagccaaggggttccgcaaagcgatgctccttcctgtaagtgcccccttccattcgagcctcatggtgcctgccggtgaaaggcttgccggcgtccttgccccaattactgttggtgcattcagtgcgcccgtggtgacgaacgtggaggctaaacccaatgacgacaaagcacgggtgaaagagcttcttgttcgtcaggtgagtgctccggttctctgggatgcatcggtacgcgaaatggtggctcttggtgttacggagttcgtggaggttggcccgggcaaggttctgtcgggtctggtcaagaggattgacaaaggagtgtccacgaagaatgttgaagacgcggcaggaattaaggccatcggggagtag

SEQ ID NO: 124356 - protein, 308 aa, Geobacter metallireducens GS-15
MSRRAFIFPGQGSQYPGMGKDLADNFALARKTFEEADDALGDNLSRLCFDGPEDQLKLTANTQPSILTVSVAALRVLQEETGLSAQYFAGHSLGEYSALVAAGVIQFADAVRTVRARGTFMQEAVPVGVGAMAAMLSIEPDVLAAICAEAAQGEEVSPANFNSPGQIVIAGHTGAVNRAIEIAKAKGFRKAMLLPVSAPFHSSLMVPAGERLAGVLAPITVGAFSAPVVTNVEAKPNDDKARVKELLVRQVSAPVLWDASVREMVALGVTEFVEVGPGKVLSGLVKRIDKGVSTKNVEDAAGIKAIGE

SEQ ID NO: 124357 - DNA, 882 bp, Synechococcus elongatus PCC 7942; identical to SEQ ID NO: 59257
  CDS (1)..(882): transl_table=11

SEQ ID NO: 124358 - protein, 293 aa, Synechococcus elongatus PCC 7942; identical to SEQ ID NO: 59258

SEQ ID NO: 124359 - DNA, 939 bp, Rhodospirillum rubrum ATCC 11170; identical to SEQ ID NO: 59259
  CDS (1)..(939): transl_table=11

SEQ ID NO: 124360 - protein, 312 aa, Rhodospirillum rubrum ATCC 11170; identical to SEQ ID NO: 59260

SEQ ID NO: 124361 - DNA, 939 bp, Moorella thermoacetica ATCC 39073; identical to SEQ ID NO: 59261
  CDS (1)..(939): transl_table=11

SEQ ID NO: 124362 - protein, 312 aa, Moorella thermoacetica ATCC 39073; identical to SEQ ID NO: 59262

SEQ ID NO: 124363 - DNA, 930 bp, Burkholderia thailandensis E264
  CDS (1)..(930): transl_table=11
atgaaatttgcattcgtttttccgggccagggctcgcaatcggtcggcatgctcaatgcattcgccgatgtcgccgtcgtgcgcgagacgctcgacgaggcgtctgatgcgctcgggcaggatatcggcaagctgatcgccgacggcccggccgacgaactcaatctgacgacgaatacgcaacccgtgatgctgacggccgcgtatgcgtgctatcgcgcgtggcagcaggcgggcggcgcgcagccgtcgatcgtcgcgggccacagcctcggcgaatacacggcgctcgtcgccgcgggcgcgatcgcgtttcgcgacgcgcttccgctcgtgcgctttcgcgcgcaggcgatgcagacggccgtgcccgtcggcgtcggcggcatggcggcgattctcggcctcgacgacgatacggtgcgcgcagtgtgcgccgaggcgtcggcggcgggcgtcgtcgaagcggtgaatttcaatgcgcccgcgcaggtcgtgatcgcgggcacgaaggcgggcatcgagatggcctgcgagatcgcgaaggcgaagggcgcgaagcgcgcgctgcctctgcccgtgtcggcgccgttccactcgtcgctgctcaagcctgcctcggacaagctgcgcgactatctcgcgaacgtcgacgtgaagacgccgcggattcccgtcgtcaacaacatcgacgtcgcggtggtgtccgatcccgccgcgatcaaggatgcgctcgtgcggcaggcggcgggccccgtgcgctgggtcgagtgcgtgcggcacatcgcccgcgagggtgcgacgcacgtgatcgagtgcggtccgggcaaggtgctcgccggcctcacgaagcgtatcgacagcaacctggtcggcgcgtcggtgttcgatccggcgtcgctcgacgaagcgctcaagctcgccgcctga

SEQ ID NO: 124364 - protein, 309 aa, Burkholderia thailandensis E264
MKFAFVFPGQGSQSVGMLNAFADVAVVRETLDEASDALGQDIGKLIADGPADELNLTTNTQPVMLTAAYACYRAWQQAGGAQPSIVAGHSLGEYTALVAAGAIAFRDALPLVRFRAQAMQTAVPVGVGGMAAILGLDDDTVRAVCAEASAAGVVEAVNFNAPAQVVIAGTKAGIEMACEIAKAKGAKRALPLPVSAPFHSSLLKPASDKLRDYLANVDVKTPRIPVVNNIDVAVVSDPAAIKDALVRQAAGPVRWVECVRHIAREGATHVIECGPGKVLAGLTKRIDSNLVGASVFDPASLDEALKLAA

SEQ ID NO: 124365 - DNA, 966 bp, Syntrophus aciditrophicus SB
  CDS (1)..(966): transl_table=11
atgattagggagcctgccatgattcatgaaaactctgcagccgtcgtattcccgggccagggatctcagcggcccggtatgggaaaagatttttttgataatgtccccatatccagacagacatttgaggaagcatcagatgctctgggctgggatgttgccgctctgtgtttttccgaggatgaacgcctcaacctgacggaatttactcagccctgtattgttaccactgaaatcgcgatgttccgggcagtgcagactcttttttccttctctccctccttctatggcggacacagtctcggtgaattttcagctcttgttgcagccggcgtttttccatttcaggatacgctgcgcatcgttcacgaaagaggccgtttgatgcagaacgcggtccccgtcggtgttggaggaatggcagccgttattttaaacgatctggatgtccagcaaatccgcagcctgctttccgatctccctgtggatgtggccaatgaaaattctctgcaccaggttgtgatcagcggagatgccaaagcattgcccgtcgcggaaagccgcctgacagagcagttcacggattcctccttccgggtggttccgttgcgggtcagcgcaccctttcacagccggttcatgaaatccattgaagagccttttgagcaggtattgcgcgcctcttcacccctctggaagtctcagaacgcggataaggtgacttccaactatacgggtggctatcaccttcccacgactgaagctgtttccacggctctcgttctgcagctcagccacgccgttcgatgggtcgataacatgagaaccctgtcttcctcaacaaaaagtgtctttgaagtcggacccggtcggccgcttcgtgactttttcaagacaatcggcataacctgttcttccgtcaccaccctttcggctgctgaacgtcttttccgtaatgaaaagtga

SEQ ID NO: 124366 - protein, 321 aa, Syntrophus aciditrophicus SB
MIREPAMIHENSAAVVFPGQGSQRPGMGKDFFDNVPISRQTFEEASDALGWDVAALCFSEDERLNLTEFTQPCIVTTEIAMFRAVQTLFSFSPSFYGGHSLGEFSALVAAGVFPFQDTLRIVHERGRLMQNAVPVGVGGMAAVILNDLDVQQIRSLLSDLPVDVANENSLHQVVISGDAKALPVAESRLTEQFTDSSFRVVPLRVSAPFHSRFMKSIEEPFEQVLRASSPLWKSQNADKVTSNYTGGYHLPTTEAVSTALVLQLSHAVRWVDNMRTLSSSTKSVFEVGPGRPLRDFFKTIGITCSSVTTLSAAERLFRNEK

SEQ ID NO: 124367 - DNA, 936 bp, Novosphingobium aromaticivorans DSM 12444
  CDS (1)..(936): transl_table=11
atgcgagcattcgtttttccggggcagggcagccagaaggtcggcatgggtcttgaactcgccgaagccagcgcggcagcccgcgaggtcttcgaggaggttgacgacgcgctgggccagaagttgttccagatcatgaaggacggcccggaagacgctttgacgcttaccgaaaatgcacagcctgcaatcatggccaacgccatcgcggtgcttcgtgtgctcgagcgggagggcggcatcaccctggccgacaaggcggacttcgtcgccgggcacagccttggcgaatataccgcgctttgtgcggcaggggcattcagcctttccgacacggcccgacttctgaagttgcgcgggcagtccatgcaggcggcggtgcctgtgggcgagggcgcaatgtgcgcgcttcttggcgcggacatcgagaaggcaacggcgctggccgaggccgccgccgaaggcgaagtctgcaccgtcgccaacgacaacgatccgacgcaggtcgtgctgtccggccacaagggcgcgatcgagcgtgcggtcggcctcgtcaaggagcacggcatcaagcggggcgtgctgctgccggtatcggcaccgttccactgccctctcatgcagcccgcagccgacgcgatggcagaggcgttcgagaagacgccgcctggacccctgcgcgtcgcgctgttcgccaatgtcacggcatcgatcgtgaccgatccggcagaggtgcagcgcctgctggtcgaacaggtaacgggccgcgtgcgctggcgcgaaagcgcgatcgcgatgcgcgaggccggcgtcgatcagttcatcgaacttggcggcaaggtccttggcccgatgatcaaccgcaccgttgcggacgtctccatcaccagcgtcgtcggcatggccgacatcgaagccatcctgaaggagctctga

SEQ ID NO: 124368 - protein, 311 aa, Novosphingobium aromaticivorans DSM 12444
MRAFVFPGQGSQKVGMGLELAEASAAAREVFEEVDDALGQKLFQIMKDGPEDALTLTENAQPAIMANAIAVLRVLEREGGITLADKADFVAGHSLGEYTALCAAGAFSLSDTARLLKLRGQSMQAAVPVGEGAMCALLGADIEKATALAEAAAEGEVCTVANDNDPTQVVLSGHKGAIERAVGLVKEHGIKRGVLLPVSAPFHCPLMQPAADAMAEAFEKTPPGPLRVALFANVTASIVTDPAEVQRLLVEQVTGRVRWRESAIAMREAGVDQFIELGGKVLGPMINRTVADVSITSVVGMADIEAILKEL

SEQ ID NO: 124369 - DNA, 930 bp, Neorickettsia sennetsu str. Miyayama; identical to SEQ ID NO: 59265
  CDS (1)..(930): transl_table=11

SEQ ID NO: 124370 - protein, 309 aa, Neorickettsia sennetsu str. Miyayama; identical to SEQ ID NO: 59266

SEQ ID NO: 124371 - DNA, 945 bp, Saccharophagus degradans 2-40
  CDS (1)..(945): transl_table=11
atgagcactacggcaaatcttgctttcgtttttcccggtcaggggtcgcaaaaagtgggtatgcttgcggacttttatcaagaaggttcggtatttaagcaaacttttgacgaagcgcaggcagcgctgggttacgatctttgggcgctaatccaaagtggaactcaggatgagctaaatatgaccgaagttacacagccagcattgttggcttgcagtgtagcgctatggcgcaagtggcaggcagaaggtggtgctcagcccgcttatatgtcgggtcacagcttaggtgaatggtcggcattggtgtgtgcaggtgttgttgcatttgaagatgcgctgcgtttagtgcgctcacgcggcaaatacatgcaagaggctgtgccagcgggtgttggcgctatggccgccattattggcttagacgatgcagcagtagaagctgcatgcgcaactgcagcagaggggggcgatattgtgtccccagtaaactacaactcaccaggtcagttggttattgccggtatgaaagcgggcgtagagaaggctatggagttgtgtaaagaagccggcgccaagcgtgcgctgccgctgcctgtaagtgcgccattccacacggcacttatgaaacccgccgccgataagttggcagccgaagtagaggcggttgagtttaatgctccgttaataccggttgtgcacaatgtaaccgctaaaacagaagccgatgcaaacaccattaaggcgctgatgattcagcaaatttctgcccctgtgttgtgggtagattgcgtaaatgaattggtagcacttggagtagaaaaaaccgttgagtgcggcccgggcaaggtgttatccggcttgaataagcgcattcaaaaatcattggcggtttccgccacagaaacgacagatttgtttgccgaagctttggcaaatgcataa

SEQ ID NO: 124372 - protein, 314 aa, Saccharophagus degradans 2-40
MSTTANLAFVFPGQGSQKVGMLADFYQEGSVFKQTFDEAQAALGYDLWALIQSGTQDELNMTEVTQPALLACSVALWRKWQAEGGAQPAYMSGHSLGEWSALVCAGVVAFEDALRLVRSRGKYMQEAVPAGVGAMAAIIGLDDAAVEAACATAAEGGDIVSPVNYNSPGQLVIAGMKAGVEKAMELCKEAGAKRALPLPVSAPFHTALMKPAADKLAAEVEAVEFNAPLIPVVHNVTAKTEADANTIKALMIQQISAPVLWVDCVNELVALGVEKTVECGPGKVLSGLNKRIQKSLAVSATETTDLFAEALANA

SEQ ID NO: 124373 - DNA, 930 bp, Methylobacillus flagellatus KT
  CDS (1)..(930): transl_table=11
atgaaatttgcatttttctttccggggcaaggttcacaatccgttggcatgatgcaggggtttggcgatcttgctgtgattaaggatacattcgtcgaggcttccgatgtgcttggcgtcgatttttggcgcatggcaacagagcctaacgatgcgctcaatcagactgccaatacgcagccactgatgctggctgccggcgttgcgacatggcgcgcgtggcaatcccaaggtgggcccttgccaaccgtgctagctggccatagcctgggtgaatacactgcgttggttgcggccggcatcgtgtcctatgaggctgcattgcctttggtgcgtttccgggccgacgtcatgcagcgcgccgtggcagaaggtgtgggtgccatggcggccgtgcttgggttgggcgatgatgctgttcgcgcagcctgtatcgaggccgcgcaaggagaggtgctggaagcagtcaatctgaactccccgggtcaggtcgtgatcgcggggcacaaggctgcggttgagcgtggtattgaggctgccaaggcgaaaggcgccaaacgcgccttgctgctgccggtcagcgtaccgtcccattgtgccctcatgaagcctgcggcagacgagctggccgagtatctcaaggatgtggatttcgcatccgcccaaatcccggtactgcataatgcagatgtggctgcgtatgacgatgcgaccaaggtcaaggatgctctggtgcgccagttgtacagccctgtgcgttgggtagagacagttcaagctgtgcatgccaccggagtgacggccagtgcggagtgcggccctggcaaagtattggccgggctggtcaagcgtacggtcgccgagctgccatgcatcgcattggtcaatcaagaagccctggcagaagccatggcgcaattcaatcaataa

SEQ ID NO: 124374 - protein, 309 aa, Methylobacillus flagellatus KT
MKFAFFFPGQGSQSVGMMQGFGDLAVIKDTFVEASDVLGVDFWRMATEPNDALNQTANTQPLMLAAGVATWRAWQSQGGPLPTVLAGHSLGEYTALVAAGIVSYEAALPLVRFRADVMQRAVAEGVGAMAAVLGLGDDAVRAACIEAAQGEVLEAVNLNSPGQVVIAGHKAAVERGIEAAKAKGAKRALLLPVSVPSHCALMKPAADELAEYLKDVDFASAQIPVLHNADVAAYDDATKVKDALVRQLYSPVRWVETVQAVHATGVTASAECGPGKVLAGLVKRTVAELPCIALVNQEALAEAMAQFNQ

SEQ ID NO: 124375 - DNA, 936 bp, Ralstonia metallidurans CH34; identical to SEQ ID NO: 59269
  CDS (1)..(936): transl_table=11

SEQ ID NO: 124376 - protein, 311 aa, Ralstonia metallidurans CH34; identical to SEQ ID NO: 59270

SEQ ID NO: 124377 - DNA, 966 bp, Acidobacteria bacterium Ellin345
  CDS (1)..(966): transl_table=11
atgacacatcaacatgggccgatcgccttcctcttcccggggcaagggtcgcaatcggtgggtatgggcaaagaattggcggcactgtatcccgtggcgcaggagaccttcgacgaggccgatgcggcgctcggttacagactttcgcaactgtgctgggagggccccgaagaccagctcaagatgaccgagatcacgcagccagcgattttgaccgcgtcggtggcggtgtggcgcgtgcttcagtcgaaggggattaatccgcagtacgtcgcgggacatagcctgggcgaatactcggcacatgttgcggcgggaacactggacttcaaagacgcggtgcggacggtacgcaatcgcggcaagtatatgcaggaagccgtccctgtcggcgtgggagcaatggccgctgtactgatgctgcccgccgacgaagtgaagaaggtctgtgaggaagcggcgcagggcgaagtttgccaggcagcgaatttgaattcgccgaaccagacggtgatctccggaagcaaggctgccgtcgagcgggcggcggaactggctaagaaacgcggagccaagcgcgccgtgatgcttccggtcagcgcacccttccattgcgcgctgatgcagccggcgcaggatcggcttgccacggatctcgcgacgctggcgtttcataatcccgaagtgccggtgctgtgcaatgtggatgtcgcgctgatcaccaccgctgatgccgcgcgcgatacgctgacgcgccaggttacaggcgcggtgcagtgggatgcgtcgatgcgaaagctgattgagctgggcgtgaagacgttcgtcgaagttggaccgggcacggtgctaagcggattgatgaagcagattgagaagacccagacctgcttcaacgtggagaacgaagattcgctgcagaaggcgatgaatggactgctgtcgaacgcgggacagcagggataa

SEQ ID NO: 124378 - protein, 321 aa, Acidobacteria bacterium Ellin345
MTHQHGPIAFLFPGQGSQSVGMGKELAALYPVAQETFDEADAALGYRLSQLCWEGPEDQLKMTEITQPAILTASVAVWRVLQSKGINPQYVAGHSLGEYSAHVAAGTLDFKDAVRTVRNRGKYMQEAVPVGVGAMAAVLMLPADEVKKVCEEAAQGEVCQAANLNSPNQTVISGSKAAVERAAELAKKRGAKRAVMLPVSAPFHCALMQPAQDRLATDLATLAFHNPEVPVLCNVDVALITTADAARDTLTRQVTGAVQWDASMRKLIELGVKTFVEVGPGTVLSGLMKQIEKTQTCFNVENEDSLQKAMNGLLSNAGQQG

SEQ ID NO: 124379 - DNA, 936 bp, Silicibacter sp. TM1040; identical to SEQ ID NO: 59271
  CDS (1)..(936): transl_table=11

SEQ ID NO: 124380 - protein, 311 aa, Silicibacter sp. TM1040; identical to SEQ ID NO: 59272

SEQ ID NO: 124381 - DNA, 942 bp, Myxococcus xanthus DK 1622
  CDS (1)..(942): transl_table=11
atgtcgaaggtcgcgttcgtgttccccgggcaaggcagccaggccgtggggatgggcaaggacctgtatgagaagttccccgaggcccgggccgtgttcgacgcggttgatgccgccctgggggagaagctctccaccctctgtttcgagggcccggacgaggcgctgaagctcacggccaacacccagccggccatcctcacggtgtcgctggcggcgcacgcggtgttcgcgaagcggggaccggcgccgtccttcgtggcggggcactcgctgggcgagtactcggcgctggtggcggcgggcgccatggacctgggcgacgcggtccgggtggtgcgcgcgcgcggcaccttcatgcaggaggcggtgcccgcgggcgtgggcgccatggccgcggtgctgggcctggttccggagaaggtgaaggcggcctgtgacgcggcggccgaggggcaggtggtgtcgccggcgaactacaactcgcccgagcagacggtcatcgccggtgacgcggcggccgtggagcgcgccggggtgaagtgcaaggaggccggcgccaagcgcgtgatgcccctgccggtatccgcccccttccactgcgcgctgatggcgccggtgcagccccggctggcggaggtgctgggcggcatccaggtgtccgcgccgtccgtgccggtggtgaccaacgtggaggcccgtcccaacgcggacgcgtcgcgggtggtgccgctgctcctggagcaggtgagctcgccggtgcgctggattgagtgcgtggaggcgctgaaggccgaaggcgtcacccgcatcatcgagctggggccgggcaaggtgctggtgggcctggtcaagcgcatcaccaaggacatcgagctgttcaacgtcgaggactccgcgagcctggacaaggcgctcgcggcactgggggtggcagcatga

SEQ ID NO: 124382 - protein, 313 aa, Myxococcus xanthus DK 1622
MSKVAFVFPGQGSQAVGMGKDLYEKFPEARAVFDAVDAALGEKLSTLCFEGPDEALKLTANTQPAILTVSLAAHAVFAKRGPAPSFVAGHSLGEYSALVAAGAMDLGDAVRVVRARGTFMQEAVPAGVGAMAAVLGLVPEKVKAACDAAAEGQVVSPANYNSPEQTVIAGDAAAVERAGVKCKEAGAKRVMPLPVSAPFHCALMAPVQPRLAEVLGGIQVSAPSVPVVTNVEARPNADASRVVPLLLEQVSSPVRWIECVEALKAEGVTRIIELGPGKVLVGLVKRITKDIELFNVEDSASLDKALAALGVAA

SEQ ID NO: 124383 - DNA, 942 bp, Mesorhizobium sp. BNC1
  CDS (1)..(942): transl_table=11
atgacgatcgccttcaccttcccggggcagggaagtcaggccgtcgggatgggccgcgacctggcggaggcatttcccgaggcgcgcgacgtctttcaggaagtggacgaggcgctcgggcagtcgctttccaagctgatgtgggaaggaccggaggaggaattgacgctgaccgcgaatgcgcagccggcgctgatggcggtgtccctggcggctatccgcgtgatggaaaaggccgggctcccgctcaaggacaaagtggcgtatgtggccggccattcgctgggggaatattcggcgcttgccgcggcagggaccttttctctcctcgacacggcgcggctcctgcgcatacgcggcaatgccatgcaggccgccgtgccggtgggcgagggcgcgatggccgccattatcggcctggagacggccgacgtggaagatgtttgcctgaaagccgccaatgggagcgtatgccagatcgccaatgacaatggcggcgggcagctcatcatttccggcgcgaaagcggcggtggaggaggccgcacggcttgcaggcgagcggggcgccaagcgcgcaatcatgctgcctgtttcggctcccttccactccgcgctgatggagcccgctgccgtgcgcatgcgcgatgcgctggccgaggtggagaagcatgcgccttcagtgccggtcatcgccaatgtcaccgtcagccccctgagcgatcctcaggagatcgcggagcggctggttgaacaggtgacgggacgtgtacgctggcgcgagacggtggaatggttcgctcaaaacggcgtggatacgttatacgaaatcggttccggcaaggtgttgacgggcttggcacgccgcatcaaccgtgatctcaacgcattagcagtgaatacaccggcagacatcgaagcaacgctgaaagcgcttctttga

SEQ ID NO: 124384 - protein, 313 aa, Mesorhizobium sp. BNC1
MTIAFTFPGQGSQAVGMGRDLAEAFPEARDVFQEVDEALGQSLSKLMWEGPEEELTLTANAQPALMAVSLAAIRVMEKAGLPLKDKVAYVAGHSLGEYSALAAAGTFSLLDTARLLRIRGNAMQAAVPVGEGAMAAIIGLETADVEDVCLKAANGSVCQIANDNGGGQLIISGAKAAVEEAARLAGERGAKRAIMLPVSAPFHSALMEPAAVRMRDALAEVEKHAPSVPVIANVTVSPLSDPQEIAERLVEQVTGRVRWRETVEWFAQNGVDTLYEIGSGKVLTGLARRINRDLNALAVNTPADIEATLKALL

SEQ ID NO: 124385 - DNA, 876 bp, Cytophaga hutchinsonii ATCC 33406
  CDS (1)..(876): transl_table=11
atgaaagcatacgttttccctggtcaggggtctcaattttcaggaatgggtaaagacctttttgaaaactctgcgaaagcaaaagaattatttcttcaggcaaatgatattctgggattcgatattacgaaagtaatgtttacaggtacagacgaagaattaaagcaaacgaatgtaactcaaccggctatatttattcattctgttatacttgctaagatcagcgaaacatttgcacctgaaatggtggcaggtcactcgttgggcgagttttctgccttagttgcaaatggtacattatcttttgaagatggattaaaattagtatccaagcgtgctgctgccatgcagaaagcatgtgaacttgtaccgggtacaatggcagctgtattggccttagcggatgaaaaggttgaagagatatgtgcatctattgcagatgaagttgttgtcgcagcgaattataactgtccgggacaattagttatttccggcagtgtaaaaggaatagaaaaagcatgtgagctgatgaaagcagccggtgcaaaacgtgcgttggtattacctgttggtggcgcattccattcgcctttaatggaacctgcccgtattgagttagaagacgcaattaaaaatacattgttcagcaagcctgcatgtgccgtttaccaaaacgtaaatgccaagccttcaacagatgttgaagcaatcaaattaaacctgattgctcagttaacggctccggtccgctggacacagtctgtacagaatatggtaaaagatggcgcaacaacgtttgttgaatgtggtccgggtaaagtattacaaggtcttgtaaagaaaattgaatccggcacggaggtagcttcgatttaa

SEQ ID NO: 124386 - protein, 291 aa, Cytophaga hutchinsonii ATCC 33406
MKAYVFPGQGSQFSGMGKDLFENSAKAKELFLQANDILGFDITKVMFTGTDEELKQTNVTQPAIFIHSVILAKISETFAPEMVAGHSLGEFSALVANGTLSFEDGLKLVSKRAAAMQKACELVPGTMAAVLALADEKVEEICASIADEVVVAANYNCPGQLVISGSVKGIEKACELMKAAGAKRALVLPVGGAFHSPLMEPARIELEDAIKNTLFSKPACAVYQNVNAKPSTDVEAIKLNLIAQLTAPVRWTQSVQNMVKDGATTFVECGPGKVLQGLVKKIESGTEVASI

SEQ ID NO: 124387 - DNA, 945 bp, Clostridium perfringens ATCC 13124
  CDS (1)..(945): transl_table=11
atggctaaactaggatttttatttgcagggcaaggagcccaatatgtaggaatgggcaaagaattctttgataactttgaagaaagtaaagaagtatttaaaagaagtagtgaagccttaggcatagatatggaagaactttgttttaatgatcctgagggattattaaataaaactgaatttactcagcctgcaataataactacaaacatggctatacttacagcactagataaattaggagttaaatctcatataagttgtggattaagcttaggagaatattctgcacttattcatagtggtgccattaattttgaagatggagttaaactagttaaaaaaagaggtaaatttatgcaagaagctgtggcagaaggtattggtggaatggttgcagttttaagaatgactccagaacaagttgatgaaataatagaaaaaagttctccatatggaatagttgagggtgcaaattataattcacctggccaaattgttatttctggagaattagtagctttagaaaaagctatggaatttataaaagaagttggtggaagagctataaaattacctgtatcagctccatttcactgttcaatgttacagccagcagctgagaaattagaagatgaattaaataaaatttcaataaataaattaaatggaattgttatgtctaatgttaagggagaagcctatttagaagatgataatataatagaacttttaacttctcaagttaaaaagcctgttttatttataaatgatatagaaaaaatgattgaaagtggtgtagatacttttatcgaaataggtcctggtaaagctttaagtggatttgttaaaaaaataaataaaaatgttacagtgcttaatgtagaggatttaaaatctttagaaaaaacattatcaaaattaagagagatggaggtactttaa

SEQ ID NO: 124388 - protein, 314 aa, Clostridium perfringens ATCC 13124
MAKLGFLFAGQGAQYVGMGKEFFDNFEESKEVFKRSSEALGIDMEELCFNDPEGLLNKTEFTQPAIITTNMAILTALDKLGVKSHISCGLSLGEYSALIHSGAINFEDGVKLVKKRGKFMQEAVAEGIGGMVAVLRMTPEQVDEIIEKSSPYGIVEGANYNSPGQIVISGELVALEKAMEFIKEVGGRAIKLPVSAPFHCSMLQPAAEKLEDELNKISINKLNGIVMSNVKGEAYLEDDNIIELLTSQVKKPVLFINDIEKMIESGVDTFIEIGPGKALSGFVKKINKNVTVLNVEDLKSLEKTLSKLREMEVL

SEQ ID NO: 124389 - DNA, 939 bp, Haemophilus somnus 129PT
  CDS (1)..(939): transl_table=11
atgaaaaaatttgcaatggttttccctggacaaggctcacaagcagtgggaatgctggctgaattggctgcagaatatccgattgttgaagaaacttttcagcaagcttcctccgttttgggttatgatttatggcagttagtgcaacaaggtcctgcagaagaattgaataaaacgtggcaaacacaacccgcacttttagctgcttccgtggcaatttatcgtgtatggcaacaaaaatatcctcacctaaaacctgaagtgatggcaggacatagtttaggtgaatattccgctttagtatgtgccggtgtaattgatttccaagatggaattaaattggtacaacttcgtggtaagttaatgcaacaagcagttccggaaggaacaggtgccatgtacgcaattataggtttagataatgaaagcattgttcaagcttgcaaagcgtctgaacaaggtgagattgtgtcagcggtaaactttaattcaccgggacaagtggtgattgcaggagcaaaagtcgcagtagaacgtgctgctgttgcttgtaaagaggcgggagcaaaacgtgcgttgccgttagcagtcagcgtgccttctcattgtgcattaatgaaaccagcagcagaagaattggcagtagcgttagaaaaaatgacgtttagcatcccacaaattccggttattaataatgttgatgtaaaagcagaaaatgaaaccactaagattcgtaccgcacttgtgcgtcagctttatagtcctgtacgttggactgaaatagttgagaatatggcaagagagggaattgaacttttatttgagatgggacctaataaggtgctcactggattaactagtcgtattgttaaagagttgaatgctaaagcagtcaatgatttatcttcattgaatacagtggaagaaagcttagattaa

SEQ ID NO: 124390 - protein, 312 aa, Haemophilus somnus 129PT
MKKFAMVFPGQGSQAVGMLAELAAEYPIVEETFQQASSVLGYDLWQLVQQGPAEELNKTWQTQPALLAASVAIYRVWQQKYPHLKPEVMAGHSLGEYSALVCAGVIDFQDGIKLVQLRGKLMQQAVPEGTGAMYAIIGLDNESIVQACKASEQGEIVSAVNFNSPGQVVIAGAKVAVERAAVACKEAGAKRALPLAVSVPSHCALMKPAAEELAVALEKMTFSIPQIPVINNVDVKAENETTKIRTALVRQLYSPVRWTEIVENMAREGIELLFEMGPNKVLTGLTSRIVKELNAKAVNDLSSLNTVEESLD

SEQ ID NO: 124391 - DNA, 897 bp, Synechococcus sp. CC9311
  CDS (1)..(897): transl_table=11
atgacgattgcctgggtgttccccggacaggggtctcagaagtcaggcatggctgagcccgtgctgacccttcccggagcggaagaacgatttgcacttgcttcccgtctgctgggcagagatttgctggcgatctgccaaggagaggctgatacgcaagtcgatccctctgatctcaacgacacccgcaacacccagccagcgctcttcgtcgttgaaagcctgattgttgatgaactccgcagacaagggcgcgagccagcgtttgtggctggccacagtctcggagaactcgttgctctgtatgccgcaggtgtctttgatgtgaccacgggtcttgagttgatgcagcggcgctcagagctcatggcagccgctggaggcggagcgatgactgccgtgatcggctttgatcgcgatcaacttgaaagccttgtccacagcacggatggcgtggtcatcgccaatgacaacagcgctgcccaggttgtgatttcagggaaccccgaggcggtaacaagtgtgagtgagcaactcacctgcaagcgcgcgattcctctggccgtctccggagcatttcactcgccattgatggcagaagcgtctgcagcgttcaaggttcacctggaaagcctggctttcgaagatgctggcttcccggtgctgagcaacacagatccaaccccatgccgcgacgccgctcaactaaagcagcgcttgactcaacagatgaccacgggcgttcgctggagagagaccatggaaacgctgacgtcagccggggttgacactttgatcgaagtgggaccagggaatgtcctcagtggcctggccaaaagggccatgaagggtgtcacgaccgcccagctctcgagctccgctgatttaggtctctaa

SEQ ID NO: 124392 - protein, 298 aa, Synechococcus sp. CC9311
MTIAWVFPGQGSQKSGMAEPVLTLPGAEERFALASRLLGRDLLAICQGEADTQVDPSDLNDTRNTQPALFVVESLIVDELRRQGREPAFVAGHSLGELVALYAAGVFDVTTGLELMQRRSELMAAAGGGAMTAVIGFDRDQLESLVHSTDGVVIANDNSAAQVVISGNPEAVTSVSEQLTCKRAIPLAVSGAFHSPLMAEASAAFKVHLESLAFEDAGFPVLSNTDPTPCRDAAQLKQRLTQQMTTGVRWRETMETLTSAGVDTLIEVGPGNVLSGLAKRAMKGVTTAQLSSSADLGL

SEQ ID NO: 124393 - DNA, 927 bp, Shewanella sp. MR-7
  CDS (1)..(927): transl_table=11
atggaaaatgtagcttttgtattcccaggccaaggttcacaggctctaggcatgttagccgagctggctggtgcacagccgattgtgggacaaacctttgccgaagcgagtgaggtgttagggtatgatttgtgggctttagtgcaagacggccccgtagaaaccttaaatgaaaccgataaaacccagccagctttattagcggcaagtgtcgctatttggcgtgcctatgtagcctctggcaaggccatgcctgcgatgttagcgggtcacagcctaggcgaatattctgcattagtttgtgccggtgtcatcgactttaaagatgcgatcaaactggttgagctacgtggtcaactgatgcagcaagccgtgccagcgggtactggcgctatgtacgcgattatcggtcttgataatgacggtattgctaatgcgtgtattgaagctgcccaaggcgaagtggtgagcccagttaacttcaacagcccaggtcaagtggttatcgccggtcaaaaagaagcggttgaacgtgctgctgcggcctgtaaagcggcgggcgccaaaatggcggttgctctgcctgtcagcgtgccatcacactgcgcattaatgaaacctgcggctgataaactagccattgctttaaatgatgtgcagtttaatgcgccaagcatcactgttatcaataacgtggatgtggcatcacccactgcggttgccgacattaaagatgcgctggttcgtcaactgtattgcccagtacgctggagcgaaaccgttgaattaatggccgaaaaaggtattacacagttagttgagtgtggtcctggtaaagtattgacaggtcttgcgaaacgcattaataaatctctttctgcccaagcagttaatgacgttgcatcccttgccgcgttaactgaataa

SEQ ID NO: 124394 - protein, 308 aa, Shewanella sp. MR-7
MENVAFVFPGQGSQALGMLAELAGAQPIVGQTFAEASEVLGYDLWALVQDGPVETLNETDKTQPALLAASVAIWRAYVASGKAMPAMLAGHSLGEYSALVCAGVIDFKDAIKLVELRGQLMQQAVPAGTGAMYAIIGLDNDGIANACIEAAQGEVVSPVNFNSPGQVVIAGQKEAVERAAAACKAAGAKMAVALPVSVPSHCALMKPAADKLAIALNDVQFNAPSITVINNVDVASPTAVADIKDALVRQLYCPVRWSETVELMAEKGITQLVECGPGKVLTGLAKRINKSLSAQAVNDVASLAALTE

SEQ ID NO: 124395 - DNA, 945 bp, Alkalilimnicola ehrlichei MLHE-1
  CDS (1)..(945): transl_table=11
atgagcgataacgacaccaagctcgcctttgtcttccccggccaggggtcccagtccgtcggcatgatggacgatctggcctcggccagccccgtcgtggaacagaccttccgggaggccggggatgccctcggcgccgatctctgggacctggtccgcaacggcccggaagacacccttaaccgcaccgactacacgcagccggccatgctggccgccggggtcgccacctggcgggcctggcgctcggagggcggtgccgagccgacggtgttggccgggcacagtctcggcgagtacaccgccctggtctgcgccggcgccctgggcttccaggatgcggtgcgcctggtcgctcagcgcggccgctttatgcaggaggcggttccggccgggcagggcgccatggcggcggtcctgggcctgaacgatcaggcggttatcgacgcctgcgccgcggccgccggggacgaggtggtctcggcggtcaacttcaatgcccccggtcaagtcgttatagcgggcgcccgagctgcggtggagcgggccatggcggcctgcgagtccgccggggccaagaaggtgatgcccctcccggtgagcgttccctcccactgcgccctgatgaagccggcggccgagcgcctggccgaggtgctggccgatatccccctggaagcaccggccatccccgtcgtgcacaacgtggacgtccagaccgcaagtgacccgaatgcaatccgcgagcggctgatcgcccaactgcacaaccccgtccgctgggtggagaccatccacgccttggtggatcagggtgtcacccaggtggtggaatgcggcccgggcaaggtccttgccggcctcaaccggcggattcagcgtcgcctgcccgtcgtggcccttgcggatgcgaagagcctggaaaaggccaaggcaagtcaataa

SEQ ID NO: 124396 - protein, 314 aa, Alkalilimnicola ehrlichei MLHE-1
MSDNDTKLAFVFPGQGSQSVGMMDDLASASPVVEQTFREAGDALGADLWDLVRNGPEDTLNRTDYTQPAMLAAGVATWRAWRSEGGAEPTVLAGHSLGEYTALVCAGALGFQDAVRLVAQRGRFMQEAVPAGQGAMAAVLGLNDQAVIDACAAAAGDEVVSAVNFNAPGQVVIAGARAAVERAMAACESAGAKKVMPLPVSVPSHCALMKPAAERLAEVLADIPLEAPAIPVVHNVDVQTASDPNAIRERLIAQLHNPVRWVETIHALVDQGVTQVVECGPGKVLAGLNRRIQRRLPVVALADAKSLEKAKASQ

SEQ ID NO: 124397 - DNA, 951 bp, Hyphomonas neptunium ATCC 15444; identical to SEQ ID NO: 59273
  CDS (1)..(951): transl_table=11

SEQ ID NO: 124398 - protein, 316 aa, Hyphomonas neptunium ATCC 15444; identical to SEQ ID NO: 59274

SEQ ID NO: 124399 - DNA, 945 bp, Rhizobium leguminosarum bv. viciae 3841; identical to SEQ ID NO: 59275
  CDS (1)..(945): transl_table=11

SEQ ID NO: 124400 - protein, 314 aa, Rhizobium leguminosarum bv. viciae 3841; identical to SEQ ID NO: 59276

SEQ ID NO: 124401 - DNA, 939 bp, Pseudomonas aeruginosa UCBPP-PA14
  CDS (1)..(939): transl_table=11
atgtctgcatccctcgcattcgtcttccccggccagggttcgcaatccctcggcatgctggccgagctgggcgcccagcaggcgctggtgcgcgataccttcgccgaggcctccgaggcgctcggttacgacctttgggcgctggtccagaatggacctgaagagcgcctgaaccagaccgacaagacccagccggccatcctcacggtttcgatcgcgctctggcgcctctggctggccgagggcggcgcgcgcccggcgttcgtcgccgggcacagcttgggcgaatattccgcgctggtcgcggccgaaagcctggcgttcgccgatgcggtcaagctggtcgagcgtaggggccaactgatgcagcaggcggttccggcggggcagggcggcatggccgcgatcctaggcctggaagacgccgatgtattggcggcctgtgccgaggcggcccagggcgaggtggtcagcgcggtcaacttcaacgcgccggggcaggtagtgatcgccggtgccgcggctgccgtggagcgtgccatcgaggcgtgcaaggcgcgcggcgccaagcgcgcggtggcgctgccggtcagcgtgccgtcgcattgcgaactgatgcgtccggccgccgagcagttcgccgcctcggtcgaaagcttgcagtggcaggcgccgaagattgcgctggtgcagaacgtcagcgccgccgtgccggctgatctcgatacgctgcgccgcgacctgctggcacagctgtacagcccggttcgctgggtggagagcatccagctgctggcggaaaagggcgtcaccgagctggtcgagtgcgggccgggcaaggtcctggcaggcctcaacaggcgctgtgcgaagggcatcaatacccatggcctggatggtgtcgaggcgttcgccgccacgcgcgccgccctggcctga

SEQ ID NO: 124402 - protein, 312 aa, Pseudomonas aeruginosa UCBPP-PA14
MSASLAFVFPGQGSQSLGMLAELGAQQALVRDTFAEASEALGYDLWALVQNGPEERLNQTDKTQPAILTVSIALWRLWLAEGGARPAFVAGHSLGEYSALVAAESLAFADAVKLVERRGQLMQQAVPAGQGGMAAILGLEDADVLAACAEAAQGEVVSAVNFNAPGQVVIAGAAAAVERAIEACKARGAKRAVALPVSVPSHCELMRPAAEQFAASVESLQWQAPKIALVQNVSAAVPADLDTLRRDLLAQLYSPVRWVESIQLLAEKGVTELVECGPGKVLAGLNRRCAKGINTHGLDGVEAFAATRAALA

SEQ ID NO: 124403 - DNA, 948 bp, Oenococcus oeni PSU-1
  CDS (1)..(948): transl_table=11
ttggaggttacggcaattaaactcgcttatttatttagcggtcagggtggaaaaatcgagccactcgaccagtcactttaccttgaatcgagcagttttcgtgaaactttcgatcaagcaaaatcgcttttgggagttgatttatggaacctttggcaaagcggggacaaacgtttggcagaaacgcgttttgctcaaccggcaatatttgttttaagtacggctctttatcgcgccataaagaatgaactgccacaggcaagtgctcttgtcggtctgagtttgggtgaatacagtgctttggttgctggtgatgctttggacttttcagagggtttgaaactaattgaaaaacgtgggcagttaatgcaacaagccagtgaggagtttcccggtgccatggctgcggttatgagccaagatacaaaattgattgaagatgtatgtcaagatgtttttcaatcaagtggccaaaaagttcagattgctaattataactatccaaaacagaccgtcatcggtggccaagtggatgctgttaaaacagcagttgaagctcttcatcaagccggtgtccagcgaattgttgatttgccggttagtggagcttttcatactcctttgatggaatcagccaatcgacaatttttaccggatttggaaaagattcagttcaaagacccgatcattccagttgtaagcaatactaccggaaaagttttcacggattcctcaatcggcgagactctcagcaaacaaatgatcagttcaactcgttttaccgactgcttgtttgaattacgggatcttggtgttgattctgttgttgaattgggtcctggacattcgctggtttcttttgccaagaaaactctaaaacttgatggatattatgctgtcaatgattcagcttccttgaagaaagctctagctgccttaacagcctaa

SEQ ID NO: 124404 - protein, 315 aa, Oenococcus oeni PSU-1
MEVTAIKLAYLFSGQGGKIEPLDQSLYLESSSFRETFDQAKSLLGVDLWNLWQSGDKRLAETRFAQPAIFVLSTALYRAIKNELPQASALVGLSLGEYSALVAGDALDFSEGLKLIEKRGQLMQQASEEFPGAMAAVMSQDTKLIEDVCQDVFQSSGQKVQIANYNYPKQTVIGGQVDAVKTAVEALHQAGVQRIVDLPVSGAFHTPLMESANRQFLPDLEKIQFKDPIIPVVSNTTGKVFTDSSIGETLSKQMISSTRFTDCLFELRDLGVDSVVELGPGHSLVSFAKKTLKLDGYYAVNDSASLKKALAALTA

SEQ ID NO: 124405 - DNA, 933 bp, Solibacter usitatus Ellin6076; identical to SEQ ID NO: 59277
  CDS (1)..(933): transl_table=11

SEQ ID NO: 124406 - protein, 310 aa, Solibacter usitatus Ellin6076; identical to SEQ ID NO: 59278

SEQ ID NO: 124407 - DNA, 939 bp, Magnetococcus sp. MC-1
  CDS (1)..(939): transl_table=11
atgggtaaggttgcttttttatttccaggtcagggttcacaagcggtgggtatggggcaggcattacatggggcggatgcctcctgtgcggccctatttgaagaggccaacacggtgcttggcgaggatctgcgggggttgatgtttgacgggccagaggcggatttaacgcttacccgcaacactcagcccgcgctggtcgtgacggccatggcggcctatactttgctacgtcaacaaagtgatctgcaagcggattttgtggcagggcactccttaggggagtatgcggcgatctgtgcggcgggggggctctcgtttgccgacgccatacgtcttacccgtttgcgtggggatgccatgcaaaaggcggtaccggtgggggtgggtgccatggctgccatgttgaatatggaggcggcgttggtggaggaggtgtgtcaggctgcatcgcaagcgttggggcaagtgtgcgtaccagccaactacaacaccccggcgcaaattgtgatctctggggacaaagcggcggtggagcatgcggtggccttagccaaagagcggggtgctaagcggtgtgtgatgttgagcgtctcggcccctttccattgccctctcatgcaaccggctgcggatgccatggctcaagctttggcgcagaccccgatgcaggatttgagcattcccttggtggccaatgtcaatgccggtatcaccaccgatgccgaaacggtacgccagcagttggtggctcaggtgtgtggttcggtacgttgggaggcctccattcgtgccatgattgcgcaaggggtggatcgttttgtggagattggtaccggcaaggtgctcaccggcatgctcaagcgcattgatggttcggtgcgtggggtggctgtgaatggtcctgaagatatggctgcattggcagagctgctgtaa

SEQ ID NO: 124408 - protein, 312 aa, Magnetococcus sp. MC-1
MGKVAFLFPGQGSQAVGMGQALHGADASCAALFEEANTVLGEDLRGLMFDGPEADLTLTRNTQPALVVTAMAAYTLLRQQSDLQADFVAGHSLGEYAAICAAGGLSFADAIRLTRLRGDAMQKAVPVGVGAMAAMLNMEAALVEEVCQAASQALGQVCVPANYNTPAQIVISGDKAAVEHAVALAKERGAKRCVMLSVSAPFHCPLMQPAADAMAQALAQTPMQDLSIPLVANVNAGITTDAETVRQQLVAQVCGSVRWEASIRAMIAQGVDRFVEIGTGKVLTGMLKRIDGSVRGVAVNGPEDMAALAELL

SEQ ID NO: 124409 - DNA, 927 bp, Shewanella sp. ANA-3
  CDS (1)..(927): transl_table=11
atggaaaatgtagcttttgtattcccaggccaaggttcacaggctctaggcatgttagccgagctggctggtgcacagccgattgtgggacaaacctttgccgaagcgagtgaggtgttagggtatgatctgtgggcattagtgcaagacggccccgcagaaaccttaaatgaaaccgataaaacccagcctgctttattagcggcaagtgtggccatttggcgcgcttacgttgcttcaggtaaagctatgcctgcaatgttagcgggtcacagcctaggcgaatattctgcattagtttgtgctggtgtcatcgactttaaagatgcgatcaaactggttgagctacgtggtcaactgatgcagcaagccgtgccagcgggtactggcgctatgtacgcgattatcggtcttgataatgacggtattgctaatgcgtgtattgaagcagcccaagacgaagtggtgagcccagttaacttcaacagcccaggccaagtggttatcgccggtcaaaaagaagcggttgaacgtgcagctgctgcctgtaaagcggcgggcgccaaaatggcggttgctctgcctgtcagcgtgccatcacactgcgcattaatgaaacctgctgctgataaattagcggtagctttaaatgatgtgcagtttaatgcgccaagcatcactgttatcaataacgtagatgtggcatcacccactgcggttgccgacattaaagatgcgctggttcgtcaactgtattgcccagtacgctggagcgaaaccgttgaattaatggccgaaaaaggtattacacagttagttgagtgtggtcctggtaaagtattgacaggtcttgcgaaacgcattaataaatctctttctgcccaagcagttaatgacgttgcatcccttgccgcgttaactgaataa

SEQ ID NO: 124410 - protein, 308 aa, Shewanella sp. ANA-3
MENVAFVFPGQGSQALGMLAELAGAQPIVGQTFAEASEVLGYDLWALVQDGPAETLNETDKTQPALLAASVAIWRAYVASGKAMPAMLAGHSLGEYSALVCAGVIDFKDAIKLVELRGQLMQQAVPAGTGAMYAIIGLDNDGIANACIEAAQDEVVSPVNFNSPGQVVIAGQKEAVERAAAACKAAGAKMAVALPVSVPSHCALMKPAADKLAVALNDVQFNAPSITVINNVDVASPTAVADIKDALVRQLYCPVRWSETVELMAEKGITQLVECGPGKVLTGLAKRINKSLSAQAVNDVASLAALTE

SEQ ID NO: 124411 - DNA, 930 bp, Azoarcus sp. BH72; identical to SEQ ID NO: 59279
  CDS (1)..(930): transl_table=11

SEQ ID NO: 124412 - protein, 309 aa, Azoarcus sp. BH72; identical to SEQ ID NO: 59280

SEQ ID NO: 124413 - DNA, 885 bp, Nostoc punctiforme PCC 73102; identical to SEQ ID NO: 59283
  CDS (1)..(885): transl_table=11

SEQ ID NO: 124414 - protein, 294 aa, Nostoc punctiforme PCC 73102; identical to SEQ ID NO: 59284

SEQ ID NO: 124415 - DNA, 939 bp, Haemophilus somnus 2336
  CDS (1)..(939): transl_table=11
atgaaaaaatttgcaatggttttccctggacaaggctcacaagcagtgggaatgctggctgaattggctacagaatatccgattgttgaagaaacttttcagcaagcttcctccgttttgggttatgatttatggcagttagtgcaacaaggtcctgcagaagaattgaataaaacgtggcaaacacaacccgcacttttagctgcttccgtggcaatttatcgtgtatggcaacaaaaatatccttacctaaaacctgaagtgatggcaggacatagtttaggtgaatattccgctttagtatgtgccggtgtaattgatttccaagatggaattaagttggtacaacttcgtggtaagttaatgcaacaagcagttccggaaggaacaggtgccatgtacgcaattataggtttagataatgaaagcattgttcaagcttgcaaagcgtctgaacaaggtgagattgtgtcagcggtaaactttaattcaccgggacaagtggtgattgcaggagcaaaagtcgcagtagaacgtgctgctgttgcttgtaaagaggcgggagcaaaacgtgcgttgccgttagcagtcagcgtgccttctcactgtgcattaatgaaaccagcagcagaagaattggcagtagcgttagaaaaaatgacgtttagcatcccacaaattccggttattaataatgttgatgtgaaagcagaaaatgaaaccactaagattcgtaccgcacttgtgcgtcagctttatagtcctgtacgttggactgaaatagttgagaatatggcaagagagggaattgaacttttatttgagatgggacctaataaggtgctcactggattaactagtcgtattgctaaagagttgaatgctaaagcagtcaatgatttatcttcattgaatacagtggaagaaagcttagattaa

SEQ ID NO: 124416 - protein, 312 aa, Haemophilus somnus 2336
MKKFAMVFPGQGSQAVGMLAELATEYPIVEETFQQASSVLGYDLWQLVQQGPAEELNKTWQTQPALLAASVAIYRVWQQKYPYLKPEVMAGHSLGEYSALVCAGVIDFQDGIKLVQLRGKLMQQAVPEGTGAMYAIIGLDNESIVQACKASEQGEIVSAVNFNSPGQVVIAGAKVAVERAAVACKEAGAKRALPLAVSVPSHCALMKPAAEELAVALEKMTFSIPQIPVINNVDVKAENETTKIRTALVRQLYSPVRWTEIVENMAREGIELLFEMGPNKVLTGLTSRIAKELNAKAVNDLSSLNTVEESLD

SEQ ID NO: 124417 - DNA, 936 bp, Actinobacillus pleuropneumoniae serovar 1 str. 4074
  CDS (1)..(936): transl_table=11
atgtcaaattttgcaatggtgttcccgggacagggctcacaagcggtcggaatgttagcggatcttgcaaccgcatacccaattgttgaagaaaccttcaaacaagcatctgatgttttaggttacgatctttgggatctcgtacaaaacggttcggcggaagatttaggtcaaacacaacgtacccaaccggcgcttttagcttcatcggttgcgatttatcgtgtgtggcaacaaaaataccctgaattaaaaccgtctgtcatggcaggtcatagcttaggcgaatactcggcattagtttgtgctggcgtattagatttccaagatgcgatcaaactagtggaattacgtggtaatgcaatgcaacaagcagtaccggcgggtacaggcgcaatgtatgcgattatcggcttagataacgaagcgattattaacgcttgtgaacaagctcaagcggaagtcggcgaaatcgtttcagcagtaaacttcaatagcccgggtcaagtcgtgattgccggtacaaaagcggctgcggaaaaagcgggtgaattatgtaaagcggcaggcgcaaaacgtgcgttaccacttgcggtaagcgtaccgtctcactgtgcattaatgaaaccggctgcggataaattagccgaagcattacaaaatatcacgttaaacgtaccggttgtaccagttattaacaatgttgatgttagtgtagaaacggatgcagaagccattcgtaacgcattagttcgccaactttatagcccggttcgttggactgaaacggtagaaaaaatggcgaatcaaggtgttacaacgctttatgaaatcggctcgggtaaagtcttaaccggtttagctggtcgtatcgtaaaagagttaaatgccaaagcagtcaatgatgtagcttcattagaggctgtttcagcataa

SEQ ID NO: 124418 - protein, 311 aa, Actinobacillus pleuropneumoniae serovar 1 str. 4074
MSNFAMVFPGQGSQAVGMLADLATAYPIVEETFKQASDVLGYDLWDLVQNGSAEDLGQTQRTQPALLASSVAIYRVWQQKYPELKPSVMAGHSLGEYSALVCAGVLDFQDAIKLVELRGNAMQQAVPAGTGAMYAIIGLDNEAIINACEQAQAEVGEIVSAVNFNSPGQVVIAGTKAAAEKAGELCKAAGAKRALPLAVSVPSHCALMKPAADKLAEALQNITLNVPVVPVINNVDVSVETDAEAIRNALVRQLYSPVRWTETVEKMANQGVTTLYEIGSGKVLTGLAGRIVKELNAKAVNDVASLEAVSA

SEQ ID NO: 124419 - DNA, 924 bp, Haemophilus influenzae R2846
  CDS (1)..(924): transl_table=11
atgtttttcccaggtcaaggctcccaaactgttggtatgcttgctgatcttgccactgaatatccaatcgttattgaaacatttaaacaagcatctgatgcgcttggttatgatttatggtatcttgttcaacaaggtccagctgaagaacttaataaaacttggcaaactcagcccgcacttttagctgcttcagtcgctatttatcgcgtatggcaagaaaaatttcctcaattaaaaccagaagtaatggctggccatagcttaggtgaatattctgcgttagtttgtgctggggtgttggatttccaagatgcgattaaattagtggaattgcgcggaaaattaatgcaacaagctgtgcctgaaggcactggcgcaatgtatgcaatcattggtttagataatgaagcaattattaatgcttgcaaacaagcagaggaaggcgaagtcgtatctgcggtgaactttaactcaccgggtcaagtagttattgcgggtgcgaaagctgcagttgagcgtgcggctgcattatgtaaagaagcaggggcgaaacgtgcattgccgttagctgtgagcgtaccttctcactgtgcattaatgaaacctgcagccgagcaattagcggtaacacttgataatattcaaattaatacaccaacaatatcggtattaaataacgttgatgtgaaagctgaaactgaaggcaccgaaattcgtaccgcacttgttcgtcagttatatagtccagttcgttggactgaaacagttgaaaaaatggcgcaagatggtgttttagcgcttgttgaagtggggccaggtaaagtattaaatggtttaaccaaacgcattgtgggtgatttacaagcaatatctgtaaatgatgttgcatcattcaatgcggtagaagaatttttagcgtaa

SEQ ID NO: 124420 - protein, 307 aa, Haemophilus influenzae R2846
MFFPGQGSQTVGMLADLATEYPIVIETFKQASDALGYDLWYLVQQGPAEELNKTWQTQPALLAASVAIYRVWQEKFPQLKPEVMAGHSLGEYSALVCAGVLDFQDAIKLVELRGKLMQQAVPEGTGAMYAIIGLDNEAIINACKQAEEGEVVSAVNFNSPGQVVIAGAKAAVERAAALCKEAGAKRALPLAVSVPSHCALMKPAAEQLAVTLDNIQINTPTISVLNNVDVKAETEGTEIRTALVRQLYSPVRWTETVEKMAQDGVLALVEVGPGKVLNGLTKRIVGDLQAISVNDVASFNAVEEFLA

SEQ ID NO: 124421 - DNA, 933 bp, Burkholderia vietnamiensis G4
  CDS (1)..(933): transl_table=11
atgaaatttgcattcgtttttccggggcagggctcgcagtcggtcggcatgctgaacgcattcgccgatctggccgtcgtgcgcgagacgctcgcggaagcatccgatgcactcggccaggatctcggcaagctgatcgccgaaggcccggctgaagaactgaatctcacgaccaacacgcagccggtgatgctgacggccgcatacgcgtgctatcgcgcatggcagcaggccggcggcccggcgccgtcgatcgtcgcgggccacagcctgggcgaatacacggcgctcgtcgccgcaggcgcgctcgcgttcaaggacgcggtgccgctcgtgcgcttccgtgcgcaggcgatgcagaccgcggtgccggtcggccagggcggcatggccgcgatcctcggcctcgacgacgacacggtgcgcgcggtgtgcgcggaagcggcgcaagcgggcgtcgtcgaagccgtgaacttcaacgcgccggcgcaggtcgtgatcgcgggcgcgaaggcggccgtcgaaaaggcgtgcgagatcgcgaaggcgaagggtgcgaagcgcgcgctgccgctgccggtgtcggcgccgttccattcgtcgctgctcaagccggcgtcggaccagctgcgcgactatctcgcgaacatcgacgtgaaggcgccgcagattccggtggtcaacaacatcgacgtcgcggtggtcagcgatccggccgcgatcaaggatgcgctggtgcgccaggccgccggcccggtgcgctgggtcgaatgcgtgcagcacatcgccgcaacgggcgtcacgcacgtgatcgagtgcgggccgggcaaggtgctggcggggctgacgaagcgcatcgacggcaatctggtcggcgcgtcggtgttcgatccggcgtcgctcgacgaagcgctgaagctggcgaccgcctga

SEQ ID NO: 124422 - protein, 310 aa, Burkholderia vietnamiensis G4
MKFAFVFPGQGSQSVGMLNAFADLAVVRETLAEASDALGQDLGKLIAEGPAEELNLTTNTQPVMLTAAYACYRAWQQAGGPAPSIVAGHSLGEYTALVAAGALAFKDAVPLVRFRAQAMQTAVPVGQGGMAAILGLDDDTVRAVCAEAAQAGVVEAVNFNAPAQVVIAGAKAAVEKACEIAKAKGAKRALPLPVSAPFHSSLLKPASDQLRDYLANIDVKAPQIPVVNNIDVAVVSDPAAIKDALVRQAAGPVRWVECVQHIAATGVTHVIECGPGKVLAGLTKRIDGNLVGASVFDPASLDEALKLATA

SEQ ID NO: 124423 - DNA, 921 bp, Exiguobacterium sibiricum 255-15
  CDS (1)..(921): transl_table=11
atgggtaaaacggtttggatgttcccaggtcaaggatcacaaatgccaggaatgggacaaacacttctccatcatgaagagtcacgtcaagcattgatggacctcgggacacggattggtcttgatttaacggatctgttgacgacagggacaaaagaagatttgaaaccgacggaaatcgcacaacctgccatcgttgcacacagtacgttgcttgcgaatcgttatgcggcgcttggtcatcggccggacttcgtactcggacatagcgtcggagagtacagtgcactcgttgccgcatctgtcttaacggcaagtgaagcagtttatctcgtacgcgaacgaggaaatctgatgaatcaagtgacgggcgggacgatggcagctgtcatcggtttaaacgacgtcgaagcagcccatcatgctgtcgagtccattgcggcaacgggagaaatcgttcaaatcgccaattacaactgtcccggacaattcgtgatttcaggacaagttgcagctgtcgagacggcgactgcgaaattaaaagagttgggcgcgaaacgtgtcctgccgcttgatgtatcaggagcattccactcgtcgttaatgacaccgtttgcctcacggttcgaagatatcttagtttcttcaccattccaggcggcaaaaacgaaattcatctcgaatgtcgacagtgatttccacgatcagccggatgagttgatccgtttacttgtccaacaattgtattcaccggttcgttttgaagcctgtgtggaaaaattgattgcagaaggtgcggatacattcattgaattcggtccttcgtcaccgctcagcggtctcgtcaagcggattaaaaaagacgtcaagattgtcagcatcacgacacttgaacaattggaagcggaggcgattcgttga

SEQ ID NO: 124424 - protein, 306 aa, Exiguobacterium sibiricum 255-15
MGKTVWMFPGQGSQMPGMGQTLLHHEESRQALMDLGTRIGLDLTDLLTTGTKEDLKPTEIAQPAIVAHSTLLANRYAALGHRPDFVLGHSVGEYSALVAASVLTASEAVYLVRERGNLMNQVTGGTMAAVIGLNDVEAAHHAVESIAATGEIVQIANYNCPGQFVISGQVAAVETATAKLKELGAKRVLPLDVSGAFHSSLMTPFASRFEDILVSSPFQAAKTKFISNVDSDFHDQPDELIRLLVQQLYSPVRFEACVEKLIAEGADTFIEFGPSSPLSGLVKRIKKDVKIVSITTLEQLEAEAIR

SEQ ID NO: 124425 - DNA, 915 bp, Prosthecochloris aestuarii DSM 271
  CDS (1)..(915): transl_table=11
atgaaagcatttgtatttcccggccagggatcacagtactgtggcatggcaaaagatatctacaacgcattccctcaggcaaaggccgtgatggacaaggcgaacgacattctcggctacagcatcaccgatatcatgttcgatgcgccggaagaagaattacgcaaaacgcagtacactcagccggccatcttccttcacagcattgccgtcgcagaactgctgggaaaagaaggcgtcgacatggctgccggccacagcctcggcgaatacacagcgctctgttttgccggagccatgagctttgaagatgccatgaagattgttgcccgccgtggagaactcatgcagcatgcaggcacccggaaccccggctccatggctgccattatcggcatgaaagatgatgtccttgacgagcttctcaaagaggccggtgaaacaggaatcgtccaggccgcaaacttcaactcgccaggccagatcgtcatttcaggagagatcagcgcggtaaaaaaagctgttgaactggcaccgttgaaaggggctagaatggcaaaagagcttcccgtctcaggagcgttccattccccgctgatgaagcctgcagaagaggaactcaaagcagcactcgacgcgatcaccattcatgacgcggcaattccggtatgcatgaatgtcactgcagagccggtttgcaaggcagccgatatccgcaacaaccttgtccttcagttgacaagcccggttcgctggacccagtcggtcgaaacaatgatcgcaggaggcgtcaccctcttcagcgaaatcggaccgcagaaagtcctgcaggggctaatcaaaagaatcgaccggaacgtcactatccagggtatcgacaacgctgaacagattcaacagcagctgtcactctaa

SEQ ID NO: 124426 - protein, 304 aa, Prosthecochloris aestuarii DSM 271
MKAFVFPGQGSQYCGMAKDIYNAFPQAKAVMDKANDILGYSITDIMFDAPEEELRKTQYTQPAIFLHSIAVAELLGKEGVDMAAGHSLGEYTALCFAGAMSFEDAMKIVARRGELMQHAGTRNPGSMAAIIGMKDDVLDELLKEAGETGIVQAANFNSPGQIVISGEISAVKKAVELAPLKGARMAKELPVSGAFHSPLMKPAEEELKAALDAITIHDAAIPVCMNVTAEPVCKAADIRNNLVLQLTSPVRWTQSVETMIAGGVTLFSEIGPQKVLQGLIKRIDRNVTIQGIDNAEQIQQQLSL

SEQ ID NO: 124427 - DNA, 954 bp, Xylella fastidiosa Ann-1
  CDS (1)..(954): transl_table=11
atgatgcccgtgacagagtctattttcgctttcgtttttccaggtcagggttctcagtctcttggcatgctttccgagtttgctgtgctctatccggagattgtcgatactttcgctgaggcatctgagggagctggtgtggatctttggacgttgtcgcaacgtggccctgaggagatgttgaaccgtactgagtacactcagccagcgttgttggccgccagtgtggcgctatggcggctttggcaggctcgcggtggccgtgcaccggatctgcttgctggtcacagtttgggggagtacagcgctttggtagtggctggtgcattgtcattgaaggatggtgcttatttggtaaggttgcgcggtcagttaatgcaggatgcggttgctgtgggtgtcggtgcgatggccgcggtcctgggtgctgaggatgctttggtggctgaggtctgtgcgcaggttgcgggaagcgaaattgtcgtcccagccaattttaattcgccggggcaggtggtgattggtggtcatgccacggcggttgatcgtgtgctggtgttgttggcagaacgtggtgtgtctaaaacagtcaagttggcagtgagtgtgccgtcgcatacgccactaatgcgtgatgttgcgcatcgtctcgctgaggcgatgcttgggttggtttggaaggtgccgcagattccggtagtgcagaatgttgatggcagagtgcatgacggtgttgaagcgatccgtgaggctctggtcaagcagctttatctgccagttcagtggacggattgtgtgagagagttggctacgtgtggtgtggtacatatcgctgagtgtggtcctggtaaggtgctgatgggactcattaggcgtatcgataaaacattggatgtgcgttcgttggcgactccaacggggttctctgatgtcttggacgagtggggtttttga

SEQ ID NO: 124428 - protein, 317 aa, Xylella fastidiosa Ann-1
MMPVTESIFAFVFPGQGSQSLGMLSEFAVLYPEIVDTFAEASEGAGVDLWTLSQRGPEEMLNRTEYTQPALLAASVALWRLWQARGGRAPDLLAGHSLGEYSALVVAGALSLKDGAYLVRLRGQLMQDAVAVGVGAMAAVLGAEDALVAEVCAQVAGSEIVVPANFNSPGQVVIGGHATAVDRVLVLLAERGVSKTVKLAVSVPSHTPLMRDVAHRLAEAMLGLVWKVPQIPVVQNVDGRVHDGVEAIREALVKQLYLPVQWTDCVRELATCGVVHIAECGPGKVLMGLIRRIDKTLDVRSLATPTGFSDVLDEWGF

SEQ ID NO: 124429 - DNA, 1002 bp, Xylella fastidiosa Ann-1
  CDS (1)..(1002): transl_table=11
atgatacccgtgacagagtctattttcgctttcgtttttccaggtcagggttctcagtctcttggcatgctttccgagtttgctgtgctctatccggagattctcgatactttcgctgaggcatctgagggagctggtgtggatctttggacgttgtcgcaacgtgggcctgaggagatgttgaaccgtactgagtacactcagccagcgttgttggccgccagtgtggcgctatggagactttggcaggctcgcggtggtcgtgcaccggatctgcttgctggtcacagtttgggggagtacagcgctttggtagcggctggtgcattgtcattgaaggatggtgcttatttggtaaggttgcgcggtcagttaatgcaggatgcggttgctgtgggtgtcggtgcgatggccgctgtccttggtgctgaggatgctttggtggctgaggtctgtgcgcaggttgcgggaagcgagattgtcgtcgcagccaattttaattcgccggggcaggtggtgattggtggtcatgccacggcggttgatcgtgcgctggtgttgttggcagaacgtggtgtgtctaaaacagtcaagttggcagtgagtgtgccgtcgcatacgccactgatgcgtgatgctgcgcatcgtctcgctgaggcgatgcttgggttggttttgaaggtgccgcagattccggtagtgcagaatgttgatggcagagtgcatgacggtgttgaagcgatccgtgaggccctggtcaagcagctttatttgccagttcagtggacggattgtgtgagagagttggccacatgtggtgtggtacgtatcgctgagtgtggtcctggtaaggtgctgatgggactcattaggcgtatcgataaaacattggatgtgcgttcgttggcgactccacggggttctctgatgtcttggacgagtggggtttttgaattgttttctaatggaaatggttggtgtagtttcagggcgtgctcttaa

SEQ ID NO: 124430 - protein, 333 aa, Xylella fastidiosa Ann-1
MIPVTESIFAFVFPGQGSQSLGMLSEFAVLYPEILDTFAEASEGAGVDLWTLSQRGPEEMLNRTEYTQPALLAASVALWRLWQARGGRAPDLLAGHSLGEYSALVAAGALSLKDGAYLVRLRGQLMQDAVAVGVGAMAAVLGAEDALVAEVCAQVAGSEIVVAANFNSPGQVVIGGHATAVDRALVLLAERGVSKTVKLAVSVPSHTPLMRDAAHRLAEAMLGLVLKVPQIPVVQNVDGRVHDGVEAIREALVKQLYLPVQWTDCVRELATCGVVRIAECGPGKVLMGLIRRIDKTLDVRSLATPRGSLMSWTSGVFELFSNGNGWCSFRACS

SEQ ID NO: 124431 - DNA, 921 bp, Streptococcus suis 89/1591
  CDS (1)..(921): transl_table=11
atgacaaagatagcttttctttttgcaggtcaagggtctcagacagtggggatggctcgcgacctttacgaatattacccgatagttagagaaacgtttgaccaggctagtcagattctggggtatgacattcgcgacctaattgacaaacaagaggataaattacatcagactcgctatacccaaccggcaattttgacaacttctgtggctatttttcgactgctggaagaagagggaatacaacccgatatggtagctggtctatccttgggagaatattcagctctggtagcatcgggagctttggcctttgaagatgcgattgccctgattgctaagcgtggtgaatatatggaaacggctgcgccagcggggactggtaagatggttgcggttctcaacacagatgtcaacttgattgaagaaatctgttcgactgttacctctgggattgtttccccagccaactacaacacaccagcccaaatcgtcatcggaggcgaggtggctgcagtggatgaggcggttgaattgctaaaggaagctggtgtcaaacggatgattccgctcaatgtatctggcccctttcacacggctctcttgcgtccagcttcggagcaattggctcaggccttggagcaggtggaatttgcggacttccaagtagagttggtcggtaatacggaagccaaggttatgaaaaaagaggacatcaagtccctcttgacccgtcaagtgatggaaccggttcgtttctatgagtcaatcgcaaccatgcaggaagctggcgtgactaactttattgaaatcggtccaggtaaagtcttatcaggttttgtcaagaaaatcgataagaccgcgcatgttgtagcaattgaagacatagaggggctacaaatagtattgaataaatcatga

SEQ ID NO: 124432 - protein, 306 aa, Streptococcus suis 89/1591
MTKIAFLFAGQGSQTVGMARDLYEYYPIVRETFDQASQILGYDIRDLIDKQEDKLHQTRYTQPAILTTSVAIFRLLEEEGIQPDMVAGLSLGEYSALVASGALAFEDAIALIAKRGEYMETAAPAGTGKMVAVLNTDVNLIEEICSTVTSGIVSPANYNTPAQIVIGGEVAAVDEAVELLKEAGVKRMIPLNVSGPFHTALLRPASEQLAQALEQVEFADFQVELVGNTEAKVMKKEDIKSLLTRQVMEPVRFYESIATMQEAGVTNFIEIGPGKVLSGFVKKIDKTAHVVAIEDIEGLQIVLNKS

SEQ ID NO: 124433 - DNA, 903 bp, Croceibacter atlanticus HTCC2559
  CDS (1)..(903): transl_table=11
ttgaactttaaaaaccaacctatgcacgcatttatatttcctggacaaggtgcccaattctctggaatgggattagatttatacgaaagctctaacgaagctcaagactattttaacaaagcaaactcaatattaggatttaacatctgtgatattatgtttgaaggttctgcagaagatctaaaacaaactaaagttacacaaccagctattttcttacactctactattttaagtaaagttatgggtgataaatttaagccagatatggttgcaggtcactcattaggtgagttttctgctttagtagccaataaaactttagagtttgaagatgctcttaaattagtatctcaacgcgctcaagctatgcaaaaagcatgtgaagctcaaccaagtactatggctgccgttttaggattagacgatcatgtggttgaggctatctgtgcagatgttgatggtactgtagtagcagcaaattataattgtccaggacaattggtaatctcaggtgaaattgacgctatccacacagcttgtgaacgcttaaaagaagaaggtgcaagacgtgcattggtattacctgttggtggtgcttttcactcaccacttatggaaccagcaagagaagagttagaagcagcaataaaagcaactacatttaatacacctatttgtcctgtttatcaaaatgtgacaacatttggtgtaactaacccagaagaaatacaaaaaaacttaatctttcaactaacagctcctgtaaaatggacacaaagtatgcaacagatgattaaagatggtgctactaagtttacagaagttggaccaggcaaagtcttacaaggcttacttggtaagattgacagaactgttgaaaaagaaagcggtactatttag

SEQ ID NO: 124434 - protein, 300 aa, Croceibacter atlanticus HTCC2559
MNFKNQPMHAFIFPGQGAQFSGMGLDLYESSNEAQDYFNKANSILGFNICDIMFEGSAEDLKQTKVTQPAIFLHSTILSKVMGDKFKPDMVAGHSLGEFSALVANKTLEFEDALKLVSQRAQAMQKACEAQPSTMAAVLGLDDHVVEAICADVDGTVVAANYNCPGQLVISGEIDAIHTACERLKEEGARRALVLPVGGAFHSPLMEPAREELEAAIKATTFNTPICPVYQNVTTFGVTNPEEIQKNLIFQLTAPVKWTQSMQQMIKDGATKFTEVGPGKVLQGLLGKIDRTVEKESGTI

SEQ ID NO: 124435 - DNA, 933 bp, Sulfitobacter sp. EE-36
  CDS (1)..(933): transl_table=11
atgaccattgcattcgtatatccgggccaaggcgcgcaaaccatcggtatgggccgcgatctggccgacgcctatccggcggcaaaggccgtgtttgacgaggtggacgaagccttgggcgaaaagctgtcgacgctgatctgggaaggcgacgcggaggagctgacgctgacacagaacgcgcagcccgccttgatggcgacatcaatggcggcgatggcggcgttgaaggccgaaggcgttaccgtcgacaaagcggcttttgtcgcgggccattcgctgggtgaatatgcggcactatgcgcggcggggacattctcgcttgccgatacggcgcggttgctgcgcatccgtgggcgggcgatgcaggcggctgtgcccgtggggcagggcgctatggcggcccttctggggctgagctttgagcaggccgaggccgtcgccgcagaggccgcacagggcgaggtctgtcaggtcgccaaccagaacgatccggcgcagaatgtcgtttcgggcagcaaggctgccgtggaacgagcgattgatctggcgaaagcggctggtgccaagcgcgcgctgcttttgcctgtgtctgccccgttccactgtgccctgatggcccccgccgcagaagagatggccggtgcgctggcggatgtgacgatgaacgcccccgccgtgcccgtggtggcgaatgtggtggccgaggcggtcaccgatcccgaacagatccgcaagctgctgattgagcaggtcaccggtcaggtgcgctggatgtcgtcggttgaatggatgggcgtgcagggcgtgaccgaggtctgggaaatcggggcgggcaaggcgctgtccggcatgatccgccgcatcaacaaggaaatcacctgcgtgaacatcggcaccgctgccgatgccgctgccgtgaaaacggcctga

SEQ ID NO: 124436 - protein, 310 aa, Sulfitobacter sp. EE-36
MTIAFVYPGQGAQTIGMGRDLADAYPAAKAVFDEVDEALGEKLSTLIWEGDAEELTLTQNAQPALMATSMAAMAALKAEGVTVDKAAFVAGHSLGEYAALCAAGTFSLADTARLLRIRGRAMQAAVPVGQGAMAALLGLSFEQAEAVAAEAAQGEVCQVANQNDPAQNVVSGSKAAVERAIDLAKAAGAKRALLLPVSAPFHCALMAPAAEEMAGALADVTMNAPAVPVVANVVAEAVTDPEQIRKLLIEQVTGQVRWMSSVEWMGVQGVTEVWEIGAGKALSGMIRRINKEITCVNIGTAADAAAVKTA

SEQ ID NO: 124437 - DNA, 942 bp, Oceanicola batsensis HTCC2597
  CDS (1)..(942): transl_table=11
atgagccgcgcattcgtatttccggggcagggcgcccagaccatcggcatgggaaaagcgctggccgaggcctatcccgcggcccgggcggtgttcgacgaggtggatgacgcactcggagaaaagctctcgtctctgatctgggagggcgatcaggagaccttgacgctcacccggaacgcgcagcccgccctgatggcgacctcgctggccgcgatccgtgcgctcgaggccgaaggggtcgagatcaccgatgcggccttcgtcgcggggcactcgctgggggaatattccgcgctggctgccgccgggtcgctcagcatcgccgatgcggcgcgcctgttgagaacacgtggcgcggccatgcaagaggcggtgccggtcggcgaaggtgccatggccgcgcttctgggactggatttcgacactgcgcaggccgtggcagaggaggcggcgcagggcgatgtctgccaggcggcgaacgacaacgacccctcgcaggtggtcgtctcgggccacagggctgccgtggaacgggcggtcgacatcgccaaggagaagggcgcaaagcgggcgatgctgctgccggtctcggcccccttccactgtgcgctgatggcccccgccgccgatgtgatggcccaggcgctggacgaggtgccgatcgccgcgccggcggtgccgctggtggcgaacgtgcgggccgaggccgtcgatgatccggcaacgatccgggcgctgctggtcgaccaggtcaccggctcggtgcgctggcgcgagagcgtgctgtggatggccgggcagggcgtgtccgaggtctgggagatcggcgccggcaaggctctgtcgggcatgatccggcggatcgacaagaccctggcctgccgggcggtcggcacgccggaggacgtggccgcggcggccgaaagccgcgcggtctga

SEQ ID NO: 124438 - protein, 313 aa, Oceanicola batsensis HTCC2597
MSRAFVFPGQGAQTIGMGKALAEAYPAARAVFDEVDDALGEKLSSLIWEGDQETLTLTRNAQPALMATSLAAIRALEAEGVEITDAAFVAGHSLGEYSALAAAGSLSIADAARLLRTRGAAMQEAVPVGEGAMAALLGLDFDTAQAVAEEAAQGDVCQAANDNDPSQVVVSGHRAAVERAVDIAKEKGAKRAMLLPVSAPFHCALMAPAADVMAQALDEVPIAAPAVPLVANVRAEAVDDPATIRALLVDQVTGSVRWRESVLWMAGQGVSEVWEIGAGKALSGMIRRIDKTLACRAVGTPEDVAAAAESRAV

SEQ ID NO: 124439 - DNA, 903 bp, Prochlorococcus marinus str. MIT 9211
  CDS (1)..(903): transl_table=11
atgactgaagcttgggtttttccgggccaagggtcccaaaaaattggtatggctgaaactctactttctcttgatggagcatcagaaagatttgaattggcttccaatttgttaggtagagatttgttggatatttgtcatggcaatagtgatcagtcaacacctctttttgatttaaatgacactcgcaatactcaaccagcaatgtttgttgtggagtcattattgattgacgaattaaaaaggcaaggatctgaagcaaaattagttgcgggtcatagtcttggcgagctagttgccctttatgcagctgaagtttttgacttttctactggtttaactttattgagaagtcgttcagaattaatggctgcagctggaggtggagcaatgactgcagtcttaggttttgatgtgaagcagcttctctcgctagtacaaaatactgaaggggttgtagtggcaaatgacaacagttctgatcaaatcgtcttatcaggtaccccagaagcagttgaaatggttgtagcgcaattaacctgcaagagatctgtccctctcaatgtttcaggcgcatttcactcaccattgatgaaagatcccgcagaggcttttgctaaagagattgataagttgatttttaataacgcaattattcctgttgtcagcaatgctgaccccacgccagaaacaaatggcgctttattgcaaaagaaattaaagaaacaaatgatcactggagttagatggcgggagaccatggctctgatgatgactcaaggcattaattcaataattgaagttggacccggtaaagtattgagtggtcttgctaaaagatcgatgccaggagttgtaatcaaacaaatttcttctgctagggacctaggtattggaacttga

SEQ ID NO: 124440 - protein, 300 aa, Prochlorococcus marinus str. MIT 9211
MTEAWVFPGQGSQKIGMAETLLSLDGASERFELASNLLGRDLLDICHGNSDQSTPLFDLNDTRNTQPAMFVVESLLIDELKRQGSEAKLVAGHSLGELVALYAAEVFDFSTGLTLLRSRSELMAAAGGGAMTAVLGFDVKQLLSLVQNTEGVVVANDNSSDQIVLSGTPEAVEMVVAQLTCKRSVPLNVSGAFHSPLMKDPAEAFAKEIDKLIFNNAIIPVVSNADPTPETNGALLQKKLKKQMITGVRWRETMALMMTQGINSIIEVGPGKVLSGLAKRSMPGVVIKQISSARDLGIGT

SEQ ID NO: 124441 - DNA, 936 bp, Erythrobacter sp. NAP1
  CDS (1)..(936): transl_table=11
atgattgcattcgtttttccggggcagggtagccagaaggtcggcatgggcaccgagctcgccgccgccagcgctgccgcgcgcgaggttttcgaagaggtcgacgaggcgcttggcatgaaactctcggccatcatgcgcgacggacccgaggaccagctgactctcaccgaaaacgcacagcctgcaatcatggctaatgcgattgcgaccctgcgcgtgcttgaggatgatttcggcgtgaagctggcggaaaccggctcctgcgtcgccggccactcgctcggcgagtatagtgccctttgtgccgtcggcgccttcgaccttgccaccactgcgcgccttctgaagcttcgcggaagcgcgatgcaggcggccgtgcctgtgggtgagggcggcatggctgcgttgctcggtgctgacgtcgagaaggccgccgcgcttgctgccgccgcttccgaacaggacgtgtgcgaggtcgcgaacgacaacgatcccactcaggttgtcatctcgggccacaagagcgccatcgaccgagccatcgcgatggcgaaggaccacggcatcaagcgcggcatcgctctgccggtttccgcacctttccattgctcgctcatgcagccagccgccgaccgaatggccgaagcgctcgccgaaacgcttccgggagaactggccctgccggtctacgccaatgtcacagcaacgaaggtgtctgacccggaagaagagcgcaatctgctggtagagcaggtcacaggccgcgtgcgttggcgcgagagcatcatcgcgatgcgcgcggacggtgttgagcgtttcgtcgaactgggcggcaaggtgcttggccccatgatcggccggatcgacaaggaagcggccaccgacagcctgatttcaatggaagacctggaggggttcgccaagacgctttga

SEQ ID NO: 124442 - protein, 311 aa, Erythrobacter sp. NAP1
MIAFVFPGQGSQKVGMGTELAAASAAAREVFEEVDEALGMKLSAIMRDGPEDQLTLTENAQPAIMANAIATLRVLEDDFGVKLAETGSCVAGHSLGEYSALCAVGAFDLATTARLLKLRGSAMQAAVPVGEGGMAALLGADVEKAAALAAAASEQDVCEVANDNDPTQVVISGHKSAIDRAIAMAKDHGIKRGIALPVSAPFHCSLMQPAADRMAEALAETLPGELALPVYANVTATKVSDPEEERNLLVEQVTGRVRWRESIIAMRADGVERFVELGGKVLGPMIGRIDKEAATDSLISMEDLEGFAKTL

SEQ ID NO: 124443 - DNA, 897 bp, Synechococcus sp. WH 7805
  CDS (1)..(897): transl_table=11
atgtcgatcgcctgggtgtttcctggtcaggggtctcagaaagtcggaatggccgatccagttctcagccttcctggtgctgaggagcgctttgcgctggcttctcggttgctgggtcgcgatctcctcgggatttgtcgcggcgagcctggggatgcggatgatcctgctgatttgaacgacacgcggaacacccagcccgcgctgttcgtggtcgagtcgctgatcgtggatgagctgcgtcggcagggtcgcgagcctgcgctggtcgccggccatagcctcggagaactggttgccctttatgcagcagaggtgtttgatgctgagaccggtcttgaactgatgcagcgccggtctgaactgatggccgcagctggcggaggagccatggccgccgttatcggtttcgagcgcagtcagctcgacgacctggtgaacgctacggaaggcgtggtgattgccaacgacaacagtgcggcccaggttgtgttgtcgggcacagcagacgccgtgaaggcggttggtgaagccctgacctgtaaacgagtcatccccctggctgtatcgggagcctttcattcaccctttatgcaggacgcggcggatgccttctcgcaacacctcaatgatctgacctttaaggatgcccgcttcccagtcctaagcaacacggaccccactccctgcgtggatgcggctgaactcaagcagcgcctgcaacgccagatgatcacaggcgttcgctggcgtgaaaccatggtggcgatgactgaagcgaacgtggagaccctggtggaagtcggcccaggggctgttctcagtggtctggccaaacgcgccatggccggggtcacgctgtcccagctcgctggagccggcgatctcggactttga

SEQ ID NO: 124444 - protein, 298 aa, Synechococcus sp. WH 7805
MSIAWVFPGQGSQKVGMADPVLSLPGAEERFALASRLLGRDLLGICRGEPGDADDPADLNDTRNTQPALFVVESLIVDELRRQGREPALVAGHSLGELVALYAAEVFDAETGLELMQRRSELMAAAGGGAMAAVIGFERSQLDDLVNATEGVVIANDNSAAQVVLSGTADAVKAVGEALTCKRVIPLAVSGAFHSPFMQDAADAFSQHLNDLTFKDARFPVLSNTDPTPCVDAAELKQRLQRQMITGVRWRETMVAMTEANVETLVEVGPGAVLSGLAKRAMAGVTLSQLAGAGDLGL

SEQ ID NO: 124445 - DNA, 936 bp, Pseudoalteromonas tunicata D2; identical to SEQ ID NO: 59291
  CDS (1)..(936): transl_table=11

SEQ ID NO: 124446 - protein, 311 aa, Pseudoalteromonas tunicata D2; identical to SEQ ID NO: 59292

SEQ ID NO: 124447 - DNA, 930 bp, Photobacterium sp. SKA34
  CDS (1)..(930): transl_table=11
atgtctaagttcgcgattgttttcccaggtcagggctctcaaaccgttggtatgctagctgaattagcagaacaatttgatgtggttaaagaaacgttctctgaggcatctgatgcgctaggttacgatctttgggcgctggttcaaaatggcccagtagaagatttaaaccaaacacaacgcactcagcctgcattgttaacagcatctgttgcgatttggcgtgcatggcagcagcaaggtggtgatcaaccaactttacttgctggccacagtcttggtgaatactctgcactagtttgtgctggcgttattgattttaaagttgcggtaaaattggttgaacttcgtggtcaactaatgcaagaagcagtaccagctggtgttggtgctatgtctgcaattatcggtcttgataacgatgcaattgcgaaagcgtgtgaagaagcggctcaaggtgaagtatgttcccctgtgaacttcaattcaccaggccaggttgttattgcgggtaataaagaagccgtagagcgtgcaaacgtactatgtaaagaagcaggtgctaaacgtgcgcttcctcttcctgtttcagtgccttctcactgcgcattaatgaaacctgcggcggataaacttgcagtagcactagaagctatcgaatttaatgcgccgtccgtacctgttattaacaatgctgacgtgacaacagaaactgatcctgcagctattaagcttgcacttgttaaacagctatacagcccagttcgttggactgaatctgttgagcttatggctgcagaaggtattgaagaattattagaaatgggtccaggtaaagtattaactggcctaactaagcgtattgatcgcgcacttagcggtgctgcagttaatgatattgcttcattagaagcggctatggctaagtag

SEQ ID NO: 124448 - protein, 309 aa, Photobacterium sp. SKA34
MSKFAIVFPGQGSQTVGMLAELAEQFDVVKETFSEASDALGYDLWALVQNGPVEDLNQTQRTQPALLTASVAIWRAWQQQGGDQPTLLAGHSLGEYSALVCAGVIDFKVAVKLVELRGQLMQEAVPAGVGAMSAIIGLDNDAIAKACEEAAQGEVCSPVNFNSPGQVVIAGNKEAVERANVLCKEAGAKRALPLPVSVPSHCALMKPAADKLAVALEAIEFNAPSVPVINNADVTTETDPAAIKLALVKQLYSPVRWTESVELMAAEGIEELLEMGPGKVLTGLTKRIDRALSGAAVNDIASLEAAMAK

SEQ ID NO: 124449 - DNA, 930 bp, Oceanospirillum sp. MED92
  CDS (1)..(930): transl_table=11
atgtcgcaatctctcgcatttgtttttccaggccagggttctcagcaggttggtatgctgtcagagctggcgtcttcgcatccagttattgaagctacgtttgctgaagcttctgaagtgcttggttatgatctttgggcgttggttcagaacggtcctgaagaagatttgaatcagactgataaaactcagcctgcgctgcttactgctggtgtggcgctttggcgtttatggcaggagcagggtggcgagatgccgtctgttgttgcaggacatagcttgggtgagtacacggcgctagtgtgtgctggcgcaattaaattctctgatggggtcagcctggttaagctgcgtggtgagttcatgcagcaggcagtgccagcaggtactggtgccatggctgccattcttggattggctgatgacgcaattgaaaaggcgtgtaaagatgctgaacagggtcaggtagtatcgcctgttaactataactgtcctgggcagattgttatcgcaggtcacaaagaagcagttgagcgcgcaattgagaactgtaaagaggcaggtgctaaacgcgctatacctctgccggtcagtgttccttctcactgtgcattgatgcagccagctgcggaccaaatggcggaagaattgagcaagattgaagttaagctgcctgaaattagtgtagttcagaatgttactgcagctgttcctggctctgtagaagaattgaaagaaaatttgttggctcagctgtatagtccggttctatggactaagagcgttcagggtatggttgatcagcaaattgaaacgactatcgaatgtggtccaggtaaggtattgtctggtcttaataagaaaatacacagacctttgactgttgcggcaattaatgacgtagctggccttgaaaaggcgctgggttaa

SEQ ID NO: 124450 - protein, 309 aa, Oceanospirillum sp. MED92
MSQSLAFVFPGQGSQQVGMLSELASSHPVIEATFAEASEVLGYDLWALVQNGPEEDLNQTDKTQPALLTAGVALWRLWQEQGGEMPSVVAGHSLGEYTALVCAGAIKFSDGVSLVKLRGEFMQQAVPAGTGAMAAILGLADDAIEKACKDAEQGQVVSPVNYNCPGQIVIAGHKEAVERAIENCKEAGAKRAIPLPVSVPSHCALMQPAADQMAEELSKIEVKLPEISVVQNVTAAVPGSVEELKENLLAQLYSPVLWTKSVQGMVDQQIETTIECGPGKVLSGLNKKIHRPLTVAAINDVAGLEKALG

SEQ ID NO: 124451 - DNA, 987 bp, Xanthobacter autotrophicus Py2
  CDS (1)..(987): transl_table=11
atgtcggatgggccgcgtacaggatctcagaccgcctttatcttccccggccagggcagccaggccgtgggaatgggcaaggcgctggcggacaatttcccggccgccaaggccgtgttcgatgaagtggacgccgccctcaacgagagcctgacgcaggtgatgtgggatggccccatcgacgcgctgaccctcaccgccaatgcccagccggcgctcatggcggtctccctcgccgccctgcgcgtgctggagaccgaggcggggctcgaccttgcccgcgaggccgccttcgtggccggccattcgctgggcgaatattccgccctcgccgccgccggcgccctcaccatcaccgaggccgcccggctgctgcgcatccgcggccgcgccatgcaggaggcggttcccgtgggcgaaggcgccatggcggcgctccttggcctcgactacgaccaggccgtggcggtggcggcggaagccgccggcgacgacgtgtgcgaagcggccaacgacaacgcccccggccaggtggtggtctccggcaccaaggcggcggtagaacgcgcgattgtcatcgccaaggagaagggcgccatgaaggccctgctcctgccggtgtccgcccccttccattgccgcctcatgggccccgccgccgaggccatggaagtggcgctctccggctccaccgtcatgaccccgcgggtgccgctggtggctaatgtgcgcgcctccccggtcaccgacccggccgagatcgtccgcctgctagtggagcaggtgaccggcacggtgcgctggcgcgaaagcgtcatctacatggcgggcgcgggcgtgacgcgcatggttgaggtcggcgccggcaaggtgctgtgcggcctcgtgaagcgcatcgacaagtcggtgtccgccagcgccgtgggcacgccggaagacgtggcggccttcatcgccgcccgcaacgccgctgcctcggcggcctga

SEQ ID NO: 124452 - protein, 328 aa, Xanthobacter autotrophicus Py2
MSDGPRTGSQTAFIFPGQGSQAVGMGKALADNFPAAKAVFDEVDAALNESLTQVMWDGPIDALTLTANAQPALMAVSLAALRVLETEAGLDLAREAAFVAGHSLGEYSALAAAGALTITEAARLLRIRGRAMQEAVPVGEGAMAALLGLDYDQAVAVAAEAAGDDVCEAANDNAPGQVVVSGTKAAVERAIVIAKEKGAMKALLLPVSAPFHCRLMGPAAEAMEVALSGSTVMTPRVPLVANVRASPVTDPAEIVRLLVEQVTGTVRWRESVIYMAGAGVTRMVEVGAGKVLCGLVKRIDKSVSASAVGTPEDVAAFIAARNAAASAA

SEQ ID NO: 124453 - DNA, 888 bp, Flavobacteria bacterium BBFL7
  CDS (1)..(888): transl_table=11
atgaaagcatacgtttttccaggtcaaggagcccaattcacaggaatgggtaaagacttatataatcaatttccagaggcaaaagcactttttaataaagcagatgaaattctaggttttgaaatttcaaaaatcatgttcgaaggaactgctgaagaattaaaggaaaccaaagtaacccaacctgctatctttttacattctgtaattcttgcaaaaatgatgggtgactctttccaaccagaaatggtggcaggtcactcactaggtgaattaagtgcacttaccgcagtaggaaccctaagttttgaagatggattaaagatagtttctaagcgtgctcttgcgatgcaagccgcttgcgaacatcaatcgagtaccatggcagcaattttaggattagacgatgcagtagtagaagatgtatgtaaaagcatagatggtattgtcgttgcagctaactataactgtccaggacaacttgtaatatctggcgctactaaagcggtagaagaagcttgcgaagctttaaaagaaaaaggtgcaaaacgcgccttaatgctaccagtaggtggagcatttcattctccattaatggaaccggcacgtgaagaacttgcggcagctatagaagctacagaatttgaagctccttcatgtcctgtatatcaaaacgtaaccacgctagggacaacagcagttgatgagattaaaacaaatcttatttatcaacttactggtcctgtaaaatggacacaatctgttcaaaatatgattgcagatggtgctactgaatttatagaagttgggccaggaagagcattgcagggaatgattaaaaagattgatcgcacggctcaggtgagtgctggtgcagttggtgagtaa

SEQ ID NO: 124454 - protein, 295 aa, Flavobacteria bacterium BBFL7
MKAYVFPGQGAQFTGMGKDLYNQFPEAKALFNKADEILGFEISKIMFEGTAEELKETKVTQPAIFLHSVILAKMMGDSFQPEMVAGHSLGELSALTAVGTLSFEDGLKIVSKRALAMQAACEHQSSTMAAILGLDDAVVEDVCKSIDGIVVAANYNCPGQLVISGATKAVEEACEALKEKGAKRALMLPVGGAFHSPLMEPAREELAAAIEATEFEAPSCPVYQNVTTLGTTAVDEIKTNLIYQLTGPVKWTQSVQNMIADGATEFIEVGPGRALQGMIKKIDRTAQVSAGAVGE

SEQ ID NO: 124455 - DNA, 936 bp, gamma proteobacterium HTCC2207; identical to SEQ ID NO: 59293
  CDS (1)..(936): transl_table=11

SEQ ID NO: 124456 - protein, 311 aa, gamma proteobacterium HTCC2207; identical to SEQ ID NO: 59294

SEQ ID NO: 124457 - DNA, 930 bp, Rickettsiella grylli; identical to SEQ ID NO: 59297
  CDS (1)..(930): transl_table=11

SEQ ID NO: 124458 - protein, 309 aa, Rickettsiella grylli; identical to SEQ ID NO: 59298

SEQ ID NO: 124459 - DNA, 921 bp, Oceanobacter sp. RED65; identical to SEQ ID NO: 59299
  CDS (1)..(921): transl_table=11

SEQ ID NO: 124460 - protein, 306 aa, Oceanobacter sp. RED65; identical to SEQ ID NO: 59300

SEQ ID NO: 124461 - DNA, 942 bp, Desulfitobacterium hafniense DCB-2; identical to SEQ ID NO: 59301
  CDS (1)..(942): transl_table=11

SEQ ID NO: 124462 - protein, 313 aa, Desulfitobacterium hafniense DCB-2; identical to SEQ ID NO: 59302

SEQ ID NO: 124463 - DNA, 897 bp, Synechococcus sp. RS9916
  CDS (1)..(897): transl_table=11
atggcgatcgcctgggtgttccctggtcaggggtctcagaaagtcggcatggccgaccctgtgatcagcctgcctggcgctgaagaacgctttgccctggcctcgcggcttctcggtcgtgatctgctggcgatctgccgtggcgaaaccagtgacgccgacggtcccgccgacctcaacgacacccgcaacacccagcccgccctgttcgtggtggagtcgctgatcgtcgacgaactgcgccgacaaggacgggaaccggccctggtggctggccacagcctgggagagctggtggctctctatgccgccggcgttttcgatgccgccactggcctggagttgatgctcaagcgctccaccctgatggccaatgctggcggtggagcgatgacggccgtgatcggcttcgatcgtgaccagctcgactccctggtggccgcccatgagggcgtggtaattgccaacgacaacagtgccgcccaggtggtgctgtctggcacccccgaggcggtcaaagccgtgagtgctgaactcacctgcaaacgtgccattcctttgccggtgtctggggcattccattcccccttcatggccgacgcggcggacgccttcgcctcccacctcgacagtgtgacctttgaagatgcccgcgtgccggtgctcagcaacaccgatcccagccccagctgcgatgccggagtgatcaagcagcgcctgcgggatcagatgacccgtggtgtgcgctggcgcgaaaccatggaggccatgaccgctgccaaggtggacaccctggtggagatcggccccggcaacgtgctcagtggtctggccaaacgctccatgagcggcgtggttgccagccagctggccagtgccggcgacctgggactgtga

SEQ ID NO: 124464 - protein, 298 aa, Synechococcus sp. RS9916
MAIAWVFPGQGSQKVGMADPVISLPGAEERFALASRLLGRDLLAICRGETSDADGPADLNDTRNTQPALFVVESLIVDELRRQGREPALVAGHSLGELVALYAAGVFDAATGLELMLKRSTLMANAGGGAMTAVIGFDRDQLDSLVAAHEGVVIANDNSAAQVVLSGTPEAVKAVSAELTCKRAIPLPVSGAFHSPFMADAADAFASHLDSVTFEDARVPVLSNTDPSPSCDAGVIKQRLRDQMTRGVRWRETMEAMTAAKVDTLVEIGPGNVLSGLAKRSMSGVVASQLASAGDLGL

SEQ ID NO: 124465 - DNA, 927 bp, Alteromonadales bacterium TW-7
  CDS (1)..(927): transl_table=11
atggcacaaaaaattgcacttctattcccaggtcaaggttcgcaaagcgtaggtatgttacaagcgctcctagaaacctctgacattgtaaaatcaacgtttgcagaggcatcaaccgcattgggatacgacttagcagcgttagttcttaacggtccagaagaaaaactaaacgaaacccaccgaactcaacctgcattattaaccgcaagtgttgcgatttatcgcgactggttagctaaaaacccagacgccgatgttgtaatggcagggcacagcttaggtgaatattcagcgcaggtatgcagtaacgtaattagcttaagcgaagcggttaaattagtagaaaaccgcggcttgtacatgcaagaagccgtaccggctggtgtgggctctatggccgctattattggcttgggcgacgacgaaattaaagcggcgtgtgcagcatcggcgcaaggcgaagttgtatcgccagttaactacaactcaccaggtcaagtagtaatagcagggcataaagcagctgtagatagagcatctgtagcctgtaaagaagccggcgcaaaacgcgcactaccgctatcggtaagcgtgccttcgcattgtgaactaatgaagcctgcagcagataaactgggtaatgatttagccgctttaacatttaatacacctaagtgtgatgtaattaataatgtagatgtaaaagcagaaagttcagctgacgcgataaaagatgcacttgtacgccagttatacagcccagttcgctggacagaaaccgtgcaagcattagtagcgcaaggtgtaacgcaaagctacgaatttggtccgggtaaagtattaacaggcctggcaaaacgaattgataaagcaatggtatgtggctcagtaaacgacgccgcttcaattgatacagctaaataa

SEQ ID NO: 124466 - protein, 308 aa, Alteromonadales bacterium TW-7
MAQKIALLFPGQGSQSVGMLQALLETSDIVKSTFAEASTALGYDLAALVLNGPEEKLNETHRTQPALLTASVAIYRDWLAKNPDADVVMAGHSLGEYSAQVCSNVISLSEAVKLVENRGLYMQEAVPAGVGSMAAIIGLGDDEIKAACAASAQGEVVSPVNYNSPGQVVIAGHKAAVDRASVACKEAGAKRALPLSVSVPSHCELMKPAADKLGNDLAALTFNTPKCDVINNVDVKAESSADAIKDALVRQLYSPVRWTETVQALVAQGVTQSYEFGPGKVLTGLAKRIDKAMVCGSVNDAASIDTAK

SEQ ID NO: 124467 - DNA, 927 bp, marine gamma proteobacterium HTCC2143
  CDS (1)..(927): transl_table=11
atgactaacccaaagcttgcttttgtatttccaggccaaggctctcaaaaagtaggcatgctaaaagagattgccggacagtttcctgtggtgctggatacatttgcagaggcttctgatgagctgggctacgatctttgggatatggtacaaaatggtgagcagcaacagctaaatttaacagagaggacgcagcctatactgctcacatccagcgtcgccttgtggcgggtttgggccgagcgtgagggtatgcggccagcaatgatggcaggtcacagtctcggtgagttttctgctttagtctgtgctgaaagcatacggttttcggaggcggtgagcttggttagggctcgaggtcaatttatgcaaactgcagtgccggtgggagagggttccatggctgcggtgctcgggcttgatgatgccgtaatcgtcgatgtctgttcgaaaaccggcgctgaagcggttaactttaattctccgggtcaggttgtaatcgcaggcaaagttgcagctgtcgatcaggccatcgaacttttgaaagaggcgggagctaaaagagcgatgaccctaccagtaagtgcgcctttccacacgtcattgatgcagcccgctgctgaaaagctggccgaaaaaatggggcagttacgtgttgcagttcctacgatcccggtggtgcataacgtccatgcagaaacggaaagtgatccggaaaaaatcaagcagttactggtgcggcaactctacagtccggttaagtggacgagctgcgtgcagacgatggtcgcagcgggcatcgaaaaaacacttgaatgtggccctgggaaagttttgagcgggttaagcaagcgtattgatcggtcattaattggttacaatatcgaagagccagtcgcgctggaaaaggcgctggccgaaatttag

SEQ ID NO: 124468 - protein, 308 aa, marine gamma proteobacterium HTCC2143
MTNPKLAFVFPGQGSQKVGMLKEIAGQFPVVLDTFAEASDELGYDLWDMVQNGEQQQLNLTERTQPILLTSSVALWRVWAEREGMRPAMMAGHSLGEFSALVCAESIRFSEAVSLVRARGQFMQTAVPVGEGSMAAVLGLDDAVIVDVCSKTGAEAVNFNSPGQVVIAGKVAAVDQAIELLKEAGAKRAMTLPVSAPFHTSLMQPAAEKLAEKMGQLRVAVPTIPVVHNVHAETESDPEKIKQLLVRQLYSPVKWTSCVQTMVAAGIEKTLECGPGKVLSGLSKRIDRSLIGYNIEEPVALEKALAEI

SEQ ID NO: 124469 - DNA, 939 bp, Pseudomonas putida GB-1; identical to SEQ ID NO: 59305
  CDS (1)..(939): transl_table=11

SEQ ID NO: 124470 - protein, 312 aa, Pseudomonas putida GB-1; identical to SEQ ID NO: 59306

SEQ ID NO: 124471 - DNA, 1387 bp, Glycine max; identical to SEQ ID NO: 59319
  CDS (95)..(1129)
  misc_feature (30)..(30): n is a, g, c or t
  misc_feature (44)..(44): n is a, g, c or t

SEQ ID NO: 124472 - protein, 344 aa, Glycine max; identical to SEQ ID NO: 59320

SEQ ID NO: 124473 - DNA, 1203 bp, Bacillus subtilis; identical to SEQ ID NO: 59321
  CDS (1)..(1203): transl_table=11

SEQ ID NO: 124474 - protein, 400 aa, Bacillus subtilis; identical to SEQ ID NO: 59322

SEQ ID NO: 124475 - DNA, 951 bp, Streptomyces aureofaciens; identical to SEQ ID NO: 59325
  CDS (1)..(951): transl_table=11

SEQ ID NO: 124476 - protein, 316 aa, Streptomyces aureofaciens; identical to SEQ ID NO: 59326

SEQ ID NO: 124477 - DNA, 1203 bp, Bacillus subtilis
  CDS (1)..(1203): transl_table=11
atgaacaatcttgcctttttatttcctggacaagggtctcaatttgtaggaatgggcaaacaattttggaatgattttgtgctcgcaaagagattgtttgaagaagcgagcgatgcgatctccttggatgtaaaaaaactgtgttttaacggagatatgaatgaattgacaaagacaatgaacgcgcagcccgctattttaacggtcagtgttattgcttttcaagtgtatatgcaggaaataggggtgaagccccgcttcctggcaggccatagcttaggcgaatattcagcgcttgtctgtgccggtgccctttcttttcgggatgccgttacacttgtaagggagcggggaattcttatgcaaaatgcagatcctcagcagcagggggcgatggccgccgtgactcacctctctcttcaaacgttgcaagaaatatgttcgaaagtgtcgacggaagactttccggcaggagtagcctgcatgaattcagaacagcagcatgtgatttccggacaccggcaagctgtggaacgtgtcatcaagatggcggaggaaaagggtgcggcatacacttatttgaatgtcagtgcgccttttcacagttcgatgatacgatcagcctccgaacaattccagactgtattacaccggtattccttccgggatgccgcatggccgatcatttcaaatgtcaccgcgcgcccttacagcagcggaaattcgatcagcgaacatctcaagcagcacatgacgttgccggttagatggacagaatcgatgcattacttgcttttacatggagtcacagaagtcatcgaaatgggtccgaacaatgtcttagccggtctgctgagaaaaacaacgaatcacattgtaccctatcccttaggacagacatctgatgttcccccgctttccaatccagcggaaagaaagaaacatattgtccatttacgcaaaaaacaactgaataaattgatgattcaatccgtcattgcgcgaaattacaacaaggattcagcggcttattccactatgacgacgccattatttacgcaaatccaagagctgaaagagagaatgaaaaggcatgaagacgtgctttcagagcaagaactcgaacattcgatccatttatgcaaattaatttgtgaagctaaacagcttccggcttgggaagaattgcggattttaaaataa

SEQ ID NO: 124478 - protein, 400 aa, Bacillus subtilis
MNNLAFLFPGQGSQFVGMGKQFWNDFVLAKRLFEEASDAISLDVKKLCFNGDMNELTKTMNAQPAILTVSVIAFQVYMQEIGVKPRFLAGHSLGEYSALVCAGALSFRDAVTLVRERGILMQNADPQQQGAMAAVTHLSLQTLQEICSKVSTEDFPAGVACMNSEQQHVISGHRQAVERVIKMAEEKGAAYTYLNVSAPFHSSMIRSASEQFQTVLHRYSFRDAAWPIISNVTARPYSSGNSISEHLKQHMTLPVRWTESMHYLLLHGVTEVIEMGPNNVLAGLLRKTTNHIVPYPLGQTSDVPPLSNPAERKKHIVHLRKKQLNKLMIQSVIARNYNKDSAAYSTMTTPLFTQIQELKERMKRHEDVLSEQELEHSIHLCKLICEAKQLPAWEELRILK

SEQ ID NO: 124479 - DNA, 939 bp, Pseudomonas syringae
  CDS (1)..(939): transl_table=11
atgtctgcatccctcgcattcgtctttccgggtcaaggatcgcaatcgctcggtatgctcgccgaacaaggcgcgcaacatccgctgatcctcgacactttcgagcaggcttccgaagccctcggctatgacctgtgggcattgactcagaacggtcctgccgagctgctcaatcagaccgacaagacccagccggccattttgaccgcttcggttgccttgtggcatgtgtggctggccgagggcggtgcggttcctgcgttcgtcgccggtcacagtctgggtgaatacagcgcactggtagccgcgcaaagcctgagcctggccgacgccgtaaagcttgtcgagcgtcgcggccagttgatgcaggaagcggtgccagcgggtcagggcggtatggccgccattctgggtctcgatgatgccgacgttattgcagcctgcgccgaagcggcacagggtgaggtcgtcagtgccgtgaatttcaactcgccgggccaggtggtgatcgccggttccgccgaggctgtcaagcgtaccatggagctgtgcaaggcccgtggcgccaagcgcgctttgccattgccggtcagcgtgccatcgcactgcgaactgatgcgcccggccgccgagcgtttcgccgaggccgttgaagccatcgaatggcaagcgccgaaaattgcgctggtacagaacgtcagcgccagtgccgtcagtgatctggcgacgctcaagcgtgatttgctggagcagttgtacaagccggtacgctgggtcgaatccattcaatgcctggccagtcgcggtgcgacccagcttgtggagtgcggtccgggcaaagtgctggccggtctgaacaagcgttgcgccgacggcgtgatgacctacaaccttgataccccggacgcctttgccgccgcacgcgcggcactggcctga

SEQ ID NO: 124480 - protein, 312 aa, Pseudomonas syringae
MSASLAFVFPGQGSQSLGMLAEQGAQHPLILDTFEQASEALGYDLWALTQNGPAELLNQTDKTQPAILTASVALWHVWLAEGGAVPAFVAGHSLGEYSALVAAQSLSLADAVKLVERRGQLMQEAVPAGQGGMAAILGLDDADVIAACAEAAQGEVVSAVNFNSPGQVVIAGSAEAVKRTMELCKARGAKRALPLPVSVPSHCELMRPAAERFAEAVEAIEWQAPKIALVQNVSASAVSDLATLKRDLLEQLYKPVRWVESIQCLASRGATQLVECGPGKVLAGLNKRCADGVMTYNLDTPDAFAAARAALA

SEQ ID NO: 124481 - DNA, 1436 bp, Arabidopsis thaliana; identical to SEQ ID NO: 59335
  CDS (130)..(1233)

SEQ ID NO: 124482 - protein, 367 aa, Arabidopsis thaliana; identical to SEQ ID NO: 59336

SEQ ID NO: 124483 - DNA, 1367 bp, Perilla frutescens; identical to SEQ ID NO: 59341
  CDS (6)..(1136)

SEQ ID NO: 124484 - protein, 376 aa, Perilla frutescens; identical to SEQ ID NO: 59342

SEQ ID NO: 124485 - DNA, 1203 bp, Bacillus subtilis; identical to SEQ ID NO: 59345
  CDS (1)..(1203): transl_table=11

SEQ ID NO: 124486 - protein, 400 aa, Bacillus subtilis; identical to SEQ ID NO: 59346

SEQ ID NO: 124487 - DNA, 924 bp, Vibrio marinus; identical to SEQ ID NO: 59347
  CDS (1)..(924): transl_table=11

SEQ ID NO: 124488 - protein, 307 aa, Vibrio marinus; identical to SEQ ID NO: 59348

SEQ ID NO: 124489 - DNA, 1143 bp, Colletotrichum gloeosporioides
  CDS (1)..(1143)
atgcctgccacacaagggaagcggccgcggacggcgctgttctttccaggccaaggggtacagaaggtgggaatgatcacaccatggctcgaggccttccccgcgacggcgaagccaatcttggaggagattgatcactacatgggcttcaagctctccgacatcatcgccaacgggcccggcaagctgcttacgaagacgcccaacgcccagcccgccatcatggcgacctcgatcctcatcctccgcatcctggagcgcgagttcggcttcgacatcccacagcgcgtcgacgttactctcgggcattcgctgggagagttcgcggcgctggtggcgggcggatacctcgagttcgaagacagcttatatctggtgcgcaagcgggcagaggccatgcacgaggcgacaaggcgtgccgtggacgaatacggtggagagtacggcatggtggccatagtaacggaaccggagtacttgaagggcctgatcgaggccatacacgactttgtgggacattcgagcgcggggtccaagggggagagctcggaagacgtcccgccgatagagcaggtgctcattgcgaacatcaatagcaagaaccagattgtgttgagcggcaacattgagcggatcaagactctcgcgacacatgtcaggcagttcctagggcatgacccacgcgccgtgcggttgaacagcgacagcccgtttcacagcccgatcatgaagcccgctgtctcggttgtgaaaagcatactgaacaagaagagcagggtcaaggggcgtgaaggggaggatattatcacattcccgggcaagttgccctgtataagcaacgtcagcgcgaggccgttcgagagcaaggaggacgtgaaggatctcttagcacggcagtgcctagagacggtgaggtggtgggacagcatcaaatatctcgatcaggaggagaaagtgagacgatgggttggcatcgggcccgggaaggtcggccgtaacctcgtcggcaaagaggtgggcatgagagggaaggactcggttaaaggcggtggcgtatgggccatcaccgacccgagcgagatcgaagaggtgctaaggggacttgaggatacggagcattggtcagatgacgatgctgaatga

SEQ ID NO: 124490 - protein, 380 aa, Colletotrichum gloeosporioides; identical to SEQ ID NO: 59350

SEQ ID NO: 124491 - DNA, 954 bp, Bacillus subtilis; identical to SEQ ID NO: 59353
  CDS (1)..(954): transl_table=11

SEQ ID NO: 124492 - protein, 317 aa, Bacillus subtilis; identical to SEQ ID NO: 59354

SEQ ID NO: 124493 - DNA, 1140 bp, Drosophila melanogaster; identical to SEQ ID NO: 59355
  CDS (1)..(1140)

SEQ ID NO: 124494 - protein, 379 aa, Drosophila melanogaster; identical to SEQ ID NO: 59356

SEQ ID NO: 124495 - DNA, 930 bp, Escherichia coli O157
  CDS (1)..(930): transl_table=11
atgacgcaatttgcatttgtgttccctggacagggttctcaaaccgttggaatgctggctgatatggcggcgagctatccaattgtcgaagaaacgtttgctgaagcttctgcggcgctgggctacgacctgtgggcgctgacccagcaggggccagctgaagaactgaataaaacctggcaaacccagccagcgctgttgactgcctctgttgcgctgtaccgcgtatggcagcagcatggcggtaaagcaccggcaatgatggccggtcacagcctgggggaatactccgcgctggtttgcgctggtgtgattgatttcgctgatgcggtgcgtctggttgagatgcgcggcaagttcatgcaagaagccgtaccggaaggaacgggcgctatggcggcaatcatcggtctggatgatgcgtctattggaaaagcgtgtgaagaagctgcagaaggtcaggtcgtttctccggtaaactttaactctccgggacaggtggttattgccggtcataaagaagcggttgagcgtgctggcgctgcctgtaaagctgcgggcgcaaaacgcgctctgccgttaccagtgagcgtaccgtctcactgtgcgctgatgaaaccagcagccgacaaactggcagtagaattagcgaaaatcacctttaacgcaccaacagttcctgttgtgaataacgttgatgtgaaatgcgaaaccaatggtgatgccattcgtgacgcactggtacgtcagttgtataacccggttcagtggacgaagtctgttgagtacatggcagcgcaaggcgtagaacatctctatgaagtcggcccgggcaaagtgcttactggcctgacgaaacgcattgtcgacaccctgaccgcctcggcgctgaacgaaccttcagcgatggcagcggcgctcgagctttaa

SEQ ID NO: 124496 - protein, 309 aa, Escherichia coli O157
MTQFAFVFPGQGSQTVGMLADMAASYPIVEETFAEASAALGYDLWALTQQGPAEELNKTWQTQPALLTASVALYRVWQQHGGKAPAMMAGHSLGEYSALVCAGVIDFADAVRLVEMRGKFMQEAVPEGTGAMAAIIGLDDASIGKACEEAAEGQVVSPVNFNSPGQVVIAGHKEAVERAGAACKAAGAKRALPLPVSVPSHCALMKPAADKLAVELAKITFNAPTVPVVNNVDVKCETNGDAIRDALVRQLYNPVQWTKSVEYMAAQGVEHLYEVGPGKVLTGLTKRIVDTLTASALNEPSAMAAALEL

SEQ ID NO: 124497 - DNA, 930 bp, Salmonella typhimurium; identical to SEQ ID NO: 59357
  CDS (1)..(930): transl_table=11

SEQ ID NO: 124498 - protein, 309 aa, Salmonella typhimurium; identical to SEQ ID NO: 59358

SEQ ID NO: 124499 - DNA, 1155 bp, Brassica napus; identical to SEQ ID NO: 59359
  CDS (1)..(1155)

SEQ ID NO: 124500 - protein, 384 aa, Brassica napus; identical to SEQ ID NO: 59360

SEQ ID NO: 124501 - DNA, 1182 bp, Zea mays; identical to SEQ ID NO: 59363
  CDS (1)..(1182)

SEQ ID NO: 124502 - protein, 393 aa, Zea mays; identical to SEQ ID NO: 59364

SEQ ID NO: 124503 - DNA, 24 bp, Artificial sequence
  primer
atgacgcaatttgcatttgtgttc

SEQ ID NO: 124504 - DNA, 21 bp, Artificial sequence
  primer
ttaaagctcgagcgccgctgc

SEQ ID NO: 124505 - protein, 353 aa, Artificial sequence
  consensus sequence
  Variant (2)..(3): Xaa in position 2 to 3 is any amino acid
  Variant (9)..(9): Xaa in position 9 is any amino acid
  Variant (11)..(12): Xaa in position 11 to 12 is any amino acid
  Variant (15)..(32): Xaa in position 15 to 32 is any amino acid
  Variant (33)..(42): Xaa in position 33 to 42 is any or no amino acid
  Variant (44)..(55): Xaa in position 44 to 55 is any amino acid
  Variant (56)..(63): Xaa in position 56 to 63 is any or no amino acid
  Variant (65)..(66): Xaa in position 65 to 66 is any amino acid
  Variant (68)..(70): Xaa in position 68 to 70 is any amino acid
  Variant (74)..(79): Xaa in position 74 to 79 is any amino acid
  Variant (80)..(85): Xaa in position 80 to 85 is any or no amino acid
  Variant (87)..(98): Xaa in position 87 to 98 is any amino acid
  Variant (99)..(110): Xaa in position 99 to 110 is any or no amino acid
  Variant (119)..(119): Xaa in position 119 is any amino acid
  Variant (122)..(124): Xaa in position 122 to 124 is any amino acid
  Variant (126)..(134): Xaa in position 126 to 134 is any amino acid
  Variant (136)..(138): Xaa in position 136 to 138 is any amino acid
  Variant (140)..(141): Xaa in position 140 to 141 is any amino acid
  Variant (142)..(142): Xaa in position 142 is any or no amino acid
  Variant (144)..(145): Xaa in position 144 to 145 is any amino acid
  Variant (147)..(148): Xaa in position 147 to 148 is any amino acid
  Variant (149)..(157): Xaa in position 149 to 157 is any or no amino acid
  Variant (159)..(159): Xaa in position 159 is any amino acid
  Variant (161)..(161): Xaa in position 161 is any amino acid
  Variant (163)..(164): Xaa in position 163 to 164 is any amino acid
  Variant (166)..(183): Xaa in position 166 to 183 is any amino acid
  Variant (184)..(205): Xaa in position 184 to 205 is any or no amino acid
  Variant (207)..(207): Xaa in position 207 is any amino acid
  Variant (209)..(211): Xaa in position 209 to 211 is any amino acid
  Variant (213)..(213): Xaa in position 213 is any amino acid
  Variant (215)..(216): Xaa in position 215 to 216 is any amino acid
  Variant (218)..(236): Xaa in position 218 to 236 is any amino acid
  Variant (237)..(246): Xaa in position 237 to 246 is any or no amino acid
  Variant (248)..(248): Xaa in position 248 is any amino acid
  Variant (251)..(253): Xaa in position 251 to 253 is any amino acid
  Variant (255)..(257): Xaa in position 255 to 257 is any amino acid
  Variant (259)..(260): Xaa in position 259 to 260 is any amino acid
  Variant (262)..(281): Xaa in position 262 to 281 is any amino acid
  Variant (282)..(294): Xaa in position 282 to 294 is any or no amino acid
  Variant (296)..(307): Xaa in position 296 to 307 is any amino acid
  Variant (308)..(311): Xaa in position 308 to 311 is any or no amino acid
  Variant (313)..(314): Xaa in position 313 to 314 is any amino acid
  Variant (316)..(319): Xaa in position 316 to 319 is any amino acid
  Variant (321)..(321): Xaa in position 321 is any amino acid
  Variant (323)..(337): Xaa in position 323 to 337 is any amino acid
  Variant (338)..(343): Xaa in position 338 to 343 is any or no amino acid
  Variant (345)..(345): Xaa in position 345 is any amino acid
  Variant (347)..(347): Xaa in position 347 is any amino acid
  Variant (349)..(349): Xaa in position 349 is any amino acid
  Variant (352)..(352): Xaa in position 352 is any amino acid
AXXFPGQGXQXXGMXXXXXXXXXXXXXXXXXXXXXXXXXXXXLXXXXXXXXXXXXXXXXXXXXLXXTXXXQPAXXXXXXXXXXXXAXXXXXXXXXXXXXXXXXXXXXXXXAGHSLGEYXALXXXGXXXXXXXXXLXXXRXXXMXXAXXXXXXXXXXXGXMXAXXGXXXXXXXXXXXXXXXXXXXXXXXXXXXXXXXXXXXXXXXXNXNXXXQXVXXGXXXXXXXXXXXXXXXXXXXXXXXXXXXXXLXVSXXXHXXXMXXAXXXXXXXXXXXXXXXXXXXXXXXXXXXXXXXXXNXXXXXXXXXXXXXXXXLXXQXXXXVXWXXXXXXXXXXXXXXXXXXXXXEXGXGXVLXG

SEQ ID NO: 124506 - protein, 33 aa, Artificial sequence
  protein pattern
  Variant (2)..(2): Xaa in position 2 is any amino acid
  Variant (3)..(3): Xaa in position 3 is any or no amino acid
  Variant (8)..(8): Xaa in position 8 is Phe or Tyr
  Variant (9)..(9): Xaa in position 9 is Ala, Ser or Thr
  Variant (12)..(13): Xaa in position 12 to 13 is any amino acid
  Variant (14)..(14): Xaa in position 14 is Ala, Gly, Asn, Ser, Thr or Val
  Variant (15)..(21): Xaa in position 15 to 21 is any amino acid
  Variant (22)..(22): Xaa in position 22 is Ala, Gly, Ser, Thr or Val
  Variant (23)..(28): Xaa in position 23 to 28 is any amino acid
  Variant (30)..(30): Xaa in position 30 is Ala, Gly or Ser
  Variant (31)..(32): Xaa in position 31 to 32 is any amino acid
  Variant (33)..(33): Xaa in position 33 is Ile, Met or Val
GXXSLGEXXALXXXXXXXXXXXXXXXXXRXXXX

SEQ ID NO: 124507 - protein, 14 aa, Artificial sequence
  protein pattern
  Variant (2)..(3): Xaa in position 2 to 3 is any amino acid
  Variant (5)..(5): Xaa in position 5 is Ala or Pro
  Variant (9)..(9): Xaa in position 9 is Ala or Ser
  Variant (11)..(12): Xaa in position 11 to 12 is any amino acid
AXXFXGQGXQXXGM

SEQ ID NO: 124508 - protein, 12 aa, Artificial sequence
  protein pattern
  Variant (2)..(2): Xaa in position 2 is any amino acid
  Variant (4)..(4): Xaa in position 4 is Ala, Cys, Gly, Ser or Thr
  Variant (5)..(6): Xaa in position 5 to 6 is any amino acid
  Variant (8)..(8): Xaa in position 8 is any amino acid
  Variant (10)..(10): Xaa in position 10 is Ile, Leu or Val
  Variant (11)..(11): Xaa in position 11 is Ala, Gly, Ser or Thr
NXNXXXQXVXXG

SEQ ID NO: 124509 - DNA, 624 bp, Escherichia coli
  CDS (1)..(624): transl_table=11
atgcccctgcccgattttcgtcttatccgcctgctaccgctggctgctcttgtgctcactgcctgttccgttaccacgcccaaaggtcctggcaaaagcccggattcgccacaatggcgtcagcatcagcaagacgtgcgcaatcttaatcagtatcagactcgcggcgcgttcgcttatatttctgaccaacaaaaagtgtacgcccgctttttctggcagcaaaccggccaggatcgctaccgtctgctgctcactaacccattgggcagcacggaactggagctgaatgctcaaccgggtaacgtgcagttagtcgacaataaaggtcagcgttataccgccgatgacgccgaagagatgattggcaaattgaccggaatgccaattccgctcaacagcttgcgccagtggattttaggtttaccgggtgatgcaaccgactacaaactggacgaccagtaccgcctgagcgaaattacctacagccagaatggcaaaaactggaaggttgtttatggtggttatgacaccaaaacgcaacctgcgatgccagccaatatggaactcaccgacggtggtcaacgcatcaagttaaaaatggataactggatagtgaaataa

SEQ ID NO: 124510 - protein, 207 aa, Escherichia coli
MPLPDFRLIRLLPLAALVLTACSVTTPKGPGKSPDSPQWRQHQQDVRNLNQYQTRGAFAYISDQQKVYARFFWQQTGQDRYRLLLTNPLGSTELELNAQPGNVQLVDNKGQRYTADDAEEMIGKLTGMPIPLNSLRQWILGLPGDATDYKLDDQYRLSEITYSQNGKNWKVVYGGYDTKTQPAMPANMELTDGGQRIKLKMDNWIVK

SEQ ID NO: 124511 - DNA, 687 bp, Yersinia pestis KIM
  CDS (1)..(687): transl_table=11
atgttgcctcatcagaaacctgccgcaggtgaaaaccagacggctgataggatttgtacccatatgcccatgcgtaaaagacatttttatcgcctgctgcctttagcctctctgctgctggctgcttgtacaatcccagtatcaaagggaccagcgactagccctacgtcgccacagtggcgtcagcatgaacaacagttgcagcaacttggccaatttgaaactcgtggcgcatttgcttacctgtctgataaacagaaagtttatgccagattcttttggcaacagacctctcccgagcgttatcgtttattactgactaacccgttaggcagcactgagttggagttagttgtacaaccgggtgtgacacaactgacggataatcaaggtaagcgctacgtcagtgatgatccgcaagagatgattcaaaagttgacaggcatgtccatcccactggaaagcctgcgccaatggatccttggcttaccgggcgatacctctgattttacccttgacgataaatatcgcctgaagaaactgacttaccaacaaaatggggtgacatgggttgttgattatcaagaatacaacacgcaggtcacgccctccttacccagccgcctggagctgaatcaagatgggcaacggattaaactgaaaatggatagctggacgatcaaataa

SEQ ID NO: 124512 - protein, 228 aa, Yersinia pestis KIM
MLPHQKPAAGENQTADRICTHMPMRKRHFYRLLPLASLLLAACTIPVSKGPATSPTSPQWRQHEQQLQQLGQFETRGAFAYLSDKQKVYARFFWQQTSPERYRLLLTNPLGSTELELVVQPGVTQLTDNQGKRYVSDDPQEMIQKLTGMSIPLESLRQWILGLPGDTSDFTLDDKYRLKKLTYQQNGVTWVVDYQEYNTQVTPSLPSRLELNQDGQRIKLKMDSWTIK

SEQ ID NO: 124513 - DNA, 690 bp, Escherichia coli CFT073
  CDS (1)..(690): transl_table=11
atggctaacggtaacgctagcattaagggttataactgcaacgtatctcaaggacttgtcattattatgcccctgcccgattttcgctttatccgcctgctaccgctagcagccctcgtgctcactgcctgttctattaccacacccaaaggcccaggcaaaagcccggattcgccacaatggcgtcagcatcagcaagacgtgcgcaatcttaatcagtatcaaactcgcggcgcgttcgcttatatttctgaccaacaaaaagtgtacgcccgtttcttctggcagcaaactggccaggatcgctaccgtctgctgctgactaacccattgggcagcacggaactggagctgaatgctcaaccgggtaacgtgcagttagtcgacaataaaggtcagcgttatacctccgatgacgccgaagagatgattggcaaattgaccggaatgccaattccgctcaacagcttgcgccagtggattttaggtttaccgggtgatgcgactgactacaaacttgacgaccagtaccgcctgagtgaaatcacctacagccagaatggcaaaaactggaaagttgtttacggtggttatgacacaaaaactcaacctgcgatgccagccaatatggaactcaccgacggtggtcaacgcatcaagttaaaaatggataactggatagtgaaataa

SEQ ID NO: 124514 - protein, 229 aa, Escherichia coli CFT073
MANGNASIKGYNCNVSQGLVIIMPLPDFRFIRLLPLAALVLTACSITTPKGPGKSPDSPQWRQHQQDVRNLNQYQTRGAFAYISDQQKVYARFFWQQTGQDRYRLLLTNPLGSTELELNAQPGNVQLVDNKGQRYTSDDAEEMIGKLTGMPIPLNSLRQWILGLPGDATDYKLDDQYRLSEITYSQNGKNWKVVYGGYDTKTQPAMPANMELTDGGQRIKLKMDNWIVK

SEQ ID NO: 124515 - DNA, 621 bp, Burkholderia vietnamiensis G4
  CDS (1)..(621): transl_table=11
atgcggatgttcccgatgcttttcccgtctttccgcgcgcagcgcgcgctggctgcggccggcgcggcgctcgcgctcgccggctgcgcgagcacgccgccggcggcgaacgcgccgtcggacgccgtgctgcagacggccgcgacgcacgcgtatcacggccgcttcgcggtgcagtacaacgaccgcctcggccggcaacagaacgtgtacggcaacttcgactggcaggagcacggcgacgacgtatcgctggaactgcgcagcccgctcggccagacgctcgccgtcgtcaaatcgacgccgcaggccgcgtcgctcgagctgccgaaccgtcagccgcaatatgcgaccgacgtcggcgagctgatgcagaacacgctcggcttcgcgttgccgctcgccggcctgcgctactggctgctgccaacgcccgcgcccacgacgcccgcgcagacgcagcgcgatccggccgacgccgcgcgcgtcacgcagatccgccaggacggctggacgatcgactacctcgcctacgcggacgcgccggccacgggcgtcaaacgcgtgaacctcgtgcgcgcgacgccgccactcgacatcaagctcgtgctcgaccagtga

SEQ ID NO: 124516 - protein, 206 aa, Burkholderia vietnamiensis G4
MRMFPMLFPSFRAQRALAAAGAALALAGCASTPPAANAPSDAVLQTAATHAYHGRFAVQYNDRLGRQQNVYGNFDWQEHGDDVSLELRSPLGQTLAVVKSTPQAASLELPNRQPQYATDVGELMQNTLGFALPLAGLRYWLLPTPAPTTPAQTQRDPADAARVTQIRQDGWTIDYLAYADAPATGVKRVNLVRATPPLDIKLVLDQ

SEQ ID NO: 124517 - DNA, 624 bp, Erwinia carotovora subsp. atroseptica SCRI1043
  CDS (1)..(624): transl_table=11
atgccaaccaaaaccgtccgatgcctgcgtttactgcctttagccagcctattgctagccgcctgtagcgttaatcaaccaacacaaacgggtaaaagcccaacctcgccagagtggcaaaaacatcaacaaaaagtacagcaactcacccaatatcaaacgcgcggcgcttttgcctatatctccgatagcaaaagagtatcagccaattttttctggcaggacacgcctccgcagcgttatagactgttgctgaccaacccgctcggcagcaccgaattagaactgcgcgcccagcccgacggcgtgcaaatcaccgacaatcaaggcaaacgttacgtaggtaaagatgccgagtacatgattcagcaactgaccggcatggcgatcccgctgaataatctgcgtcaatggatcctcggcataccgggtgatgcgaccgaattcacattggatgaacgctatctgctaaaaaccatcacctatcgtcagggcaatcaaaactgggatgtcagctatcagagctacaacaccgagttgacgcccccgcttccaaccagtctggaattggttcagggcgaacagcgaattaagctgaagatgaataactggatggttaaatag

SEQ ID NO: 124518 - protein, 207 aa, Erwinia carotovora subsp. atroseptica SCRI1043
MPTKTVRCLRLLPLASLLLAACSVNQPTQTGKSPTSPEWQKHQQKVQQLTQYQTRGAFAYISDSKRVSANFFWQDTPPQRYRLLLTNPLGSTELELRAQPDGVQITDNQGKRYVGKDAEYMIQQLTGMAIPLNNLRQWILGIPGDATEFTLDERYLLKTITYRQGNQNWDVSYQSYNTELTPPLPTSLELVQGEQRIKLKMNNWMVK

SEQ ID NO: 124519 - DNA, 624 bp, Yersinia pseudotuberculosis IP 32953
  CDS (1)..(624): transl_table=11
atgcccatgcgtaaaagacatttttatcgcctgctgcctttagcctctctgctgctggctgcttgtacaatcccagtatcaaagggaccagcgactagccctacgtcgccacagtggcgtcagcatgaacaacagttgcagcaacttggccaatttgaaactcgtggcgcatttgcttacctgtctgataaacagaaagtttatgccagattcttttggcaacagacctctcccgagcgttatcgtttattactgactaacccgttaggcagcactgagttggagttggttgtccaaccgggtgtgacacaactgacggataatcaaggtaagcgctacgtcagtgatgatccgcaagagatgattcaaaagttgacgggcatgtccatcccactggaaagcctgcgccaatggatccttggtttaccgggcgatacccctaattttacccttgacgataaatatcgcctgaagaaactgacttaccaacaaaatggggtgacatgggttgttgattatcaagaatacaacacgcaggtcacgccccccttacccagccgcctggagctgaatcaagatgggcaacggattaaactgaaaatggatagctggacgatcaaataa

SEQ ID NO: 124520 - protein, 207 aa, Yersinia pseudotuberculosis IP 32953
MPMRKRHFYRLLPLASLLLAACTIPVSKGPATSPTSPQWRQHEQQLQQLGQFETRGAFAYLSDKQKVYARFFWQQTSPERYRLLLTNPLGSTELELVVQPGVTQLTDNQGKRYVSDDPQEMIQKLTGMSIPLESLRQWILGLPGDTPNFTLDDKYRLKKLTYQQNGVTWVVDYQEYNTQVTPPLPSRLELNQDGQRIKLKMDSWTIK

SEQ ID NO: 124521 - DNA, 633 bp, Mannheimia succiniciproducens MBEL55E
  CDS (1)..(633): transl_table=11
atgaatcatttaaaatctttctttaccgctcttgttgcgggctttattttaacggcttgttcgtcgcttgatattagcgacacgcgcccggctgatgttaaaactatcgataaatccgatatacaatggcagcaacatctcaaacaaatcaaacaaattcagcattacagcagtcaagggcaaatcggttatatcagtagtaaagaacgcttttccagccgtttcgaatggaattacgccgcacccaccgattacacactgaaactttattcaactatcagttccaccagtctggtaatgcaaatgcataatacgggcatgaccatttcagacaacaaaggcaaccggcgttccgaagcggatgcgaaagccttagtacgtgaaatcatcggtatggatgtgccgcttgagcaatttgcttactggctgaaaggtcagcccgatgaaaaagccgattatcaggtaggcgaaaatcattatttggcgagttttacttatccgttagacggtacggtttggtccgcggattatttaaactatcacgaagaaaaacagccggcattgcctaaagatattttgctgaaaaatgccaaccaaacgctgaaaattcgtgtggataactggacattctaa

SEQ ID NO: 124522 - protein, 210 aa, Mannheimia succiniciproducens MBEL55E
MNHLKSFFTALVAGFILTACSSLDISDTRPADVKTIDKSDIQWQQHLKQIKQIQHYSSQGQIGYISSKERFSSRFEWNYAAPTDYTLKLYSTISSTSLVMQMHNTGMTISDNKGNRRSEADAKALVREIIGMDVPLEQFAYWLKGQPDEKADYQVGENHYLASFTYPLDGTVWSADYLNYHEEKQPALPKDILLKNANQTLKIRVDNWTF

SEQ ID NO: 124523 - DNA, 618 bp, Pseudomonas syringae pv. syringae B728a
  CDS (1)..(618): transl_table=11
atgtttttgcgccacgtaatcgtattcagcctcatcgccctgctcaccggctgcgccggcctcacctcccgcgaagccgttcagggcaagggtgaccccgcgcaatggcgcgagcacaaacagcaactgagcagcctcgatggctggcagatcaacggcaaggtcggtatccgcgcgccgaaagactccggcagcggcaccctgttctggctgcagcgccaggattactacgacatccgcctgtccggcccgctaggtcgtggtgctgcacgcctgaccggcaggcccggcgccgtggtgctcgaagttgccaatcagggccgctacgaagccacctcgccagaatcactgctgcaggatcaactgggctggaaactgcccgtgtcgcaccttgtatggtgggtacgcggtctaccggcaccggacagcaaaagcaacgtgacactcgatggcgacagccgactggccagccttgaacaggatggctggcaggtggaatacctcagctacgtcgagcagaacggctattggctgccagagcgcgtcaagctgcacgggcaggatctggatgtcacgctggtcatcaaggactggcagcctcgcaaactggggcaatga

SEQ ID NO: 124524 - protein, 205 aa, Pseudomonas syringae pv. syringae B728a
MFLRHVIVFSLIALLTGCAGLTSREAVQGKGDPAQWREHKQQLSSLDGWQINGKVGIRAPKDSGSGTLFWLQRQDYYDIRLSGPLGRGAARLTGRPGAVVLEVANQGRYEATSPESLLQDQLGWKLPVSHLVWWVRGLPAPDSKSNVTLDGDSRLASLEQDGWQVEYLSYVEQNGYWLPERVKLHGQDLDVTLVIKDWQPRKLGQ

SEQ ID NO: 124525 - DNA, 603 bp, Methylobacillus flagellatus KT
  CDS (1)..(603): transl_table=11
atgcaagccttagcacgctggttgctcctgggcaccatcctggccgtccccggctgcgccagcatcccacctgccacggcgcccagcacgcccgaaactcaccgacaacacctggccaccctggccaagatagaccagttcggcctgaaggggcgcattggcgtgcagaccgaaaccaagggattctctggctcgacgcaatggcagcacactccgctgcaggacgagatcgccctgttttcgccgctgggaagccaagttgccgcaatccatcgcaccagcggcagtctcagtctggtgactagcgacaacaagcattttgaagcggcggatgccgaaaccctgacggagcagaacctgggctggcgcctgcccatgaacgggctggcagactgggtgcttggacggccaggcaaggcgccgatagaaaccgtgcagtgggatgatgccggacggctcgtcaagctcaggcaggatggatgggatatcgaatacggccaatataccgccattggccattaccagctccctacccgcctcaccctgcgtcatgccagcaagctcacgctcaagctgatcgtgcagcaatggcaactgccctaa

SEQ ID NO: 124526 - protein, 200 aa, Methylobacillus flagellatus KT
MQALARWLLLGTILAVPGCASIPPATAPSTPETHRQHLATLAKIDQFGLKGRIGVQTETKGFSGSTQWQHTPLQDEIALFSPLGSQVAAIHRTSGSLSLVTSDNKHFEAADAETLTEQNLGWRLPMNGLADWVLGRPGKAPIETVQWDDAGRLVKLRQDGWDIEYGQYTAIGHYQLPTRLTLRHASKLTLKLIVQQWQLP

SEQ ID NO: 124527 - DNA, 636 bp, Burkholderia xenovorans LB400
  CDS (1)..(636): transl_table=11
atgcgtctttcccgtctgatttcctttccccgggcgccgcgtggcgcggcgctcggattcgcagcggcggcggttgtcgcattggccggttgtgcgtcggtgaaaccgcaggggccatccacgtcgaatgccgcaacctccgtcaccgcgcagacgagccgttcttaccagggccgtttcgcggtccagtacaacgatcagaacggccagcagcgcaacgcctacggcaatttcgcctggcaggaaaccggcgataccgtgactctggagttacgcaatccgctcggccagacgctggcggtggtgacgtcgtcgccagcgtcggccacgctggagttgccgaatcgccagccgctcaccgcggacaacgtctccacgctgatgcagaatgcgctcggcttcgcactgccggtcgaggggctgcgctactggctgcaaccgtcgccggcacccacttcgcgcgccaggaccgagaaggatcccgaccagccgtcgcggctgaaagagatcacgcaggacggctggacgatcgactacctggcgtatgtcgagccgcctgccacgggcgtgaagcgcgtcaacctgacgcgctcggagccgccgctcgacatcaagctcgtcctggatcatcagtaa

SEQ ID NO: 124528 - protein, 211 aa, Burkholderia xenovorans LB400
MRLSRLISFPRAPRGAALGFAAAAVVALAGCASVKPQGPSTSNAATSVTAQTSRSYQGRFAVQYNDQNGQQRNAYGNFAWQETGDTVTLELRNPLGQTLAVVTSSPASATLELPNRQPLTADNVSTLMQNALGFALPVEGLRYWLQPSPAPTSRARTEKDPDQPSRLKEITQDGWTIDYLAYVEPPATGVKRVNLTRSEPPLDIKLVLDHQ

SEQ ID NO: 124529 - DNA, 630 bp, Haemophilus somnus 129PT
  CDS (1)..(630): transl_table=11
atgaaaacatctcaaaaacctttttttatacttattttaacgatattgctgagtgcttgtactttagatattgccagcgaacgcccgcaaagtattcagtatatagaaaaaaatgataaaaaatggcagcaacacctacaaaaaattaagcaaataaaacaatatcaagctcaaggacaattgggttatattaacaataaacaacgtttttccactcgctttacttggcaatataacaatccgcaatcctattctttactactttcatcaactttcagcagttcaatacttaaatttgaagtttcacctttcggtattactgtttcagaccataaaggaaatcagcgttcaacaaaagatatcaacaacttgctccgtgaaatgatcggtatctctattccattacaacaaatagggaactggctaaaaggtcaaccagatgaaaattcagattatcaggtcggcataaatcatttattagcaagctttacttattcagttgagggtgaagtttggagtgctgactatctcaactatcgaacagatcaaagcattccattacccaaagatattcttctgaaaagtagtgagcagaccttaaaagttaggatagataactggaaatattaa

SEQ ID NO: 124530 - protein, 209 aa, Haemophilus somnus 129PT
MKTSQKPFFILILTILLSACTLDIASERPQSIQYIEKNDKKWQQHLQKIKQIKQYQAQGQLGYINNKQRFSTRFTWQYNNPQSYSLLLSSTFSSSILKFEVSPFGITVSDHKGNQRSTKDINNLLREMIGISIPLQQIGNWLKGQPDENSDYQVGINHLLASFTYSVEGEVWSADYLNYRTDQSIPLPKDILLKSSEQTLKVRIDNWKY

SEQ ID NO: 124531 - DNA, 588 bp, Pseudoalteromonas tunicata D2
  CDS (1)..(588): transl_table=11
atgcgattacatttgattttaatcatcttttttttatttctaaccggctgtgttagcccaaaagtaccccttgagccaatttcggttcattggaagtcaaaattacaggaacaaaacaactggcaaattgcaggtaagttagcttttatcagcccagaaaaacgtcagtcggcaaatttcaattggcaaactgaaccaagcaatagcatgctaagtttaaccagttttattggcagtcaaatcttaaaattaaatcaatatccagactatgcagaactgttttttgacgataaaaattataccgcaaccagcgcagaagaattgttatataacttaacacggatgcaactgccgctggcgcaatcggatgcatggctaaaagggacatttaccagcccaagcatggtattagatgaacttgatcgcattcaaagtgcaaccattttgaatcaacgaggtgagctgtggcaaatcagttatcaagactacattatgcaagatggtttttggttagcacaaaaactcactctaacccacggacaaattaaagttaaaattaacattaacaattggcagttttcttcatga

SEQ ID NO: 124532 - protein, 195 aa, Pseudoalteromonas tunicata D2
MRLHLILIIFFLFLTGCVSPKVPLEPISVHWKSKLQEQNNWQIAGKLAFISPEKRQSANFNWQTEPSNSMLSLTSFIGSQILKLNQYPDYAELFFDDKNYTATSAEELLYNLTRMQLPLAQSDAWLKGTFTSPSMVLDELDRIQSATILNQRGELWQISYQDYIMQDGFWLAQKLTLTHGQIKVKININNWQFSS

SEQ ID NO: 124533 - DNA, 591 bp, Photobacterium sp. SKA34
  CDS (1)..(591): transl_table=11
atgagattacgtaatttagcctttattgctattacatttgccttattatctggctgtgcacaaacgccaaaaagcacacaaaaagtagattgggaaacccatcaaacccaattaaagcgcctcaccgattatcaagcgaaaggtgtatttggttatttaagtcctgagcaacgcatatctctcacctttaactggaaaaatcatggtgatggataccagttaatcttaacaaaaatgtataaaactgtccttaatctcaatgcagaaccgggtaacgtcacgctaatcgatcctgatggtaaaacctatcatggcactgatgctgcacaattagtgaagcaattaacaggaatcgaattacccttatcacaaatgcgcgattggctgattggtttaccgacagctgctgatacatatcagctaaacaacaatgatcaagtcgcttttcttgccaaagagattaacggtcaagtatgggaaatgcactacaacacgtataatgatcaaagccctgcattacccacgcaaatggtactaaaccaaggtaaactcaaaattaaaataaaaatctctaactggttagcgaattaa

SEQ ID NO: 124534 - protein, 196 aa, Photobacterium sp. SKA34
MRLRNLAFIAITFALLSGCAQTPKSTQKVDWETHQTQLKRLTDYQAKGVFGYLSPEQRISLTFNWKNHGDGYQLILTKMYKTVLNLNAEPGNVTLIDPDGKTYHGTDAAQLVKQLTGIELPLSQMRDWLIGLPTAADTYQLNNNDQVAFLAKEINGQVWEMHYNTYNDQSPALPTQMVLNQGKLKIKIKISNWLAN

SEQ ID NO: 124535 - DNA, 618 bp, Pseudomonas putida GB-1
  CDS (1)..(618): transl_table=11
atgttcctgcgccattgcatcaccttcacccttatcgccctgctggccggctgtgccggcttcggtagccgagaagccctgcagggtcacggcgacccgcagcagtggcgcgcccataaagaacagctgagcagcctcgatggctggcagatcaacggcaaggtcggcatccgcgccccgcgcgactccggcagcggcaccctgttctggctgcaacgccaggactactacgacattcgcctggccggcccgctgggccgtggcgccgcacgcctgaccgggcgcccaggtggcgtggtgctcgaagtggccaaccagggccgctacgaggccacaagccccgaagccctgcttgaagaacaactgggctggcagctgccagtctcgcacctggtctggtgggtgcgcggcctgcctgcccccgacagcaagagcaagctgaccctggatggtgacagccgcctggccagcctcgatcaggatggctggcaggtacagtacctgagctacaccgaacaaaacggttactggctgcccgagcgcctgaaactgcacggcaaggacctggacgtgaccctggtggtcaaggactggcaaccgcgccagctggggcactga

SEQ ID NO: 124536 - protein, 205 aa, Pseudomonas putida GB-1
MFLRHCITFTLIALLAGCAGFGSREALQGHGDPQQWRAHKEQLSSLDGWQINGKVGIRAPRDSGSGTLFWLQRQDYYDIRLAGPLGRGAARLTGRPGGVVLEVANQGRYEATSPEALLEEQLGWQLPVSHLVWWVRGLPAPDSKSKLTLDGDSRLASLDQDGWQVQYLSYTEQNGYWLPERLKLHGKDLDVTLVVKDWQPRQLGH

SEQ ID NO: 124537 - DNA, 700 bp, Actinobacillus actinomycetemcomitans
  CDS (74)..(697): transl_table=11
ccatcgacatcagattgccgccctcgttgcgaaccgtaaaataaccaccattttctggggataaaaattgtttatgaaaaaattaaaatcctacgttttacttgtgttagccgtgttatttttaaccgcttgcgtcaccgatcaggaacgtccgactaacgtaaaatacatcgaaaaaaccgaccgcacttggcagcagcatttcacccaattaaaacaaattcaaggttatccggcgcttgggcagttaggttatatcagcagcaaagaacgcttttccacgcgcttcgactggcaatataacaacccacgcgattacaccctgcaactgtattccaccatcagcagcgaaaccctgcagattcaaatgcacgcgcaaggcatgaccatttccgacaacaaagggcgccaacgctccgccgccgacgcaaaaatgctgctacgtgaaattatcggcatggatttcccgttggaacaattcgctttctggctgaaaggtcaaccggaagataacgccgattatcaagtgggagaaaaccatttgttagccaccttcagtcgcactatcgacggtaaaccctggacggcggactatttgtcataccatgtcaatcgccgtccgccgatgccggaaaatattttgctgaaaacggaaggacaaactttgaaaatccgtgtagatgaatggctgttttaatga

SEQ ID NO: 124538 - protein, 207 aa, Actinobacillus actinomycetemcomitans
MKKLKSYVLLVLAVLFLTACVTDQERPTNVKYIEKTDRTWQQHFTQLKQIQGYPALGQLGYISSKERFSTRFDWQYNNPRDYTLQLYSTISSETLQIQMHAQGMTISDNKGRQRSAADAKMLLREIIGMDFPLEQFAFWLKGQPEDNADYQVGENHLLATFSRTIDGKPWTADYLSYHVNRRPPMPENILLKTEGQTLKIRVDEWLF

SEQ ID NO: 124539 - DNA, 624 bp, Escherichia coli O6
  CDS (1)..(624): transl_table=11
atgcccctgcccgattttcgctttatccgcctgctaccgctagcagccctcgtgctcactgcctgttctattaccacacccaaaggcccaggcaaaagcccggattcgccacaatggcgtcagcatcagcaagacgtgcgcaatcttaatcagtatcaaactcgcggcgcgttcgcttatatttctgaccaacaaaaagtgtacgcccgtttcttctggcagcaaactggccaggatcgctaccgtctgctgctgactaacccattgggcagcacggaactggagctgaatgctcaaccgggtaacgtgcagttagtcgacaataaaggtcagcgttatacctccgatgacgccgaagagatgattggcaaattgaccggaatgccaattccgctcaacagcttgcgccagtggattttaggtttaccgggtgatgcgactgactacaaacttgacgaccagtaccgcctgagtgaaatcacctacagccagaatggcaaaaactggaaagttgtttacggtggttatgacacaaaaactcaacctgcgatgccagccaatatggaactcaccgacggtggtcaacgcatcaagttaaaaatggataactggatagtgaaataa

SEQ ID NO: 124540 - protein, 207 aa, Escherichia coli O6
MPLPDFRFIRLLPLAALVLTACSITTPKGPGKSPDSPQWRQHQQDVRNLNQYQTRGAFAYISDQQKVYARFFWQQTGQDRYRLLLTNPLGSTELELNAQPGNVQLVDNKGQRYTSDDAEEMIGKLTGMPIPLNSLRQWILGLPGDATDYKLDDQYRLSEITYSQNGKNWKVVYGGYDTKTQPAMPANMELTDGGQRIKLKMDNWIVK

SEQ ID NO: 124541 - DNA, 618 bp, Pseudomonas putida
  CDS (1)..(618): transl_table=11
atgttcctgcgccattgcatcacctttaccttgatcgccctgctggccggctgcgccggcttcggtagccgtgaggccctgcagggccacggcgacccgcaacagtggcgcgcccacaaagcgcagctgagcagcctcgatggctggcagatcaacggcaaggtcggcatccgcgccccgcgcgattccggcagcggtacgctgttctggctgcaacgccaggattattacgacattcgcctggccggcccgctgggccgtggcgccgcgcgccttaccggccgcccgggtggcgtggtgctggaagtggccaaccagggccgctacgaagccaccagcccggaagccctgctggaagaacaactgggctggcagctgccggtttcgcatctggtctggtgggtgcgcggcctgcccgcccccgacagcaagagcaagctgaccctcgatggcgacagccgcctggccagcctcgaccaggatggctggcaggtgcagtacctgagctacaccgaacagaacggctactggttgcccgagcgcctgaagctgcacggcaaggacctggacgtgaccctggtggtcaaggactggcagccgcgccagctggggcattga

SEQ ID NO: 124542 - protein, 205 aa, Pseudomonas putida
MFLRHCITFTLIALLAGCAGFGSREALQGHGDPQQWRAHKAQLSSLDGWQINGKVGIRAPRDSGSGTLFWLQRQDYYDIRLAGPLGRGAARLTGRPGGVVLEVANQGRYEATSPEALLEEQLGWQLPVSHLVWWVRGLPAPDSKSKLTLDGDSRLASLDQDGWQVQYLSYTEQNGYWLPERLKLHGKDLDVTLVVKDWQPRQLGH

SEQ ID NO: 124543 - DNA, 624 bp, Salmonella typhimurium
  CDS (1)..(624): transl_table=11
atgaccctgcccgattttcgcctgattcgtctactgccgttagcaagcctggttctcaccgcctgtacgcttcctgggcataaaggcccgggcaagagcccggattcccctcagtggcgccagcatcagcaagaggtgcgtcatctgaatcaataccagacgcgcggcgcctttgcttacatctcagatgatcagaaagtctatgcgcgtttcttctggcaacagaccggacaggatcgctatcgcctgctgctcaccaatccgctgggcagcaccgagctggagcttaacgcccagccgggcaacgttcagttggtggataacaaaggccagcgttataccgccgatgacgccgaagagatgatcggcaaactcaccgggatgccgattccgttaaacagcctgcggcagtggatcctcggtctgcctggcgatgccaccgactacaaactggacgaccagtatcgcctgagcgaagtgaactatcgccaggatggtaaaaactggaaagtggtttacggtggctatgacagcaaaacgcagcctgccatgcctgccaatatggagctttcagacggcagtcagcgcattaagctgaaaatggataactggattgtgaaatga

SEQ ID NO: 124544 - protein, 207 aa, Salmonella typhimurium
MTLPDFRLIRLLPLASLVLTACTLPGHKGPGKSPDSPQWRQHQQEVRHLNQYQTRGAFAYISDDQKVYARFFWQQTGQDRYRLLLTNPLGSTELELNAQPGNVQLVDNKGQRYTADDAEEMIGKLTGMPIPLNSLRQWILGLPGDATDYKLDDQYRLSEVNYRQDGKNWKVVYGGYDSKTQPAMPANMELSDGSQRIKLKMDNWIVK

SEQ ID NO: 124545 - DNA, 1083 bp, Vibrio cholerae
  CDS (123)..(740): transl_table=11
ggcggaattttacttgatgccctctttgattgaaagggcagaccggatttgttttcctgagttcgtgagatcaatgatatagttagcccgttttcgctctcgctttggataaaaaacgcactatgaatgctctcgtacgtcgcctactgccaggattggcgagtctgttgcttttggcaggttgtgccaccgcaccgctacaacccgtcaatgttcaatggcaatcacaccaagtcactctagaacaaattcaacattatcaattaaccggaaaactcggctatatcgcgcccgatcagcgacaatcgttcaactttcaatggcaaaaaagcccacaaaaactctcactgcgtttaagcaattttcttggtcaaaccgtgctgaacttacaggtcgatgaacaaggtgcgcgggtcgaaacttatgatgatcaaatctaccgcgaccaagatgcacaaagcctgatccgcaatttaacagggttagatattcccgttgaacagcttgaagattggattttaggcttgccgacccaagcaacccattacgagttgaatgaacaaaacactcttgccactctcaccaaactcgcctcaacggaggaatggcacgtagaataccaacgttaccaagcgattgagtggcaacatcagcccattccgctgcctgataaacttaaactccagcaaaataaaacctcgattcaactggtgatctcacaatggacgctgctcccatgatccacggcacaaccgtgtggccttcaccggccaaactcaacctgttcctttacatcacaggtcgtcgagctaacggctatcacgatctgcagaccttgtttcagtttctcgatcacggtgatgagttaaccattaccgccaacaacagcggcaacatcaccctctctcctgctctggccgatgtcgcgttagaagataacctgatttacaaagccgcgatggcactcaaaaatgcggcgcaatcaccactcggcgcagacattcaactgcacaaggtgttgcctatgggcggcggaattggtggcggatcatccaatgcggccactaccttagtcgcactcaa

SEQ ID NO: 124546 - protein, 205 aa, Vibrio cholerae
MNALVRRLLPGLASLLLLAGCATAPLQPVNVQWQSHQVTLEQIQHYQLTGKLGYIAPDQRQSFNFQWQKSPQKLSLRLSNFLGQTVLNLQVDEQGARVETYDDQIYRDQDAQSLIRNLTGLDIPVEQLEDWILGLPTQATHYELNEQNTLATLTKLASTEEWHVEYQRYQAIEWQHQPIPLPDKLKLQQNKTSIQLVISQWTLLP

SEQ ID NO: 124547 - DNA, 609 bp, Vibrio vulnificus
  CDS (1)..(609): transl_table=11
atgtttcgacgaacttatttttggttaatgctcttgccgctgtttatggttggctgtactggccttccggaccatcccaccagcgttgagtggcaaagtcatcaagccaaactgtcacaaattcaatcatttcaagccgttggcaaactgggttacatctcgccagatcaacgacaaaacctcaatttctactggaaacactcaccagagcaaagcaacctgcgttttacgacatttcttggccagaccgcattaaatctcaccatgacgccgcaaggtgctcgcgttgaaacctacgacgatcagatcttaaccgccgcgaatgcgaccgctttggtccaacagttaaccgggttggttatacctgtcgaacaactgagtgattggatcatcggtttgccgaatggcgctgacgactttcaactcaatgagcaaaatacactcagctcattagagaaagatctcaattttcagcgttggcatatcgcctacacgcagtatcgtgatgtggaatttcatcagcaagttgtaccgctgccagccaagcttagcctgacccagcaagacatcaaattaaatatcgttgtgagtaagtggacgctaaaataa

SEQ ID NO: 124548 - protein, 202 aa, Vibrio vulnificus
MFRRTYFWLMLLPLFMVGCTGLPDHPTSVEWQSHQAKLSQIQSFQAVGKLGYISPDQRQNLNFYWKHSPEQSNLRFTTFLGQTALNLTMTPQGARVETYDDQILTAANATALVQQLTGLVIPVEQLSDWIIGLPNGADDFQLNEQNTLSSLEKDLNFQRWHIAYTQYRDVEFHQQVVPLPAKLSLTQQDIKLNIVVSKWTLK

SEQ ID NO: 124549 - DNA, 654 bp, Xanthomonas axonopodis pv
  CDS (1)..(654): transl_table=11
atgagcaagacggtccgaacgctggccctgggcgggctggtgctggccgggctgtcggcctgcgtcagcgtgccgcgcgggcagggcagcggtgcggcggtggtcgatcacgtctccgacagtgcgcgccaggccgaagccgctcgccaggcctggttgcaggcgcatccccactggtccttccagggccgggtggcgatcagcaaggaccgcaacggcggcagcggccgcatcgactggcagcaggatggcccgcgctaccgcgtgcaactcagtgcgccggtcacccggcaaagctgggtgctcaccggcgacaccaccagtggcgccggccggctggaagggctggagggcggtccgcgcagtggccccgatgccgagcaggtgctgctggaagcaaccggctggaccatcccggtcaaccagatgccggactgggtgcgcgcgctgcgcatcgccggtgcgggtgccgcacgcgtcgacctggatgccgccgggcgcccgcgcaccgtgcagcaggacggctggacgatcgactttctggcctggacgccagccagcgccgagcagcccgagctgccgcagcggatcgaagcccgtagcggcgaggccaaggtgcgcctgctggtcgaccaatggaccgtatcgccctga

SEQ ID NO: 124550 - protein, 217 aa, Xanthomonas axonopodis pv
MSKTVRTLALGGLVLAGLSACVSVPRGQGSGAAVVDHVSDSARQAEAARQAWLQAHPHWSFQGRVAISKDRNGGSGRIDWQQDGPRYRVQLSAPVTRQSWVLTGDTTSGAGRLEGLEGGPRSGPDAEQVLLEATGWTIPVNQMPDWVRALRIAGAGAARVDLDAAGRPRTVQQDGWTIDFLAWTPASAEQPELPQRIEARSGEAKVRLLVDQWTVSP

SEQ ID NO: 124551 - DNA, 624 bp, Yersinia pestis
  CDS (1)..(624): transl_table=11
atgcccatgcgtaaaagacatttttatcgcctgctgcctttagcctctctgctgctggctgcttgtacaatcccagtatcaaagggaccagcgactagccctacgtcgccacagtggcgtcagcatgaacaacagttgcagcaacttggccaatttgaaactcgtggcgcatttgcttacctgtctgataaacagaaagtttatgccagattcttttggcaacagacctctcccgagcgttatcgtttattactgactaacccgttaggcagcactgagttggagttagttgtacaaccgggtgtgacacaactgacggataatcaaggtaagcgctacgtcagtgatgatccgcaagagatgattcaaaagttgacaggcatgtccatcccactggaaagcctgcgccaatggatccttggcttaccgggcgatacctctgattttacccttgacgataaatatcgcctgaagaaactgacttaccaacaaaatggggtgacatgggttgttgattatcaagaatacaacacgcaggtcacgccctccttacccagccgcctggagctgaatcaagatgggcaacggattaaactgaaaatggatagctggacgatcaaataa

SEQ ID NO: 124552 - protein, 207 aa, Yersinia pestis
MPMRKRHFYRLLPLASLLLAACTIPVSKGPATSPTSPQWRQHEQQLQQLGQFETRGAFAYLSDKQKVYARFFWQQTSPERYRLLLTNPLGSTELELVVQPGVTQLTDNQGKRYVSDDPQEMIQKLTGMSIPLESLRQWILGLPGDTSDFTLDDKYRLKKLTYQQNGVTWVVDYQEYNTQVTPSLPSRLELNQDGQRIKLKMDSWTIK

SEQ ID NO: 124553 - DNA, 22 bp, Artificial sequence
  primer
atgcccctgcccgattttcgtc

SEQ ID NO: 124554 - DNA, 27 bp, Artificial sequence
  primer
ttatttcactatccagttatccatttt

SEQ ID NO: 124555 - protein, 177 aa, Artificial sequence
  consensus sequence
  Variant (2)..(14): Xaa in position 2 to 14 is any amino acid
  Variant (15)..(16): Xaa in position 15 to 16 is any or no amino acid
  Variant (18)..(33): Xaa in position 18 to 33 is any amino acid
  Variant (34)..(38): Xaa in position 34 to 38 is any or no amino acid
  Variant (40)..(49): Xaa in position 40 to 49 is any amino acid
  Variant (50)..(50): Xaa in position 50 is any or no amino acid
  Variant (52)..(91): Xaa in position 52 to 91 is any amino acid
  Variant (92)..(94): Xaa in position 92 to 94 is any or no amino acid
  Variant (96)..(98): Xaa in position 96 to 98 is any amino acid
  Variant (100)..(105): Xaa in position 100 to 105 is any amino acid
  Variant (107)..(108): Xaa in position 107 to 108 is any amino acid
  Variant (110)..(110): Xaa in position 110 is any amino acid
  Variant (112)..(134): Xaa in position 112 to 134 is any amino acid
  Variant (135)..(136): Xaa in position 135 to 136 is any or no amino acid
  Variant (138)..(140): Xaa in position 138 to 140 is any amino acid
  Variant (142)..(143): Xaa in position 142 to 143 is any amino acid
  Variant (145)..(151): Xaa in position 145 to 151 is any amino acid
  Variant (152)..(156): Xaa in position 152 to 156 is any or no amino acid
  Variant (158)..(161): Xaa in position 158 to 161 is any amino acid
  Variant (162)..(162): Xaa in position 162 is any or no amino acid
  Variant (164)..(176): Xaa in position 164 to 176 is any amino acid
HXXXXXXXXXXXXXXXGXXXXXXXXXXXXXXXXXXXXXWXXXXXXXXXXXLXXXXXXXXXXXXXXXXXXXXXXXXXXXXXXXXXXXXXXXXXXXGXXXPXXXXXXWXXGXPXXXXXXXXXXXXXXXXXXXXXXXXXWXXXYXXYXXXXXXXXXXXXPXXXXXLXXXXXXXXXXXXXW

SEQ ID NO: 124556 - protein, 22 aa, Artificial sequence
  protein pattern
  Variant (2)..(4): Xaa in position 2 to 4 is any amino acid
  Variant (5)..(8): Xaa in position 5 to 8 is any or no amino acid
  Variant (10)..(10): Xaa in position 10 is Leu, Met or Val
  Variant (11)..(11): Xaa in position 11 is Glu, Asn, Gln or Ser
  Variant (12)..(12): Xaa in position 12 is any amino acid
  Variant (13)..(13): Xaa in position 13 is Phe, Ile, Leu or Met
  Variant (14)..(15): Xaa in position 14 to 15 is any amino acid
  Variant (17)..(17): Xaa in position 17 is Ile, Leu or Val
  Variant (18)..(18): Xaa in position 18 is any amino acid
  Variant (20)..(20): Xaa in position 20 is any amino acid
  Variant (22)..(22): Xaa in position 22 is Ala, Asp, Glu, Gly, Asn or Thr
GXXXXXXXPXXXXXXWXXGXPX

SEQ ID NO: 124557 - DNA, 477 bp, Escherichia coli
  CDS (1)..(477): transl_table=11
atgcttagtggtaaagacttaggccgagcgatagagcaggccattaacaaaaaaatcgcatcgggatccgtcaaatcaaaggcggaggtcgcacgccactttaaagtccaaccaccatcaatttatgactggattaagaaaggctctataagtaaagataaacttccagaattatggcgtttcttttctgatgttgttggtccagagcattgggggcttaacgaataccccataccaacccccaccaattcagatacaaaaagtgaacttttagatataaacaacctttatcaagcagcctctgatgaaataagagcgattgtagctttcctgttatctggaaatgctacagaaccagattgggttgaccacgatgttcgcgcctacatagcagcgatggaaatgaaagtgggtaagtatctgaaagctcttgaatctgaacggaaaagccagaacatcacaaaaactggaacttaa

SEQ ID NO: 124558 - protein, 158 aa, Escherichia coli
MLSGKDLGRAIEQAINKKIASGSVKSKAEVARHFKVQPPSIYDWIKKGSISKDKLPELWRFFSDVVGPEHWGLNEYPIPTPTNSDTKSELLDINNLYQAASDEIRAIVAFLLSGNATEPDWVDHDVRAYIAAMEMKVGKYLKALESERKSQNITKTGT

SEQ ID NO: 124559 - DNA, 477 bp, Escherichia coli; 0157:H7
  CDS (1)..(477)
atgcttagtggtaaagacttaggccgagcgatagagcaggccattaacaaaaaaattgcatcaggagccgtcaaatcaaaggcggaaatcgcacgtcatttcaaagtccaaccaccatcaatccatgactggattaagaaaggttcgataagtaaagacaaacttccagaactatggcgtttcttttctgatgtggttggtccagagcattgggggcttaacgaataccccataccaaccccatccacttcagatacaaaaagtgaacttttagacataaacagcctttatcaagccgcctctgatgaaaaaagagcaattgtggctttcctcttatctggaaatgctacggagcctagttgggttgatcatgacgttcgtgcctacattgccgcaatggaaatgaaggtagctaactatctgaaaaatcaagaatcaaaacggaaaagccagaacatcaccaagacaggaacttaa

SEQ ID NO: 124560 - protein, 158 aa, Escherichia coli; 0157:H7
MLSGKDLGRAIEQAINKKIASGAVKSKAEIARHFKVQPPSIHDWIKKGSISKDKLPELWRFFSDVVGPEHWGLNEYPIPTPSTSDTKSELLDINSLYQAASDEKRAIVAFLLSGNATEPSWVDHDVRAYIAAMEMKVANYLKNQESKRKSQNITKTGT

SEQ ID NO: 124561 - DNA, 432 bp, Xylella fastidiosa 9a5c
  CDS (1)..(432): transl_table=11
atgcttacaggtgaacaactagggcgggccatcaaacaagccatgcaactgaagggcgtcacccccacaaagatggcggaacacttcggcgtaaaggccccatcggtctatggttggatcaaagaaggccgaatcagtaaggagaaattgcctagtctttggtcgtatttctcggatgtggtagggccgacgcattggggattggaagcatggcccagcggtggagttccagcgccccctatgaaaggtacggacatcacagaggcttatcatgctgcatcagcagcaactcgcgcggcggttgacttactcttgcttccagcacgacagcgtgcgctagtactttccgctgccccaccagcgctagcgggcggggtggacttaattgaacagtatgcacaggcggcgcagaaaattcgaaaaagagcctga

SEQ ID NO: 124562 - protein, 143 aa, Xylella fastidiosa 9a5c
MLTGEQLGRAIKQAMQLKGVTPTKMAEHFGVKAPSVYGWIKEGRISKEKLPSLWSYFSDVVGPTHWGLEAWPSGGVPAPPMKGTDITEAYHAASAATRAAVDLLLLPARQRALVLSAAPPALAGGVDLIEQYAQAAQKIRKRA

SEQ ID NO: 124563 - DNA, 432 bp, Xylella fastidiosa Dixon
  CDS (1)..(432): transl_table=11
atgcttacaggtgaacaactagggcgggccatcaaacaagccatgcaactgaagggcgtcacccccacaaagatggcgaaacacttcagcgtaaaagccccatcggtctatggttggatcaaagaaggccgaatcagtaaggagaaactgcctagtctttggtcgtatttctcggatgtggtagggccgacgcattggggattggaagcatggcccagtggtggaattccagcgccccctattaaaggtacggacatcacagaggcttatcatgctgcatcagcagcaactcgcgcggcggttgacttactcttgcttcccgcacgacagcgggcgctagtactttccgctgccccaccagcgctagcaggaggggtggacttaattgaacagtatgcacaggcggcgcaggaaattcgaaaaagagcctga

SEQ ID NO: 124564 - protein, 143 aa, Xylella fastidiosa Dixon
MLTGEQLGRAIKQAMQLKGVTPTKMAKHFSVKAPSVYGWIKEGRISKEKLPSLWSYFSDVVGPTHWGLEAWPSGGIPAPPIKGTDITEAYHAASAATRAAVDLLLLPARQRALVLSAAPPALAGGVDLIEQYAQAAQEIRKRA

SEQ ID NO: 124565 - DNA, 24 bp, Artificial sequence
  primer
atgcttagtggtaaagacttaggc

SEQ ID NO: 124566 - DNA, 26 bp, Artificial sequence
  primer
ttaagttccagtttttgtgatgttct

SEQ ID NO: 124567 - protein, 152 aa, Artificial sequence
  consensus sequence
  Variant (3)..(3): Xaa in position 3 is any amino acid
  Variant (5)..(6): Xaa in position 5 to 6 is any amino acid
  Variant (12)..(12): Xaa in position 12 is any amino acid
  Variant (15)..(17): Xaa in position 15 to 17 is any amino acid
  Variant (19)..(25): Xaa in position 19 to 25 is any amino acid
  Variant (26)..(30): Xaa in position 26 to 30 is any or no amino acid
  Variant (32)..(32): Xaa in position 32 is any amino acid
  Variant (35)..(35): Xaa in position 35 is any amino acid
  Variant (37)..(38): Xaa in position 37 to 38 is any amino acid
  Variant (41)..(43): Xaa in position 41 to 43 is any amino acid
  Variant (47)..(47): Xaa in position 47 is any amino acid
  Variant (49)..(49): Xaa in position 49 is any amino acid
  Variant (53)..(53): Xaa in position 53 is any amino acid
  Variant (57)..(57): Xaa in position 57 is any amino acid
  Variant (60)..(61): Xaa in position 60 to 61 is any amino acid
  Variant (69)..(69): Xaa in position 69 is any amino acid
  Variant (74)..(76): Xaa in position 74 to 76 is any amino acid
  Variant (78)..(78): Xaa in position 78 is any amino acid
  Variant (79)..(81): Xaa in position 79 to 81 is any or no amino acid
  Variant (83)..(83): Xaa in position 83 is any amino acid
  Variant (85)..(88): Xaa in position 85 to 88 is any amino acid
  Variant (90)..(94): Xaa in position 90 to 94 is any amino acid
  Variant (97)..(99): Xaa in position 97 to 99 is any amino acid
  Variant (101)..(101): Xaa in position 101 is any amino acid
  Variant (105)..(107): Xaa in position 105 to 107 is any amino acid
  Variant (110)..(110): Xaa in position 110 is any amino acid
  Variant (112)..(113): Xaa in position 112 to 113 is any amino acid
  Variant (116)..(117): Xaa in position 116 to 117 is any amino acid
  Variant (118)..(118): Xaa in position 118 is any or no amino acid
  Variant (120)..(124): Xaa in position 120 to 124 is any amino acid
  Variant (126)..(133): Xaa in position 126 to 133 is any amino acid
  Variant (135)..(142): Xaa in position 135 to 142 is any amino acid
  Variant (144)..(150): Xaa in position 144 to 150 is any amino acid
MLXGXXLGRAIXQAXXXKXXXXXXXXXXXXAXHFXVXXPSXXXWIKXGXISKXKLPXLWXXFSDVVGPXHWGLXXXPXXXXPXPXXXXTXXXXXDIXXXYXAASXXXRAXVXXLLXXXAXXXXXVXXXXXXXXAXXXXXXXXYXXXXXXXRK

SEQ ID NO: 124568 - protein, 46 aa, Artificial sequence
  protein pattern
  Variant (3)..(3): Xaa in position 3 is any amino acid
  Variant (5)..(5): Xaa in position 5 is any amino acid
  Variant (6)..(6): Xaa in position 6 is any or no amino acid
  Variant (8)..(8): Xaa in position 8 is any or no amino acid
  Variant (10)..(10): Xaa in position 10 is Ile or Val
  Variant (11)..(11): Xaa in position 11 is His or Tyr
  Variant (12)..(12): Xaa in position 12 is Asp or Gly
  Variant (16)..(16): Xaa in position 16 is Glu or Lys
  Variant (18)..(18): Xaa in position 18 is Arg or Ser
  Variant (22)..(22): Xaa in position 22 is Asp or Glu
  Variant (26)..(26): Xaa in position 26 is Glu or Ser
  Variant (29)..(29): Xaa in position 29 is any amino acid
  Variant (30)..(30): Xaa in position 30 is any or no amino acid
  Variant (38)..(38): Xaa in position 38 is Glu or Thr
  Variant (43)..(43): Xaa in position 43 is Glu or Asn
  Variant (44)..(44): Xaa in position 44 is Ala or Glu
  Variant (45)..(45): Xaa in position 45 is Trp or Tyr
HFXVXXPXSXXXWIKXGXISKXKLPXLWXXFSDVVGPXHWGLXXXP

SEQ ID NO: 124569 - protein, 26 aa, Artificial sequence
  protein pattern
  Variant (2)..(5): Xaa in position 2 to 5 is any amino acid
  Variant (6)..(6): Xaa in position 6 is any or no amino acid
  Variant (8)..(8): Xaa in position 8 is any amino acid
  Variant (10)..(10): Xaa in position 10 is Ala or Asp
  Variant (11)..(11): Xaa in position 11 is Ala or Glu
  Variant (12)..(12): Xaa in position 12 is any amino acid
  Variant (15)..(15): Xaa in position 15 is Ala or Ile
  Variant (17)..(17): Xaa in position 17 is Ala or Asp
  Variant (18)..(18): Xaa in position 18 is Phe or Leu
  Variant (21)..(21): Xaa in position 21 is any amino acid
  Variant (22)..(22): Xaa in position 22 is Gly or Pro
  Variant (23)..(23): Xaa in position 23 is Ala or Asn
  Variant (24)..(24): Xaa in position 24 is any amino acid
  Variant (25)..(25): Xaa in position 25 is Gln or Thr
  Variant (26)..(26): Xaa in position 26 is Glu or Arg
IXXXXXAXSXXXRAXVXXLLXXXXXX

SEQ ID NO: 124570 - protein, 21 aa, Artificial sequence
  protein pattern
  Variant (3)..(3): Xaa in position 3 is Ser or Thr
  Variant (5)..(5): Xaa in position 5 is Glu or Lys
  Variant (6)..(6): Xaa in position 6 is Asp or Gln
  Variant (12)..(16): Xaa in position 12 to 16 is any or no amino acid
  Variant (18)..(18): Xaa in position 18 is any amino acid
  Variant (19)..(19): Xaa in position 19 is Ala or Ile
  Variant (20)..(20): Xaa in position 20 is any amino acid
  Variant (21)..(21): Xaa in position 21 is Gln or Ser
MLXGXXLGRAIXXXXXKXXXX

SEQ ID NO: 124571 - DNA, 1593 bp, Escherichia coli
  CDS (1)..(1593): transl_table=11
atgacggcgaaaacagcaccgaaagtcacgctgtgggagttcttccagcagttaggcaaaaccttcatgttacccgtggcattattgtcgttctgcggcattatgctcggcattggtagttctcttagcagccatgatgtcataaccctgatcccggtcctgggcaaccccgtgttgcaggctatctttacctggatgagtaagattggctcgtttgcttttagtttcctgcctgtcatgttctgtatcgccatcccgctgggcctggcacgcgaaaataaaggcgtagcggcattcgctggcttcatcggttatgcggtaatgaacctcgcggtaaacttctggttgaccaataaaggcattctgccaaccacggatgccgcggttctgaaagccaataacatccagagcattcttgggatccagtcgatcgataccgggatcctcggtgcggtgatcgccggtattatcgtctggatgctgcatgagcgtttccataatatccgcctgccggatgcgctggcattcttcggcggtacgcgcttcgtaccaattatctcctcgctggtgatgggccttgtcggcctggtgattccattagtctggccgattttcgccatgggtattagcggcttgggccatatgataaacagcgcgggtgatttcggaccgatgctgtttggtaccggtgaacgtctgctgttgccgtttggtctgcatcacattctggtggcattaattcgctttaccgacgcaggcggcacgcaggaagtctgcggtcaaaccgtcagcggcgcactgaccatcttccaggcgcaattgagttgcccgaccactcacggtttttctgaaagcgccacgcgtttcctttcgcaaggtaaaatgcctgcgtttctcggcggtctgccaggtgcagcgttagctatgtatcactgcgcgcgcccggaaaatcgccataaaattaaaggtctgctgatttctggcctgatcgcctgcgtcgttggcggcactaccgaaccgctggaattcctgttcctgttcgtagcgccagttctgtatgtcatccacgcgctgttaaccggcctcggcttcaccgtcatgtctgtgctcggcgtcaccatcggtaataccgacggcaatatcatcgacttcgtggtgttcggtattttgcatggtctgtcaaccaagtggtacatggtgccagtggtggcggcaatctggtttgtcgtttactacgtcatcttccgtttcgctatcacccgcttcaatctgaaaaccccggggcgcgatagcgaagttgccagctcaatcgaaaaagccgttgccggtgcgccgggtaaatcaggttacaacgttcctgcaatcctcgaagcattaggcggtgccgacaatattgtcagcctcgataactgcattacccgtctgcgtttgtctgtgaaagatatgtcgcttgttaatgtgcaggcactgaaggacaatcgggcaattggcgtagtacaacttaatcaacataacctgcaggttgttatcgggccacaagttcagtcagtaaaagatgaaatggccggtctgatgcatactgtccaggcataa

SEQ ID NO: 124572 - protein, 530 aa, Escherichia coli
MTAKTAPKVTLWEFFQQLGKTFMLPVALLSFCGIMLGIGSSLSSHDVITLIPVLGNPVLQAIFTWMSKIGSFAFSFLPVMFCIAIPLGLARENKGVAAFAGFIGYAVMNLAVNFWLTNKGILPTTDAAVLKANNIQSILGIQSIDTGILGAVIAGIIVWMLHERFHNIRLPDALAFFGGTRFVPIISSLVMGLVGLVIPLVWPIFAMGISGLGHMINSAGDFGPMLFGTGERLLLPFGLHHILVALIRFTDAGGTQEVCGQTVSGALTIFQAQLSCPTTHGFSESATRFLSQGKMPAFLGGLPGAALAMYHCARPENRHKIKGLLISGLIACVVGGTTEPLEFLFLFVAPVLYVIHALLTGLGFTVMSVLGVTIGNTDGNIIDFVVFGILHGLSTKWYMVPVVAAIWFVVYYVIFRFAITRFNLKTPGRDSEVASSIEKAVAGAPGKSGYNVPAILEALGGADNIVSLDNCITRLRLSVKDMSLVNVQALKDNRAIGVVQLNQHNLQVVIGPQVQSVKDEMAGLMHTVQA

SEQ ID NO: 124573 - DNA, 1578 bp, Clostridium difficile 630
  CDS (1)..(1578): transl_table=11
atgaaacaaaaaatgaaagaattctttttacagttaggaaaatcatttttattgccaatagcattaatatctgcagcaggtatatttttaggaataagttcagcattttcaaatcctaatatagttagtgatatgccttttttagcaaataattttattcaaggaatattgggttttacaaaagctataacaggagtactttttggaaacttagcaatattctttgctatatcaatatctgttggtcttgctaaagaagaaaaagcagtttctgcattttctggttttgttggttatttagtattacacactagtataaattatatgttagggtgtagggggattcttgctgaacctgacatgatgagagaaatgggtcaagctgtaactttaggcatacaaacattagaattaggagtatttggtggaattgtagttggtataataacagcatcattacataataaatactataatataaaactgccagattatttaggattctttggtggaactaggtttgttccaataataacaacagtagtattctctattttggggataataataccatatatatggccatatgtaaatacaattattcagagtgtaggtattggtatagctagtttaggatatttaggaacatttgtatttgggtttcttgaaagacttttaataccatttggattacatcatatattaaatgctatgtttagatttactgaagtaggaggttctttagttgtgggagggcaagaagtatttggagcattaaacatattcttagctcaactaagtgaccctgaaacaatcagtttttcaacagaagcaactagatttttagctcaagggaaaatacctataatggtatttggtcttcctgctgctgcatatgccatgtataaaactgcaaagcctgaaaataggtcgaaggttaaaggtatattactagctggtgctttagcaacatttgtaacaggaattacggaaccattggaattttcattcttatttgtatcaccaatattatttgttatacatgcatttttatcaggtatatcatttatgatgatgcatatatttggagtagcaataggaaatactcaaggtggcataatagatttagtagtatttggagttatgcaaccaaatacaaagtggatttattctataatacttggtttggtgtatgcaatagtttattataatgtatttaagattttgatacttagatttaacttacaaactccaggacgagaagaaataacagatataaattttgatttagaacctttatcaaataaagtagaaatagctcaaagtggagaaactactaagagagcattatctataattaaatatttaggtggtaaggacaatatagaagatataacaaactgtataactcgcttaagagtagtagttaaagatatgagtaaagtagatgaaaatgcttttaaaaaatatacaggtgcaatgggagttataaaagtatctgataaagatatccaaataatttatgggccatctgtatctcaagtaagagacgaagtttcttttgcaatgtctatttaa

SEQ ID NO: 124574 - protein, 525 aa, Clostridium difficile 630
MKQKMKEFFLQLGKSFLLPIALISAAGIFLGISSAFSNPNIVSDMPFLANNFIQGILGFTKAITGVLFGNLAIFFAISISVGLAKEEKAVSAFSGFVGYLVLHTSINYMLGCRGILAEPDMMREMGQAVTLGIQTLELGVFGGIVVGIITASLHNKYYNIKLPDYLGFFGGTRFVPIITTVVFSILGIIIPYIWPYVNTIIQSVGIGIASLGYLGTFVFGFLERLLIPFGLHHILNAMFRFTEVGGSLVVGGQEVFGALNIFLAQLSDPETISFSTEATRFLAQGKIPIMVFGLPAAAYAMYKTAKPENRSKVKGILLAGALATFVTGITEPLEFSFLFVSPILFVIHAFLSGISFMMMHIFGVAIGNTQGGIIDLVVFGVMQPNTKWIYSIILGLVYAIVYYNVFKILILRFNLQTPGREEITDINFDLEPLSNKVEIAQSGETTKRALSIIKYLGGKDNIEDITNCITRLRVVVKDMSKVDENAFKKYTGAMGVIKVSDKDIQIIYGPSVSQVRDEVSFAMSI

SEQ ID NO: 124575 - DNA, 1578 bp, Clostridium difficile 630
  CDS (1)..(1578): transl_table=11
atgaaaaaaaataagttaggtttatggaacttcttccaaatgttaggaaaaacgtttatgttcccaatagcactacttagtgtttctgggatgatgctaggacttggggcaggttttacagaccctaagatgattgaaatggttccatttttagggaatgaatatgttaacttagttttaaacttcatgttaacaataggattatttgcatttaacaacttgggagcattatttgcaatggcaattccactaggattattaaaaaaagaaaaagagtttggtgctttttcaggattagtaggatttatagcaatgcacataggtacaaatttttatttaacaagagctgatttgttagtaccagcagaacagatgtcaactaatggtcaagctatgattatgggtatacaaacatataatacaagtgttttaggtggtattgtagcaggattaattgtttatgcaatatatgataaagttagtaatttaaagataccagaatcattaggattctacagtggaccaagattagttccaattgttagtttaatagttatgagtatagttggattattaatacctattgtttggccaccatttttcaatgcattccaaagtttaggaagatggatttcttcagcaggaccattaggatatttttcatatgcagtggcagaaagagttacaattccatttggactaaatcatcttgtaacatccgtattccgttttacaccaataggtggaactgctgttattgatggagaaacgtactttggtacattgaacatgtttatggcatatgtagaaaataatcagattatacctcttgatttagctggtaaaatggaacaaggtaaattgatgattcaatatggattagctggtgctgcattggctatctaccgtacagcaaaaccagaaaatagaaaggcacttaaaggacttttaatatcaggggtgttgacagttattataggtggtataagtgaaccaatagagtttctattcttattcatatcaccagcattatttgctttccatacatttatgaatggtctagcaaacatggtacttccatacttaggcgtgttgatgggattcacaggagatttaattgcatttataagttttggtgtgttaagaggaacagctacaggatggccaatagcagtattagtagcagttttatattttgcaatatactattttgtatttaagtgggcaattattaagtttaatataaagaccccaggacgtgaggataaagaaataaaagtatctgaaggaaatggttcagatttcaaaaatttgtctacatataaaggacaacaaatgatatctgctttaggtggtcaatctaatatattatcactagataattgtgtaactagattgcgtttaaaactacaagatgtatcattaataaatgaggatgcaattaaagaggctggtggtatagcagttgttaaattggatgagcatacaatacaagtaattataggaactcaagtgtattctttaagaaagcagatggataaagctatggaaggtcatttggaggcatgtaatgattaa

SEQ ID NO: 124576 - protein, 525 aa, Clostridium difficile 630
MKKNKLGLWNFFQMLGKTFMFPIALLSVSGMMLGLGAGFTDPKMIEMVPFLGNEYVNLVLNFMLTIGLFAFNNLGALFAMAIPLGLLKKEKEFGAFSGLVGFIAMHIGTNFYLTRADLLVPAEQMSTNGQAMIMGIQTYNTSVLGGIVAGLIVYAIYDKVSNLKIPESLGFYSGPRLVPIVSLIVMSIVGLLIPIVWPPFFNAFQSLGRWISSAGPLGYFSYAVAERVTIPFGLNHLVTSVFRFTPIGGTAVIDGETYFGTLNMFMAYVENNQIIPLDLAGKMEQGKLMIQYGLAGAALAIYRTAKPENRKALKGLLISGVLTVIIGGISEPIEFLFLFISPALFAFHTFMNGLANMVLPYLGVLMGFTGDLIAFISFGVLRGTATGWPIAVLVAVLYFAIYYFVFKWAIIKFNIKTPGREDKEIKVSEGNGSDFKNLSTYKGQQMISALGGQSNILSLDNCVTRLRLKLQDVSLINEDAIKEAGGIAVVKLDEHTIQVIIGTQVYSLRKQMDKAMEGHLEACND

SEQ ID NO: 124577 - DNA, 1629 bp, Borrelia burgdorferi B31
  CDS (1)..(1629): transl_table=11
atgtcaacatcatcagcatctatatctatatttacaatattacaaaaaataggaaaagccttcatgcttccaatagcacttttaccagcagctggaattttattgggaattgggggagcatttactaatgaaacaatgattcaggcttatggattagaagaagtccttggaaaaggaactgttgctaactcaatactttatcttatgaaatatacaggggaagtaatttttgctaatctgcccttaatgtttgcagcggcaattccaatcggacttgctaaagtagaaaaaggaacagctgctttagcaggagtagtgggatttttggttatgcatcaaactataaatgggattttgtacatacaaggaatcacaccagaaagcgcaagcttaaaagcactattggaattaggaatgcctgaaacagctgcaactgcaaaaagccaggaatatacaagtgtacttggaatattctctcttcaaatgagcgtaatgggaggattgatagcaggatttgttgctgtctttcttcacaacagattccataatattcaattacccacattcttagcattttttgggggcacaagatttgtgccaattgtaactacaatggcaatgtttgtggtaggaatatttttaacatttatttggccttttatccaaggtgcaatgacttcgtttggaagaattgtagaacaatcaggactttttggaacatttgcatatggagcaataaaaagatctttaattccatttggactccaccacatattttatttgccattttggcaaacagctgttgggggaacattggaaataaataacgaattaatctcaggagcacaaaatatatttttcaaacaacttgcagatcccaatactgtacactttgaagttgcaaaaggaacaagattttttagcggggaatttgttgttatgatttttggattacctggggcggcgcttgctatgtaccatacatcaaaacctgaaaataaaaaaaacgtagcttcattgctactatctgctagctttacatcaatgttaacaggaattacagagcctcttgaatttgcattcctttttgcagcaccagcactttattactttatatatgttcctctttttggactagcatatcttttaacacaccttttaaacgtaggagttggactaacattttctggcggatttatagatatgttcctatttggaatacttcagggaaatagcaaaacaaattggatagcaattcctatcttgggaatcttctactttattggattttactttatatttaaatttgcaatcatgaaattcaatcttaaaacaataggaagagaagacgaagagatggaaaaaaccatgatgagttcagaaaaaacaagcttatcagaaaccgcttcaaaagtattagagggtcttggaggaaaagataatattacatacattgatgcatgtgcatcaagattaagagtcaatctaaaacaaatagaagtcattaaatcagacgcctatttcaaaaatctaggtgccagtggaatattaaaaaaaggaaatagtgttcaaattgtatttggaggattgtccgataatataaaaatggaaatcgacaagcttatgtaa

SEQ ID NO: 124578 - protein, 542 aa, Borrelia burgdorferi B31
MSTSSASISIFTILQKIGKAFMLPIALLPAAGILLGIGGAFTNETMIQAYGLEEVLGKGTVANSILYLMKYTGEVIFANLPLMFAAAIPIGLAKVEKGTAALAGVVGFLVMHQTINGILYIQGITPESASLKALLELGMPETAATAKSQEYTSVLGIFSLQMSVMGGLIAGFVAVFLHNRFHNIQLPTFLAFFGGTRFVPIVTTMAMFVVGIFLTFIWPFIQGAMTSFGRIVEQSGLFGTFAYGAIKRSLIPFGLHHIFYLPFWQTAVGGTLEINNELISGAQNIFFKQLADPNTVHFEVAKGTRFFSGEFVVMIFGLPGAALAMYHTSKPENKKNVASLLLSASFTSMLTGITEPLEFAFLFAAPALYYFIYVPLFGLAYLLTHLLNVGVGLTFSGGFIDMFLFGILQGNSKTNWIAIPILGIFYFIGFYFIFKFAIMKFNLKTIGREDEEMEKTMMSSEKTSLSETASKVLEGLGGKDNITYIDACASRLRVNLKQIEVIKSDAYFKNLGASGILKKGNSVQIVFGGLSDNIKMEIDKLM

SEQ ID NO: 124579 - DNA, 1725 bp, Borrelia burgdorferi B31
  CDS (1)..(1725): transl_table=11
ttgctgaaattagcattggagaggcttagcatgattaattttattaaaataattaacttttcaagtttgcaaaaattttctaaagcactacgagtgcctatttctattttaccggtttcatgtttattgattggtattggatctgtattttcaaattcttctagtattgtttatgttgataaaatttttattcaaaatgttttaggcttaatgaaggctataggcaatgctattcttctcaatatgcctttaattttttctattggaatttctattggagttgcaagaatggggcagggaacagcggctttgggaggccttattggttatttaacatttaatattactgaaaattattttattgaggctttttcagggcttgttgaagcagagacaatgtcttctgttgggcgtataaatttttttggtgttcaaactttaaatacgggaattgcaggttctttagcggtaggccttttagttggatatttgcataacaaattttataatatgaagctacccaaaccttttgtgtttttttcagagtgccattttgtgcctatagtaataattttacccttttgtgtttttttggctatatttttttgtttgatttggtcaagttttgacgatttaattgcatctttaggtttgtttgtttttaggtttgaatattttggcagttttctttatggatttttaaataggcttttattgcctttggggttgcattctattttatcttttccttttgagtttacttctttgggaggagtggagatagttaatggcgatactgttagaggtcttaagaatatattttatgctcagctattagacccatcacttggtaaattttcatcaggctttgccaaaattagcagtggattttatctatctattatgtttggactgcccggagcagcattaggggtttacaagggtattgttcatgaagataaaaataaggttgcagcacttcttttctctggggccttgacagcttttttaacaggaataactgagcctttagaatttttatttattttcacagcgcctttgctttattttgttcatgccgcttattcggggtttgcattgttgcttgctaatttttttaatgttacgattggcaatagcttttctactggatttttggatttttttatgtttgggatacttcaaggaaattctaagacaaattggattagtgtattacctttgggggcaatgttttttgctctttattattttacttttagttggctttatagatactttgattttcagatatttgttacagacgatccattttttgaaggccaagaaggaaagctagagagtctcggaattgcgcatcttttaattcaaggtcttggtggatttgataatattacaaagcttgatgtttgttctacaagattgcatgtagatgttgttaatactgagcttgttgataataatttgcttaaagaggctggagttcttaaaatagggcttgttaatggcaaggttcagcttttttatggatctaatgtttattatattaaaaatgccattgatacctattctccaaagagtctttttgaagctagtgttatggttgcagttgataatgtaaaaaaaggttttaaaacttatattgaaatgaaagaagacaaaaaacttgaaaagcaaggtaaatcaggaaaaacctataagcttagcgaattagaagaagattag

SEQ ID NO: 124580 - protein, 574 aa, Borrelia burgdorferi B31
MLKLALERLSMINFIKIINFSSLQKFSKALRVPISILPVSCLLIGIGSVFSNSSSIVYVDKIFIQNVLGLMKAIGNAILLNMPLIFSIGISIGVARMGQGTAALGGLIGYLTFNITENYFIEAFSGLVEAETMSSVGRINFFGVQTLNTGIAGSLAVGLLVGYLHNKFYNMKLPKPFVFFSECHFVPIVIILPFCVFLAIFFCLIWSSFDDLIASLGLFVFRFEYFGSFLYGFLNRLLLPLGLHSILSFPFEFTSLGGVEIVNGDTVRGLKNIFYAQLLDPSLGKFSSGFAKISSGFYLSIMFGLPGAALGVYKGIVHEDKNKVAALLFSGALTAFLTGITEPLEFLFIFTAPLLYFVHAAYSGFALLLANFFNVTIGNSFSTGFLDFFMFGILQGNSKTNWISVLPLGAMFFALYYFTFSWLYRYFDFQIFVTDDPFFEGQEGKLESLGIAHLLIQGLGGFDNITKLDVCSTRLHVDVVNTELVDNNLLKEAGVLKIGLVNGKVQLFYGSNVYYIKNAIDTYSPKSLFEASVMVAVDNVKKGFKTYIEMKEDKKLEKQGKSGKTYKLSELEED

SEQ ID NO: 124581 - DNA, 1545 bp, Borrelia burgdorferi B31
  CDS (1)..(1545): transl_table=11
atgttaaagggttttgaacaagctcagaaatttggacgttcttttatgcttccaattgctattttgccagcagcggggctgcttttaggaattggaggctctctttctaatccagaaaccgttaggacgtattcttttttgaatatattcttcttacaatcagttttcaaaataatgagtgcgtcgggttctattattttttcaaatttagcgccaatattttctattggaattgctgttggacttgcaaaatcagataaaggcacatctggaatcgcagcatttattggctaccttgtaatgaatgctactattggagttttaattgatgtgtcaggcagagcggagtctttctctagtggtgctgtgggttttgttcttggaattaagactttagaaacgggggtttttggcggggttgtagttggtattttgacttattatcttcattctagatttaacaaagtagatttacctaaggttcttggatttttttctggatctagatttgttccgatcattgtttctttttctagtatttttcttgctgttattatgtttcttgtttggccatttgtacaaagtggaattaataaagtagggggcttagtagattcaaccggttatattggaacacttatttatgggatttttttaaggatgcttggaccttttggtcttcatcatatattttatttgccattttggacaacaggccttgggggatctgttattattgatggaaagttaattgaaggaactcagaatattttctttgcagaacttgctgcccaaggtacagatagattttttatcggaactagccgttttatgagtggacgatttattaccatgatgtttggtttgcccggagctgcacttgctctatattacactgcaaagcgcgaggagagaacaaaagtttttggtcttttgatgtcttcagcgctaacgtcatttttaacaggtataacagaacctcttgaattttcttttctttttgtagcccctattctttatgttgttcatgctacatttgatggatttgctttcatgctagcgcatattttgcaaattacaataggtcaaacgttttctggagggtttgtcgattttattctttttggcattttgcagggaaattcaagaactaattggcttttggtgccagttataggcattgtttggttttttctttactactttacttttatatttttaataaataagtttgattttaaaactccgggtagaacgcaagatttaaattctgaagattctccaagttctaagagtagtgaatttgaagaaaattatgccactaaggttattattgggcttggtggtgcttcaaatattgttgagcttgattgttgtgcaactaggcttagaattacagtaagggatgttcttaaagtttctgaaaaaattttaaaaaaaactggttctaaaggagtaattattaaaggcaatggggttcaggtagtttacggaccaggtgttagtgttcttaagaatgaaatagaagaattgctagaggcttga

SEQ ID NO: 124582 - protein, 514 aa, Borrelia burgdorferi B31
MLKGFEQAQKFGRSFMLPIAILPAAGLLLGIGGSLSNPETVRTYSFLNIFFLQSVFKIMSASGSIIFSNLAPIFSIGIAVGLAKSDKGTSGIAAFIGYLVMNATIGVLIDVSGRAESFSSGAVGFVLGIKTLETGVFGGVVVGILTYYLHSRFNKVDLPKVLGFFSGSRFVPIIVSFSSIFLAVIMFLVWPFVQSGINKVGGLVDSTGYIGTLIYGIFLRMLGPFGLHHIFYLPFWTTGLGGSVIIDGKLIEGTQNIFFAELAAQGTDRFFIGTSRFMSGRFITMMFGLPGAALALYYTAKREERTKVFGLLMSSALTSFLTGITEPLEFSFLFVAPILYVVHATFDGFAFMLAHILQITIGQTFSGGFVDFILFGILQGNSRTNWLLVPVIGIVWFFLYYFTFIFLINKFDFKTPGRTQDLNSEDSPSSKSSEFEENYATKVIIGLGGASNIVELDCCATRLRITVRDVLKVSEKILKKTGSKGVIIKGNGVQVVYGPGVSVLKNEIEELLEA

SEQ ID NO: 124583 - DNA, 1503 bp, Vibrio cholerae O1 biovar eltor str. N16961
  CDS (1)..(1503): transl_table=11
gtgctaacatttaggctacgggggtatgccgttagtcccagcaattctaataacttaatcaggagcataaacatgtttaagaacgcttttgcgaatctgcaaaaggtcggtaaggcgctgatgctgccagtatcagttttgcctgtcgccggtattttgctaggcgtgggtgccgctaattttagctggctaccagaagtggtatcacatctcatggaacaggcgggtggttcagtctttggtcaaatgccattgctatttgcggtcggtgttgccctaggctttactaacaacgacggtgtatctggtctgtctgctatcgtcggttacggcattatggttgcgactttaaaagtcatggcaactgtgatgggtgtgagcggcatcgatactggtgttctgggtggtatcctagccggtggtgttgcagcttggtcattcaaccgtttctacaaaattcaactgcctgaatatctgggtttctttgcaggtaaacgtgctgttccaatcatcacgggttttatttcgattgcactgggtgtggttctgtcattcatttggccaccaatcggttctgcgatcgccactttctctgactgggcggcaaaccaagatcctgtaaccgcatttggtatctacggtatcgttgagcgttcactgatcccatttggtctgcatcatatttggaacgtacctttcttctaccaagctggtacttgtgtgaatggtgcgggtgaaaccgttaacggcatcatgacttgcttcctaacggctgacgatgcttctcgtgcggcaggcaatggcttcggtcaattggcaggtggctatttgttcaaaatgttcggtcttccagccgctgcatttgctatcgctcactgtgctaagcctgaaaaccgtgcaaaagtaatgggtatcatggcttctgctgctctgacttcattcctaaccggtattactgagccaatcgaattcgcattcttgttcgtagctccagtactgtacgctatccacgctgtattagcaggtctggcttacgttctgactaacgcgctgggcgtggttcacggtcataccttctctaacggtttcattgactttgttgttcaatcaccacgtgcagataacatgttactgctggttggcttaggcattggctacgctgtgctgtactacgtagtattcacattcgttatccgtgctcttaacctaaaaacaccaggtcgtgaagacgagagcgctgataaatcggcatcaagcggtaatgagctggctggtgatctggttgccgcattcggtggtaaagcgaacattactaacctagatgcgtgtatcactcgtttgcgtgtatcggtagccgatactgctctggttgatcaggataagctgaaaaagcttggtgcagcaggtgtggttatggtttctggtggtgtacaagctatcttcggtactaaatcagacaacctgaaaactgaaatggatgagtggatccgtaacaacggttaa

SEQ ID NO: 124584 - protein, 500 aa, Vibrio cholerae O1 biovar eltor str. N16961
MLTFRLRGYAVSPSNSNNLIRSINMFKNAFANLQKVGKALMLPVSVLPVAGILLGVGAANFSWLPEVVSHLMEQAGGSVFGQMPLLFAVGVALGFTNNDGVSGLSAIVGYGIMVATLKVMATVMGVSGIDTGVLGGILAGGVAAWSFNRFYKIQLPEYLGFFAGKRAVPIITGFISIALGVVLSFIWPPIGSAIATFSDWAANQDPVTAFGIYGIVERSLIPFGLHHIWNVPFFYQAGTCVNGAGETVNGIMTCFLTADDASRAAGNGFGQLAGGYLFKMFGLPAAAFAIAHCAKPENRAKVMGIMASAALTSFLTGITEPIEFAFLFVAPVLYAIHAVLAGLAYVLTNALGVVHGHTFSNGFIDFVVQSPRADNMLLLVGLGIGYAVLYYVVFTFVIRALNLKTPGREDESADKSASSGNELAGDLVAAFGGKANITNLDACITRLRVSVADTALVDQDKLKKLGAAGVVMVSGGVQAIFGTKSDNLKTEMDEWIRNNG

SEQ ID NO: 124585 - DNA, 1368 bp, Bacillus halodurans C-125
  CDS (1)..(1368): transl_table=11
atgcttacatttttacagagaatagggaaatcccttatgttaccgattgcggtattgccggccgcggctattttattaaggcttggccaagaggacttgttcaaccaagcgttcatcgcggcagcaggtgctgcggtctttgatcatttgccacttatttttgcgattggcgtcgcgatcggattttcgaaagattcgaatggtaccgctgggttggcgggagcgatcgggtatttagtattagtcaacggtacacaagcgattgatcctaatgtagatatggccattcttggtggaattatttctgggattgttgctggacttctttacaatcgctttcatgacgtcaaactccctcaatggctagggtttttcggagggcggagatttgttccaattataaccgctactgtgatggtcatctttgcaggcttgtttggttatgtgtggccgccgattcaagatgggattaatcaaatcggtcaatggattatcggtggaggagcgcttggtgtcggaatatttgggttcttgaaccggctgttaattccggtcgggcttcatcacgtattgaatagtctcgtctggtttgtatttggtgagtatgaaggcgcgacgggtgacttgcaccgtttcttcgcaggtgatccgacagcagggtcatttatggcgggttttttcccgattatgatgttcggtttgccagctgcagcacttgcgatgattgcggcggctgagcctgagcgcagaaaagaagtaaccgggatgctcatcggaattgcagtgaccgcttttgtgactggggttacggaaccacttgagttttcgtttatgttcctagcaccgattctgtatgttgctcatgccttgctaacggcgagctcgctggcgattgcccatctacttgaaattcgccatgggtttggcttctctgggggagccatcgactttgtcttgaactggcggcttgccaccaagcctgcccttttgatcgtcatgggtctcatttatgcgctcatctatttcgtcctcttctatgtggtcattaagaaatttgacttgaaaacaccaggtagagaagatgaaagtgaggaaacggatgcttcaagtaatggacaagccgataaatatgatgtgatggcgagccatttcatcactgatcttggcggacaggaaaacctcaaaacgattgatcattgcacgacacgtctacgcttaacagtccatgatatggggaaagtgaatgaggaattgctgaaaaagcatggggctcgcggtgtcattaaagtcaatgagacgaacgttcaagtcatcatcggaaccgacgtggaatttgttgctgatcgaatgaaaaacaagcatggttaa

SEQ ID NO: 124586 - protein, 455 aa, Bacillus halodurans C-125
MLTFLQRIGKSLMLPIAVLPAAAILLRLGQEDLFNQAFIAAAGAAVFDHLPLIFAIGVAIGFSKDSNGTAGLAGAIGYLVLVNGTQAIDPNVDMAILGGIISGIVAGLLYNRFHDVKLPQWLGFFGGRRFVPIITATVMVIFAGLFGYVWPPIQDGINQIGQWIIGGGALGVGIFGFLNRLLIPVGLHHVLNSLVWFVFGEYEGATGDLHRFFAGDPTAGSFMAGFFPIMMFGLPAAALAMIAAAEPERRKEVTGMLIGIAVTAFVTGVTEPLEFSFMFLAPILYVAHALLTASSLAIAHLLEIRHGFGFSGGAIDFVLNWRLATKPALLIVMGLIYALIYFVLFYVVIKKFDLKTPGREDESEETDASSNGQADKYDVMASHFITDLGGQENLKTIDHCTTRLRLTVHDMGKVNEELLKKHGARGVIKVNETNVQVIIGTDVEFVADRMKNKHG

SEQ ID NO: 124587 - DNA, 2028 bp, Bacillus halodurans C-125
  CDS (1)..(2028): transl_table=11
atgtttaaaaaatcattcggcgttttgcaacgcgtcggaaaagcgctcatgctaccggtcgctttactgccggcagctgggattttgctcgcttttggtgacgcgctccaaaaccctgatatgacggagcgttttccgtttttaacggcagattggatcgtgatcattgccgaacttatgcaaaatgcaggggacattgtcttcgcaaatctcgcccttcttttcgccgttggggtcgccatcggtctttcgaatggagacggggtcgctggacttgctgcgttaatcgggtatttgatcatcaacgtaacaatgagcgttatcgggcatgttacacctgagatggtcggagatagcccagcttatgcaagcgtacttggcattccaacgctacaaacaggggtattcggtggaatcattgccggccttctcggtgcgtatatgtacaagaaatactttaatattgaattgccgtcatacttaggtttctttgcgggaaaacgatttgttccaatcgcaacagcctttttctccttattcgtcggggtgctcttacactttatttggccgaccgttcaggatggcttaaacgcattctcttattacatgacggagtcaaaccgtacggttgcagcgtttatctttggtgtcattgagcgtgctctgattccgttcggacttcatcacattttctactcgccattctggtttgagtttggtcagtatacgaacgccgctggtgaaattgtacgtggggaccaacggatcttctttgcgcaaattcgtgatggtgctgagctgacagctggtacgttcatggcaggtaaattcccgttcatgatgttcggtcttccagctgctgcacttgcgatttaccattgcgcacgtcctgaaaacaaaaaagttgttgctggtattatggcatctgcagcccttacttcgtttttaacagggattacagagcctattgaatttagtttcttatttgtagcgccattattgtttgccgtgcataccattttcgctggtctttcatttatgatcatgcacattttggacattaagattgggatgactttctctggaggggtcattgactttatcctttacggagtccttccaaacagaaccgcttggtggcttgtgattccgattggattagtgttctcagtcatttactacttcgggttccgctttgcaatcaagaaatttaaccttatgactcctggtcgcgaagaaccaacggaagaagatggagctggggctgaagtagataaaaactcgcttccattcaatgtccttgaagctcttggtggcaaggagaatttaacaaacttagatgcgtgcataacgcgattacgcgtgaacgtcaaagatgcgaaaaatgttgacaaaaatcgtctgaagaaattaggcgcctctggtgtgatggaagtggggaacagcattcaagcgatcttcggcccacgttctgatcaaattaaaacgcaaattcaagacattcttgatggtaaaacaccagtcgttactgaagaaacacctgatgaagcgcaagccgctccggttgcaggcgacatctctttcgccatgccgattgaaggaaagcttcttgatctaagcgacgtaccagatgaagtgttttcgaaaaaaatgatgggcgacggctttgcgattgaaccgacagaaggtattgtctatgcgccatttgacggaaaagtaagtacgatcttcccgacaaaacacgcgattggcttaacgacagatactggcaaagaagtgctcatccatatcggtatcgatacggttaacttaaaaggggaaggattcactgcccatgtcgagcaagatgacattgttcaacaaggtcaaaagcttatgagcttcgacctagatgtgattaatgaaaaagcgaaatcagcgatcacgccgattatttttactaaccttgccgaaggagagcacatcacgcttcatacatctggtgagcaaaaagcaaacacagaaaacattctttccattaaacaatag

SEQ ID NO: 124588 - protein, 675 aa, Bacillus halodurans C-125
MFKKSFGVLQRVGKALMLPVALLPAAGILLAFGDALQNPDMTERFPFLTADWIVIIAELMQNAGDIVFANLALLFAVGVAIGLSNGDGVAGLAALIGYLIINVTMSVIGHVTPEMVGDSPAYASVLGIPTLQTGVFGGIIAGLLGAYMYKKYFNIELPSYLGFFAGKRFVPIATAFFSLFVGVLLHFIWPTVQDGLNAFSYYMTESNRTVAAFIFGVIERALIPFGLHHIFYSPFWFEFGQYTNAAGEIVRGDQRIFFAQIRDGAELTAGTFMAGKFPFMMFGLPAAALAIYHCARPENKKVVAGIMASAALTSFLTGITEPIEFSFLFVAPLLFAVHTIFAGLSFMIMHILDIKIGMTFSGGVIDFILYGVLPNRTAWWLVIPIGLVFSVIYYFGFRFAIKKFNLMTPGREEPTEEDGAGAEVDKNSLPFNVLEALGGKENLTNLDACITRLRVNVKDAKNVDKNRLKKLGASGVMEVGNSIQAIFGPRSDQIKTQIQDILDGKTPVVTEETPDEAQAAPVAGDISFAMPIEGKLLDLSDVPDEVFSKKMMGDGFAIEPTEGIVYAPFDGKVSTIFPTKHAIGLTTDTGKEVLIHIGIDTVNLKGEGFTAHVEQDDIVQQGQKLMSFDLDVINEKAKSAITPIIFTNLAEGEHITLHTSGEQKANTENILSIKQ

SEQ ID NO: 124589 - DNA, 1713 bp, Pseudomonas aeruginosa PAO1
  CDS (1)..(1713): transl_table=11
atgcccccgttcctgatcgaaagcctgcaacgcctgggccgcgccctgatgctgccgatcgcgatcctgccgatcgccggcctgctgctgcgcctgggcgacgtcgacctgctcgacattccgctggtccacgacgccggcaaggcgatcttcgccaacctggcgctgatcttcgccatcggcatcgccgtcggtttcgctcgcgacaacaatggcaccgccggcctcgccggcgccatcggctacctggtgatgatctcggtgctcaaggtgatcgatccgggcatcgacatgggcgtgctctccggcatcatcagcggcctggtggctggcgccctgtataaccgcttcaaggacgtgaagctgccggaatacctggcgttcttcggcggccgccgcttcgtgccgatcgccaccgggatcagcgcggtctgcctgggcctgctgttcggggtgatctggccaccgctgcaacagggcatcaacggcctcggccaactcatgctggaaagcggcagcttcggcgccttcgccttcggcgtgctgaaccgcctgctgatcgtcaccgggttgcaccacatcctcaacaacctggtgtggttcgtcttcggtagcttcaccgacccggaaaccgggcgcgtcgtcaccggcgacctggcgcgctatttcgccggcgacccgaagggcggccagttcatggccgggatgttcccggtgatgatgttcggcctgcccgccgcctgcctggcgatgtaccgcaacgcccgtccggagcggcgcaagctgatcggcgggctgctcctgtcgatggccttgaccgccttcctcaccggcgtcaccgagccggtggagttcgccttcatgttcctcgcgccgctgctctacctgctgcatgcgctgctcaccggcctgtccatggccctcaccgacctgctcgatatccgcctcggcttcaccttctccggtggcgccatcgacctcgccctgggctggggccgttccacccacggctggatgctctggccgctgggcctgctctatgccggcatctattacctggtgttcgacttctgcatccgccgcttcaacctgaagaccccgggccgcgaagacgacgcgagcagcgaatcgggcgacaacgccgaagccgagcgcgccccggcattcatccgcgccttgggtggcgcagccaacctcgaagtggtggacgcctgcaccacgcgcctgcgtctgcgcctggtcgaccgcaacaaggcctcggacgcccaactcaaggccctcggtgcgatggccgtggtacgtccgggcaaggccggcagcctgcaggtggtggtcggcccacaggccgacagcatcgccgacgagatccgccgcgccctgcccttcgatacgcaaccgggcgaagccgtaccgccgctgggcagtccgcacacagccgaagaggtggtggcgatgcaggccaccgtcgacgccgccgaagcccaggcctggctcggcgccctcggcggcgccggcaacctgcgcgaggtacgggacgtcgcactgacccgcctgcgggtcagcgtggcggacgaacgcaagctggccaccgagcaactgcgtcgtctcggcggacagggcgtcagttccctcgccggcggcatctgccatatcctggtgggcccccgcgccgcggccctgagccaggccctgcaaccgctgctgcggcgctga

SEQ ID NO: 124590 - protein, 570 aa, Pseudomonas aeruginosa PAO1
MPPFLIESLQRLGRALMLPIAILPIAGLLLRLGDVDLLDIPLVHDAGKAIFANLALIFAIGIAVGFARDNNGTAGLAGAIGYLVMISVLKVIDPGIDMGVLSGIISGLVAGALYNRFKDVKLPEYLAFFGGRRFVPIATGISAVCLGLLFGVIWPPLQQGINGLGQLMLESGSFGAFAFGVLNRLLIVTGLHHILNNLVWFVFGSFTDPETGRVVTGDLARYFAGDPKGGQFMAGMFPVMMFGLPAACLAMYRNARPERRKLIGGLLLSMALTAFLTGVTEPVEFAFMFLAPLLYLLHALLTGLSMALTDLLDIRLGFTFSGGAIDLALGWGRSTHGWMLWPLGLLYAGIYYLVFDFCIRRFNLKTPGREDDASSESGDNAEAERAPAFIRALGGAANLEVVDACTTRLRLRLVDRNKASDAQLKALGAMAVVRPGKAGSLQVVVGPQADSIADEIRRALPFDTQPGEAVPPLGSPHTAEEVVAMQATVDAAEAQAWLGALGGAGNLREVRDVALTRLRVSVADERKLATEQLRRLGGQGVSSLAGGICHILVGPRAAALSQALQPLLRR

SEQ ID NO: 124591 - DNA, 2187 bp, Streptococcus pyogenes M1 GAS
  CDS (1)..(2187): transl_table=11
atgaaaacatcattcaagcaactgtttcgtttcgaattttggcaaaaatttgggaaatgtcttatggtcgttattgctgtcatgccagcggctggtttaatgatcagtatcggaaactctattccaatgattaaccacgactcagcatttttggcatctctaggcaacattatcgctcaaattggttgggctgttattgttaaccttcacttgctatttgccttggccattggtggtagttgggctaaagaaagagctggaggggcctttgcctcagggcttgcttttgtcttgatcaatcggataacaggtgctttttatggcgtgtctagtactatgctagctgatccagaagcaaaaatcacaagcctccttggcactcaaatgatcgttaaagattatttcaccagtgtcttggaatctccagctttaaacacaggggtttttgttgggattattgcagggttcgtaggagcaacggcctataacaaatactataattaccgtaaacttcctgaagttttgaccttctttaatgggaagcgttttgtaccatttgtcgttattttacgttctatttttgtagcccttattttggttgttgtttggccggtgatccagtctgggattaacagttttgggatgtggattgcctcttcacaagattcagctccaatcctagccccattcctatatggtaccttggaacgtctcttgttgccatttggtcttcaccacatgttgacgatcccaatgaactatacagctcttggtggaacttatgaggtcatgacaggtgcagcagcggggacaaaagtatttggtcaagaccctttgtggcttgcttgggtaactgaccttgttcaccttaaaggatcagacgcttcagcctatagtcacttaatggatagtgtgactccagctcgtttcaaagtaggacaaatgattggagctaccggaacattgatgggggttgccttagccatgtaccgtaatgtggatgccgataaaaaacacacatacaaaatgatgttcatctcagcagcggcagcggtctttttgacaggggtaactgagccacttgagtacctatttatgtttgcagcaatgccactttacatcgtctatgcccttgttcaaggagcttcatttgccatggcagaccttgtgaatctccgtgttcactcatttggaaatatagagctactaacccgcacccctatggctcttaaagcaggcctaggcatggatgtgattaactttgtttgggtttctgtcctctttgcagttatcatgtactttattgcagatatgatgatcaagaaaatgcatctcgcaacagctggccgtttaggcaactacgatgccgatatactgggtgaccgtaacactcaaacaagacctacccaagtagcagatagcaactctcaagtcgtgcaaatcgttaatctccttggtggggcaggcaatattgatgatgttgatgcttgtatgacgcgcttacgagtgacggtcaaagaccccgctaaggttggtgctgaggacgattggaaaaaagctggcgctataggcttgatccaaaaaggcaacggcgttcaagcggtctatggccctaaagcagatattttgaaatcagatattcaagatttgctggactcaggtgctcttattccagaagtcaatatgtcacagctcactagcaaaccgactcccgcaaaagattttaaacacgtgacagaagatgtgctatcagtggcagacgggatggttctcccaatcacaggtgtaaaagaccaggtgtttgcggctaagatgatgggagatgggtttgcggttgaaccaacccatggtaatatctatgcacccgtagctggccttgtgaccagtgtctttccgaccaagcatgcctttggtttactgacagataatggtcttgaagtgctggtgcacgtgggacttgataccgtcgccttaaatggtgtgcctttttcagtcaaagtctcagaagggcaacgggttcatgcaggtgacctattagtcgtagcagatcttgctgctattaaatcagcagagcgtgaaacaatcattgttgttgcttttaccaacacaacagagatccaagatgtgaccttgacatctttaggagctcagcctgctaagactaaagtagctaccgtagaactttaa

SEQ ID NO: 124592 - protein, 728 aa, Streptococcus pyogenes M1 GAS
MKTSFKQLFRFEFWQKFGKCLMVVIAVMPAAGLMISIGNSIPMINHDSAFLASLGNIIAQIGWAVIVNLHLLFALAIGGSWAKERAGGAFASGLAFVLINRITGAFYGVSSTMLADPEAKITSLLGTQMIVKDYFTSVLESPALNTGVFVGIIAGFVGATAYNKYYNYRKLPEVLTFFNGKRFVPFVVILRSIFVALILVVVWPVIQSGINSFGMWIASSQDSAPILAPFLYGTLERLLLPFGLHHMLTIPMNYTALGGTYEVMTGAAAGTKVFGQDPLWLAWVTDLVHLKGSDASAYSHLMDSVTPARFKVGQMIGATGTLMGVALAMYRNVDADKKHTYKMMFISAAAAVFLTGVTEPLEYLFMFAAMPLYIVYALVQGASFAMADLVNLRVHSFGNIELLTRTPMALKAGLGMDVINFVWVSVLFAVIMYFIADMMIKKMHLATAGRLGNYDADILGDRNTQTRPTQVADSNSQVVQIVNLLGGAGNIDDVDACMTRLRVTVKDPAKVGAEDDWKKAGAIGLIQKGNGVQAVYGPKADILKSDIQDLLDSGALIPEVNMSQLTSKPTPAKDFKHVTEDVLSVADGMVLPITGVKDQVFAAKMMGDGFAVEPTHGNIYAPVAGLVTSVFPTKHAFGLLTDNGLEVLVHVGLDTVALNGVPFSVKVSEGQRVHAGDLLVVADLAAIKSAERETIIVVAFTNTTEIQDVTLTSLGAQPAKTKVATVEL

SEQ ID NO: 124593 - DNA, 1947 bp, Escherichia coli O157:H7 EDL933
  CDS (1)..(1947): transl_table=11
  misc_feature (973)..(973): s is g or c
  misc_feature (1162)..(1162): s is g or c
  misc_feature (1422)..(1422): y is t or c
atgaatattttaggttttttccagcgactcggtagggcgttacagctccctatcgcggtgctgccggtggcggcactgttgctgcgattcggtcagccagatttacttaacgttgcgtttattgcccaggcgggcggtgcgatttttgataacctcgcattaatcttcgccatcggtgtggcatccagctggtcgaaagacagcgcaggtgcggcggcgctggcgggggcggtaggttactttgtgttaaccaaagcgatggtgaccatcaacccagaaattaacatgggtgtactggcgggtatcattaccggtctggttggtggcgcagcctataaccgttggtccgatattaaactgccggacttcctgagcttcttcggcggcaaacgctttgtgccgatcgccaccggcttcttctgtctggtgctggcggccatttttggttacgtctggccgccggtacagcacgctatccatgcaggcggcgagtggatcgtttctgcgggcgcgctgggttccggtatctttggtttcatcaaccgtctgttgatcccaaccggtctgcatcaggtgctgaacaccatcgcctggttccagattggtgaattcaccaacgcggcgggtacggttttccacggcgacatcaaccgtttctacgctggtgacggcaccgcggggatgttcatgtccggcttcttcccgatcatgatgttcggcctgccgggtgcggcgctggcgatgtacttcgcagcaccgaaagagcgtcgtccgatggttggcgggatgctgctttctgttgctgttactgcgttcctgaccggtgtgactgagccgctggaattcctgttcatgttccttgctccgctgctgtacctcctgcacgcactgctgaccggtatcagcctgtttgtggcaacgctgctgggtatccatgccggcttctctttctctgcgggggctatcgactacscgttgatgtataacctgccggccgccagccagaacgtctggatgctgctggttatgggtgttgtcttcttcgctatctacttcgtggtgttcagtttggttatccgcatgttcaacctgaaaacgccgggtcgtgaagataaagaagacgagatcgttactgaagaagccaacagcaacactgaagaasgcctcaatcaactggcgaccaactatattgctgcggttggcggcactgacaacctgaaagcaattgacgcctgtatcacccgtctgcgccttaccgtggctgactctgcccgcgttaacgatacgatgtgtaaacgtctgggggcttctggggtagtaaaactgaacaaacagactattcaggtgattgttggcgcgaaagcagaatccatcggcgatgcgatgaagaaagtcgttgcccgtggcccggtagcagctgcytctgctgaagcaactccggcaactgccgctcctgtagcaaaaccgcaggctgtaccaaacgcggtatctatcgcggagctggtatcgccgattaccggtgatgtcgtggcactggatcaggttcctgacgaagcattcgccagcaaagcggtgggtgacggtgtggcggtgaaaccgacagataaaatcgtcgtatcaccagccgcaggaacaatcgtgaaaatcttcaacaccaaccacgcgttctgcctggaaaccgaaaaaggcgcggagattgtcgttcacatgggtatcgataccgtagcgctggaaggtaaaggctttaaacgtctggtggaagagggcgcgcaggtaagcgcagggcaaccgattctggaaatggatctggattacctgaacgctaacgcccgttcgatgattagcccggtggtttgcagcaatatcgacgatttcagtggcttgatcattaaagctcagggccatgttgtggcgggtcaaacaccgctgtatgaaatcaaaaagtaa

SEQ ID NO: 124594 - protein, 648 aa, Escherichia coli O157:H7 EDL933
  misc_feature (325)..(325): The Xaa at location 325 stands for Ala, or Pro.
  misc_feature (388)..(388): The Xaa at location 388 stands for Arg, or Gly.
MNILGFFQRLGRALQLPIAVLPVAALLLRFGQPDLLNVAFIAQAGGAIFDNLALIFAIGVASSWSKDSAGAAALAGAVGYFVLTKAMVTINPEINMGVLAGIITGLVGGAAYNRWSDIKLPDFLSFFGGKRFVPIATGFFCLVLAAIFGYVWPPVQHAIHAGGEWIVSAGALGSGIFGFINRLLIPTGLHQVLNTIAWFQIGEFTNAAGTVFHGDINRFYAGDGTAGMFMSGFFPIMMFGLPGAALAMYFAAPKERRPMVGGMLLSVAVTAFLTGVTEPLEFLFMFLAPLLYLLHALLTGISLFVATLLGIHAGFSFSAGAIDYXLMYNLPAASQNVWMLLVMGVVFFAIYFVVFSLVIRMFNLKTPGREDKEDEIVTEEANSNTEEXLNQLATNYIAAVGGTDNLKAIDACITRLRLTVADSARVNDTMCKRLGASGVVKLNKQTIQVIVGAKAESIGDAMKKVVARGPVAAASAEATPATAAPVAKPQAVPNAVSIAELVSPITGDVVALDQVPDEAFASKAVGDGVAVKPTDKIVVSPAAGTIVKIFNTNHAFCLETEKGAEIVVHMGIDTVALEGKGFKRLVEEGAQVSAGQPILEMDLDYLNANARSMISPVVCSNIDDFSGLIIKAQGHVVAGQTPLYEIKK

SEQ ID NO: 124595 - DNA, 1434 bp, Escherichia coli O157:H7 EDL933
  CDS (1)..(1434): transl_table=11
  misc_feature (946)..(946): k is g or t
atgtttaagaatgcatttgctaacctgcaaaaggtcggtaaatcgctgatgctgccggtatccgtactgcctatcgcaggtattctgctgggcgtcggttccgcgaatttcagctggctgcccgccgttgtatcgcatgttatggcagaagcaggcggttccgtctttgcaaacatgccactgatttttgcgatcggtgtcgccctcggctttaccaataacgatggcgtatccgcgctggctgcagttgttgcctatggcatcatggttaaaaccatggccgtggttgcgccactggtactgcatttacctgctgaagaaatcgcctctaaacacctggcggatactggcgtactcggagggattatctccggtgcgatcgcagcgtacatgtttaaccgtttctaccgtattaagctgcctgagtatcttggcttctttgccggtaaacgctttgtgccgatcatttctggcctggctgccatctttactggcgttgtgctgtccttcatttggccgccgattggttctgcaatccagaccttctctcagtgggctgcttaccagaacccggtagttgcgtttggcatttacggtttcatcgaacgttgcctggtaccgtttggtctgcaccacatctggaacgtacctttccagatgcagattggtgaatacaccaacgcagcaggtcaggttttccacggcgacattccgcgttatatggcgggtgacccgactgcgggtaaactgtctggtggcttcctgttcaaaatgtacggtctgccagctgccgcaattgctatctggcactctgctaaaccagaaaaccgcgcgaaagtgggcggtattatgatctccgcggcgctgacctcgttcctgaccggtatcaccgagccgatcgagttctccttcatgttcgttgcgccgatcctgtacatcatccackcgattctggcaggcctggcattcccaatctgtattcttctggggatgcgtgacggtacgtcgttttcgcacggtctgatcgacttcatcgttctgtctggtaacagcagcaaactgtggctgttcccgatcgtcggtatcggttatgcgattgtttactacaccatcttccgcgtgctgattaaagcactggatctgaaaacgccgggtcgtgaagacgcgactgaagatgcaaaagcgacaggtaccagcgaaatggcaccggctctggttgctgcatttggtggtaaagaaaacattactaacctcgacgcatgtattacccgtctgcgcgtcagcgttgctgatgtgtctaaagtggatcaggctggcctgaagaaactgggcgcagcgggcgtagtggttgctggttctggtgttcaggcgattttcggtactaaatccgataacctgaaaaccgagatggatgagtacatccgtaaccactaa

SEQ ID NO: 124596 - protein, 477 aa, Escherichia coli O157:H7 EDL933
  misc_feature (316)..(316): The Xaa at location 316 stands for Ala, or Ser.
MFKNAFANLQKVGKSLMLPVSVLPIAGILLGVGSANFSWLPAVVSHVMAEAGGSVFANMPLIFAIGVALGFTNNDGVSALAAVVAYGIMVKTMAVVAPLVLHLPAEEIASKHLADTGVLGGIISGAIAAYMFNRFYRIKLPEYLGFFAGKRFVPIISGLAAIFTGVVLSFIWPPIGSAIQTFSQWAAYQNPVVAFGIYGFIERCLVPFGLHHIWNVPFQMQIGEYTNAAGQVFHGDIPRYMAGDPTAGKLSGGFLFKMYGLPAAAIAIWHSAKPENRAKVGGIMISAALTSFLTGITEPIEFSFMFVAPILYIIHXILAGLAFPICILLGMRDGTSFSHGLIDFIVLSGNSSKLWLFPIVGIGYAIVYYTIFRVLIKALDLKTPGREDATEDAKATGTSEMAPALVAAFGGKENITNLDACITRLRVSVADVSKVDQAGLKKLGAAGVVVAGSGVQAIFGTKSDNLKTEMDEYIRNH

SEQ ID NO: 124597 - DNA, 1518 bp, Streptococcus pneumoniae TIGR4
  CDS (1)..(1518): transl_table=11
atgtttaaagttttacaaaaagttggaaaagcttttatgttacctatagctatacttcctgcagcaggtctacttttggggattggtggtgcactttcaaacccaaccacgatagcaacttatccaatactagacaatagtatttttcaatcaatattccaagtaatgagctctgcaggagaggttgtattcagtaatttgtcactacttctctgtgtgggattatgtattggcttagcgaaacgagataaaggaaccgctgcgttagcaggagtaactggttacttagttatgactgcaacgatcaaagctttggtaaaactttttatggcagaaggatctgcaattgatactggagttattggagcattagttgtcggaatagttgccgtatatttgcacaaccgatataacaatattcaattaccttccgctttaggattctttggaggttcacgcttcgttcctattgttacatcgttctcttctatcttgattggctttgtcttctttgttatttggccacctttccaacaacttcttgtttctacaggtggatatatttctcaggcgggtccaattggaacttttctatatggatttttaatgagactttctggagcagtaggcttacatcatataatttaccctatgttttggtatactgaacttggtggtgttgaaactgttgcaggacaaacagtggttggagctcaaaaaatattttttgctcaattagccgatttggcccattctggattatttacagaaggaacaaggttttttgcaggtcgtttctcaacaatgatgttcggtttaccggctgcctgtttagcgatgtaccatagtgttcctaaaaatcgtcgtaaaaaatacgcgggtttgttttttggagttgctttaacatcttttattaccggtattacagaaccaattgaatttatgtttctattcgtcagtccggttctatatgttgttcacgcattccttgatggtgttagcttctttattgcagacgtcttaaatatttcaataggaaacacattttcaggaggtgtaatcgatttcactttatttggaattttgcaggggaacgctaagacgaattgggttcttcagattccatttggacttatttggagtgttttgtattatattatttttagatggttcattactcaattcaacgttctaacgccagggcgaggagaagaagtagattctaaagaaatttctgaatccgcagattcaacttcaaatactgcagattatttaaaacaggatagcctacaaattatcagagccttgggtggatcaaataatatagaagatgtagatgcttgtgtgacacgtttacgtgtagctgtaaaagaagttaatcaagttgataaagcacttttaaaacaaattggtgcagttgatgtcttagaagtgaagggtggcattcaagcaatctatggagcaaaagcaatcttatataaaaatagtattaatgaaattttaggtgtagatgattaa

SEQ ID NO: 124598 - protein, 505 aa, Streptococcus pneumoniae TIGR4
MFKVLQKVGKAFMLPIAILPAAGLLLGIGGALSNPTTIATYPILDNSIFQSIFQVMSSAGEVVFSNLSLLLCVGLCIGLAKRDKGTAALAGVTGYLVMTATIKALVKLFMAEGSAIDTGVIGALVVGIVAVYLHNRYNNIQLPSALGFFGGSRFVPIVTSFSSILIGFVFFVIWPPFQQLLVSTGGYISQAGPIGTFLYGFLMRLSGAVGLHHIIYPMFWYTELGGVETVAGQTVVGAQKIFFAQLADLAHSGLFTEGTRFFAGRFSTMMFGLPAACLAMYHSVPKNRRKKYAGLFFGVALTSFITGITEPIEFMFLFVSPVLYVVHAFLDGVSFFIADVLNISIGNTFSGGVIDFTLFGILQGNAKTNWVLQIPFGLIWSVLYYIIFRWFITQFNVLTPGRGEEVDSKEISESADSTSNTADYLKQDSLQIIRALGGSNNIEDVDACVTRLRVAVKEVNQVDKALLKQIGAVDVLEVKGGIQAIYGAKAILYKNSINEILGVDD

SEQ ID NO: 124599 - DNA, 1998 bp, Clostridium acetobutylicum ATCC 824
  CDS (1)..(1998): transl_table=11
atgggtaataagatatttgccgtacttcaaaaaatcggtaaatctttaatgcttccagtatctgttctaccggcggctggaattctattgagacttggacagccagatttgcttaatatgccttatgttcaagcagcaggaaatgctatttttaataatttacctttaatttttgcggttggagttgctataggtttttcaggcggagaaggtgttgcagcacttgcagctgtaattggagaactaatacttgaggcggttgaaaaaacagcaggtgatacggcagcagcagctttagcaaaaacagcggcagcttcacatcatatgacgcttgcagcatttcaaaaaactcaagaatacagtaacattgtaactaaaacaactattagtatgggtgtttttggcggtataataatcggtcttacagcagctattttatataataagttccatgatataaagatgcctcaagttttgggtttctttggtggaaaacgtttcgttccaattataacttcaatttcagctcttattattgcaactataggagtaaatatttggttgccaatacaagctggaataaattcactagcagcatttgcaactacatcaccaattggacctgcaatgtatgctggaggaaaaagacttttaattccactaggacttcatcacatttattatccattgttcttatatcaatttggtcactttgtttcaaatggagttacttatgtaggagatacagcaagatacttccatggggatcctactgccggaaacttcatggcagcagagtatccaatactaatgtttggtcttccaggagctgctctagctatgattgcagctgctaaaaaagaaaagagaaaagaaatggctggaatgatgatttcagcagcatttgtagcatttgtaacaggtattacagagccaattgaattctcattcatatttgttgctccagtattatttgtgttccacgtacttgctgcattcgcatctggtcttattacaagttatttacacataagattagggtatactttctcagcatccttcatagattatgttttaggattcaaatatgcaggtcatccattacttatatggcttgtaggtatagggttctttgtattgtactttgttgtattctacttcacaattaaagcaatgaacattaagacaccaggtagagaagatgatgatgcagaaggtgttaagaagataaatgtaaaaggaaaagctaaggcagctaaggtgcttgaagctataggcggaaaagataatataaaagtacttgatgcatgtataacaagattaagacttaacttaaatgatccttctttggttgataaagctacacttaaagctcttggagcagctggagtaatgacagcagaagatagtgttcaagtagtttttggaactgaagctgaaagaataaaagatgacataaaagcaattatacaaaatggtggatatgttgaagatgattcagataaggaagaagaagttcaagaggataagcaaatttctaaaggtgcacacgaacttttaagtccagctgatggagaagtagttggtattgagagtgttccggatagtacatttgctgaaaaaatgcttggagacggttttgcagtaataccttcaggaaatgaagtacactcaccagctgatggagaagtatcagttttattcccaactaagcatgcatttgcaataacaacagaaggcggacttgaacttttaatacatgttggaattgatactgtagcattaaatggtgaaggtttcacagcacatgtaaaacaaggagataaagttaaaaaaggagatttgattttaactttagatactgagtttataaagagcaaaggtaaaaaccttataactccagtgattgtaactaacatggatgttgtaggaaatatagatgttaaattaggaaacgttaaaaattccgagaaagctgcggatgttaccgtaaaataa

SEQ ID NO: 124600 - protein, 665 aa, Clostridium acetobutylicum ATCC 824
MGNKIFAVLQKIGKSLMLPVSVLPAAGILLRLGQPDLLNMPYVQAAGNAIFNNLPLIFAVGVAIGFSGGEGVAALAAVIGELILEAVEKTAGDTAAAALAKTAAASHHMTLAAFQKTQEYSNIVTKTTISMGVFGGIIIGLTAAILYNKFHDIKMPQVLGFFGGKRFVPIITSISALIIATIGVNIWLPIQAGINSLAAFATTSPIGPAMYAGGKRLLIPLGLHHIYYPLFLYQFGHFVSNGVTYVGDTARYFHGDPTAGNFMAAEYPILMFGLPGAALAMIAAAKKEKRKEMAGMMISAAFVAFVTGITEPIEFSFIFVAPVLFVFHVLAAFASGLITSYLHIRLGYTFSASFIDYVLGFKYAGHPLLIWLVGIGFFVLYFVVFYFTIKAMNIKTPGREDDDAEGVKKINVKGKAKAAKVLEAIGGKDNIKVLDACITRLRLNLNDPSLVDKATLKALGAAGVMTAEDSVQVVFGTEAERIKDDIKAIIQNGGYVEDDSDKEEEVQEDKQISKGAHELLSPADGEVVGIESVPDSTFAEKMLGDGFAVIPSGNEVHSPADGEVSVLFPTKHAFAITTEGGLELLIHVGIDTVALNGEGFTAHVKQGDKVKKGDLILTLDTEFIKSKGKNLITPVIVTNMDVVGNIDVKLGNVKNSEKAADVTVK

SEQ ID NO: 124601 - DNA, 1467 bp, Clostridium acetobutylicum ATCC 824
  CDS (1)..(1467): transl_table=11
ttgggtgtaacaaataagctattagcagcatgtcaaaaattaggaaagtcattaatgactcctatcgccgttttacctgctgcaggattacttttaagattagggcagcctgatcttcttaacatttcatggatgatggctgctggaaacggaattttcaacaacttagcaatgatatttgcaattggaattgcagtgggttttgctgaagaaaataatggtgttgcaggactatctgcagcagttggatatttcgttttaacaaatgtcgctacatcatttaacaagcacattgatatgggagtacttggcggtataatagtaggtattttagctggtaatctttacaataaatacaagagtactagacttccagatttcttgggcttcttcggtggaagacgtcttgttccaatactaacatcactatgttctctagtattaggactaatttccggattagtttggcctgctattcaaaatgttataaacgcttttggaaacagcgtatcacatgcaggcgttgttggttcttttatttatggacttttaaacagattacttataccaattggacttcaccatgttttgaatacattattctggtttcaatttggaaccttcaaatcagcttcaggaaaaatagtaactggagatttacatagattctttgcattagataaaactgctggaacatacatgactggattctttcctattatgatgtttgcacttccagctgcatgtttagcaatgatttcagctgctaaaaaagaaaatagaaaaaaggtttctggtatgcttcttggaatagcttttactgcttttcttacaggtgtaactgaaccaattgagtttctatttatgttcttagcaccagttctatatgttgtacatgctgttcttacaggactttctatggcaataacctcagcacttggaataaaatcaggatttaccttctccgctggatttgtagattatataatgaattttaatatatccacaaaaccaatattacttatagtgattggtatattatacgcaataatctattacttcttattcttatttacaataaaaaaattcaatctaccaactcctggtagaatggatgacttagatgacttagatgatttagatgatttagatgatttagatgatttagatgaagaacctgaaaacactccaaaaattaagtcttcaccttcaaagaattcaactcttgaagaaaaggccgttggaatattagaagctataggtaataaaaataacattcaatcattagatgcatgcgttactagaataagacttacggtaaaagacggaagcaaggttgatgaacctaaattgaaaaaattaggagctacaggaattatgaagctagatgacaagaactttcaaatagttgttggaactacagctgatataattgcaactcacattaaggaaattattaaaaaataa

SEQ ID NO: 124602 - protein, 488 aa, Clostridium acetobutylicum ATCC 824
MGVTNKLLAACQKLGKSLMTPIAVLPAAGLLLRLGQPDLLNISWMMAAGNGIFNNLAMIFAIGIAVGFAEENNGVAGLSAAVGYFVLTNVATSFNKHIDMGVLGGIIVGILAGNLYNKYKSTRLPDFLGFFGGRRLVPILTSLCSLVLGLISGLVWPAIQNVINAFGNSVSHAGVVGSFIYGLLNRLLIPIGLHHVLNTLFWFQFGTFKSASGKIVTGDLHRFFALDKTAGTYMTGFFPIMMFALPAACLAMISAAKKENRKKVSGMLLGIAFTAFLTGVTEPIEFLFMFLAPVLYVVHAVLTGLSMAITSALGIKSGFTFSAGFVDYIMNFNISTKPILLIVIGILYAIIYYFLFLFTIKKFNLPTPGRMDDLDDLDDLDDLDDLDDLDEEPENTPKIKSSPSKNSTLEEKAVGILEAIGNKNNIQSLDACVTRIRLTVKDGSKVDEPKLKKLGATGIMKLDDKNFQIVVGTTADIIATHIKEIIKK

SEQ ID NO: 124603 - DNA, 1533 bp, Streptococcus pneumoniae R6
  CDS (1)..(1533): transl_table=11
gtgagggggagttttatgtttaaagttttacaaaaagttggaaaagcttttatgttacctatagctatacttcctgcagcaggtctacttttggggattggtggtgcactttcaaacccaaccacgatagcaacttatccaatactagacaatagtatttttcaatcgatattccaagtaatgagctctgcaggagaggttgtattcagtaatttgtcactacttctctgtgtgggattatgtattggcttagcgaaacgagataaaggaaccgctgcgttagcaggagtaactggttacttagttatgactgcaacgatcaaagctttggtaaaactttttatggcagaaggatctgcaattgatactggagttattggagcattagttgtcggaatagttgccgtatatttgcacaaccgatataacaatattcaattaccttccgctttaggattctttggaggttcacgcttcgttcctattgttacatcgttctcttctatcttgattggctttgtcttctttgttatttggccacctttccaacaacttcttgtttctacaggtggatatatttctcaggcgggtccaattggaacttttctatatggatttttaatgagactttctggagcagtaggcttacatcatataatttaccctatgttttggtatactgaacttggtggtgttgaaactgttgcaggacaaacagtggttggagctcaaaaaatattttttgctcaattagccgatccggcccattctggattatttacagaaggaacaaggttttttgcaggtcgtttctcaacaatgatgttcggtttaccggctgcctgtttagcgatgtaccatagtgttcctaaaaatcgtcgtaaaaaatacgcgggtttgttttttggagttgctttaacatcttttattaccggtattacagaaccaattgaatttatgtttctattcgtcagtccggttctatatgttgttcacgcattccttgatggtgttagcttctttattgcagacgtcttaaatatttcaataggaaacacattttcaggaggtgtaatcgatttcacattatttggaattttgcaggggaacgctaagacgaattgggttcttcagattccatttggacttatttggagtgttttgtattatattatttttagatggttcattactcaattcaacgttctaacgccaggacgaggagaagaagtagattctaaagaaatttctgaatccgcagattcaacttcaaatactgcagattatttaaaacaggatagcctacaaattatcagagccttgggtggatcaaataatatagaagatgtagatgcttgtgtgacacgtttacgtgtagctgtaaaagaagttaatcaagttgataaagcacttttaaaacaaattggtgcagttgatgtcttagaagtgaagggtggcattcaagcaatctatggagcaaaagcaatcttatataaaaatagtattaatgaaattttaggtgtagatgattaa

SEQ ID NO: 124604 - protein, 510 aa, Streptococcus pneumoniae R6
MRGSFMFKVLQKVGKAFMLPIAILPAAGLLLGIGGALSNPTTIATYPILDNSIFQSIFQVMSSAGEVVFSNLSLLLCVGLCIGLAKRDKGTAALAGVTGYLVMTATIKALVKLFMAEGSAIDTGVIGALVVGIVAVYLHNRYNNIQLPSALGFFGGSRFVPIVTSFSSILIGFVFFVIWPPFQQLLVSTGGYISQAGPIGTFLYGFLMRLSGAVGLHHIIYPMFWYTELGGVETVAGQTVVGAQKIFFAQLADPAHSGLFTEGTRFFAGRFSTMMFGLPAACLAMYHSVPKNRRKKYAGLFFGVALTSFITGITEPIEFMFLFVSPVLYVVHAFLDGVSFFIADVLNISIGNTFSGGVIDFTLFGILQGNAKTNWVLQIPFGLIWSVLYYIIFRWFITQFNVLTPGRGEEVDSKEISESADSTSNTADYLKQDSLQIIRALGGSNNIEDVDACVTRLRVAVKEVNQVDKALLKQIGAVDVLEVKGGIQAIYGAKAILYKNSINEILGVDD

SEQ ID NO: 124605 - DNA, 1530 bp, Staphylococcus aureus subsp. aureus Mu50
  CDS (1)..(1530): transl_table=11
atgaaatctttatttgaaaaagcacagcagttcggcaagtcctttatgttacctatcgcaatcttaccagctgcaggtctattgttgggtatcggtggtgcattaagtaatccaaacaccgttaaagcataccctattttagatattaccttattacaaaatatttttacattaatgtcagctgcaggtagtattgttttccaaaatttaccggtcatctttgcaattggtgtcgcaatcggattatctagaagcgataaaggtactgcaggtttagctgcgctgctcggtttcttaattatgaacgcaactatgaatggcttattaactatcacgggcacattggcaaaagatcagcttgcacaaaatggacaaggcatggtgctcggtatacaaacggttgaaaccggtgtttttggcgggattatcacaggtattatgaccgcaatacttcacaacaaatatcacaaagtggtattaccaccgtatttaggtttctttggtggctctagatttgtccctattgtcacagcatttgccgcaatctttttaggtgtattgatgtttttcatttggccaagcatacaagccggcatttatcatgttggtggatttgtaacgaaaacaggtgccatcggtacttttgtttatggcttcatcttaagattgttaggtccactcggtttacaccatattttttacttaccgttttggcagacggcacttggtggtactttagaagtcaaagggcacttagttcaaggtacgcagaacatcttctttgctcaacttggtgatccagatgtgacgaagtattattcaggtgtgtcacgctttatgtcaggccgttttattacgatgatgttcggcttatgtggtgccgcacttgcaatttatcacacagctaaacctgaacataaaaaagttgtcggcggtttaatgttatccgctgcactcacttcatttttaacaggtattaccgaacctttagagtttagtttcttgtttgtcgcacctattctttatgtaatccatgccttctttgatggattagcatttatgatggcagacattttcaacattacaattggtcaaaccttcagtggaggctttatcgatttcttactctttggtgtgctacaaggtaatagtaaaacaaactacctatacgtcatacctattggaattgtgtggttctgtttgtattacatcgttttcagattcttaattacgaaatttaatttcaaaacacctggtcgagaagataaagctgcagcacaacaagttgaggctactgaaagagcacaaactattgttgctggtttgggaggcaaagataacattgaaatcgttgactgttgtgcaacgagactacgcgtcacacttaatcaaaatgacaaagtcgataaagtattactcgaaagtactggtgccaaaggtgtaatccagcaaggcactggtgtgcaagtaatttatgggcctcacgttacagttatcaaaaatgaaattgaagaattgctcggggattaa

SEQ ID NO: 124606 - protein, 509 aa, Staphylococcus aureus subsp. aureus Mu50
MKSLFEKAQQFGKSFMLPIAILPAAGLLLGIGGALSNPNTVKAYPILDITLLQNIFTLMSAAGSIVFQNLPVIFAIGVAIGLSRSDKGTAGLAALLGFLIMNATMNGLLTITGTLAKDQLAQNGQGMVLGIQTVETGVFGGIITGIMTAILHNKYHKVVLPPYLGFFGGSRFVPIVTAFAAIFLGVLMFFIWPSIQAGIYHVGGFVTKTGAIGTFVYGFILRLLGPLGLHHIFYLPFWQTALGGTLEVKGHLVQGTQNIFFAQLGDPDVTKYYSGVSRFMSGRFITMMFGLCGAALAIYHTAKPEHKKVVGGLMLSAALTSFLTGITEPLEFSFLFVAPILYVIHAFFDGLAFMMADIFNITIGQTFSGGFIDFLLFGVLQGNSKTNYLYVIPIGIVWFCLYYIVFRFLITKFNFKTPGREDKAAAQQVEATERAQTIVAGLGGKDNIEIVDCCATRLRVTLNQNDKVDKVLLESTGAKGVIQQGTGVQVIYGPHVTVIKNEIEELLGD

SEQ ID NO: 124607 - DNA, 2067 bp, Staphylococcus aureus subsp. aureus Mu50
  CDS (1)..(2067): transl_table=11
atgtttaagaaattgtttggacaattgcaacgtatcggtaaagcattaatgttacctgttgcgattttaccagcagctggtattttattagcgtttggtaacgcaatgcacaacgaacaattagtagaaattgcaccatggttaaaaaacgatatcattgtaatgatttcgtcggtcatggaagcagcaggacaagttgtatttgataacttgccattattatttgcagttggtacagcacttggattagcaggaggagacggtgttgcagcattagcagcgctagtaggttacttaattatgaatgcaacaatggggaaagtgttgcacattacaattgatgacattttctcatatgccaaaggggcaaaagaattaagtcaagcagcgaaagaaccagcacatgctttagtattaggtattccaacgttacaaacgggtgtgtttggtggtattatcatgggtgctttagccgcatggtgttacaacaaattttataatattacactaccaccatttttaggattctttgcaggtaaacgatttgtaccgattgtgacatcggtcgtagcaatcgcaacaggtgtgcttttaagctttgcgtggccaccaattcaagatggattaaatagtttatcgaatttcttattaaataaaaatttaacattaacaacgtttatattcggtattattgaacgctcattaattccatttggtttacatcatattttctattcaccgttctggtttgaattcggaagttatacaaatcacgcaggtgaattagttcgtggtgaccaacgtatttggatggcacaattgaaagatggcgtaccatttactgctggtgcatttactactggtaaatatccatttatgatgtttggtttaccagcggcggcatttgctatttataaaaatgcacgaccagaacgcaaaaaagtcgtgggtggtttaatgttatcagcaggattaactgcatttttaactggtatcactgagccattagaattttcattcttatttgtagcaccagtactttatggaattcacgtattattagctggtacatcattcttagtaatgcatttattaggcgttaaaattggtatgacattctcaggtggtttcatagattatattttatatggtttattaaactgggatcgttcacacgcattattagttattccagtcggtattgtatatgctatcgtgtattacttcttattcgactttgcaattcgtaagtttaaattgaaaacaccaggtcgtgaagatgaagaaactgaaattcgtaactctagtgtcgcaaaattaccatttgatgtcttagatgcaatgggtggaaaagaaaacattaaacatttagatgcatgtattacacgtctgcgcgtagaagtggttgataaatcaaaagtagatgtagcaggtattaaagctttaggcgcatcaggtgtattagaagttggaaacaatatgcaagctatctttggtccaaaatcagatcaaattaaacatgatatggccaagattatgagtggtgaaattacgaaaccaagtgaaacgacagtgactgaagaaatgtcagatgaaccagttcacgtagaagcacttggaacaacagacatctatgcaccaggtgtcggtcaaatcattccattatcagaagtacctgatcaagtattcgctggtaaaatgatgggtgatggtattggctttatccctgaaaaaggtgaaattgtagcaccgtttgatggtacagtgaaaacaatcttccctacgaaacatgcgataggattagaatctgaaagtggcgtcgaagtacttattcatattggtatcgatacagtgaaactgaatggtgaaggattcgaaagtctgattaacgttgatgaaaaagtaacacaagcccaaccattaatgaaagtgaatttagcatacttgaaagcacacgcaccaagcatcgttacaccaatgattattacaaatcttgaaaataaagaacttgtcattgaagatgtacaagatgctgatccaggtaagctaattatgacagtcaaataa

SEQ ID NO: 124608 - protein, 688 aa, Staphylococcus aureus subsp. aureus Mu50
MFKKLFGQLQRIGKALMLPVAILPAAGILLAFGNAMHNEQLVEIAPWLKNDIIVMISSVMEAAGQVVFDNLPLLFAVGTALGLAGGDGVAALAALVGYLIMNATMGKVLHITIDDIFSYAKGAKELSQAAKEPAHALVLGIPTLQTGVFGGIIMGALAAWCYNKFYNITLPPFLGFFAGKRFVPIVTSVVAIATGVLLSFAWPPIQDGLNSLSNFLLNKNLTLTTFIFGIIERSLIPFGLHHIFYSPFWFEFGSYTNHAGELVRGDQRIWMAQLKDGVPFTAGAFTTGKYPFMMFGLPAAAFAIYKNARPERKKVVGGLMLSAGLTAFLTGITEPLEFSFLFVAPVLYGIHVLLAGTSFLVMHLLGVKIGMTFSGGFIDYILYGLLNWDRSHALLVIPVGIVYAIVYYFLFDFAIRKFKLKTPGREDEETEIRNSSVAKLPFDVLDAMGGKENIKHLDACITRLRVEVVDKSKVDVAGIKALGASGVLEVGNNMQAIFGPKSDQIKHDMAKIMSGEITKPSETTVTEEMSDEPVHVEALGTTDIYAPGVGQIIPLSEVPDQVFAGKMMGDGIGFIPEKGEIVAPFDGTVKTIFPTKHAIGLESESGVEVLIHIGIDTVKLNGEGFESLINVDEKVTQAQPLMKVNLAYLKAHAPSIVTPMIITNLENKELVIEDVQDADPGKLIMTVK

SEQ ID NO: 124609 - DNA, 1749 bp, Caulobacter crescentus CB15
  CDS (1)..(1749): transl_table=11
atgaggtctccgctcgagatcctgcagccgctgggccgggccctgatgctgccgatcgcggtgctgccggtggcggcgctgctcctacgcatcggccagccggacctgctgggcgcgccggccctggcggcggccacccacgggatgtcgctgtcggtggccaacaccttcggcgcggccggcggggcgatcttcgccagccttggcctgatcttcgccatcggcgtggcggtgggcctggcccgcgagaaccacggcgccgccggcctggcgggcgtggtctgctatgtcatcgccaccaagggggtggaggcgctgctggtcgccccgcccgaggtggcggccaaggcggtcgagggggccaaggatctcgccatagccgcctggaaggccaaggagatcggcaagctgtcgatcccggtgggcatcctctcgggcgtgatcagcggcgcgctgtacaaccgctacagtaccatccagctgcccgagtacctggccttcttcggcggtcggcggttcgtgccgatcgtggcgggcctggccggcgtcgtcctggccctgctgttcggcgcgttctggagcacgctggaggccggggtcgacgggctcagcggcctggtcaccgcgtcgggcgatctgggcctggtcgtctatggcctgctcaatcgcctgctgatcgtcacgggcctgcaccacatcctcaacaatgtggtctggttcatcctgggcgacttcaacggggtcaccggcgacctcaaccggttcgcggccggggacaagaccgccggggcgttcatgagcgggttcttcccagtgatgatgttcggcctgccggccgcgtgcctggccatgctgcacaccgcgcggcccgagcgtcgcaaggcggtggcggggatgctgggctcgctggccctgacctcgttcctgacaggcgtgaccgagccgatcgagtttacgttcatgttcctggcgccggtgctgttcgccatccacgcgctgctgacgggcctgtcgatggctctgatgaacatgctggacgtcaagctgggctttgggttctcggcgggtctgttcgactatgtgctgaacttcaacaaggctacgcgcccgctgctgctgatcccggtggggctggtctatggcgcgctctattacggggtcttccggttcgcgatcctgcgctttgacctgaagacccccggccgcgaggacgaggcgccgccctccgcccaggcggtgaccaccggcggcgggcgcggggccgacatgctggcggcgctgggcggtgcggccaatctggtcagcgtcgatgcgtgcaccacccgtctgcggctgatcgtggtcgaccaggggctggtcaatgaaccggccctcaaggcgctgggcgcccggggcgtcgtccggccctccgacaaggccctgcaggtggtgctggggcccatcgccgacaccgtcgccggcgagatccggcacgccatcagcgcgccgcccgcgccggctcccgcgccggcccccgatgtctcccaggcggccaaggccctcctggccgccctcggcggcgccgacaacctccgcgacctctccgtccacgccagccgactgcgcgtcgtcctcaacgacccagaacgcgtcgatcaagccgcccttcacaccgcaggcgtgcgcggctttgccgccgtcgcgcccggcgccgtccacatcatcatcggcccccacgccgagcggatcgcggaggtgcttcgaccctag

SEQ ID NO: 124610 - protein, 582 aa, Caulobacter crescentus CB15
MRSPLEILQPLGRALMLPIAVLPVAALLLRIGQPDLLGAPALAAATHGMSLSVANTFGAAGGAIFASLGLIFAIGVAVGLARENHGAAGLAGVVCYVIATKGVEALLVAPPEVAAKAVEGAKDLAIAAWKAKEIGKLSIPVGILSGVISGALYNRYSTIQLPEYLAFFGGRRFVPIVAGLAGVVLALLFGAFWSTLEAGVDGLSGLVTASGDLGLVVYGLLNRLLIVTGLHHILNNVVWFILGDFNGVTGDLNRFAAGDKTAGAFMSGFFPVMMFGLPAACLAMLHTARPERRKAVAGMLGSLALTSFLTGVTEPIEFTFMFLAPVLFAIHALLTGLSMALMNMLDVKLGFGFSAGLFDYVLNFNKATRPLLLIPVGLVYGALYYGVFRFAILRFDLKTPGREDEAPPSAQAVTTGGGRGADMLAALGGAANLVSVDACTTRLRLIVVDQGLVNEPALKALGARGVVRPSDKALQVVLGPIADTVAGEIRHAISAPPAPAPAPAPDVSQAAKALLAALGGADNLRDLSVHASRLRVVLNDPERVDQAALHTAGVRGFAAVAPGAVHIIIGPHAERIAEVLRP

SEQ ID NO: 124611 - DNA, 1542 bp, Salmonella typhimurium LT2
  CDS (1)..(1542): transl_table=11
atgaaaagattcaaccttctgcaaatgttacaaagcatcgggcgatcgttaatgatccccattgccatgctgcctgccgccggtattttgctggcttttggtgttagctttcaggatcccaatattgtcgccagcctgccgtttctcggcactgacgggctggttcacgtgctgaagctgatggcggaagcgggcagtgcgattttcgccaacctgccgctgctgtttgcggtcggcgtggcggtgggacttagtgacgatcagggcattgccgggctgtcggcgatcgccgggtttttgattatgaacgtcaccatcggccagtttctggggatcacgcccgaatcggtggcgcaggtgcgtgactacacgatggtgctgggcatcccttcgctgcagaccggcgtgtttggcggcatcattatcgggattatcgccgcctggctgtataaacgctattaccgcatccagcttccttcatggctggagttcttctccggcaagcgatttgtgccgatagtgacctccttcgccgcgctgtttgtcgggctggtgatggcggtggtctggccgccggttcagcatctgattaatggcctgtcgaataccatgacggtgcaggggccgggcgtgtccgccttcctgttcggttttgtcgagcggctgctgatcccgtttggtcttaaccatgtctggtggccgacgttctggctgcagtttggcgagtacgtgaacaaagccgggcaggtggtgcatggcgaccagcttatcttctttgcccagttgaaagatcaggtgccgattaccgccggaacctttatggccgggctgacgccgatcaagatgttctgtattccggcgattgcgctggcgatctaccgctgcgccagcccggaaaacatagcgcgtgtgaagggcattatgctctctggcgcgatcacttccatcgtctgcggtatcaccgagccgattgagttctccttcctgtttgttgcacccgtgctgtatggcattcacgccgtcctggcggggctggtgttcctgctgatggagtggttcagcgtgcacatcgggctctctttctccggcgggcttatcgactatctcttctttggcgttctgccgcgagcgcctcactggtacatggtattcccggtcgggctggtgatgggcgcggtgtactacgtcctgtttacctttgccatccgtcgctggaatttgctgacgccgggccgtgaagtcgaagaaaccgctgtggcgcaggaaagcgaacagaacgacctggtgagcggcatcattctggcctatggcggattggggaatatgaccagcatcgaagcctgcatgtcacgtctgcgcattgacgtgacggataagacgctggtggacaaagcgctgctgaaacagcttggcgcggcgggcgtcgttgaggtcgggaacaacattcagagcgtctttggcatgaaatccgaccggctgaaagaggcgatccgcgcgattaaagcgcatccggtttccggacattgtgaacccatacactaa

SEQ ID NO: 124612 - protein, 513 aa, Salmonella typhimurium LT2
MKRFNLLQMLQSIGRSLMIPIAMLPAAGILLAFGVSFQDPNIVASLPFLGTDGLVHVLKLMAEAGSAIFANLPLLFAVGVAVGLSDDQGIAGLSAIAGFLIMNVTIGQFLGITPESVAQVRDYTMVLGIPSLQTGVFGGIIIGIIAAWLYKRYYRIQLPSWLEFFSGKRFVPIVTSFAALFVGLVMAVVWPPVQHLINGLSNTMTVQGPGVSAFLFGFVERLLIPFGLNHVWWPTFWLQFGEYVNKAGQVVHGDQLIFFAQLKDQVPITAGTFMAGLTPIKMFCIPAIALAIYRCASPENIARVKGIMLSGAITSIVCGITEPIEFSFLFVAPVLYGIHAVLAGLVFLLMEWFSVHIGLSFSGGLIDYLFFGVLPRAPHWYMVFPVGLVMGAVYYVLFTFAIRRWNLLTPGREVEETAVAQESEQNDLVSGIILAYGGLGNMTSIEACMSRLRIDVTDKTLVDKALLKQLGAAGVVEVGNNIQSVFGMKSDRLKEAIRAIKAHPVSGHCEPIH

SEQ ID NO: 124613 - DNA, 1470 bp, Fusobacterium nucleatum subsp. nucleatum ATCC 25586
  CDS (1)..(1470): transl_table=11
atgtttagttatttacaaaaaattggtaaagcacttatggttccagtggcagttttgccagcagcagctataatgttaggaataggttattggatagacccaagtggttggggagctaatagccaattagcagcattcttaataaaagcaggtgcagcaatattagataatatgccaatattatttgctgttggtgttgcttatggattatcaaaggataaagatggagcagcagctcttgcaggacttgttgcatttgaaatagttacaactttattgtcaacaggagctgtatcacaaataatgggtatcccacaagaagaagttcatgcggcatttggaaaaattaacaatcaatttataggtatactttgtggagtaatatcaggagagttatataataaattccataaaattgaattacctagatttttagcattttttagtggaaaaagatttgtccctattataacttctgttgtaatgatagttgtttcatttattttaacatatatatggccagtaatttatggagcattagtgacttttggaacaagtattgcaaaacttggtccagttggagcaggaatttatggtttctttaatagattattgataccagtagggttacaccatgctgtaaactctgtattttggttcaatgttgcaggaataaatgatataggaagattctggggaagtccagcagcagcttatgctgacttaccagaaattttgcaaggaacatatcatgttggaatgtatcaagcaggattcttcccaataatgatgtttggacttttaggagcttgtgttgcctttattcaaacttcaaaaccagaaaatagaactaaaatattttctataatggttgctgctggatttacaagtttcttaacaggagtaacagaaccaatagaatttgcatttatgtttgttgcaccagtactttatttattacatgcactacttacaggagtttcattattcttatcagcatcatttaactggatggcaggatttagtttttcaggaggatttatagatttcttcctatcattaaaaaatccaaatgcaaataatccatttatgctaatagttttaggtttagtattctttgtgatttattactttgtattcctatttgttattaaagcatttgacttaaaaacaccaggaagagaagaaagtgaagaagaaaaagcagaagctataaaagttaaaactacaaattctgaattagcagaatcattagtaggtttattaggtggagcagataatatagttgaagtggataactgtactacaagacttagattaaaagttaaagatagtgctaatgttaaagaaggagaaattaaaaaattagttccaggagttttaaaaccttcaaaagaaacagtacaggttataataggaccacatgttgaatttgttgctactgaattaaaaagaatattagaaagatag

SEQ ID NO: 124614 - protein, 489 aa, Fusobacterium nucleatum subsp. nucleatum ATCC 25586
MFSYLQKIGKALMVPVAVLPAAAIMLGIGYWIDPSGWGANSQLAAFLIKAGAAILDNMPILFAVGVAYGLSKDKDGAAALAGLVAFEIVTTLLSTGAVSQIMGIPQEEVHAAFGKINNQFIGILCGVISGELYNKFHKIELPRFLAFFSGKRFVPIITSVVMIVVSFILTYIWPVIYGALVTFGTSIAKLGPVGAGIYGFFNRLLIPVGLHHAVNSVFWFNVAGINDIGRFWGSPAAAYADLPEILQGTYHVGMYQAGFFPIMMFGLLGACVAFIQTSKPENRTKIFSIMVAAGFTSFLTGVTEPIEFAFMFVAPVLYLLHALLTGVSLFLSASFNWMAGFSFSGGFIDFFLSLKNPNANNPFMLIVLGLVFFVIYYFVFLFVIKAFDLKTPGREESEEEKAEAIKVKTTNSELAESLVGLLGGADNIVEVDNCTTRLRLKVKDSANVKEGEIKKLVPGVLKPSKETVQVIIGPHVEFVATELKRILER

SEQ ID NO: 124615 - DNA, 1350 bp, Thermoanaerobacter tengcongensis MB4
  CDS (1)..(1350): transl_table=11
atgcttccagtagctgtattgcctgcagcagcattacttttaaggcttggtgcgcctgatgttttcaatatcccatttattatgcaggcaggtgcagcagtatttgataatttgcctttaatatttgctgttggtatcgctataggctttgccgaaggggatggagtagcagctttagcagcagctgtagggtatttcgtgctaacaaaaggtgctactacaataaacaaagatataaacatgggagttttaggcggtatcttaatgggtataatagctggatacctttataataagtaccatgacacaaaacttcccgatttcctgggattttttggcggcaagaggtttgtacctattgtgacggcatttgcagcgattgtattagctctcataatgggatatgtatggccgcctatacagaatggcatctatgccgtaggtgaatggattataggagcaggagctttgggagtattcgtgtatggagtattgaacagattgctcattccttttggactgcaccacgttataaacagccttgtgtggtttgtgtttggaacttttaagacgcctgctggtaaaattgtgacaggagacttaaacaggttttttgcgggagacccgacggcaggaatttttatggcaggcttttacccaataatgatgttcggacttccagcagcagcattggctatgtgggcagcagctaagccagagcagagaaaagttgtatctggtgtgtttataagcgctgctttgacatctttcttgacagggattacagaacccattgaattttccttcatgtttttagcgccggtgctttatgtaatacatgcccttttgacaggtctttcactcgctgtaacttacgtgctcgggataaagaatggatttggcttttcagcaggactcattgactacattttaagctatggaattgccacaaagcctctattgttagtagtaataggagtaatttacggagttgtgtactatgtaattttctactatgttataactaagttcaacctacctacacctggaagattagaggaagaagctcaagaccagtacagagatatgtctaaatcagaaataagcgatgtagcagcacaatacgtggaggtattgggaggttctgacaatattgaatctttagaagcctgcattaccaggttgcgccttactgtaaaagacgatacaatagtagatgatgagaaattgaaaaagttaggtgcaactggtgtaatgaggatgggcaaaaatgctcttcaagtgattgtgggtactaaagcggatttgattgctcaagagatgaaaaagcatatgaagaaaaaatcttaa

SEQ ID NO: 124616 - protein, 449 aa, Thermoanaerobacter tengcongensis MB4
MLPVAVLPAAALLLRLGAPDVFNIPFIMQAGAAVFDNLPLIFAVGIAIGFAEGDGVAALAAAVGYFVLTKGATTINKDINMGVLGGILMGIIAGYLYNKYHDTKLPDFLGFFGGKRFVPIVTAFAAIVLALIMGYVWPPIQNGIYAVGEWIIGAGALGVFVYGVLNRLLIPFGLHHVINSLVWFVFGTFKTPAGKIVTGDLNRFFAGDPTAGIFMAGFYPIMMFGLPAAALAMWAAAKPEQRKVVSGVFISAALTSFLTGITEPIEFSFMFLAPVLYVIHALLTGLSLAVTYVLGIKNGFGFSAGLIDYILSYGIATKPLLLVVIGVIYGVVYYVIFYYVITKFNLPTPGRLEEEAQDQYRDMSKSEISDVAAQYVEVLGGSDNIESLEACITRLRLTVKDDTIVDDEKLKKLGATGVMRMGKNALQVIVGTKADLIAQEMKKHMKKKS

SEQ ID NO: 124617 - DNA, 1650 bp, Streptomyces coelicolor A3(2)
  CDS (1)..(1650): transl_table=11
atgcagaagaccaaggccgcactctgggaattcctccaggggctcggcaagacgttcatgctcccggtggccctgctcgcgttctgcggcatcatgctgggcatcggctcctcgctgtcgagtgacgcggtcactgacaacgttgccttcctgaagggcgagggcttccacctcgtcttcacctggatggccaacacgggcctggtcgccttcaccttcctgcccgtcctcttcgccatggcgatcccgctcggcctcgcccgcgaggacaagggcgtggccgcgttctccggtttcgtcggcttcgtcgccatgaacctcgcggtgaacttctacctcaccgccaagggcgtcgacttcgaggacgagaaggcgatcgagcactacggcatagccgacgtgctgggcgtgcagtccatcgacacgggactgctcggcgccgtggccgttggcatcgttgtcagcctgctccaccggcgcttccgcacccagcggatgcccgacgcgctggccttcttcggcgggctgcgcttcgtcccgatcgtctcggccctggtcctgagcgtgctcggtctgctcatcccgctggtgtggccgaccttcaacggctggatcagcgcggtcggccgcggcatcgggcacacgggcgtcttcggaccgttcttcttcggcatgggcgaagtactgctgcgcccgatcggcctgcaccacatcctcgtcgccatgttccgcttcacggacgtcggcggctcgggaaccgtctgcggcgaccacgtctccggcgcactgaacctgttctacgcccagctggactgctcggcggcaccaggctccgccgtcaccgacgccacgcacttcctctcccagggcaagatggcggcctacctgggcggcctgccgggcgccgcgctcgcgatgtaccactgcgcgaggcgccgtatgcggccggagatcaaggccctgctcgtgtccggtgtggtggcctgcgtggtcggcggcatcacggagccgctggagttcctgttcctgttcgtcgccccgtggctgtacctcgtccacgcggtcctggtgggactgggcttcctcacggcggccgtgctcggcgtgttcatcggcaacacggacggcaacgtcatcgactggctcgtcttcggtgtgctccagggctcgacgaccaagtggtatctggtgccggtgatcgcggcggtgtggttcgccgcgtactacttcctgttccgctgggccatcacccgcttcgacctcaagacgcccggccgggaggacccgccggcggacgacgaccacgacgagcacgacgagcacgacggtgcgcatgacgcggaacacgcggaggagcaggtcagagcggctcctgagccggcgcgcgagctggtcgccgggaagtacgacgcggccgccatgctcgacgcgatcggcggcgccggcaacatccggtccctggacaactgcatcacccgcctgcgcatgacggtggcggacgccgaagcggtggacgaggcccggctgaagaagctgggggccgtgggcgtcgtcaagctcgacgggcacaacgtccaggtcgtcatcggtccgcaggtgcagtccgtgaaggacgccatcgcgacgatggtcccggcgggccggccgtga

SEQ ID NO: 124618 - protein, 549 aa, Streptomyces coelicolor A3(2)
MQKTKAALWEFLQGLGKTFMLPVALLAFCGIMLGIGSSLSSDAVTDNVAFLKGEGFHLVFTWMANTGLVAFTFLPVLFAMAIPLGLAREDKGVAAFSGFVGFVAMNLAVNFYLTAKGVDFEDEKAIEHYGIADVLGVQSIDTGLLGAVAVGIVVSLLHRRFRTQRMPDALAFFGGLRFVPIVSALVLSVLGLLIPLVWPTFNGWISAVGRGIGHTGVFGPFFFGMGEVLLRPIGLHHILVAMFRFTDVGGSGTVCGDHVSGALNLFYAQLDCSAAPGSAVTDATHFLSQGKMAAYLGGLPGAALAMYHCARRRMRPEIKALLVSGVVACVVGGITEPLEFLFLFVAPWLYLVHAVLVGLGFLTAAVLGVFIGNTDGNVIDWLVFGVLQGSTTKWYLVPVIAAVWFAAYYFLFRWAITRFDLKTPGREDPPADDDHDEHDEHDGAHDAEHAEEQVRAAPEPARELVAGKYDAAAMLDAIGGAGNIRSLDNCITRLRMTVADAEAVDEARLKKLGAVGVVKLDGHNVQVVIGPQVQSVKDAIATMVPAGRP

SEQ ID NO: 124619 - DNA, 2028 bp, Oceanobacillus iheyensis HTE831
  CDS (1)..(2028): transl_table=11
atgtttaagaaggcatttggtctattacagaagataggtaaagcacttatgttgccagttgcattattaccagtcgctgggttgttgctaggtcttggtaacgcagtacagcagaatacagtgttagagtatcttccattcttacatatggagtggattcagttaattgctacagttatggaagatgctggtggtattatttttgataatttaccattgatatttgctattggtgtatcgatagggcttgcaagtgatggagctgcggggctagctgcattagtcggatatttagtcttaaatcaagttatgggatcttggattggtgtaacttctaaaatgattgaatctgaccctagttttgcatctgttttaggtatcccaactttacaaacaggtgtattcggaggaattattgtcggactaattgctgccttttgttataaccgatttcatgatattgaaatgccttctttcttaggtttttttgctggaaagcgatttgttcctatagctactgctgggtgttcatttgtaataggtatattgctcatgtttatttggccgccggtacaagatgcgatgaatagtgcatcatattggttaattgaagaaggtacatatgtagcagtcttcttatttggatttattaaacgattattaattccgttcggacttcatcatatttttcacgcacctttttggtatgaatttggatcattcgagactgaagctggtaatattgtaagaggggatatggcgattttttttgctcaattaaaagatggagtagaattcacagctggtcactttatggctggggaattcccaatcatgatgtttggtttacctgccgcagctctagcaatgtaccatgctgctaagccagaaaaaaagaaattagttgcaggtttacttgtatcaggagcactaacatctttcttaacaggaattacagaacctcttgagttttcttttatgtttttatcaccaattttatttttgatccatgcacttttagatggtttatcttttgttttgatgacatattttcatgtgaatataggatttactttctcaggaggagctattgactttgtgctttttggtattctgccaggacaagaaccgtggtggataacgattatacttgggttattttttgcgataatatattattttctattccgttacttcattaaaaagtttaatttactaacgccaggtagagaagaatcagatgatcataaatatagtcctagttctgaaaaaagcgacttagcgtttgacgtagtagaagcgataggtggattacaaaatattactcatttggatgcttgtattacaagattgcgggtatctgtcgattctattcaaaaagtaaataaggttagattaaaaaaaataggagcatcaggagtcttagtggtgggaaataacgttcaagcaatatttggacctcgctccgagacgataaaaggacaaatacaggatattattttaggtaaggtacctcgactaggacaagagtttgaatatcctgttgtagaggagcctatatccgttaatgatgaaataatcgtatcaccattaactggacaaatgataccgataacagatgtgtctgacccagtattttctggtaaattgatgggagaaggttttgccatcattccggaagatggaacgattgtttctcctgtggatggggaaatcattcatatttttccgaccaatcatgcaattggagtccaatcagaggaagggacagaaatattaatacatgctggattggatacagttaacttaaatggaaaaggatttaatatttttgttgatgaaaatcaatttgttaaagctgggcaagcattattaaaagtagatctagactatttagaaaaacaaggattttcaacagttactcctgttgtattcacaaacatacatgatttagcttatatacatttactagaggaaaaagttgaaaaaggacaatccaatattatagccttcaaaagggtacaataa

SEQ ID NO: 124620 - protein, 675 aa, Oceanobacillus iheyensis HTE831
MFKKAFGLLQKIGKALMLPVALLPVAGLLLGLGNAVQQNTVLEYLPFLHMEWIQLIATVMEDAGGIIFDNLPLIFAIGVSIGLASDGAAGLAALVGYLVLNQVMGSWIGVTSKMIESDPSFASVLGIPTLQTGVFGGIIVGLIAAFCYNRFHDIEMPSFLGFFAGKRFVPIATAGCSFVIGILLMFIWPPVQDAMNSASYWLIEEGTYVAVFLFGFIKRLLIPFGLHHIFHAPFWYEFGSFETEAGNIVRGDMAIFFAQLKDGVEFTAGHFMAGEFPIMMFGLPAAALAMYHAAKPEKKKLVAGLLVSGALTSFLTGITEPLEFSFMFLSPILFLIHALLDGLSFVLMTYFHVNIGFTFSGGAIDFVLFGILPGQEPWWITIILGLFFAIIYYFLFRYFIKKFNLLTPGREESDDHKYSPSSEKSDLAFDVVEAIGGLQNITHLDACITRLRVSVDSIQKVNKVRLKKIGASGVLVVGNNVQAIFGPRSETIKGQIQDIILGKVPRLGQEFEYPVVEEPISVNDEIIVSPLTGQMIPITDVSDPVFSGKLMGEGFAIIPEDGTIVSPVDGEIIHIFPTNHAIGVQSEEGTEILIHAGLDTVNLNGKGFNIFVDENQFVKAGQALLKVDLDYLEKQGFSTVTPVVFTNIHDLAYIHLLEEKVEKGQSNIIAFKRVQ

SEQ ID NO: 124621 - DNA, 1593 bp, Shigella flexneri 2a str. 301
  CDS (1)..(1593): transl_table=11
atgacggcgaaaacagcaccgaaagtcacgctgtgggagttcttccagcagttaggcaaaaccttcatgttacccgtggcattattgtcgttctgcggcattatgctcggcattggtagttctcttagcagccatgatgtcataaccctgatcccggtcctgggcaaccccgtgttgcaggctatctttacctggatgagtaagattggctcgtttgcttttagtttcctgcctgtcatgttctgtatcgccatcccgctgggcctggcacgcgaaaataaaggcgtagcggcattcgctggcttcgtcggttatgcggtaatgaacctcgcggtaaacttctggttgaccaataaaggcattctgccaaccacagatgccgccgttctgaaagccaataacatccagagcattcttgggatccagtcgatcgataccgggatcctcggtgcggtgatcgccggtattatcgtctggatgctgcatgagcgtttccataatatccgcctgccggatgcgctggcattcttcggcggtacgcgcttcgtaccaattatctcctcgctggtgatgggccttgtcggcctggtgattctattagtctggccgattttcgccatgggtattagcggcttgggccatatgataaacagcgcgggtgatttcggaccgatgctgtttggtaccggtgaacgtctgctgttgccgtttggtctgcatcacattctggtggcattaattcgctttaccgacgcaggcggcacgcaggaggtctgcggtcaaaccgtcagcggcgcactgaccatcttccaggcgcaattgagttgcccgaccactcacggtttttctgaaagcgtcacgcgtttcctttcgcaaggtaaaatgcctgcgtttctcggcggtctaccaggtgcagcgttagctatgtatcactgcgcgcgcccggaaaatcgccataaaattaaaggtctgctgatttctggcctgatcgcctgcgtcgttggcggcactaccgaaccgctggaattcctgttcctgttcgtagcgccagttctgtatgtcatccacgcgctgttaaccggcctcggcttcaccgtcatgtctgtgctcggcgtcaccatcggtaataccgacggcaatatcatcgacttcgtggtgttcggtattttgcatggtctgtcaaccaagtggtacatggtgccagtggtggcggcaatctggtttgtcgtttactacgtcatcttccgtttcgctatcacccgcttcaatctgaaaaccccggggcgcgatagcgaagttgccagctcaatcgaaaaagccgttgccggtgcgccgggtaaatcaggttacaacgttcctgcaatcctcgaagcattaggcggtgccgacaatattgtcagcctcgataactgcattacccgtctgcgtttgtctgtggaagatatgtcgcttgttaatgtgcaggcactgaaggacaatcgggcaattggcgtagtacaacttaatcaacataacctgcaggttgttatcgggccacaagttcagtcagtaaaagatgaaatggccggtctgatgcatactgtccaggcataa

SEQ ID NO: 124622 - protein, 530 aa, Shigella flexneri 2a str. 301
MTAKTAPKVTLWEFFQQLGKTFMLPVALLSFCGIMLGIGSSLSSHDVITLIPVLGNPVLQAIFTWMSKIGSFAFSFLPVMFCIAIPLGLARENKGVAAFAGFVGYAVMNLAVNFWLTNKGILPTTDAAVLKANNIQSILGIQSIDTGILGAVIAGIIVWMLHERFHNIRLPDALAFFGGTRFVPIISSLVMGLVGLVILLVWPIFAMGISGLGHMINSAGDFGPMLFGTGERLLLPFGLHHILVALIRFTDAGGTQEVCGQTVSGALTIFQAQLSCPTTHGFSESVTRFLSQGKMPAFLGGLPGAALAMYHCARPENRHKIKGLLISGLIACVVGGTTEPLEFLFLFVAPVLYVIHALLTGLGFTVMSVLGVTIGNTDGNIIDFVVFGILHGLSTKWYMVPVVAAIWFVVYYVIFRFAITRFNLKTPGRDSEVASSIEKAVAGAPGKSGYNVPAILEALGGADNIVSLDNCITRLRLSVEDMSLVNVQALKDNRAIGVVQLNQHNLQVVIGPQVQSVKDEMAGLMHTVQA

SEQ ID NO: 124623 - DNA, 1500 bp, Shewanella oneidensis MR-1
  CDS (1)..(1500): transl_table=11
atggctggaaagctggaatcaactcgtcaaatccgagcgcgtcgcttaggccattttgtcacccagcaatggtttaaatttgcccagcgcttaagtcaagcgctgttaatccctattgccattttacccgccgcgggggtgatgctggggttgacggtaagcccaatcccttttatgccagaagtacttaatgtattaatgctggctgtgggtaagctgattttcgcgattatgccgattttgtttgctgtggcggtggcgattggtttttgccgagatcaggggattgcagcatttaccgcggtgtttggctatggcgtgatgacagcaaccttggccgctttagccgacctctaccaactacccactcaattagtgcttggcatggaaaccttagatacgggaattgcgggtggcatgctgattggcggcgtcacatgctttgcagtgcgttggagccagtatattcgcttgccggcgattttttccttttttgaagggcgacgcagtgcgtctttgttgattattcctttggcaatgggcttaggttatgtgctagcccatatatggccgtctttatccttattgattgagcgagtctctgactgggctgtttaccaaaagcctgcgattgcttttggcgtatatggcgcgcttgagcgattacttatccctttaggtttacaccatatttggaatgcgccgttttatttagaagtcggccaatatcagttgcaggatgcagaagtggtgcgtggtgaagtggcgcgctatttagcgggcgatccgcaagcgggaaatttagcgggtggttatctgattaaaatgtggggattaccggcagcggcgctggcgatttggcgctgcgccgataactcggagcgcaatcgtgttgcaggtattatgctctcggctgcagcagccagttggttgactggggtgactgaacccattgaatttgcctttatgtttgtggcgccgctgttgtttcttatccatgtcatgctgtcgggactggcttattttgtctgtattatgctcgatattcaccacagtattgtgttttcccatggactggtggatttcactctgttgttttctctttctcgcaatacggggtggtttgctgtgttagggccactcacagcggtgatttattacatcttgtttagaggaagtattctggcctttaatctaaaaacgccaggacgacttcaatctgatggcaccaaaggttcaaaagagagcttaagggcaatcattgcggcattaggagggcgcgataatattgtggagctcaatgcctgtttaacgcggttacgcttaagtgtacatagccctgagttagtcaataaagtgcggctcagtcagttaggcgctaagggggtgattgtgatgggcaaaggggtgcaaatagtttatggcactaaggcggaaaccctgcgtaaagtgttgcaacgctatttagatacgcggcgttatgaagtcaattgccgttaa

SEQ ID NO: 124624 - protein, 499 aa, Shewanella oneidensis MR-1
MAGKLESTRQIRARRLGHFVTQQWFKFAQRLSQALLIPIAILPAAGVMLGLTVSPIPFMPEVLNVLMLAVGKLIFAIMPILFAVAVAIGFCRDQGIAAFTAVFGYGVMTATLAALADLYQLPTQLVLGMETLDTGIAGGMLIGGVTCFAVRWSQYIRLPAIFSFFEGRRSASLLIIPLAMGLGYVLAHIWPSLSLLIERVSDWAVYQKPAIAFGVYGALERLLIPLGLHHIWNAPFYLEVGQYQLQDAEVVRGEVARYLAGDPQAGNLAGGYLIKMWGLPAAALAIWRCADNSERNRVAGIMLSAAAASWLTGVTEPIEFAFMFVAPLLFLIHVMLSGLAYFVCIMLDIHHSIVFSHGLVDFTLLFSLSRNTGWFAVLGPLTAVIYYILFRGSILAFNLKTPGRLQSDGTKGSKESLRAIIAALGGRDNIVELNACLTRLRLSVHSPELVNKVRLSQLGAKGVIVMGKGVQIVYGTKAETLRKVLQRYLDTRRYEVNCR

SEQ ID NO: 124625 - DNA, 2190 bp, Streptococcus mutans UA159
  CDS (1)..(2190): transl_table=11
atgaaaaattataaacaactttttagcttcgaattttggcaaaaattcggaaaatgtttaatggttgttattgctgttatgcctgcagcaggtttgatggtttctattgggaattcattagccttgattgaccctaaatcaacccttttagtgactgttgctaatatcattgcccaaattggttggggtgttattaacaaccttcatattttatttgctgtggctatcgggggtagctgggctaaggaacgtgcaggtggagctttcgctgcagcccttgcctttattttgattaaccttattactggtaacttttatggcatatcgcttgagatgattgcggataaaacaagttatgtacacaatatctttggcggtaagatgcacgttgctgattactttatcaatgtacttggccaacctgccttgaacatgggagttttcgttggtattatctctggtttcgttggcgcaacagcttataacaagtattataatttccgtaaacttccagatgttttatcgttctttaacggaaaacgctttgtaccttttgtcgttattgttcgttcaacaattgttgctttaattctttctgtattttggccaattgtacaatctggtattaatggttttggtatgtggattgcttcttcacaacataccgcaccgtttcttgcgccattcctttatggtactttagaacgtttactgttgccatttggtttacaccatatgttaacgattccaatgaattatacccaactcggtggtacttatgttgtcttgacaggtgctcaagcaggaaaacatgtgcttggacaagatccactttggttagcttgggtgcaagaccttatccatcttaaaggtgcaggtcatatgtctcaataccatcacttgttaacatctgtaactcctgctcgtttcaaggtaggacaaatgattggttcatcaggtattcttatgggacttacattggcgatgtaccgcaatgttgacccagataaaaaagaaaaatataaagggatgttcctttcagcagctgttgccgtattcttaacaggggtaacagaaccacttgaatacatgtttatgtttgcagctttaccgctctatcttgtttacgctgttgttcaaggtttggcctttgcatcagccgatttgattcaccttcgtgtgcattcatttggtaatattgagtttctgacgagaacgccaatggctatcaaagccggtttagctatggatattgtcaactttatcgttgtttcagttgtctttggtgttgctatgtacttcattaccaactttatgattaagaagtttaatttggcaacttcaggacgtaatggcaattatgatacaggtgatgatgcttctgacgaaacagcttcaaatagtaatgcaggaacagcaaatgctaattcacaaattgtaaaaattatcaatcttttaggtggtaaagaaaatatctctgatgttgatgcttgtatgacccgcctgcgtattactgtgaccgatgttgctaaagtgggtgatgaagctgcttggaaaaaagcaggagctatgggcttaattgtcaaaggcaatggtgttcaagccgtttatggtcctaaggcagatgtccttaaatctgatattcaggatttattagattcaggagtggacattcctaagacagatgttacagctctagaagaagataagacagcagatgtcagcttcaaaggagttacagaagaaatagcaactgtggcagatggtcaagtacttccaattacacaagtacatgacccagtcttctcacaaaaaatgatgggcgatggtttcgctgttgagccagaaaatggcaatatctactctccagtagctggtttagtaactagtgtcttcccaaccaaacatgctcttggtcttttaacggatgatggacttgaagttttagttcatgtcggtttagatactgttgctcttaatggagctccattctctgctaaggtgaaagatggccaacgtgttgcattaggagacttacttctagttgctgatttggaagctatcaaatctgcagatcgtgaaacaactgttattgttgcctttacaaatacagcagaacttaagtctgtaacgcttgagaaaacaggtcaacaagctgctaaaacagttgtcgccaaagtagaactttaa

SEQ ID NO: 124626 - protein, 729 aa, Streptococcus mutans UA159
MKNYKQLFSFEFWQKFGKCLMVVIAVMPAAGLMVSIGNSLALIDPKSTLLVTVANIIAQIGWGVINNLHILFAVAIGGSWAKERAGGAFAAALAFILINLITGNFYGISLEMIADKTSYVHNIFGGKMHVADYFINVLGQPALNMGVFVGIISGFVGATAYNKYYNFRKLPDVLSFFNGKRFVPFVVIVRSTIVALILSVFWPIVQSGINGFGMWIASSQHTAPFLAPFLYGTLERLLLPFGLHHMLTIPMNYTQLGGTYVVLTGAQAGKHVLGQDPLWLAWVQDLIHLKGAGHMSQYHHLLTSVTPARFKVGQMIGSSGILMGLTLAMYRNVDPDKKEKYKGMFLSAAVAVFLTGVTEPLEYMFMFAALPLYLVYAVVQGLAFASADLIHLRVHSFGNIEFLTRTPMAIKAGLAMDIVNFIVVSVVFGVAMYFITNFMIKKFNLATSGRNGNYDTGDDASDETASNSNAGTANANSQIVKIINLLGGKENISDVDACMTRLRITVTDVAKVGDEAAWKKAGAMGLIVKGNGVQAVYGPKADVLKSDIQDLLDSGVDIPKTDVTALEEDKTADVSFKGVTEEIATVADGQVLPITQVHDPVFSQKMMGDGFAVEPENGNIYSPVAGLVTSVFPTKHALGLLTDDGLEVLVHVGLDTVALNGAPFSAKVKDGQRVALGDLLLVADLEAIKSADRETTVIVAFTNTAELKSVTLEKTGQQAAKTVVAKVEL

SEQ ID NO: 124627 - DNA, 1581 bp, Escherichia coli CFT073
  CDS (1)..(1581): transl_table=11
atgaaacaaaagaaagcctggagtttttttcagagcctggggaaggcatttatgtatcccattgctctgctaagtgtatgtggcatgatgctagggctgggaagtggtttagccagtgatgatatggcaaagttaattccatttctggctattccaataattaaaaccatacttgatttcattgttagtcttggtttgtttgcctttgttaatttacctgtattgtttgcgatagcgattcccttaggattattaaaagataaagaggataaagcctatggtgctttttctggcttaattggttttatggcgatgcatctgggaacgaacttttatcttaaacagcacgacttattggtcgttgctgaccaaatgtcgacacatgggcaaaccatcattctggggatccagtcctacaataccagcgtgttggggggaattgttgctgggttattagtcgccagcatgtataaaaagatcgttaatttacgcattcctgaatcgttaggtttttatagcggcccacgtctggtgcctatcattacactgattgtgatgagtggatttggtctgatcattccttttatctggccgccgtttttcaatcttttcatgctcattggacactggatttcaacttccggtcctgttggttatttcttctatgcagttgccgaacgcgtgacgattccttttggcttaaaccatctggtgacgtcagttttccgctttacgccaatcggcggttcggctgtgattggtggcgaagaatattacggcaccctgaacatgtttatggcatacgtcaaagagaatgcggtcattccgctggatttggcggggaaaatggagcagggcaaactgatgattcagtatggtctggctggtgccgcgctggcgatgtatcgcactgctcatgctcaaaacagaaaggctatcaaagcattgcttatttccggggtgcttacggtgattattggcggcgtcagcgaaccgattgagtttctgttcttatttgtcagtccactgctgtttgtcttccatgcctttatgaatggattcgctaacatggttctgccatatatgggcgtgaagatgggatttactggcgatctgattcaatttattagctttggcgtattgcgtggcacaagaacaggttggccgatcgcggtgtgtgtcgaagtggcctatttcttcatttattactttgtgttccgttggactattctcaaatttaacctgatgacggtaggccgtgaagagtccagtcctgtcacgctgaacgctcatgaggatacggctatagcggatatcccaactcctgataaatcagagctgcaagcggcggagcagatggttaaggcacttggtggtaaagagaatattaagtcactggataattgcgtaactcgtttacgtttaacaatcgcagatatgggattgcttgacgaggctgcaataaaaagagccggcggaattgcggttgttaaacttgatcaaaataccctacaagtcattatcggcactaaagtcatcgccctgcgtcgggatatggataactatatggggatatactga

SEQ ID NO: 124628 - protein, 526 aa, Escherichia coli CFT073
MKQKKAWSFFQSLGKAFMYPIALLSVCGMMLGLGSGLASDDMAKLIPFLAIPIIKTILDFIVSLGLFAFVNLPVLFAIAIPLGLLKDKEDKAYGAFSGLIGFMAMHLGTNFYLKQHDLLVVADQMSTHGQTIILGIQSYNTSVLGGIVAGLLVASMYKKIVNLRIPESLGFYSGPRLVPIITLIVMSGFGLIIPFIWPPFFNLFMLIGHWISTSGPVGYFFYAVAERVTIPFGLNHLVTSVFRFTPIGGSAVIGGEEYYGTLNMFMAYVKENAVIPLDLAGKMEQGKLMIQYGLAGAALAMYRTAHAQNRKAIKALLISGVLTVIIGGVSEPIEFLFLFVSPLLFVFHAFMNGFANMVLPYMGVKMGFTGDLIQFISFGVLRGTRTGWPIAVCVEVAYFFIYYFVFRWTILKFNLMTVGREESSPVTLNAHEDTAIADIPTPDKSELQAAEQMVKALGGKENIKSLDNCVTRLRLTIADMGLLDEAAIKRAGGIAVVKLDQNTLQVIIGTKVIALRRDMDNYMGIY

SEQ ID NO: 124629 - DNA, 2346 bp, Mycoplasma penetrans HF-2
  CDS (1)..(2346): transl_table=4
atgaatattaagacatgacttcaaaaaagtaattcaactttctttaatatgtttcacttcaaaaaaggtgaaacaaaaaataaaggaaaagtaaaagatttcttttctcaactttcaagagggttaatgttgccaatagcaatattgccaattgctggattacttttgggaataggaggggcaataggtgcaaatattcctcaaacctctgatcttcaaattcttgctaatatatttaaagcaatgagtcaggtagtgtttgatagtttgccaatcttattctgtgttgcaataacaataaccttttccaaggacaggggaacagctgcattttcttcattactagcatatttagttttctgtagcattcaggttccttttattcaaaaagaaaatggtcaaattgtttctattatgtggtttcacacaaatttaaatgtagtaagaagtattactactacattgtttggattcactaatttacaaacttctatatttggaggtatacttgtaggctttttgacttcttttatttataacaaagtttcaaaaataaaattaccaacagcattagatttttttagtgggattagattagtgccaattgtactaataccagtaatttctttattagctgttctattcttaatattttgaccatgagtgggatatgtgattagtattattggtcaaaatattcaattagcaccatatggaactggtggattattatatggaatattagggcgttcattaatgccttttggtttgcatcatattccaattattttagcttatcaaacagactttggaggtgtgttatataaacaagatttattaaatgcattggtaaataatggtgtgtcaacagactcaacaatttatcaagctattaacaatgcttttccaggaactagcatagttggtgatcaaaacatatgaaattttataaattcattaagttttaattctttaccaaatgctgatggaactcaaactcctatattccaatgatttgttaaaaatcttaatgtatatgcaggtaaatatactcaggattacccaacttatatgggtgcttgtatggggattggtgttgccttaattcttgtttcaaaaaaagaaaatagaaaaagagtggcatctgtggtgggttcagcaatggcagtagctttcttaacaggaattactgaaccactagaatatactttcttattctgtgctgcaccactttactatttaatttatgtaccattatctggaatttcttacatgcttatggagttatcacaagcacatgtgggagttggatttgcaagaggatttatagatttaattatctatggagcaattcctgttgttaaaggtagtaatttctattgagcattcccaattgcaataggagaaggtttaattacaggtttctcattctatttcttaattaaaaaatttaattttagtacaccaggaagaaatgaaaataattttgaattaattactaaaagtaaatataaagaaatgaaaaatatggcttcttcatctaaaaacaagaatgaagcacctgaaagaatagcaaaactaatatatgcactaggaggtttagataacattgaaaatgttactgcttgtgcaactagattaagagttagtttaaattcttctgaattagtaaaagttaatgatttcaaatcaatgggatctaaaggagagtttttaaaagataaagcaatacaagttatttttggtggtgaggcttcaattttatctgatcaaattaatgatgtaatagaaggtaatttatctcttccaaaagatttaaaaacagaaaatactgatttaaataaacaagaaaataaagtagaaaataaaaagattattccttttaaagtttttgccccagttaatggaaaaatccaatatttagaaaatgtagatgatgatgtatttaaaaataaattaatgggtaatggagtagcaattttaccaactagcaataaagtgtactcaatattaagtaaaggaaagttagttgatatatttgatactaaacattgctacacatttgaatcagaagataaaacaaaaatattattccacataggaatagattcagtatctttatcttcaaacccatttaaacctgtttgtaaaaaagattctgatgtttctaaaaaatctttaatatctgaaatagatttaaatttattaaaaaaagctaaaagtattgcttcacctattgttcttccagaattgttagaaaatcaagaagtaaaaatcctagttaagaataatcaagtaataaaacaaggagatccaattttagaaattattgaaaaaactaaatag

SEQ ID NO: 124630 - protein, 781 aa, Mycoplasma penetrans HF-2
MNIKTWLQKSNSTFFNMFHFKKGETKNKGKVKDFFSQLSRGLMLPIAILPIAGLLLGIGGAIGANIPQTSDLQILANIFKAMSQVVFDSLPILFCVAITITFSKDRGTAAFSSLLAYLVFCSIQVPFIQKENGQIVSIMWFHTNLNVVRSITTTLFGFTNLQTSIFGGILVGFLTSFIYNKVSKIKLPTALDFFSGIRLVPIVLIPVISLLAVLFLIFWPWVGYVISIIGQNIQLAPYGTGGLLYGILGRSLMPFGLHHIPIILAYQTDFGGVLYKQDLLNALVNNGVSTDSTIYQAINNAFPGTSIVGDQNIWNFINSLSFNSLPNADGTQTPIFQWFVKNLNVYAGKYTQDYPTYMGACMGIGVALILVSKKENRKRVASVVGSAMAVAFLTGITEPLEYTFLFCAAPLYYLIYVPLSGISYMLMELSQAHVGVGFARGFIDLIIYGAIPVVKGSNFYWAFPIAIGEGLITGFSFYFLIKKFNFSTPGRNENNFELITKSKYKEMKNMASSSKNKNEAPERIAKLIYALGGLDNIENVTACATRLRVSLNSSELVKVNDFKSMGSKGEFLKDKAIQVIFGGEASILSDQINDVIEGNLSLPKDLKTENTDLNKQENKVENKKIIPFKVFAPVNGKIQYLENVDDDVFKNKLMGNGVAILPTSNKVYSILSKGKLVDIFDTKHCYTFESEDKTKILFHIGIDSVSLSSNPFKPVCKKDSDVSKKSLISEIDLNLLKKAKSIASPIVLPELLENQEVKILVKNNQVIKQGDPILEIIEKTK

SEQ ID NO: 124631 - DNA, 2310 bp, Mycoplasma penetrans HF-2
  CDS (1)..(2310): transl_table=4
atgtacattagtaatttaaaaacatttggtttagttcaagatgtaaaacaagatcataaagttagctttaaaagcaataaagtatttgcaaaaattggttcctctttcaaaaagacttttgaaagtttaggaagacttgggaaagctttattattccctattgctgttttaccaattgcagcaatattaaatagattaggtgcacaattaccaaattcagccgatactcctgaatttgctaaatttgtgcaaacattattatcagcagctggtaatactgtatttaacaacctccacattttatttgcagtaggtgtaggatttggattaactaaagataatcggggtgaagctgctttaactgcattggttggaattatcctacttggtttattaatgagtagtactggtgcagacttaccccaacaaatttatggaaaaattaaatttccaattgatcaatctttgattgatgctggaattgtctctgcagatgcaacaggttttcaagcattatttggaaacaaatatgattcaatactttcacaaaatgttttaaatggtattttatctggagtatttgttgcttgagtttacaacagatttaacaatgtagaattaccaaaagtattaggattcttttcaggaagaagattattaccagttcttattattttaggaatgatgttttatggaattatttatgcagtaattttcccttgattaggttgaattctatatcaaatttcacttggtttatcttctgccactggtaatagatgaagtaatgctagtatctcaggagtatatgcatttttaaatagattattaattccgtttggattacaccacattccaaatacattattttgatttgtattagggcaagcaccagatgcaagtgatcctagtaaatttgtatatggtgatattaatatctttttaaatggacaagcacaaggaaataatgcaggtacattccagtcaggtttttttgctagtatgatgtttggtttaccagcattggtttatgtgttttatagaaatgcagaaagtaaagaacaaaaacaaagagtattatctacttttggaccacttgctttagtttcattcttaactggaattactgaacctattgaatttgcatttatgtttgttagtccattactatatggagttcatgcattattaacaggaatattttcatttattacaggagcaatgggaatccaaattggatttggatttagtgcaggattgatagattacttattatcaattccaaaatctcttcaaattatagaagctaatagaactggaatagatgcagtatttgcaaatccaggatgattgtgagtaataggattattgtgtgcattatcttatatttttgtaggcaatctattagttaaaaaacttaacttatcagtacctggaagaggtcaaaatttaattactgaatcaatggtgaaaaaagacaatcatactgataataataaagacaataaaaaagggttatctgaaaaaactaagaaattagttttaggtttaggtggatgagaaaatattgaaaattatcaaaactgtacaacaagacttagatatgatgtaaaagacatgagtaagatagatgaagctttgctaaaagaaggaggagcaattggaactaagaaattccaagatcatcatcttcatgtaattttagggccagaagctgaacttgttaatgatgaaattattaataacaaaaacagtgatttaactttaaataatgacaataatttagttaaagaaaaagagaaacaaaaactagcattagctaaacctgttaaagttaaatctccaattagtggaactatagtatttttagaagatgttaaagatgaaacattttctttaatgggcaaaggtgttgctataatcccatctgaaaatgagtttatagcacaagacaattttgagattgagtctttcttttgaacaggacatgcttatattgcaaagattaaagatcttgatgtattagttcatattgggattgatactgtaaaaataaattcagataaaaaagaaggggataaacttgaagtcttttctactaaattaatcgataaaaagaatcataaaatttcaaaaggtgaaaagataattaaagtagattttgctaagcttaaaaaacttggatatgatcctacaactttatttattgttttaaatgaaaatttagttaacaatgaattaaatctattagttaaaaataatcaaaaagttaacaaaggtgatccactgtttgaagtgaaagcaaaatag

SEQ ID NO: 124632 - protein, 769 aa, Mycoplasma penetrans HF-2
MYISNLKTFGLVQDVKQDHKVSFKSNKVFAKIGSSFKKTFESLGRLGKALLFPIAVLPIAAILNRLGAQLPNSADTPEFAKFVQTLLSAAGNTVFNNLHILFAVGVGFGLTKDNRGEAALTALVGIILLGLLMSSTGADLPQQIYGKIKFPIDQSLIDAGIVSADATGFQALFGNKYDSILSQNVLNGILSGVFVAWVYNRFNNVELPKVLGFFSGRRLLPVLIILGMMFYGIIYAVIFPWLGWILYQISLGLSSATGNRWSNASISGVYAFLNRLLIPFGLHHIPNTLFWFVLGQAPDASDPSKFVYGDINIFLNGQAQGNNAGTFQSGFFASMMFGLPALVYVFYRNAESKEQKQRVLSTFGPLALVSFLTGITEPIEFAFMFVSPLLYGVHALLTGIFSFITGAMGIQIGFGFSAGLIDYLLSIPKSLQIIEANRTGIDAVFANPGWLWVIGLLCALSYIFVGNLLVKKLNLSVPGRGQNLITESMVKKDNHTDNNKDNKKGLSEKTKKLVLGLGGWENIENYQNCTTRLRYDVKDMSKIDEALLKEGGAIGTKKFQDHHLHVILGPEAELVNDEIINNKNSDLTLNNDNNLVKEKEKQKLALAKPVKVKSPISGTIVFLEDVKDETFSLMGKGVAIIPSENEFIAQDNFEIESFFWTGHAYIAKIKDLDVLVHIGIDTVKINSDKKEGDKLEVFSTKLIDKKNHKISKGEKIIKVDFAKLKKLGYDPTTLFIVLNENLVNNELNLLVKNNQKVNKGDPLFEVKAK

SEQ ID NO: 124633 - DNA, 1989 bp, Lactobacillus plantarum WCFS1
  CDS (1)..(1989): transl_table=11
atgaagacatattttcagaaaatcggtcagtcattgatgctaccgattgcaacgttgcccgcagcagcgattttggttgggattgggaattacctgccaaaacagtggctgtttgcaaattacttgattcagggtggtaacgttgtcctgaataacttagccttgctgtttgcagtcggcttagctatcgggatgtcagtcaataaggacggcgcggcagctattgctggtttgatcgcgtttgaagttccggtgatggtgttaaaaccagcgacattagcgacgatgctgaatgttaaagtgagtcagatcaatccagcatttagcgcgttagataacaatgtgctgattggaatcagtgctggactgattgcggctgcgctctataatcggttccacgaagtaaaattaccaatggcgctctcattctttagtggtaaacgcctagtgccaattatggctgcttttgtgatgctgattgtgacggcggtattgtaccttgtttggccgtttgtctatgatgccatcgtcctctttgcaacgggaatttcaaaattaggtttcgtgggggctggtctatatggctttttcaatcgtttattgattccgactggtttgcaccacgccttaaattccgtattctggtataacgttgcggggatcaatgatattggcaatttctgggccagccatggtgttaaaggaatcacagggatgtatgaagctggattcttcccaattatgatgtttggcttgccagctggtgcgtatgcaatttatcgtaatgcacgaccggaacgaaaaaaagaagtgggttcattgatgttagctggtgcgtttgcgtcgttctttacgggggtgaccgaaccgcttgaattttcattcatgttcgtggcatggccgctctacttattacatgccgtttttatgggactatcattaggattcgccgcgttaatgcactggaccgccagcttttcgtttagtggcgggttagtcgattatttattgagttttcggatgccgttagccaaccaaccctatatgttactggttcaagggctggtgatggccgtcatttattactttggttttgactttgcaatcaaacggtttaatttgaagacgcctggtcgtgaagttgtgtctgcagatgtcgatggggtgggtgcacctgctagtccagcggtggccgttgcagcaacggatgataagtatatgcgccaagcaaagcaaatttatgcagctattggtggtcatgacaatattagtgtgatcaacaattgtacgacgcggctgcggttacaacttaaggatacggaaaaagtcgatcagccggccgtaatggctgctggcgtgcctggtttgaacgtactggatgttcataacattcacattgtgatcggcacggaagtccagttcgtcgcggaggctttacaaaaattattttctggtcaggtggcgacgaccccggcatctgatgctgaatcaaaggccccggttgaaccgcaaactgctactgtaacggaagcgccggtgacaacgattttgcgggcaccggcaacgggacaattaatgccgattagtacggttgcggatgagacgtttgctggtaaactcttaggtgatggttacgctgttgaacccgaagatggtgaagtcgttgctccggttagtgggacagtgacaagtgtctttccgaccaaacacgctatcggtttgaagacgacgagtggtttagaagtcttattacacatggggatcaataccgtggaaatgaatggtacgccgttcaagttacacgtggcaacgggtgatgaaattgcggccggtactgcggtagcgacggttgacttggctgctatcaagtcagccggtaaagcgacaaccatgatggtcgttatcaccaatatggatcacgttaacaaactaacccttaatccaactggtcatgtgactagcggtgatttgattggcgcagctgaataa

SEQ ID NO: 124634 - protein, 662 aa, Lactobacillus plantarum WCFS1
MKTYFQKIGQSLMLPIATLPAAAILVGIGNYLPKQWLFANYLIQGGNVVLNNLALLFAVGLAIGMSVNKDGAAAIAGLIAFEVPVMVLKPATLATMLNVKVSQINPAFSALDNNVLIGISAGLIAAALYNRFHEVKLPMALSFFSGKRLVPIMAAFVMLIVTAVLYLVWPFVYDAIVLFATGISKLGFVGAGLYGFFNRLLIPTGLHHALNSVFWYNVAGINDIGNFWASHGVKGITGMYEAGFFPIMMFGLPAGAYAIYRNARPERKKEVGSLMLAGAFASFFTGVTEPLEFSFMFVAWPLYLLHAVFMGLSLGFAALMHWTASFSFSGGLVDYLLSFRMPLANQPYMLLVQGLVMAVIYYFGFDFAIKRFNLKTPGREVVSADVDGVGAPASPAVAVAATDDKYMRQAKQIYAAIGGHDNISVINNCTTRLRLQLKDTEKVDQPAVMAAGVPGLNVLDVHNIHIVIGTEVQFVAEALQKLFSGQVATTPASDAESKAPVEPQTATVTEAPVTTILRAPATGQLMPISTVADETFAGKLLGDGYAVEPEDGEVVAPVSGTVTSVFPTKHAIGLKTTSGLEVLLHMGINTVEMNGTPFKLHVATGDEIAAGTAVATVDLAAIKSAGKATTMMVVITNMDHVNKLTLNPTGHVTSGDLIGAAE

SEQ ID NO: 124635 - DNA, 1572 bp, Vibrio parahaemolyticus RIMD 2210633
  CDS (1)..(1572): transl_table=11
gtgaatattctcggatacgcgcagaagttaggtaaagctcttatgcttcctatcgcgactttgccaatcgcaggcttgttactgcgcttgggccaacctgatgtatttgacatcgcgtttatggcacaagccggtaactcaatcttctctaaccttccattgttatttggtctaggtatcgcgatcggcttatcaaaagacggtcaaggtgctgcaggtcttgctggtgcggttgcgtacttcgtacttactgcgacagcgtcaacaatcgatgcgtcagttaacatgtcattcttcggtggtatcatcgcaggtatcattgctggccattcttacaacgctttccatgctacacgtcttcctgagtggctagcattcttctctggtaagcgcctagtgccaattatggctggtttgttcgccctagttgctggtgctgtttcaggtattgtatggccaacaatccaaggtggtctagatgcacttgctcacggtatctctacttctggcgcaatcggtcagtttgtatacggtacgcttaaccgtgctctaattcctgtaggtctacaccacgtactgaactctttcttctggtttggtatgggttcttgtcaagaagtgctagtttctggcgcaacagctgctggtcaagctcttcctgcactacaacaactttgtgttgacccagctctagctaagactcttgttgctggtcaaactcacacatttgaattcgctaactcagtaactccagaaattacagcaactgttaaagaagtaactgaaacagttaaatctggtgacctacaccgtttcttcggcggcgataagagcgctggtgtattcatgaacggtttcttcccagtaatgatgttcggcctaccaggtgcagcacttgctatgtacctagcggctcctgttgagaaacgtagccaagttgggggggcattgttctctgttgcattctgttcattcctaactggtatcacagagcctctagagttcatgttcgtattcctagctcctgctctatacgcgattcacgcagtgttcactggtctatcgctagttgttgctaacatgcttggtacgctacacggcttcacattctctgctggtctaattgactacttgttgaactacggtctagcaactaaacctctactactaggtgcagttggtcttggcttcggtgctctttacttcttcacattcagcttcgcaatccgcgcgtttaacctaaaatcgccaggccgtgaagatgatgatagccaagcagcagcaccagcaggtgaagcaaaaagtggtgacctagctcgtcaatacctaaaagcgctaggtggtcatgacaacctaacttcaattgacgcatgtatcactcgtctacgtctaactctgaaagatcgttcagtagctgatgaagaagtgttgaagaaactaggtgcgaaaggtgttgttaaactaggtgaaaacaaccttcaagttatccttggtcctctagcagaaatcgttgctggtgaaatgaaagcaatcggcgcaaacgaagacctatcgaatgtaaaactaccataa

SEQ ID NO: 124636 - protein, 523 aa, Vibrio parahaemolyticus RIMD 2210633
MNILGYAQKLGKALMLPIATLPIAGLLLRLGQPDVFDIAFMAQAGNSIFSNLPLLFGLGIAIGLSKDGQGAAGLAGAVAYFVLTATASTIDASVNMSFFGGIIAGIIAGHSYNAFHATRLPEWLAFFSGKRLVPIMAGLFALVAGAVSGIVWPTIQGGLDALAHGISTSGAIGQFVYGTLNRALIPVGLHHVLNSFFWFGMGSCQEVLVSGATAAGQALPALQQLCVDPALAKTLVAGQTHTFEFANSVTPEITATVKEVTETVKSGDLHRFFGGDKSAGVFMNGFFPVMMFGLPGAALAMYLAAPVEKRSQVGGALFSVAFCSFLTGITEPLEFMFVFLAPALYAIHAVFTGLSLVVANMLGTLHGFTFSAGLIDYLLNYGLATKPLLLGAVGLGFGALYFFTFSFAIRAFNLKSPGREDDDSQAAAPAGEAKSGDLARQYLKALGGHDNLTSIDACITRLRLTLKDRSVADEEVLKKLGAKGVVKLGENNLQVILGPLAEIVAGEMKAIGANEDLSNVKLP

SEQ ID NO: 124637 - DNA, 1431 bp, Vibrio parahaemolyticus RIMD 2210633
  CDS (1)..(1431): transl_table=11
atgtttaagaacctttttgctaacctgcaaaaagttggtaaggcgctgatgcttccagtatcagttttaccagttgcaggtattttactaggtgttggtgctgcccacctaagctttattccagagatcgtttctaaccttatggaacaagctggtggttcagtattcggccaaatggcacttctattcgctgtaggtgttgcactaggcttcacaaacaacgatggtgtagctggtctagctgctattgttggttacggcatcatgactgcaacactaggtgttatggctggcgtaatgggcgttgaaaaaatcgatacaggtgtactcggtggtatccttgtcggtggtgttgctgcttgggcattcaaccgtttcttcaaaattcaacttccagaataccttggcttctttgctggtaagcgtgcagtgccaatcatcactggttttgcagcgatcatccttggtgtaattctttctgtaatttggccaccaatcggcggtgcaatctctgcattctctgactgggctgcgcaccaaaatccacaactagcattcggtatctacggtgttgttgagcgttcactaatcccattcggtctacaccacgtttggaacgtacctttcttcttcgaagctggtacttgtgttaacgcagcaggcgaaactcaacacggcgttctaacttgttacctagttgctgatgaagcatctcgtgctgctggtaatggcttcggtcagctagcgggtggttacatgttcaagatgttcggtctaccagctgcagcaatcgcaattgctcactgtgctaaacctgaaaaccgcgcgaaagtaatgggtatcatggcgtcagctgctctgacttcattcctaacaggtattactgagccaatcgaattctcattcctattcgttgctcctgttctatacggtatccacgctctactagctggttctgcatacatcgttgctaacactctaggctttgtacacggtacatctttctctcacggtctgatcgacttcctagttctatctggtaacgctcagaagatgggtctgatgatcgctgttggtctagtttacgcagtaatctactacgtagtgttccgtgcagtaatcacagctcttgacctaaaaactcctggtcgtgaagatgaaactgaagaagctgcggcgacttctagttcagacatggcaggtgagcttgttgcagcattcggcggcaaagcaaacatcactggtctagacgcatgtatcactcgtctacgtgttgctgttgcagatactgctgcggttgaccaagacaaactaaaacaacttggcgcagctggtgttgtagttgttgctggtggtgttcaggctatcttcggtactaagtctgacaacctaaaaactgaaatggatgagtggattcgtaaccacggttaa

SEQ ID NO: 124638 - protein, 476 aa, Vibrio parahaemolyticus RIMD 2210633
MFKNLFANLQKVGKALMLPVSVLPVAGILLGVGAAHLSFIPEIVSNLMEQAGGSVFGQMALLFAVGVALGFTNNDGVAGLAAIVGYGIMTATLGVMAGVMGVEKIDTGVLGGILVGGVAAWAFNRFFKIQLPEYLGFFAGKRAVPIITGFAAIILGVILSVIWPPIGGAISAFSDWAAHQNPQLAFGIYGVVERSLIPFGLHHVWNVPFFFEAGTCVNAAGETQHGVLTCYLVADEASRAAGNGFGQLAGGYMFKMFGLPAAAIAIAHCAKPENRAKVMGIMASAALTSFLTGITEPIEFSFLFVAPVLYGIHALLAGSAYIVANTLGFVHGTSFSHGLIDFLVLSGNAQKMGLMIAVGLVYAVIYYVVFRAVITALDLKTPGREDETEEAAATSSSDMAGELVAAFGGKANITGLDACITRLRVAVADTAAVDQDKLKQLGAAGVVVVAGGVQAIFGTKSDNLKTEMDEWIRNHG

SEQ ID NO: 124639 - DNA, 1443 bp, Vibrio parahaemolyticus RIMD 2210633
  CDS (1)..(1443): transl_table=11
atgtttgcaagtatatttggacaactacaaaaaatagggcggtcgttgatgctgcctgtagcggtgttaccggtggccggcttgatgctgggtattggtaatgcgggttttgggtttattccagacgcggtcaacaaagtgatgctcgccgccggcgaaggcgtattcggcaacatgcagttgatgtttgcggtcggtgtggcgctcgggttatcaaaaggcaatgacggtgcggctgcgctcgctggcttagttggcctaattattatgaacgcatcgctcggtattgtgacaggcctgcgcggcctagaaactgacgccaccataatgggcgttgagacgctacaaaccggggtgtttggcggcatctttatcggtgcggtcgcggcaatcatgtacaaccgcttctacaacatcaaactgccggaatatttgggcttcttcgcgggtaagcgatttgtgcccattgtcaccggtttatcggcgatcgtcgttggtgcgattctcgcgtttgcatggccacctgtcggacaacttcttgatgcattctctcattgggcagcgtaccaaaaccctgttctcgcgtgggcggtttacggcgtgggcgaacgttctttactcccggttggtttgcaccacatctggaatgcgccgttcttctttgaagtcggcagctatgtagacccagaaaccggcaaagagtttaccggtgagctcactcgcttcttcgcgggcgataaaaccgcaggttatctgtctggtggctttatgtattccatgtgggcactaccagcagcggcactggcgatttaccactgcgcgtctccagagcgcaagaaaatcgtcggcggtttgatgatgtctgcggcgttgacctcttggttaactggtatcactgagccaatcgaatttaccttcttattcgtcgcgccagtgctgtacgtaatccatatcttcctaactggtattgcatttgcgatcaccgcatttttggaaatcaaacacagtactgactttgcgcacggcgcgatccagttcttcctttactacccaatgtcaagcaacgcgtggatgttcatcatcatcggtccaatctgggcgacgctgtactatggcttgttccgcttcctaattgtgaagttggatctgaaaacgccgggccgtgaaaccgacattgcagaagtgaagattgccggacagcctgatgaaatcgcagtggatgtggtggcagctctgggcggtaaagccaacatcaaatcagtcgatgcgtgtatcacccgtctgcgcgtctcggtgaaagacattgccaacgttgatgttgctaagctaaaagcacttggcgcgcgagatgtgttagtgattggcgacagtttacaagcgattttcggcacgcagtctgactcaattaagtcagaagtgcacagcgtactcgctgcctcctga

SEQ ID NO: 124640 - protein, 480 aa, Vibrio parahaemolyticus RIMD 2210633
MFASIFGQLQKIGRSLMLPVAVLPVAGLMLGIGNAGFGFIPDAVNKVMLAAGEGVFGNMQLMFAVGVALGLSKGNDGAAALAGLVGLIIMNASLGIVTGLRGLETDATIMGVETLQTGVFGGIFIGAVAAIMYNRFYNIKLPEYLGFFAGKRFVPIVTGLSAIVVGAILAFAWPPVGQLLDAFSHWAAYQNPVLAWAVYGVGERSLLPVGLHHIWNAPFFFEVGSYVDPETGKEFTGELTRFFAGDKTAGYLSGGFMYSMWALPAAALAIYHCASPERKKIVGGLMMSAALTSWLTGITEPIEFTFLFVAPVLYVIHIFLTGIAFAITAFLEIKHSTDFAHGAIQFFLYYPMSSNAWMFIIIGPIWATLYYGLFRFLIVKLDLKTPGRETDIAEVKIAGQPDEIAVDVVAALGGKANIKSVDACITRLRVSVKDIANVDVAKLKALGARDVLVIGDSLQAIFGTQSDSIKSEVHSVLAAS

SEQ ID NO: 124641 - DNA, 1434 bp, Salmonella enterica subsp. enterica serovar Typhi Ty2
  CDS (1)..(1434): transl_table=11
atgtttaagaatgcatttactaacctgcaaaaggccggtaaatcgctgatgctgccggtatccgtactccctatcgcaggtatcctgctgggtgtcggttccgctaacttcagctggctgccagccgttgtatcgcacgttatggcagaagcgggcggatctgtttttgccaatatgccgctgattttcgctatcggcgtggcgttgggcttcaccaacaacgacggcgtttcggctctggcggcggtagtagcgtatggcatcatggtgaaaaccatggctgtggttgcgccgctggttctgcatttacctgctgaagagatcgccgctaaacaccttgctgatacgggtgttctcggggggattatctccggtgcgatcgcagcgtatatgtttaaccgcttctaccgtatcaaactgcctgagtatctgggcttctttgcgggcaaacgcttcgtgccgatcatttcgggtctggccgctatttttaccggtgtggtgctgtctttcgtatggccgccagtcggtacggctatccaggcgttctcgcagtgggcggcttatcagaacccggttgtcgcgtttggcatttacggttttatcgagcgttgcctggtgccgtttggtctgcatcatatctggaacgttcctttccagatgcagatcggcgaatacaccaacgcagcgggtcaggtattccacggcgacattccgcgctatatggcgggcgacccgacggcgggtatgttgtctggcggcttcctgttcaaaatgtacggtctgccggctgcggccattgctatctggcactctgctaaaccggaaaaccgcgcaaaagtgggcggtatcatgatttccgccgcgctgacctcgtttttgacgggtattaccgagcctatcgagttctccttcatgttcgtggcgccgatcctgtacattattcacgcgattctggcaggtctggcattcccgatctgtatcctgctggggatgcgtgacggtacgtcgttctcccacggtctgatcgactttatcgtgctgtccggtaacagcagcaaattgtggctgttcccgattgttggcgccggttatgcgattgtgtactacaccgtgttccgcgtgctgatcaaagcgctggatctgaaaacgccgggccgtgaagactctactgatgacgcaaaagcgggcgctaccagcgaaatggcgccggctttgattgcggcgtttggcggtaaagagaacatcactaacctggatgcctgtatcacgcgtctgcgcgtgagcgtagccgatgtagcgaaagtggatcaggctggcctgaagaaactgggcgcggcaggcgttgtcgtcgcgggttccggcgttcaggctattttcggtacgaaatccgataacctgaaaacggaaatggatgagtacatccgtaacagctaa

SEQ ID NO: 124642 - protein, 477 aa, Salmonella enterica subsp. enterica serovar Typhi Ty2
MFKNAFTNLQKAGKSLMLPVSVLPIAGILLGVGSANFSWLPAVVSHVMAEAGGSVFANMPLIFAIGVALGFTNNDGVSALAAVVAYGIMVKTMAVVAPLVLHLPAEEIAAKHLADTGVLGGIISGAIAAYMFNRFYRIKLPEYLGFFAGKRFVPIISGLAAIFTGVVLSFVWPPVGTAIQAFSQWAAYQNPVVAFGIYGFIERCLVPFGLHHIWNVPFQMQIGEYTNAAGQVFHGDIPRYMAGDPTAGMLSGGFLFKMYGLPAAAIAIWHSAKPENRAKVGGIMISAALTSFLTGITEPIEFSFMFVAPILYIIHAILAGLAFPICILLGMRDGTSFSHGLIDFIVLSGNSSKLWLFPIVGAGYAIVYYTVFRVLIKALDLKTPGREDSTDDAKAGATSEMAPALIAAFGGKENITNLDACITRLRVSVADVAKVDQAGLKKLGAAGVVVAGSGVQAIFGTKSDNLKTEMDEYIRNS

SEQ ID NO: 124643 - DNA, 1569 bp, Enterococcus faecalis V583
  CDS (1)..(1569): transl_table=11
atggcagtaaagaaaaagaaagcgactttctgggagtttttccaaggattaggtaaaacgtttatgttgccagtggctttattagcttttatggggattttgttgggattaggaagttctttttccagtgaatccatgattgaaacgatcccgtttttaggaaagcccgcagtgaaaattattttccaatttatgtcgacaattggtggttttgcgtttgcctatttacctgtcatgtttgcaatggccattccgttggggttagttcggaaagaaaaaggaattgctgcgttttcaggtttcgtaggctatacggtgatgaatttagcgattaatttctatttagtgcagacgaatcgcctcgtggatcctgagcagttgcgggaagccggccaaggaatggtttttgggattcaaacgattgaaatgggtgttcttggtggaattatcgctgggcttattgtctataagttgcataatcgattttatacggtgcaactaccagatagttttgccttcttttctggcgcacggtttgtgccaattattacttcattagtaatggcattcgtgggcttagtaattccgttagtttggccacttttcgcgctaatgattatggcgattggccaacttatccaacgttctggtatttttgggccttttctgtttggttcaggggaacgtctactgttaccgtttgggttgcatcatattttggtttccatgattcgttttactgaagcagggggttcagcggtggtggctggcaaagaagtgtttggcgcgttaaatattttctatgcagaattgcaaaataatttaccgatttcaccaagcgcaacagctttcttgtcacaagggaaaatgccgacctttatttttggcttaccagcggcgtcacttgcgatgtatcatactgcagctccggcgaatcgacataagattaaaggcttactcctttcgggtgtaattgctacggctatcactggcattacagaaccaattgaatttttattcttatttattagtccattattatggctgtttcatgtcattatgactggtctaggtttcatggtaatggctttattaggtgttgtgattgggaacactgatggcgggctactggactttgttatttttggcttgttacaaggaacttatacaaaatggtggtgggttctcattgtcggcgctatctggtttgttgtttattatttcgtctttaaaacagtcattgtaacctttgatttaaaaacacctggacgagacaaggtcttagatgagactgaatataccgatcaagaagttcaatataagaaaacgggtggctatgatgcgcctgggattttagcggctttgggtgggcaagagaatattcaagctattgataattgcattacgcgtttacgtttagtgttagcagatgctaataaagtagatgatgacaaattaaagcaattaggggctttaggcgttgtacatttagatgcgcagaatgtacaagtgattatcggaaccaaagtgacaacggtccgtaatcaattagagatgattttaggttag

SEQ ID NO: 124644 - protein, 522 aa, Enterococcus faecalis V583
MAVKKKKATFWEFFQGLGKTFMLPVALLAFMGILLGLGSSFSSESMIETIPFLGKPAVKIIFQFMSTIGGFAFAYLPVMFAMAIPLGLVRKEKGIAAFSGFVGYTVMNLAINFYLVQTNRLVDPEQLREAGQGMVFGIQTIEMGVLGGIIAGLIVYKLHNRFYTVQLPDSFAFFSGARFVPIITSLVMAFVGLVIPLVWPLFALMIMAIGQLIQRSGIFGPFLFGSGERLLLPFGLHHILVSMIRFTEAGGSAVVAGKEVFGALNIFYAELQNNLPISPSATAFLSQGKMPTFIFGLPAASLAMYHTAAPANRHKIKGLLLSGVIATAITGITEPIEFLFLFISPLLWLFHVIMTGLGFMVMALLGVVIGNTDGGLLDFVIFGLLQGTYTKWWWVLIVGAIWFVVYYFVFKTVIVTFDLKTPGRDKVLDETEYTDQEVQYKKTGGYDAPGILAALGGQENIQAIDNCITRLRLVLADANKVDDDKLKQLGALGVVHLDAQNVQVIIGTKVTTVRNQLEMILG

SEQ ID NO: 124645 - DNA, 2169 bp, Enterococcus faecalis V583
  CDS (1)..(2169): transl_table=11
atgaaaaaaatgtttagttttgagttttggcaaaaattcggaaaagctttaatggtcgttgtggcagtaatgcccgcagcgggtttaatgattagtattgggaaatcgcttcctttaatcgatcctaatttaggcttgttagtaacaacaggcggagttctggagagtatcggttgggcaattattggcaacttacatttactatttgcgttagcaataggtggcagttgggccaaagatcgtgcaggtggcgcatttgcagcggggatttcttttgttttaatcaaccgtattactggagccatttttggtgtaacaaatgaaatgttggctgatgaacaagctttcacgcataccttatttggcaccaagattatggtgaagggattctttacaagtgtcttagaagctccggcattaaatatgggtgtttttgtagggattattgctggttttgtcggtgcgatggcttacaacaagtattacaattatcggaaattaccagatgcgctatcattttttaatggtaaacggtttgtcccatttgtcgttattttgtggtcaacaattgtctcaattgcattagcacttatttggccaaatattcaagcgggaattaataattttgggttatggattgcgcaatctcaagatagtgcacctattttagcgccattcttatatggaacgttggaacgtttgttattaccttttgggttacatcatatgttgacgattccaatcaactatacacaattaggtggaacgtatgaaattttatctggcgcacaagctggaacccaagtctttggtcaagatcctttatggttggcttgggcaacagacttagtgaatcttaaaggcgctggtgatatgagcaagtatcagtttgtcttagaaaattggacaccagctcgattcaaagtaggccaaatgattggttcttcagggattttaatggggatggctttggcgatgtatcgtaatgtcgatgcagataaaaaagctaaatataaatcaatgtatttttctgctgctttagctgttttcttaactggtgtgacagagccgctagaattcatgtttatgtttgctgcagtgccgctttatgtaatttatgcggtgatccaaggtgctgcttttgcaatggctgatattttaccattgcgtgtgcattcgtttggaaatattgaattgttaacaagaacaccgctagcaataaaagctggtttaggtggcgatttaatcaattttgttttaatggtcatcatttttggtgttgtcacttatttcttagcgaatttcttaattaaaaaatttaattacgcaacacctggaagaaatggaaactatgacaatgataacagcgaagaaatcgcatctggcgcggctggttcaggcgtcgtcgatcagcaaatcgcgcaaattgtctacttacttggtggtaaacaaaatatcaaagaagttgatgcgtgtatgacacgcttacgtgtcagtgtaaaggatcgagaaaaagtcggttcggaagaggcgtggaaacgggcaggcgcaatgggcttgattgtgaaagataatggcgttcaagccgtttatggaccaaaagccgatgttttaaaatccgatattgaagatttactagcttccggcgttgacattccagaaccagttatagcagaaagtacagcaggagtgccaacaacgaatttcttaggtaagaaaaaagatttcgtggctgtagcgacaggggaagttattccaatggcgcaagtcaatgatcctgtcttttcacaaaaaatgatgggggatggatttgcagttaagcctctagaaggagaggtggtggcaccaatttcggggaaagttctaagtgttttcccaagcaaacatgcgattgggctacaaacagaagaaggtattgaagtacttgtccatatgggaattgatacagttgaaatggcaacacctgcttttgaatcttttgttaaagaaggacaatcattgaaagctgggacgaaactagctaaaatgaatttggatgtgattgaacaagctggcaaagaaacaacgattattgtcgcctttacaaacagcgacaaagtggaacaagtagttattaatcaactaggaaccaccactgcgggaactgtgatcggacagattgaaatttaa

SEQ ID NO: 124646 - protein, 722 aa, Enterococcus faecalis V583
MKKMFSFEFWQKFGKALMVVVAVMPAAGLMISIGKSLPLIDPNLGLLVTTGGVLESIGWAIIGNLHLLFALAIGGSWAKDRAGGAFAAGISFVLINRITGAIFGVTNEMLADEQAFTHTLFGTKIMVKGFFTSVLEAPALNMGVFVGIIAGFVGAMAYNKYYNYRKLPDALSFFNGKRFVPFVVILWSTIVSIALALIWPNIQAGINNFGLWIAQSQDSAPILAPFLYGTLERLLLPFGLHHMLTIPINYTQLGGTYEILSGAQAGTQVFGQDPLWLAWATDLVNLKGAGDMSKYQFVLENWTPARFKVGQMIGSSGILMGMALAMYRNVDADKKAKYKSMYFSAALAVFLTGVTEPLEFMFMFAAVPLYVIYAVIQGAAFAMADILPLRVHSFGNIELLTRTPLAIKAGLGGDLINFVLMVIIFGVVTYFLANFLIKKFNYATPGRNGNYDNDNSEEIASGAAGSGVVDQQIAQIVYLLGGKQNIKEVDACMTRLRVSVKDREKVGSEEAWKRAGAMGLIVKDNGVQAVYGPKADVLKSDIEDLLASGVDIPEPVIAESTAGVPTTNFLGKKKDFVAVATGEVIPMAQVNDPVFSQKMMGDGFAVKPLEGEVVAPISGKVLSVFPSKHAIGLQTEEGIEVLVHMGIDTVEMATPAFESFVKEGQSLKAGTKLAKMNLDVIEQAGKETTIIVAFTNSDKVEQVVINQLGTTTAGTVIGQIEI

SEQ ID NO: 124647 - DNA, 2064 bp, Bacillus cereus ATCC 14579
  CDS (1)..(2064): transl_table=11
atgtttaagaagatctttggtgttcttcaaaaagtcggaaaagcgttaatgcttccagtagcgattttaccggcggcaggtattttacttggatttggtaatgcatttcaaaatccacagttaacaaatgttattcctgctttaaaagcagattggttcgtaatggttgcaaaaattatggaacaatctggtgatattattttcgctaaccttgcattattattcgcagttggggtagcaattggtttagctggtggagacggagtagctggtttagcagcattcgtcggctacttaattatgaacaaaacgatgagtgtgttcttagaagtagataagctagtgaaagtaacaagttctggagcagacccagtaaaaattggatttgcagatccagcgtatgcaaacgtattaggtattccaacgctacaaacaggggtatttggtggtattatcgtcggtatagtagcggcatattgctataataaatacttcaacattgaattaccatcatacttaggtttctttgcaggtaagcgtttcgtaccgatcgcaactgcaacattctctttaatagtaggtattatcatgtgcttcgtttggccatacattcaaggtggcttaaacacgttctcacatcaaatgattgatgcaaatagaacaatcgcagcatttatattcggtttaattgaacgttcattaattccatttggattacatcacattttctattcaccgttctggttcgaattcggtcagtatacaaatgcagctggcgaattaatccgtggtgaccaaaaaatctttatggcacagttaaaagacggtgtagaattaacagcagggacatttacaactggtaagtatccgttcatgatgttcggtcttccagcagcagctttagcaatgtaccatgaagcacgtccagaaaataaaaaattagcagcaggtattttaggttctgcagcattaacatctttcttaacaggtattacagagccacttgaattttcattcttattcgtagcgccagtattattcggaattcacgctgtatttgctggtctatcatttatgacaatgcaaattttaggtgttaaaattggtatgacattctctggtggtttaattgacttcctattattcggtgtactaccaggccgtacagcatggtggtgggtaattattgttggtcttgtactagcagttatttactacttcggattccgctttgcaattcgtaaatggaatctaaaaacacctggtcgtgaagtggcaaatgcaaatgacggcgcaggaaaagcagaagcaggcgaactccctcgtgaagtattagtagcacttggtggtaaagaaaacattgcttctttagatgcttgtattactcgtttacgtgttcaagttaacgaacaaaagaatgtaaacaaagaccgcttaaaagaacttggagcagctggtgtacttgaagttggaaataacattcaagctattttcggaccgaaatctgacacattaaaatcacaaattcatgatattatgtcaggtcgtacacctcatgttgaaaaagaagatcctgtaaaagtggaagaaactcctcaaaaagttgatgaaaatgaaacaattgtatcaccaatcgaaggaaaaatcttaccaattacagaagtacctgaccaagtattctcaggaaaaatgatgggagacggatttgcaattgagccaactgaaggaacagtagtttctccagtgaacggtgagattgtcaatgtattccctacaaaacatgcgattggtattcaatctgaaggcggaaaagaaattttaattcacttcggtattgatactgtaaaattaaatggtgaaggttttgaagcgcttgtagcacaaggcgacaaggtgaaacaaggccaaccattattaaaagtagatcttgcatttgtaaaagaaaatgcaccatctatcattacaccaattgtctttacaaacttacaacaagggcaacaagtcgaattgaaaaaagatggaaatgttaagaagggcgaaaccgctattattgacattcagtag

SEQ ID NO: 124648 - protein, 687 aa, Bacillus cereus ATCC 14579
MFKKIFGVLQKVGKALMLPVAILPAAGILLGFGNAFQNPQLTNVIPALKADWFVMVAKIMEQSGDIIFANLALLFAVGVAIGLAGGDGVAGLAAFVGYLIMNKTMSVFLEVDKLVKVTSSGADPVKIGFADPAYANVLGIPTLQTGVFGGIIVGIVAAYCYNKYFNIELPSYLGFFAGKRFVPIATATFSLIVGIIMCFVWPYIQGGLNTFSHQMIDANRTIAAFIFGLIERSLIPFGLHHIFYSPFWFEFGQYTNAAGELIRGDQKIFMAQLKDGVELTAGTFTTGKYPFMMFGLPAAALAMYHEARPENKKLAAGILGSAALTSFLTGITEPLEFSFLFVAPVLFGIHAVFAGLSFMTMQILGVKIGMTFSGGLIDFLLFGVLPGRTAWWWVIIVGLVLAVIYYFGFRFAIRKWNLKTPGREVANANDGAGKAEAGELPREVLVALGGKENIASLDACITRLRVQVNEQKNVNKDRLKELGAAGVLEVGNNIQAIFGPKSDTLKSQIHDIMSGRTPHVEKEDPVKVEETPQKVDENETIVSPIEGKILPITEVPDQVFSGKMMGDGFAIEPTEGTVVSPVNGEIVNVFPTKHAIGIQSEGGKEILIHFGIDTVKLNGEGFEALVAQGDKVKQGQPLLKVDLAFVKENAPSIITPIVFTNLQQGQQVELKKDGNVKKGETAIIDIQ

SEQ ID NO: 124649 - DNA, 1593 bp, Shigella flexneri 2a str. 2457T
  CDS (1)..(1593): transl_table=11
atgacggcgaaaacagcaccgaaagtcacgctgtgggagttcttccagcagttaggcaaaaccttcatgttacccgtggcattattgtcgttctgcggcattatgctcggcattggtagttctcttagcagccatgatgtcataaccctgatcccggtcctgggcaaccccgtgttgcaggctatctttacctggatgagtaagattggctcgtttgcttttagtttcctgcctgtcatgttctgtatcgccatcccgctgggcctggcacgcgaaaataaaggcgtagcggcattcgctggcttcgtcggttatgcggtaatgaacctcgcggtaaacttctggttgaccaataaaggcattctgccaaccacagatgccgccgttctgaaagccaataacatccagagcattcttgggatccagtcgatcgataccgggatcctcggtgcggtgatcgccggtattatcgtctggatgctgcatgagcgtttccataatatccgcctgccggatgcgctggcattcttcggcggtacgcgcttcgtaccaattatctcctcgctggtgatgggccttgtcggcctggtgattccattagtctggccgattttcgccatgggtattagcggcttgggccatatgataaacagcgcgggtgatttcggaccgatgctgtttggtaccggtgaacgtctgctgttgccgtttggtctgcatcacattctggtggcattaattcgctttaccgacgcaggcggcacgcaggaggtctgcggtcaaaccgtcagcggcgcactgaccatcttccaggcgcaattgagttgcccgaccactcacggtttttctgaaagcgtcacgcgtttcctttcgcaaggtaaaatgcctgcgtttctcggcggtctaccaggtgcagcgttagctatgtatcactgcgcgcgcccggaaaatcgccataaaattaaaggtctgctgatttctggcctgatcgcctgcgtcgttggcggcactaccgaaccgctggaattcctgttcctgttcgtagcgccagttctgtatgtcatccacgcgctgttaaccggcctcggcttcaccgtcatgtctgtgctcggcgtcaccatcggtaataccgacggcaatatcatcgacttcgtggtgttcggtattttgcatggtctgtcaaccaagtggtacatggtgccagtggtggcggcaatctggtttgtcgtttactacgtcatcttccgtttcgctatcacccgcttcaatctgaaaaccccggggcgcgatagcgaagttgccagctcaatcgaaaaagccgttgccggtgcgccgggtaaatcaggttacaacgttcctgcaatcctcgaagcattaggcggtgccgacaatattgtcagcctcgataactgcattacccgtctgcgtttgtctgtggaagatatgtcgcttgttaatgtgcaggcggtgaaggacaatcgggcaattggcgtagtacaacttaatcaacataacctgcaggttgttatcgggccacaagttcagtcagtaaaagatgaaatggccggtctgatgcatactgtccaggcataa

SEQ ID NO: 124650 - protein, 530 aa, Shigella flexneri 2a str. 2457T
MTAKTAPKVTLWEFFQQLGKTFMLPVALLSFCGIMLGIGSSLSSHDVITLIPVLGNPVLQAIFTWMSKIGSFAFSFLPVMFCIAIPLGLARENKGVAAFAGFVGYAVMNLAVNFWLTNKGILPTTDAAVLKANNIQSILGIQSIDTGILGAVIAGIIVWMLHERFHNIRLPDALAFFGGTRFVPIISSLVMGLVGLVIPLVWPIFAMGISGLGHMINSAGDFGPMLFGTGERLLLPFGLHHILVALIRFTDAGGTQEVCGQTVSGALTIFQAQLSCPTTHGFSESVTRFLSQGKMPAFLGGLPGAALAMYHCARPENRHKIKGLLISGLIACVVGGTTEPLEFLFLFVAPVLYVIHALLTGLGFTVMSVLGVTIGNTDGNIIDFVVFGILHGLSTKWYMVPVVAAIWFVVYYVIFRFAITRFNLKTPGRDSEVASSIEKAVAGAPGKSGYNVPAILEALGGADNIVSLDNCITRLRLSVEDMSLVNVQAVKDNRAIGVVQLNQHNLQVVIGPQVQSVKDEMAGLMHTVQA

SEQ ID NO: 124651 - DNA, 1689 bp, Chromobacterium violaceum ATCC 12472
  CDS (1)..(1689): transl_table=11
gtgagtactcttaacaagtttgcaggcatccagcaactggggcgcgccctgatgctgccgatcgccgtgctgccggtggccggcctgttgctgcgtctgggccagcccgacctgttggacatcaagttcatggcgcaggcgggcgacgccatcttcggcaatctggctctgatcttcgccatcggcgtggcggtcggcttcgccaaggatggcaacggcacttccggcctggccggcgccatcggctacctggtgctgaccgcggtgctgaaagtgatcgacgacaagatcaatatgggcgtgctgtccggcatcctgtccggtctgatcgcgggctatctgtacaaccgctacaaggacatcaagctgcccagctacctggccttcttcggcggcaagcgcttcgtgcccatcgtcaccggcttcggcatgctggtgctcggggcggtcctcggctatgcctggccgccggtgcagcatggcatcgacgccgtgggcaagtggctgatcgccaccggcgaggtgggcgtgttcttctacggcgtgctcaaccgcatcctgatcgtcaccggcctgcaccatatcctgaacaatatcgtgtggttccaggtcggcgatttcaccaacgccgccggcaaggtggtgcatggcgacctgacccgcttcttcgccggcgacaagacggccggcatgttcatggccggcatgttcccggtgatgatgttcggcctgccggccgcctgcctggcgatgtaccgcaccgccaagccggagaaccgcgccgccgtcggcggcctgctgttctccatggccctgaccgcgatgctgaccggcgtcaccgagccggtggagttcgccttcatgttcctggccccggtgctctacggcatccacgcggtgctgaccggcgtttccatggccgtcatgcagatgctgggcgtgaagctgggcttcggcttctccgccggcctgttcgactatgtcatcaactatggtatcgccaccaagccgctgctgctgctgccggtgggcgcggtctacttcgccgtctactatgcgctgttcgtgttcttcatccgcaagttcgatctgaagacgccgggccgcgaggatgccgccgtgacggtcgccgaggtcaaagccggcactagccgcgcgcgcgccttcatcgatgcgctgggcggcgccgccaacctgaagtcggtggacgcctgcaccacccgcctgcgcctgcaggtggccagcaatgaaaaggtcaacgaggccgcgctgaaggcgctgggctcgcgcggcctgatcaagccggccgccggcagcgtgcaggtggtgctgggaccggaggcggacctgatcgccgacgagatccgcggcgcgctgggcaacgccgccgccgagccgcaagcggccgtttcggctgtggccgagacgctggcgtccgcggcggcggccggtggcgccagcatcgacaaggcgcgctggctggccgcgctgggcggtgccggcaatgtgcgcaagatcgaggcggtggccggcagccggctgcgggtggaggtggccgacgccgcgctggtcgaccaggccgcgctgcaggcgctgggcgccagcggcgtcaccgcggtgtcctccagcctgctgcacgtggtgctgcaagtcgacgccgcgccgtacgccgcggttttgcaaggatga

SEQ ID NO: 124652 - protein, 562 aa, Chromobacterium violaceum ATCC 12472
MSTLNKFAGIQQLGRALMLPIAVLPVAGLLLRLGQPDLLDIKFMAQAGDAIFGNLALIFAIGVAVGFAKDGNGTSGLAGAIGYLVLTAVLKVIDDKINMGVLSGILSGLIAGYLYNRYKDIKLPSYLAFFGGKRFVPIVTGFGMLVLGAVLGYAWPPVQHGIDAVGKWLIATGEVGVFFYGVLNRILIVTGLHHILNNIVWFQVGDFTNAAGKVVHGDLTRFFAGDKTAGMFMAGMFPVMMFGLPAACLAMYRTAKPENRAAVGGLLFSMALTAMLTGVTEPVEFAFMFLAPVLYGIHAVLTGVSMAVMQMLGVKLGFGFSAGLFDYVINYGIATKPLLLLPVGAVYFAVYYALFVFFIRKFDLKTPGREDAAVTVAEVKAGTSRARAFIDALGGAANLKSVDACTTRLRLQVASNEKVNEAALKALGSRGLIKPAAGSVQVVLGPEADLIADEIRGALGNAAAEPQAAVSAVAETLASAAAAGGASIDKARWLAALGGAGNVRKIEAVAGSRLRVEVADAALVDQAALQALGASGVTAVSSSLLHVVLQVDAAPYAAVLQG

SEQ ID NO: 124653 - DNA, 1767 bp, Chromobacterium violaceum ATCC 12472
  CDS (1)..(1767): transl_table=11
atgtttagtcaatcattcgcttttctgcagaagatcggcaaggcgctgatgctgccggtggcggtgctgccggtggccggcctgctgctcggcatcggcgcgaccgacttccacacccagaacacggtcttcctggcgatcctgtcgctgatgaagaactccggcgacgtgatcttcggcaacctgccgctgatcttcgccgtgggcgtggcgctcggcttcaccgagaacgacggcgtcgccgccatcgccgccgtgatcggccatctggtcaccaccgtgaccctgggcgtgatggccggcatcctgggcgtggccaccacgcccatcatgggcctgccgtcgatccagaccggcgtgttcggcggcatcctcgccggcggcctggcggcctatatgttcaaccgcttctaccggatcaagctgcccgaatacctgggcttcttcgccggcaagcgcttcgtgcccatcatcaccgccgtcggcgccatcggcctgggcgtggtgctgtccttcgtatggcccccgatcggcaacggcatcaagtcgttctcgcaatgggcggccgtcagcgacccccgcaccgcggccaccgtctacggcttcgtcgagcggatgctgatccccttcggcctgcaccacatctggaacgtgccgttcttcttcgaaatcggcgccttcccggacgcggccggcaagatcatccacggcgacatcaaccgcttcttcgccggcgacccaaccgcgggcatcctgtccggcgccttcctgttcaagatgttcggcctgcctgccgcggccatcgccatctggcactcggccaagccggaaaaccgcgtcaaggtgggcggcatcatgatctccgccgcgctgacctccttcctgaccggcatcaccgagccgatcgagttctccttcctgttcgtggcgccggtgctgtacctgatccacgccgtgctggccgcctccacccagttcgtggccaacacgctggacatgcacatgggcttcaccttctcccagggcggcatcgacttcctgatgttcaacctgatcggcgacaagtccaagcatgccggctacgtgttcatcctgggcccgatctacgcggcgatctactactcggtgttccgtttcgtgatcgccaagttcaatctgaagaccccgggccgcgaggatgaaagcgcggaaacttccggcgccgtcagcgaagaccagcgcgcccgcgcgctggtgctggccttcggtggccgctccaacatccgcagcctggacgcctgcatcacccgtctgcgcatcgcggtgcaggacaccgccaaggtcgaccaggccaagctgaagtccatgggcgcgtccggcgtggtggtggtcggcagcggcatccaggccatcttcggaccgctgtcggaaaacctgaagaccgacatggaaatctacctgcgcggcgccggcagtgacgccgagctgccgtccgcccaggccgccgctcctgccgcctctccggcccccgcggccgcggctgcgccggccgccgccaaggctgacgtcgccgcgctgaaacaggcgctgggcggcgcggccaacctcggcaaggtggaagccatcgcccacactcgcctgcgggtggagctgaaggatgccgcccgcttcgacgaagccgccgcccgcgcggccggcgtatccgccgtcaccctggtggcgcccggcgtgctgcacctgatcgtcggcgaccaggcggcggcgctcgccgcctcgctgcaaggctga

SEQ ID NO: 124654 - protein, 588 aa, Chromobacterium violaceum ATCC 12472
MFSQSFAFLQKIGKALMLPVAVLPVAGLLLGIGATDFHTQNTVFLAILSLMKNSGDVIFGNLPLIFAVGVALGFTENDGVAAIAAVIGHLVTTVTLGVMAGILGVATTPIMGLPSIQTGVFGGILAGGLAAYMFNRFYRIKLPEYLGFFAGKRFVPIITAVGAIGLGVVLSFVWPPIGNGIKSFSQWAAVSDPRTAATVYGFVERMLIPFGLHHIWNVPFFFEIGAFPDAAGKIIHGDINRFFAGDPTAGILSGAFLFKMFGLPAAAIAIWHSAKPENRVKVGGIMISAALTSFLTGITEPIEFSFLFVAPVLYLIHAVLAASTQFVANTLDMHMGFTFSQGGIDFLMFNLIGDKSKHAGYVFILGPIYAAIYYSVFRFVIAKFNLKTPGREDESAETSGAVSEDQRARALVLAFGGRSNIRSLDACITRLRIAVQDTAKVDQAKLKSMGASGVVVVGSGIQAIFGPLSENLKTDMEIYLRGAGSDAELPSAQAAAPAASPAPAAAAAPAAAKADVAALKQALGGAANLGKVEAIAHTRLRVELKDAARFDEAAARAAGVSAVTLVAPGVLHLIVGDQAAALAASLQG

SEQ ID NO: 124655 - DNA, 1515 bp, Photorhabdus luminescens subsp. laumondii TTO1
  CDS (1)..(1515): transl_table=11
atgggtatattcaattacttgcagcgattgggaaaagcattaatgcttcccattgccacgcttcccgtagcagcacttttgctacgtttcggccaacccgacgtatttaatattcctttcatcgccagcgctggcggtggtatttttgaaaacctcccgctactatttgcattaggtatcgcaataggcttagcaaaagataatgctggcgctgccgcactggcaggtgtcgtcggttttttagtactcactaaagccacgtcagtcatagactcgactatcaatatgtcttttttcgcaggtattatcgcaggtattgttgccggtcattgttataaccgtttttcaaatacacgtctgccagagtttctcgctttcttcgccggtaagcgattagtccctatcatgaccggcattatttgtctgttcattgcatggatatgtggctatgtatggccatatgtccagcacggtattgatactttcagccttttagtatcaaagagcggcatggccggatggtttacttatggtgtgcttaaccgctctctcattccatttggtttacactatatcctgcattctgttttctggtttagtctgggtgactgtctgaaaattacttatgacttagccagttctgtacataatatctgcctggcaccggatattgtccgttctctgaccatcggcgcagcggttccaggtattgatggctctactattacccaaatagccaccgatatgagccgcggcgacttgaaccgtttcttcgccggtgatccacatgccggaatctatatggcctgggcttatcctatctttatgggcggtttgcccggcgctgcattggcaatgtatcttgcagcaccaaaggaacgtcgtcctcagattggcgggatgctattatccgtcgctttaaccgcatttttaaccggtataactgaaccaatagaattctcattcctattcctggctccagctttatatgttctgcatgccatattggctggtgttagcatggttatcgtcaattcattgggtattctgcatggctttggattctctgccggattaattgaccttgtattgagctggggtctggcaaccaagccgtggttgttaatcccattaatcgccttattctttgtactgtattttgtttgcttcaccctcatgattcgtatttttaacttacgtacaccaggccgcgaaattggagaaacaactcaagcgacttccgcctcccaagacaacgaaacaattcaacattacattaccgctcttggtggtgcacaaaatattcatgccgtagatgcctgcattacccgtctccgtttaaccgttgaagacaacacacaattggatgaacaccggttaaaacaattaggtgcaaaaggcatcctgaaaataggtaagcagagtgttcaagtggtattgggaccccaagcagaaagtattgccgggcagatacgtactcagctatcctcagatagaccagacaaaagatcgtag

SEQ ID NO: 124656 - protein, 504 aa, Photorhabdus luminescens subsp. laumondii TTO1
MGIFNYLQRLGKALMLPIATLPVAALLLRFGQPDVFNIPFIASAGGGIFENLPLLFALGIAIGLAKDNAGAAALAGVVGFLVLTKATSVIDSTINMSFFAGIIAGIVAGHCYNRFSNTRLPEFLAFFAGKRLVPIMTGIICLFIAWICGYVWPYVQHGIDTFSLLVSKSGMAGWFTYGVLNRSLIPFGLHYILHSVFWFSLGDCLKITYDLASSVHNICLAPDIVRSLTIGAAVPGIDGSTITQIATDMSRGDLNRFFAGDPHAGIYMAWAYPIFMGGLPGAALAMYLAAPKERRPQIGGMLLSVALTAFLTGITEPIEFSFLFLAPALYVLHAILAGVSMVIVNSLGILHGFGFSAGLIDLVLSWGLATKPWLLIPLIALFFVLYFVCFTLMIRIFNLRTPGREIGETTQATSASQDNETIQHYITALGGAQNIHAVDACITRLRLTVEDNTQLDEHRLKQLGAKGILKIGKQSVQVVLGPQAESIAGQIRTQLSSDRPDKRS

SEQ ID NO: 124657 - DNA, 1542 bp, Photorhabdus luminescens subsp. laumondii TTO1
  CDS (1)..(1542): transl_table=11
atgaaaagaatcattaacacattgcaaaaccttggcaaatctttgtatggcccggtgttaattctccctattgtcgggctgtttattgcttttggcaatgtattgggaaacggtaaccttgcagaatatcttccatttttaaaccacgggttaattcagcaatctggcaaactgatcgcccaatctgctatttcaatattgagcaatctggcgttgatttttgctgttggaatccctatcggactggcaaaacgcaataaaggttatgccgcattgatcggtctggttactttcgtcatttttatcaacgccatgcacgtcactttagcattacaaggaaaattggtgccagaaacgcaaatgcgcaatgttggtcaaggaatggtgctaggtgtgcaagtattggaaatgggggcttttgccgggatattgatcggtgcactggctggctattgctataaccgttattcgtcaaaacagtttaatggtgtaatggcaatttattccgggcactgttttgttgccattctgatgatccctctggccgttatatcgggttacttaatgagtgatatttggccctatgcgcaacggagcatcagcgcccttgcgcatggtattcatgagtccggggcatttggcgtcgctatatacggctttctggagcgcattctgatccccttaggtttacatcatctggtttacacgccctttttgtataccgaattagggggcattgcagaggtatgcggcactgtacatcaaggagctcgtaatatctatttcgctgaaatggcctgcccggctgtacatcaactcagtcacagcgtggtatgggatgcacgagggatcagcaagatgtttggcctgactgccgctgcactggcaatgtatgtgactgcccgcccagaaaagaaaagtacagcaaaagctgttctcatccctgccgccatgaccacttttttgttaggcgtgaccgaaccactcgaattttctttcctgtttgttgctccgctactatttggtgttcatgccgtgctaaccggtttaggttttatgctgttctatctactcggcgtacatgctatcggcgctaatggcataatcgacttcatactgtacaacttaccgctcggtaccgaaaaatctaactggccaatgtatatcgccgtagggctaatcatgtcggtgatttatttcttcgcattccgtttcctcattttacattacgacctgaaaaccccgggacgcgaaaataacgatcaggaaacacgcctctatagcaagcaacagtatcaagttgccaatgatgacaaaccaggacaacaaatcatctgtgggttaggtggtacagcaaatattgtcgctatcgacaactgctacacccggctacgcataacagtacatgacaccacgctcattgacaaaaacaggcttaaatcaaccggcgcaaaaggtgtcatctgtcagggaaataacgttcaggtaatttacggtctgcacgtccaaaaaatgcgtgaagccgtagaagaagcactttaa

SEQ ID NO: 124658 - protein, 513 aa, Photorhabdus luminescens subsp. laumondii TTO1
MKRIINTLQNLGKSLYGPVLILPIVGLFIAFGNVLGNGNLAEYLPFLNHGLIQQSGKLIAQSAISILSNLALIFAVGIPIGLAKRNKGYAALIGLVTFVIFINAMHVTLALQGKLVPETQMRNVGQGMVLGVQVLEMGAFAGILIGALAGYCYNRYSSKQFNGVMAIYSGHCFVAILMIPLAVISGYLMSDIWPYAQRSISALAHGIHESGAFGVAIYGFLERILIPLGLHHLVYTPFLYTELGGIAEVCGTVHQGARNIYFAEMACPAVHQLSHSVVWDARGISKMFGLTAAALAMYVTARPEKKSTAKAVLIPAAMTTFLLGVTEPLEFSFLFVAPLLFGVHAVLTGLGFMLFYLLGVHAIGANGIIDFILYNLPLGTEKSNWPMYIAVGLIMSVIYFFAFRFLILHYDLKTPGRENNDQETRLYSKQQYQVANDDKPGQQIICGLGGTANIVAIDNCYTRLRITVHDTTLIDKNRLKSTGAKGVICQGNNVQVIYGLHVQKMREAVEEAL

SEQ ID NO: 124659 - DNA, 1572 bp, Vibrio vulnificus YJ016
  CDS (1)..(1572): transl_table=11
gtgaatattcttggatacgcgcaaaagttaggtaaagctcttatgctacctatcgcaacgctaccagttgcggcgctcttactacgtttgggtcaaggcgacctgttagatatcccattcatggcgcaagctggtggtgctatctttggtcaacttcctcttctattcggtcttggtatcgcgattggtctttctaaagacggtcaaggtgctgcaggtctagcaggtgcagtggcgtactttgtactaactgcaacagcaacaacaatcgatgcttctatcaacatgtcgttctttggcggtatcattggtggtatcatcgctggtcactcatacaacgctttccatgctacacgtcttcctgagtggttggcattcttctctggcaaacgtctagtgcctattatggcaggtctattctcactggttgctggtgcagttgctggtgtggtttggccttcaatccaaggcggtcttgatgctctagcacacgcggtatcgacttctggtgctgtaggtcaattcgtttacggtactctaaaccgtgcactaattcctgttggtcttcaccacgttcttaactcatacttctggttcggtatgggtacgtgtcaagagatcctagtaacaggtgctcaagcagctggtcaagctctacctgctctacaacagctttgtgtagacccagcactagcgaaaactcttgttgctggtcaaactcacacatttgagtttgctaacgctgtaactcctgaaatcactgcaacagtgaaagaagtaactgaaacagtgaaatctggtgacctacaccgcttcttcggtggtgacaaaggcgctggcgtattcatgaacggcttcttccctgtgatgatgtttggtctaccaggtgctgctctagcgatgtacctagcagctccagcagaaaaacgtagccaagttggtggtgcactgttctctgtagcgttctgttcattcctaaccggtatcacagagccactagaattcatgttcgtgttcctagctccagcactatacgctctacacgctgtgttcactggtctagcactagttgtagcaaacatgttcggcacgctacatggctttggtttctcagcaggtctaatcgacttcctattgaactggggtctagcaactaagccattcgtactgctactaatcggtctagctttcggtgctctatacttcttcactttcttcttcgcaatccgcgcattcaacctgaaatcgccaggtcgtgaagatgatgattctgaaacaagtgcggcttctggtgatgcaaagagtggtgacctagctcgtcaatacctaaaagcactaggtggtcacgagaaccttacatcaatcgatgcatgtatcactcgtctacgtctaacgcttaaagatcgctctgtcgctgacgaagcagtacttaagaaactgggtgctaaaggtgtggttaagcttggcgaaaacaacctacaagttatccttggtcctctagctgaaatcgttgcgggtgaaatgaaagcaatcggtgtcaacgaagacctatcagaagtgaaactgccttaa

SEQ ID NO: 124660 - protein, 523 aa, Vibrio vulnificus YJ016
MNILGYAQKLGKALMLPIATLPVAALLLRLGQGDLLDIPFMAQAGGAIFGQLPLLFGLGIAIGLSKDGQGAAGLAGAVAYFVLTATATTIDASINMSFFGGIIGGIIAGHSYNAFHATRLPEWLAFFSGKRLVPIMAGLFSLVAGAVAGVVWPSIQGGLDALAHAVSTSGAVGQFVYGTLNRALIPVGLHHVLNSYFWFGMGTCQEILVTGAQAAGQALPALQQLCVDPALAKTLVAGQTHTFEFANAVTPEITATVKEVTETVKSGDLHRFFGGDKGAGVFMNGFFPVMMFGLPGAALAMYLAAPAEKRSQVGGALFSVAFCSFLTGITEPLEFMFVFLAPALYALHAVFTGLALVVANMFGTLHGFGFSAGLIDFLLNWGLATKPFVLLLIGLAFGALYFFTFFFAIRAFNLKSPGREDDDSETSAASGDAKSGDLARQYLKALGGHENLTSIDACITRLRLTLKDRSVADEAVLKKLGAKGVVKLGENNLQVILGPLAEIVAGEMKAIGVNEDLSEVKLP

SEQ ID NO: 124661 - DNA, 1887 bp, Lactobacillus johnsonii NCC 533
  CDS (1)..(1887): transl_table=11
atgatgcagaaactacaaagatttggggcggctatgttcgtacctgtcttgcttttctcatttgccggtattgtggtggctttaggaagtctatttaataatgcaacactttttggctccttagctaatcctacaactgggtggtataaagtatgggacactatttctgccggtggttggacagtttttaatcaagaatgtttgctttttgtggttggattacctattggtttagctaacaaatcaagaggtcgtgccgcaatggaagccctcattacttacttaacttttaactatttcgttggagctatgttgagtcactggggtgcgttctttggtgtaccaaactttaataagattcaaattactgctaatgctactaatggtggtttaactgaaattgctggtatcaagactttagatactaacattgttttctctttaattattgctggtattgttgtttatttacataatcattactttgataaaaaattgccagaatggcttggaactttccaggggtcaacgtatgtttacttcttaggattctttgtaatgattccagttgcatttttaacttgtttaatttggcctaaagtacaattaggtattaacagtatgcaacaatttattgtaagtagtggatttgttggtatttggatttactcatttttgaaccgtgtcttaattcctactggccttcatcacttggtatatattccgttccaatttggaccagctgttgttgctggaggtcttcaaccatattggctaaagcacttgactgaatatgctgcaagtacaaaacctttatcacagattgcttctgtagaaggattccaactttacggtaatgaaaaagttttcttagtaccatttatttgttgggcattctatgcaactgccaagaaaaataaaaagaaacagacttcagcattacttataccagcagccttaacttctgtttttgctggtatcactgaaccaattgactttacttatttattcgcagctccagtactttggattgtatattcagttatggctgctactatgaatacggttatgtggtgtttcggtttaagaggacttatgtcagatggtgcaattggtattgcttcaatgaattggcttccactttgggcacatcactggcacatttatgtaatgcaattcattgttgggattgtatttggttttattacttactttatttttaagataatgattgaaaaatttaactatgtaactccaggacgtgaagctgatgatgaagatgttaaattaatcaataagaaagaatataaagaaaagatggctcaacaaaaagctgctcaacaagcaacaggtgttgatgctaatgatccttatattgctagagctcaggcttacttagatctattaggtggtccaaataacattgaagaactatcatcttgtgctacacgtttacgtgtaacggttaaagatccagaaaaattaggttctgatgcacaatttaaggctaataaagctgttaatgtggttcaccatggaaaagctattcaagttattgttggtcttgatgttgctcaagttttggaaagaatgcagagcttgatggaaaatgctggtcatgatgccaaagtaagtcaagaacaagatccagaggtcgaacaagcaattggtttcattgacttactaggtggacgtgacaatattaagaagttaacgccttgctcaactagaattagagttgaagtatatgatccttctaaagtggctgatagcaaacaattcaaagatcttggagcacatgatattactcataaagataacgaaattgatattgttattggcttaaatgcagagaatattattgataagatgaaggaaaatatgtag

SEQ ID NO: 124662 - protein, 628 aa, Lactobacillus johnsonii NCC 533
MMQKLQRFGAAMFVPVLLFSFAGIVVALGSLFNNATLFGSLANPTTGWYKVWDTISAGGWTVFNQECLLFVVGLPIGLANKSRGRAAMEALITYLTFNYFVGAMLSHWGAFFGVPNFNKIQITANATNGGLTEIAGIKTLDTNIVFSLIIAGIVVYLHNHYFDKKLPEWLGTFQGSTYVYFLGFFVMIPVAFLTCLIWPKVQLGINSMQQFIVSSGFVGIWIYSFLNRVLIPTGLHHLVYIPFQFGPAVVAGGLQPYWLKHLTEYAASTKPLSQIASVEGFQLYGNEKVFLVPFICWAFYATAKKNKKKQTSALLIPAALTSVFAGITEPIDFTYLFAAPVLWIVYSVMAATMNTVMWCFGLRGLMSDGAIGIASMNWLPLWAHHWHIYVMQFIVGIVFGFITYFIFKIMIEKFNYVTPGREADDEDVKLINKKEYKEKMAQQKAAQQATGVDANDPYIARAQAYLDLLGGPNNIEELSSCATRLRVTVKDPEKLGSDAQFKANKAVNVVHHGKAIQVIVGLDVAQVLERMQSLMENAGHDAKVSQEQDPEVEQAIGFIDLLGGRDNIKKLTPCSTRIRVEVYDPSKVADSKQFKDLGAHDITHKDNEIDIVIGLNAENIIDKMKENM

SEQ ID NO: 124663 - DNA, 2067 bp, Lactobacillus johnsonii NCC 533
  CDS (1)..(2067): transl_table=11
atgtctaagaaattttctcatattggccaagccttctcacaactggggcaagcctttatgcttccaatagctattttacctgtagccggcttactcctaggactaggcggagccttaaccaataaagctgccgttacctcttatccttggcttaatcaagaatggcttcaaacaattctaaagataatgaattttgcaggaagtgctgtctttaataacttagctcttattttctcaattggtttagcagttggcttagcaaaaggggataaaggaacagctggcttagcaggtggcgttgcctatctagtatatacagccacaatctcaggactactccaactattttcacctaaaaacactattgatacaggagtattaggtgcaattgtgattggctcagttgttgcctacctacataatcattatcgcaaggtagaattaccacaattcttaggcttttttggtggttcaagatttattcctattatttcatctttagctgcgattgttattggtgctatcttcttcattatttggccaccaattcaaagcgatttaaccagtgcaggttatgcaatagctaaaatgggaagtttgggaagttttctatatggcttcttgcttcgtttaactggagcagttggtctacatcacacaatttatccaatgttttggtatacagctttaggtggcaccgcagatgtagctggtaaaactgttgttggtgctcaaaatattttctttgctcaattagctgatcctaatcaccatggtttgtttacttacggtactagattttttgctggtcgttttgcaactatgatgttcggtcttccaggagctgctttagcaatgtacctttgcttacctaagagaaatcgtaagactaacggtggtctatatctttcaggcggtttaacctcattcctaactggtattactgaaccaattgaatatactttcttattcgtagcaccttggttatatgttatccatgcttttctcgatggatgttcattttatgttgctgatatcatgaatattagaattggaaattcattctctggcggtttaattgactatcttctctttggtgtcttacaaggaaaagataaaactaattggccgaatgtcttaattatgggagttatctggttcttcctttacttctttatttttactttttgtattaaaaaattccatgttggtattccagggatggttgtagaagaaaatcaagatgctgaaaaaattatgtcaaacagccctaagactgatgacaaactatacaacgaatcttgtgagattatcactgctcttggcggtttagaaaatattgaaactgtttcagcttgtgcaaccagattgagagtttctttaaaggataatagtttagttaatgatgacgtatttaaaatgttgggcgctcctggagtattaaaagttgctggtggagttcaagctatttttggtggaaaggccgatctatatagtcaagaaattaatgacattatcgcacatccagatatgcagcccgcaaataatccacaagtggataaaacttctaattttcaatcaaattctgtgcataagtcagaagaagttattttcaaggcacctgtcaaagggacttttgaagatatatctcaagttaatgacgaagtattttctcaaaagatgatgggtgaaggatttgcaattaaaccagaaaatggaaaaatttatagtccggttaacgctacagttgtatcaatctttaaaacaaaacatgctgtaggtcttaaaaccgactctggtttagaagttatgcttcatcttggaatagacactgttgaactagaaggtaagccatttaccttaaaggtaaacgaaggcgagcaagtaactccagagacacagttaattgaaatggatctaaaacaaattgaaactgctaaaaaagatccaacagttatgactctgattactaatagtagtgagagagttgaacaagtcgaagatatcgcgacaagtggacaattagttgaggcacataatgatgtctactccgtaaccactaaataa

SEQ ID NO: 124664 - protein, 688 aa, Lactobacillus johnsonii NCC 533
MSKKFSHIGQAFSQLGQAFMLPIAILPVAGLLLGLGGALTNKAAVTSYPWLNQEWLQTILKIMNFAGSAVFNNLALIFSIGLAVGLAKGDKGTAGLAGGVAYLVYTATISGLLQLFSPKNTIDTGVLGAIVIGSVVAYLHNHYRKVELPQFLGFFGGSRFIPIISSLAAIVIGAIFFIIWPPIQSDLTSAGYAIAKMGSLGSFLYGFLLRLTGAVGLHHTIYPMFWYTALGGTADVAGKTVVGAQNIFFAQLADPNHHGLFTYGTRFFAGRFATMMFGLPGAALAMYLCLPKRNRKTNGGLYLSGGLTSFLTGITEPIEYTFLFVAPWLYVIHAFLDGCSFYVADIMNIRIGNSFSGGLIDYLLFGVLQGKDKTNWPNVLIMGVIWFFLYFFIFTFCIKKFHVGIPGMVVEENQDAEKIMSNSPKTDDKLYNESCEIITALGGLENIETVSACATRLRVSLKDNSLVNDDVFKMLGAPGVLKVAGGVQAIFGGKADLYSQEINDIIAHPDMQPANNPQVDKTSNFQSNSVHKSEEVIFKAPVKGTFEDISQVNDEVFSQKMMGEGFAIKPENGKIYSPVNATVVSIFKTKHAVGLKTDSGLEVMLHLGIDTVELEGKPFTLKVNEGEQVTPETQLIEMDLKQIETAKKDPTVMTLITNSSERVEQVEDIATSGQLVEAHNDVYSVTTK

SEQ ID NO: 124665 - DNA, 1743 bp, Mycoplasma mycoides subsp. mycoides SC str. PG1
  CDS (1)..(1743): transl_table=4
atgaattttaataaatttaaaattaataaagataattttaagcaattttcctcaaaaacaacagcaattttacaaaagtttggtcgtggattaatgctaccaatttctatattaccttttgttggtttattattaggaattggtggagtaattggagcaaatatttctacaactaatcacacaggattaattgtaagtaaatctttaaaagcaatgtctgaaattgtttttgctaatttggctattttatttacaatatcaattgtaattacttttacaggcgaatcaggatcggctgcttttttagcaatactgggttatttagtttttaattcaacacagtcagcttttattcattataatgataaagttttagttgatgttttttatattcacaaaggtgaatgattaaaatcaattgttggatctaatttaggaattagctctttacaaacttcactatttggatctattgtagttggagttatagttgtaaaaatttataacaagtttaaatatataaaattaccaagtgccttaaactttttttctggaattagatttttaccaattttaattattcccagtatgtttttattaggattaatatttttattaatttgaccttatgttggattattaattaatcaaataggaataagcttatcaaaaactcctagaggtgttgatggatttatttatggagttttaggaagagcattaatgccatttggacttcatcatattttaatcacacttgcttatcaatctgcttttggtgaaattttagaatatgataaactaatttttaaattaatagaatcaaaagtagatcaagaaacaatatataaaattgaacaatcatttaaaagttttacaaaaagcaatacccaaattattgttggtgatcaaaatatttgaaattttataaattctataccagttaataaaattcaacaaacaccaatttttttatgatttgaaaataatttaaatattaatgcaggaaaattcactcaagattatccaacttatttaggtacttgtatggggataggtttagcctttattttaacaagtagtaaagaaaataaaaagcaaacagcttcggtgattatgagtgctatgggagtttcattcctaactggtataactgagcctttagagtttacttttttatttgttacaccagttttatattatgtggtttatgtacctttttcaggattaagctatttatttatgaatttagtaaatgctcatgtaggggttggatttgctagagggtttattgatttattggtatatggggcactacctgtattaaaaggaactagattttattgagcatttgttttttctttaattcaaggagttgctatttttgtaatattttatttttgaattattaaaaaagatctcccaaccccaggtagaaaaggaaatgaattaggattaattagtaaaaaagactattttgaattaaaaaacaaagataatagtgaaaaaagaataaaagaaataattaaagctttaggttcaaaagaaaatattaaatctgtttcagcttgtgctacaagactaagagttgtagtaaataatgaaagtttaataaaaactgaagaactaattaaattaggaagtgttggaaatattattaaaaataataatattcaagctatattcggtggcgaagctacaattatttcagaaaaaataaataatatattaaatcaagaataa

SEQ ID NO: 124666 - protein, 580 aa, Mycoplasma mycoides subsp. mycoides SC str. PG1
MNFNKFKINKDNFKQFSSKTTAILQKFGRGLMLPISILPFVGLLLGIGGVIGANISTTNHTGLIVSKSLKAMSEIVFANLAILFTISIVITFTGESGSAAFLAILGYLVFNSTQSAFIHYNDKVLVDVFYIHKGEWLKSIVGSNLGISSLQTSLFGSIVVGVIVVKIYNKFKYIKLPSALNFFSGIRFLPILIIPSMFLLGLIFLLIWPYVGLLINQIGISLSKTPRGVDGFIYGVLGRALMPFGLHHILITLAYQSAFGEILEYDKLIFKLIESKVDQETIYKIEQSFKSFTKSNTQIIVGDQNIWNFINSIPVNKIQQTPIFLWFENNLNINAGKFTQDYPTYLGTCMGIGLAFILTSSKENKKQTASVIMSAMGVSFLTGITEPLEFTFLFVTPVLYYVVYVPFSGLSYLFMNLVNAHVGVGFARGFIDLLVYGALPVLKGTRFYWAFVFSLIQGVAIFVIFYFWIIKKDLPTPGRKGNELGLISKKDYFELKNKDNSEKRIKEIIKALGSKENIKSVSACATRLRVVVNNESLIKTEELIKLGSVGNIIKNNNIQAIFGGEATIISEKINNILNQE

SEQ ID NO: 124667 - DNA, 1674 bp, Mycoplasma mycoides subsp. mycoides SC str. PG1
  CDS (1)..(1674): transl_table=4
atgcataatctaaaaacaaaaactaaaaaagacaaagaaaatagtttttataataatcttttaaatgcattacaacgtttaggaaaaactttaatgtttcctattgcagttttaccaattgcagctttattagctagatttggtgctttaattcaagatccactagctaatggaggttcaaatatttctgaaattcaaaaattcataggattagttatagctactcctggtcaaattgtttttgataatttagcaataatttttgctattggtattagttttggattagcaaaagataatcgtggagaagctgcattagttggtggtattgtttgatttggaatgacagctttattaaaagaaggtttaattccaacatttatttgaaaaaatgtactaacttcagataaacttttaattaagcaaggtgaacaaatggttccagctactcaactattatattttttaagaaataatactgttaagtaccaattggattctggagttgttggtggtattgttgttggttgtttagttgctttaatctataacaaatataaagatgtaactttacctcaggctctttcattttttggtggaagaagatttattccaatgttaggtgttttaatgattgttccactaggattaggatttgctatcatttgaccttgagcacaatttattttaattaaaataggaacaactttatctcaagcaaatggctttgctaaaggatttgcagttggaacttatggatttttaaatagaattgttcaaccatttggattacaccacattttaaatacatttgtatgattccaattaccaattgaaggtaaattattagctgatggatctacaacaataattaatggagatattactgcatttcaaaaaggattgattggttctggtttatttacttctggttttttccctttatttttagggggattaccaggagttgctctagctttaattttagcttcagataaagataaaaaaaagcaaatgactgctttttatgggggttctgcttttgttgcttgaattactggaattgatgaacctttaatttttaactttatttttatttctccaattttatatgttttaaatgctttatttacaggtattttttacatgtttgtaacttgatctcaaattgctttaggtattggatttagtgctggatttattgactatgtagtttcgttttgaacttcatgacaaatttcaacaaaaatcggatgatacgctaacccattatgaatttgagtatttgctattgctatgtttggtttatattttacaacattttactttttaattaaaaagctaaatattccaacccctggtagagaaaatcaattaggatttaaaaaagaagttttagaaccaataacaagtaataataaacaaaataaatatgaaataatggctaaaagaattttagatattgttggtgaagataatattgaattagttgaaagttgctctacaagattacgattgactgtaaaaaataattcaaaacaagtcattgatgatgaaaaaatcaagcaagttggagcttttggagtagttagattaggtaaaaataattatcaaataataattggaactgatgtagaacatgttgcagataagttaaaagaaattctaaattag

SEQ ID NO: 124668 - protein, 557 aa, Mycoplasma mycoides subsp. mycoides SC str. PG1
MHNLKTKTKKDKENSFYNNLLNALQRLGKTLMFPIAVLPIAALLARFGALIQDPLANGGSNISEIQKFIGLVIATPGQIVFDNLAIIFAIGISFGLAKDNRGEAALVGGIVWFGMTALLKEGLIPTFIWKNVLTSDKLLIKQGEQMVPATQLLYFLRNNTVKYQLDSGVVGGIVVGCLVALIYNKYKDVTLPQALSFFGGRRFIPMLGVLMIVPLGLGFAIIWPWAQFILIKIGTTLSQANGFAKGFAVGTYGFLNRIVQPFGLHHILNTFVWFQLPIEGKLLADGSTTIINGDITAFQKGLIGSGLFTSGFFPLFLGGLPGVALALILASDKDKKKQMTAFYGGSAFVAWITGIDEPLIFNFIFISPILYVLNALFTGIFYMFVTWSQIALGIGFSAGFIDYVVSFWTSWQISTKIGWYANPLWIWVFAIAMFGLYFTTFYFLIKKLNIPTPGRENQLGFKKEVLEPITSNNKQNKYEIMAKRILDIVGEDNIELVESCSTRLRLTVKNNSKQVIDDEKIKQVGAFGVVRLGKNNYQIIIGTDVEHVADKLKEILN

SEQ ID NO: 124669 - DNA, 2031 bp, Mycoplasma mycoides subsp. mycoides SC str. PG1
  CDS (1)..(2031): transl_table=4
atgttcaagagtagttttaaagataaattaaaggcatttgctgctaatattatgcctactttatctaaactaagtaaagcattcttattacctattgctttattaccgattgctggtgtgtttttaggagttggagctgctattgctgcaaatacacctgaacaatctactttatgatttattggtaaagttatggggaatatgggggatgtttgttttggtaacctacctgtattattctgtatttctgtagctttagcatatactaaagattcaggagttgcagcaattactgctgtagttgggttcttagtatttaacggtgttcaagctcctttatttattgctcctgcaacaaaaaccaatgataaagtttttgaatacagtttattatgatacaaacacgtatctaactcattaacaggatcaaatatggggatcttatcacttaacactggagttttaggaggaatctttgttggagcaattgctgctaaatgttataacaaattccaccaaactcaattaccaactgctattagtttctttagtggaacaaaactagttcctattattacattcgtagcagttattcctttatcatttatttttatgatggcttgacctgttattggtttaggattgaataaatttggtcaagtttcaggaactttaccttatggaactgattcattaatttttgaaattgttgagcgttcattagttccatttggtctacaccacgtgttttatgctccattatgatgaactagtgctggaggatcaattgctgaagggttcaacactttaaatactcaaagcgaagaagttaaaaaggcattcgttgattcatataataaactacatggtacaaatcataataatttaaaagcaattattgatatagttaaggcaaaagatgcattatgaggagctgttggggatcaaattatctcgcaaagagttattggtcacttaaatatcctaaactttactgatgttgaaaaattaggaattaacttaggaagattccaatcaggtaagtttggatttatgttattaggtttaccatcagctgctttagctatgtgattagcggcaccaaaagaaaatagacaacaagtatttggaatttatttctcagctgcgtttacttgtttcttaacaggtattacagaacctattgaatatacattcttatttgttgctccatgattattctatggtgttcatatgccattagcatcaattgcattttgagcaacaggagctttacaaactcacattactcaaactgtttcaggtggaattattgattacatcgtatttggaattattccatttatcagtggagctatgaaaccaatatcagcatttggtgtattaggagttgctgttgtattagcaccaatttacttctgtgcattctacttcttaatcaaactatttaatgttaaaacaccaggtagagatggaaatgctgaagctaaattatacactaaagcagatttcaaagcttctaaaggattaaatgttgatggttcaaaaatgagttcatcagcagatgataaagaacaagctagactagcaaaagctgcagctattattgaatatctaggtggagaagaaaacattgttgatgttgattcttgtgcttcaagattaagattaactgttgttgatgctaaaaaagctgatattgatggaattaaatctttaggtggaacaactggagctttagtaaaaggaaataacattcaaattgtttatggtggagaacaagaagctattaaaccaagaatgcaaaaacttttagaacaacaaagacacgaaaaaatgatgagtcattcagaaatgaaatctgaagaaatgaaatcagaaaacatgggtatgacttgtgaatcaaatcaagcttgtgataaaaaagatgaagcttgcagttgtgaaaaagattgcatgtgtgaagaaccaaataaagttgaagaacaacctgtaagtgaaatgaaagttgaaaaaaccaaaagcaactag

SEQ ID NO: 124670 - protein, 676 aa, Mycoplasma mycoides subsp. mycoides SC str. PG1
MFKSSFKDKLKAFAANIMPTLSKLSKAFLLPIALLPIAGVFLGVGAAIAANTPEQSTLWFIGKVMGNMGDVCFGNLPVLFCISVALAYTKDSGVAAITAVVGFLVFNGVQAPLFIAPATKTNDKVFEYSLLWYKHVSNSLTGSNMGILSLNTGVLGGIFVGAIAAKCYNKFHQTQLPTAISFFSGTKLVPIITFVAVIPLSFIFMMAWPVIGLGLNKFGQVSGTLPYGTDSLIFEIVERSLVPFGLHHVFYAPLWWTSAGGSIAEGFNTLNTQSEEVKKAFVDSYNKLHGTNHNNLKAIIDIVKAKDALWGAVGDQIISQRVIGHLNILNFTDVEKLGINLGRFQSGKFGFMLLGLPSAALAMWLAAPKENRQQVFGIYFSAAFTCFLTGITEPIEYTFLFVAPWLFYGVHMPLASIAFWATGALQTHITQTVSGGIIDYIVFGIIPFISGAMKPISAFGVLGVAVVLAPIYFCAFYFLIKLFNVKTPGRDGNAEAKLYTKADFKASKGLNVDGSKMSSSADDKEQARLAKAAAIIEYLGGEENIVDVDSCASRLRLTVVDAKKADIDGIKSLGGTTGALVKGNNIQIVYGGEQEAIKPRMQKLLEQQRHEKMMSHSEMKSEEMKSENMGMTCESNQACDKKDEACSCEKDCMCEEPNKVEEQPVSEMKVEKTKSN

SEQ ID NO: 124671 - DNA, 1638 bp, Bacillus cereus ATCC 10987
  CDS (1)..(1638): transl_table=11
atgaaaattacgtcttttgatttttggcaaaagttcgggaaagcgttattagttgttgtagctgtaatgccagcagctggtttaatgatttctatcggtaagttaattgggatgtctgctggggatattaacgcagttcatacgatcgctcgcgtaatggaagacatcggttgggcaattattacaaatctgcacatcttattcgcggtagcaattgggggatcttgggcaaaggatcgcgcaggtggtgcatttgcagcgctattagcattcgtcttaacgaacagaattacaggagctatatttggcgtaaacgctgaaatgttagcggattcaaaagcgaaagtttcttcagtattagcaggagatttaattgtaaaagattactttacttctgtacttggtgcaccagcattaaacatgggagttttcgtagggattatcacaggtttcttaggagctactttatataacaaatattataactataacaaactgccacaagcattagcattctttaacggaaaacgattcgtaccattcgttgtaattgtttggtctacagtaactgcaattgtattatcacttttatggccattcatccaaagtggattaaatgaatttggtcgctggattgcagcttcaaaagatagtgcaccaattgttgcaccatttgtatatggaacgttagagcgtttactattaccattcggtttacaccatatgttaacaattccgatgaactatacagagctaggtggaacatatacgatgttaactggctcaaaagttggacaagttgtagcaggacaagatcctttatggcttgcatggattacagatttaaataacttattagcaaatggagatacaaaagcatataacgatttattaaataacgttgtaccagctcgtttcaaagctggacaagttatcggttcaacagcagcattaatgggtattgctttcgcgatgttccgtaatgttgataaagaaaaacgttcaaaatataaaccaatgttcttatcagcagcattagcagtatttttaacaggtgtaacagaaccaattgaattcatgttcatgtttattgctccagtattatatgttgtatatgcaattacaacaggacttgcattcgcattagcagacttaattaacttacgtgttcacgcattcggatttattgagctaattactcgtacaccgatgatggtgaatgcaggactaactagagatttaatcaatttcgttatcgtttcattagtattcttcggtctgaactttacattattcaatttcttaattaaaaagttcaacttaccaacaccaggacgtgcaggtaactacattgataacgaagatgagtcatcagaaggaacaggaaatgtacaagatggttcattagcaacaaaagttattgatttattaggtggaaaagaaaatattgctgacgtagatgcttgtatgactcgtttacgtgtaacagtaaaagatttagatgttgttgcaccagaagcacagtggaaacaaaatggtgctttaggacttatcgtaaaagataaaggtgtacaagctgtatatggtccgaaagctgacgtattaaagtcagacattcaagatatgttaggtgcgtaa

SEQ ID NO: 124672 - protein, 545 aa, Bacillus cereus ATCC 10987
MKITSFDFWQKFGKALLVVVAVMPAAGLMISIGKLIGMSAGDINAVHTIARVMEDIGWAIITNLHILFAVAIGGSWAKDRAGGAFAALLAFVLTNRITGAIFGVNAEMLADSKAKVSSVLAGDLIVKDYFTSVLGAPALNMGVFVGIITGFLGATLYNKYYNYNKLPQALAFFNGKRFVPFVVIVWSTVTAIVLSLLWPFIQSGLNEFGRWIAASKDSAPIVAPFVYGTLERLLLPFGLHHMLTIPMNYTELGGTYTMLTGSKVGQVVAGQDPLWLAWITDLNNLLANGDTKAYNDLLNNVVPARFKAGQVIGSTAALMGIAFAMFRNVDKEKRSKYKPMFLSAALAVFLTGVTEPIEFMFMFIAPVLYVVYAITTGLAFALADLINLRVHAFGFIELITRTPMMVNAGLTRDLINFVIVSLVFFGLNFTLFNFLIKKFNLPTPGRAGNYIDNEDESSEGTGNVQDGSLATKVIDLLGGKENIADVDACMTRLRVTVKDLDVVAPEAQWKQNGALGLIVKDKGVQAVYGPKADVLKSDIQDMLGA

SEQ ID NO: 124673 - DNA, 2064 bp, Bacillus cereus ATCC 10987
  CDS (1)..(2064): transl_table=11
atgtttaagaagatctttggtgttcttcaaaaagtcggaaaagcgcttatgcttccagtagcgattttaccggcagcaggtattttacttggatttggtaatgcatttcaaaatccacagttaacaaatgttattcctgctttaaaagcagattggttcgtaatggtagcaaaaattatggaacaatctggtgatattattttcgctaaccttgcattactattcgcagttggggtagcaattggcttagctggtggagacggagtagctggtttagcagcattcgttggctacttaattatgaacaaaacgatgagtgtgttcttagaagtagacaagctagtgaaagtaacaagttctggagcagacccagtaaaaattggatttgcagatccagcgtatgcaaacgtattaggaattccaacgctacaaactggagtgtttggtggtattatcgtcgggatagtagcggcatattgctataataaatacttcaacattgaattaccatcatacttaggtttctttgcaggtaagcgtttcgtaccgatcgcaactgcaacattctctttaatagtaggtattatcatgtgcttcgtttggccatacattcaaggtggcttaaacacgttctcacatcaaatgattgatgcaaatagaacgttagcagcatttattttcggtttaattgaacgttcattaattccatttggattacatcacattttctattcaccgttctggttcgaattcggtcagtatacaaatgcggctggcgaattaattcgtggtgaccaaaaaatctttatggcacagttaaaagacggtgtagaattaacagcaggtacatttacaactggtaagtatccgttcatgatgttcggtcttccagcagcagctttagcaatgtaccatgaagcacgtccagaaaacaaaaaattagcagctggtattttaggttctgctgcattaacatctttcttaacaggtattacagagccacttgaattttcattcttattcgtagcaccagtattattcggaattcacgctgtattcgctggtctatcatttatgacaatgcaaattttaggtgttaaaattggtatgacattctctggtggtttaatcgacttcctattattcggtgtactaccaggccgtacggcatggtggtgggtaattattgttggtcttgtactagcggttatttactacttcggattccgatttgcaatccgtaaatgggatttaaaaacacctggtcgtgaagttgcaaattcgaatgaaggtgcaggaaaagcagaagctggtgaacttcctcgtgaagtattagtagcacttggtggtaaagaaaacattgcttctttagacgcttgtattactcgtttacgtgttcaagttaacgaacaaaagaatgtaaataaagatcgcttgaaagaacttggagcagctggtgtacttgaagttggaaataacattcaagctatttttggaccgaaatctgacacattaaaatcacaaattcatgatattatgtcaggtcgtacacctcatgttgaaaaagaagagcctgtaaaagtagaagaagctcctcaaaaagttgatgaaaacgaaacaatcgtttcaccaattgaagggaaaatcctaccaattacagaagtgccggatcaagtattttcaggaaaaatgatgggagatggatttgcaattgagccaacagaaggaacagtagtttctccagttaacggtgaaattgtcaacgtattccctacaaagcatgcaattggtattcaatctgaaggtggaaaagaaattttaatccacttcggtattgatactgtaaaattaaatggtgaaggttttgaagcacttgtagcacaaggtgacaaagtgaaacaaggacaaccattattaaaagtagatcttgcatttgtaaaagaaaatgcaccatctatcattacaccaattgtatttacgaatttacaacaagggcaacaagtcgaattgaaaaaagatggaaatgttaagaagggcgaaaacgctattattgacattcagtag

SEQ ID NO: 124674 - protein, 687 aa, Bacillus cereus ATCC 10987
MFKKIFGVLQKVGKALMLPVAILPAAGILLGFGNAFQNPQLTNVIPALKADWFVMVAKIMEQSGDIIFANLALLFAVGVAIGLAGGDGVAGLAAFVGYLIMNKTMSVFLEVDKLVKVTSSGADPVKIGFADPAYANVLGIPTLQTGVFGGIIVGIVAAYCYNKYFNIELPSYLGFFAGKRFVPIATATFSLIVGIIMCFVWPYIQGGLNTFSHQMIDANRTLAAFIFGLIERSLIPFGLHHIFYSPFWFEFGQYTNAAGELIRGDQKIFMAQLKDGVELTAGTFTTGKYPFMMFGLPAAALAMYHEARPENKKLAAGILGSAALTSFLTGITEPLEFSFLFVAPVLFGIHAVFAGLSFMTMQILGVKIGMTFSGGLIDFLLFGVLPGRTAWWWVIIVGLVLAVIYYFGFRFAIRKWDLKTPGREVANSNEGAGKAEAGELPREVLVALGGKENIASLDACITRLRVQVNEQKNVNKDRLKELGAAGVLEVGNNIQAIFGPKSDTLKSQIHDIMSGRTPHVEKEEPVKVEEAPQKVDENETIVSPIEGKILPITEVPDQVFSGKMMGDGFAIEPTEGTVVSPVNGEIVNVFPTKHAIGIQSEGGKEILIHFGIDTVKLNGEGFEALVAQGDKVKQGQPLLKVDLAFVKENAPSIITPIVFTNLQQGQQVELKKDGNVKKGENAIIDIQ

SEQ ID NO: 124675 - DNA, 1572 bp, Clostridium difficile 630
  CDS (1)..(1572): transl_table=11
atgaaaaaagtatttggtgttttacaaaaagtaggaaaatctctaatgctaccagttgcattacttcctgcagcaggtatattacttggcgtgagtaatgctttagcaggagacgcattgttggctcattttccagttttggcgaatcctacatttcaacttataataagtataatggaaagttcaggtcaaattatatttaataacttaccacttatatttgcagttggggtagctgttggtttaactgaaggagaaggtgttgcagcattggcagccatagtaggttttttaattctcaatacatctatgggtgttatggcgggtgttacagaagatatggtagacaattctatgtatgcaaatattgttggaataccaacaattcaaacaggggtatttggtggtattattatagggatagtggctgcttatctttataaaaagttttataaaattgaattacctcagtatctaggtttttttgcaggtaaaagatttgtaccaatcgttacttcattagttgctatagcaataggaattatattgtcttttatttggcctccaatacaagagggattacttagtttctcaaaaaatgttatagaagcaaatcaaacactagcagcatttatggaaggttctttggaaagactattaataccatttggtttgcatcatgttttccataatccattttggtatcaatttggagaatatgtaaataaagctggtgagcttgtaatgggtgaccaaaagatattctttgctcaacttaaagatggagtaaatttcacagcaggtacttttatgacaggtgcatttccatttatgatgtttggtcttccagcagcagctcttgctatggtgcatgaagcaaagccagaaaagaaaaaatttgtagcaggtataatggcatcagcagcattaacctcttttttaacaggaataaccgagccaatagagtttgcgtttttatttgttgcaccagtattatttgcaatacattgtttattttcaggtttatcatacgcaattatgcaattattaggagttaaaattggattcacattttcaggaggattaatagatttcttattatttggtgttcttcctaatagaactccatggtacttggctatcttggtaggtattggttttgcagtattatactatagtgtatttagatttatgataagaaagtttaatttaaagacaccaggaagagaagatgagtcagaaactaacgctgaagtcattgaaatgtctaagaatgaattagcatcagagattttgattgctttaggaaataaagacaacttaaagagcctagatgcgtgtataacaagacttagattggttgtaaatgatataaataaagtagataaagaaaaattgaaatcacttggagcagcaggtgttatggttattggcaacaatgttcaagctatatttggaccaaaatcagattcaataaagtctgatataaaagatataatagagggaaaaacaaaggttgaaagtactgttactaaaaatgttgataaaaataaagtgaaaaaaaatatgtaa

SEQ ID NO: 124676 - protein, 523 aa, Clostridium difficile 630
MKKVFGVLQKVGKSLMLPVALLPAAGILLGVSNALAGDALLAHFPVLANPTFQLIISIMESSGQIIFNNLPLIFAVGVAVGLTEGEGVAALAAIVGFLILNTSMGVMAGVTEDMVDNSMYANIVGIPTIQTGVFGGIIIGIVAAYLYKKFYKIELPQYLGFFAGKRFVPIVTSLVAIAIGIILSFIWPPIQEGLLSFSKNVIEANQTLAAFMEGSLERLLIPFGLHHVFHNPFWYQFGEYVNKAGELVMGDQKIFFAQLKDGVNFTAGTFMTGAFPFMMFGLPAAALAMVHEAKPEKKKFVAGIMASAALTSFLTGITEPIEFAFLFVAPVLFAIHCLFSGLSYAIMQLLGVKIGFTFSGGLIDFLLFGVLPNRTPWYLAILVGIGFAVLYYSVFRFMIRKFNLKTPGREDESETNAEVIEMSKNELASEILIALGNKDNLKSLDACITRLRLVVNDINKVDKEKLKSLGAAGVMVIGNNVQAIFGPKSDSIKSDIKDIIEGKTKVESTVTKNVDKNKVKKNM

SEQ ID NO: 124677 - DNA, 1566 bp, Clostridium difficile 630
  CDS (1)..(1566): transl_table=11
atgatgaagaaaatacaacgttttggaggggcaatgtttacaccaacactattatttgcttttgctgggataatggttggattctcaattgtatttcaaaatcagtcaattatgggttcacttgctacaccagaaaatatttggtaccaattttggggtgtaatatctagtggagcttggatggtatttaatcaattgccattattatttgctatttctttaccaatagcacttgcaaaaaagcaacaagcaagagcttgtatggaggctttagcaacgtatttgacttttaattattttgtaggttctatgttaagtttttggggaaaaagctttggagttgatttcgcagctgaaataagtgctggaagtggacttgtaagcattgctggtattaaaacattagatactggtatggttggtgctttgttaatatcaggtattgtcatttatattcataatagattttatgataaagaactgccagattttattggattatttagaggctcatcacttgtagttgcaatttgtttctttgttatgataccagttgcattattaacttgttttatttggcctcatattcaaaatgttattagatatttgcaaacgttttttataaatagtggaaatataggagtttggtgttatgcattcttacaaaagattttaataccaactggattacatcattttgtatatgcaccaatttgttatgatagtgttgttgttccgggtggtacatcagtatattgggctactcatattcaggattttcaaacttcagctaagactctaaaggaaatgtatccaatcggattttcattatccggattatcgaaggtgtttggttcattaggtgtatttggtgctttctatgtaactgcaaagccagaaaaaaagaaaaaagtattaggtttaatgattcctgctactcttactgcagtattaactggaattactgagccgttagaatttacatttttatttgtagcaccacttttattcctagtacatgcatttttagatgcatgcttgcaaacgatttcgtttgccctaggagttgttggtgattttggtggaggaattattaactgggttgtattaaattggcttcctcttggaatgtatcactggaaggtatatattgttcaagttgttgtagggattatattttcatttatctggttctttgtatttactttcttaattaagaagtttgatatgaaaactcctggtagagaggaagatagtgaagaaacaaaactatatactaaaaatgaatatttagaaacgaaagatgaaaaaggaaataaattgagtaaagcctctcaacaagcatctgaatacataaaattagttggtggagcagaaaatgttgtagatgttacaaactgtgctacgagattgagattaaccttgaaagatgactcaattatttctaaagaagaagattttaaggcagtaggtgcacatggtttagtgcataatggaaaagctgttcagattattattgggctttcagtaccaagtgtaagagaagaatttgaaaatttattataa

SEQ ID NO: 124678 - protein, 521 aa, Clostridium difficile 630
MMKKIQRFGGAMFTPTLLFAFAGIMVGFSIVFQNQSIMGSLATPENIWYQFWGVISSGAWMVFNQLPLLFAISLPIALAKKQQARACMEALATYLTFNYFVGSMLSFWGKSFGVDFAAEISAGSGLVSIAGIKTLDTGMVGALLISGIVIYIHNRFYDKELPDFIGLFRGSSLVVAICFFVMIPVALLTCFIWPHIQNVIRYLQTFFINSGNIGVWCYAFLQKILIPTGLHHFVYAPICYDSVVVPGGTSVYWATHIQDFQTSAKTLKEMYPIGFSLSGLSKVFGSLGVFGAFYVTAKPEKKKKVLGLMIPATLTAVLTGITEPLEFTFLFVAPLLFLVHAFLDACLQTISFALGVVGDFGGGIINWVVLNWLPLGMYHWKVYIVQVVVGIIFSFIWFFVFTFLIKKFDMKTPGREEDSEETKLYTKNEYLETKDEKGNKLSKASQQASEYIKLVGGAENVVDVTNCATRLRLTLKDDSIISKEEDFKAVGAHGLVHNGKAVQIIIGLSVPSVREEFENLL

SEQ ID NO: 124679 - DNA, 1428 bp, Clostridium difficile 630
  CDS (1)..(1428): transl_table=11
atgatgcaacaactgtcacttttaggaaagactatgctggtgccaatagctgtaatgccagcagcaggtatattaggattattatttggtccaaatatgctcaatgtgccagctatatctaatatatctaatatagtattttcaaatgtggactacttatttttattaggagcagctagtgcctactcaaagtctaaagacaagacaagtgtaatggttgcagccgtagttgcatatatgatatttaagtcaaatttagagttattgaatgatacattaaatgcaggtgtatttggtgggataattgttggagcttgtatagcatggacttacaataaaacatataaagttaaagttccagcatttttaagcttctttgcaggagaaaaatgtgtaattacactatcaccagtggttgctttaattttatcatatatatttagtttattatggatatatccacaagctgcaatgaatcaatttggtttttggttgggaggagctggtgcaataggaatattcttgtttttattctgtaaccgtgcactaataccaactgggttacatcaagttttaaatgcttacatattatttgaaatgggtgaatatacaacatcaacaggagaagttataagaggagaaattcctagatttatggcaggagacccaaatgcaggattcttctggacaggattttacataattatgatgttttcaatacctgctatttcttatgctatatataaaacagcacaagataaaaagaagcaagaagtaaaaggtgcaatgaccgctggagcattgacttcttttatggcaacagtaactgaaccaatagaattttcgtttttatttgcatctccaaagttatatataattcattctttttattctggtctaggtggagttgtactatatttactgggtgctcgcttgggttcatttaatggagcaagtataattgactatgtcttaagttttagttatggagataaagcgtggttagttatacctgtaggagttgtattctttgtattatattatgtaacatttaaatatataataataaaagataatgtgcaaacaccaggacgtgaagttgagatagagataggtgataaagttagtgaaaaagaaaagaatttaaaactttctcatggtaatttttcatatatggctaaacagataattaaaaattgtggtggttatgaaaatatagtgactcttaataattgtatgacgagattacgtttagaagtgaaggatgccactattttgaatgatgataatattaaaaaaacaggagccaaaggggtaattaaattgagtaatacatcagttcaaatcatcataggaacggatgttgttaaagtaaaggatgagatggaaatgcaacttgatgagttgagaaagcaggcagatgcataa

SEQ ID NO: 124680 - protein, 475 aa, Clostridium difficile 630
MMQQLSLLGKTMLVPIAVMPAAGILGLLFGPNMLNVPAISNISNIVFSNVDYLFLLGAASAYSKSKDKTSVMVAAVVAYMIFKSNLELLNDTLNAGVFGGIIVGACIAWTYNKTYKVKVPAFLSFFAGEKCVITLSPVVALILSYIFSLLWIYPQAAMNQFGFWLGGAGAIGIFLFLFCNRALIPTGLHQVLNAYILFEMGEYTTSTGEVIRGEIPRFMAGDPNAGFFWTGFYIIMMFSIPAISYAIYKTAQDKKKQEVKGAMTAGALTSFMATVTEPIEFSFLFASPKLYIIHSFYSGLGGVVLYLLGARLGSFNGASIIDYVLSFSYGDKAWLVIPVGVVFFVLYYVTFKYIIIKDNVQTPGREVEIEIGDKVSEKEKNLKLSHGNFSYMAKQIIKNCGGYENIVTLNNCMTRLRLEVKDATILNDDNIKKTGAKGVIKLSNTSVQIIIGTDVVKVKDEMEMQLDELRKQADA

SEQ ID NO: 124681 - DNA, 2067 bp, Staphylococcus aureus subsp. aureus MRSA252
  CDS (1)..(2067): transl_table=11
atgtttaagaaattgtttggacaattgcaacgtatcggtaaagcattaatgttacctgttgcgattttaccagcagctggtattttattagcgtttggtaacgcaatgcacaacgaacaattagtagaaattgcaccatggttaaaaaacgatatcattgtaatgatttcgtcggtcatggaagcagcaggacaagttgtatttgataacttgccattattatttgcagttggtacagcacttggattagcaggaggagacggtgttgcagcattagcagcgctagtaggttacttaattatgaatgcaacaatggggaaagtgttgcatattacaattgatgacattttctcatatgccaaaggggcaaaagaattaagtcaagcagcgaaagaaccagcacatgccttagtattaggtattccaacattacaaacgggtgtgtttggtggtattatcatgggtgctttagccgcatggtgttacaacaaattttataatattacactaccaccatttttaggattctttgcaggtaaacgatttgtaccgattgtgacatcggtcgtagcaattgcaacaggtgtggttttaagttttgcgtggccaccaattcaagatggattaaatagtttatcgaatttcttattaaataaaaatttaacattaacaacttttatattcggtattattgaacgctcattaattccatttggtttacatcatattttctattcaccgttctggtttgaattcggaagttatacaaatcacgcaggtgaattagttcgtggtgaccaacgtatttggatggcacaattgaaagatggcgtaccatttactgctggtgcatttactactggtaaatatccattcatgatgtttggtttaccagcggcggcatttgctatttataaaaatgcacgaccagaacgtaaaaaaatcgtgggtggtttaatgttatcagcaggattaactgcatttttaactggtatcactgagccattagaattttcattcttatttgtagcaccagtactttatggaattcacgtattattagctggtacatcattcttagtaatgcatttattaggcgttaaaattggtatgacattctcaggtggtttcatagattatattttatatggtttattaaactgggatcgttcacacgcattattagttattccagtcggtattgtatatgctatcgtgtattacttcttattcgactttgcaattcgtaagtttaaattgaaaacaccaggtcgtgaagatgaagaaactgaaattcgtaactctagtgtcgcaaaattaccatttgatgtcttagatgcaatgggtggaaaagaaaacattaaacatttagatgcatgtattacacgtctgcgcgtagaagtggttgataaatcaaaagtagatgtagcaggtattaaagctttaggcgcatcaggtgtattagaagttggaaacaatatgcaagctatctttggtccaaaatcagatcaaattaaacatgatatggcgaagattatgagtggtgaaattacaaagccaagtgaaacgacagtgactgaagaaatgtcagatgaaccagttcacgtagaagcacttggaacaacagacatctatgcaccaggtgtcggtcaaatcattccattatcagaagtacctgatcaagtattcgctggtaaaatgatgggtgatggtgttggctttatccctgaaaaaggtgaaattgtagcaccgtttgatggtacagtgaaaacaatcttccctacgaaacatgcgataggattagaatctgaaagtggtgtcgaagtacttattcatattggtatcgatacagtgaaactgaatggtgaaggattcgaaagtctgattaacgttgatgaaaaagtaacacaaggtcaaccattaatgaaagtgaatttagcatacttgaaagcgcacgcaccaagcatcgttacaccaatgattattacaaatcttgaaaataaagaacttgtcattgaagatgtccaagatgctgatccaggtaagctaattatgacagtcaaataa

SEQ ID NO: 124682 - protein, 688 aa, Staphylococcus aureus subsp. aureus MRSA252
MFKKLFGQLQRIGKALMLPVAILPAAGILLAFGNAMHNEQLVEIAPWLKNDIIVMISSVMEAAGQVVFDNLPLLFAVGTALGLAGGDGVAALAALVGYLIMNATMGKVLHITIDDIFSYAKGAKELSQAAKEPAHALVLGIPTLQTGVFGGIIMGALAAWCYNKFYNITLPPFLGFFAGKRFVPIVTSVVAIATGVVLSFAWPPIQDGLNSLSNFLLNKNLTLTTFIFGIIERSLIPFGLHHIFYSPFWFEFGSYTNHAGELVRGDQRIWMAQLKDGVPFTAGAFTTGKYPFMMFGLPAAAFAIYKNARPERKKIVGGLMLSAGLTAFLTGITEPLEFSFLFVAPVLYGIHVLLAGTSFLVMHLLGVKIGMTFSGGFIDYILYGLLNWDRSHALLVIPVGIVYAIVYYFLFDFAIRKFKLKTPGREDEETEIRNSSVAKLPFDVLDAMGGKENIKHLDACITRLRVEVVDKSKVDVAGIKALGASGVLEVGNNMQAIFGPKSDQIKHDMAKIMSGEITKPSETTVTEEMSDEPVHVEALGTTDIYAPGVGQIIPLSEVPDQVFAGKMMGDGVGFIPEKGEIVAPFDGTVKTIFPTKHAIGLESESGVEVLIHIGIDTVKLNGEGFESLINVDEKVTQGQPLMKVNLAYLKAHAPSIVTPMIITNLENKELVIEDVQDADPGKLIMTVK

SEQ ID NO: 124683 - DNA, 1497 bp, Erwinia carotovora subsp. atroseptica SCRI1043
  CDS (1)..(1497): transl_table=11
gtgagtattctgagctatttacaaaaaatcggccgggcattgatggtgcctgtcgcgacgctgcctgctgccgctatcctgatggggataggttattggattgatccggttggttggggaagtgagaacgcgttggcggcactattcctcaaatcgggtggggcgatcattgagaatatggcggtgctgtttgcggtgggcgtcgcttacggtatgtcgaaagataaggatggtgcggccgcattgaccggctttgtcggttatctggtgctcactacgctgtgttcaccggctgttgtcgccatgatccaacggatccctgttgaactggtgccgactgcgtttggcaagattgaaaaccagttcatcggtattctggtcggtgtgatgtccgctgaactgtataaccgtttcagtcaggttgaattgcctagagcgctatctttcttcagcggacgccggttggtgccgattctggtttctttcttgatgattctggtggcgtttattttaatgtccatctggccagcaatttacaatgtactggtgtcgttcggtgaatacattcaacagttaggatcggttggcgctgggctctatgcgttctttaaccgcttgctgatccccgtagggttacaccatacgcttaattccgtgttctggtttgatgtcgcgggtattaacgatattcctaacttcctggccggccaacagtctatcgattctggcaaagctgtggtggggattaccggacgttatcaggcgggcttcttccctataatgatgttcggcctgccgggagctgcactggcgatttaccactgcgcgcgccctgagaacaaaagtaaagttgccgggattatgctggcggcggcgtttgcttcattcttcactgggatcactgaaccgctggaattctcattcatgttcgtggcgccagtgctgtacttcctgcatgcgttactgacgggtttttccgtctttatcgctgccagtatgcattggattgctgggtttggcttcagtgccggtctggtggatatggtgctgtcctcgcgtaacccgctagccactcaatggtacatgctgatagcgcaggggttggtgttcttcgtcatttattatgtggtgttccgcttcacgattactcgcttcaatctgttaacaccgggacgtgaactggcagtgagcggtagcgaagccgatggatatgacgtgagtaccgcatctgcgggtgataaatcaagcgatacggcgacgttggcgcgtggctatttgcaggcgcttggcggcaaagccaacctgatcggcatcgatgcctgtatcacgcgtttgcgtttgaatgtagctgactcttctctggttgatgatgctcaggcgaaacgtcttggtgcggcaggtgttattcgtctgaataagcagagcgtacagattgtcgtgggcacgcaagctgaatcgatagcaattgcgctgaaagcggaacatgacaaagcgtaa

SEQ ID NO: 124684 - protein, 498 aa, Erwinia carotovora subsp. atroseptica SCRI1043
MSILSYLQKIGRALMVPVATLPAAAILMGIGYWIDPVGWGSENALAALFLKSGGAIIENMAVLFAVGVAYGMSKDKDGAAALTGFVGYLVLTTLCSPAVVAMIQRIPVELVPTAFGKIENQFIGILVGVMSAELYNRFSQVELPRALSFFSGRRLVPILVSFLMILVAFILMSIWPAIYNVLVSFGEYIQQLGSVGAGLYAFFNRLLIPVGLHHTLNSVFWFDVAGINDIPNFLAGQQSIDSGKAVVGITGRYQAGFFPIMMFGLPGAALAIYHCARPENKSKVAGIMLAAAFASFFTGITEPLEFSFMFVAPVLYFLHALLTGFSVFIAASMHWIAGFGFSAGLVDMVLSSRNPLATQWYMLIAQGLVFFVIYYVVFRFTITRFNLLTPGRELAVSGSEADGYDVSTASAGDKSSDTATLARGYLQALGGKANLIGIDACITRLRLNVADSSLVDDAQAKRLGAAGVIRLNKQSVQIVVGTQAESIAIALKAEHDKA

SEQ ID NO: 124685 - DNA, 1434 bp, Erwinia carotovora subsp. atroseptica SCRI1043
  CDS (1)..(1434): transl_table=11
atgttcaagaatgcattcgcaaacctgcaaaaagtaggtaagtcgctaatgctgcccgtatccgtactccctatcgcaggtattctgctgggtgtcggttcggccaattttagctggttacctgaaattgtctccagcgtcatggcacaggctggtgactcggtatttgccaacatgccgctgatttttgctatcggtgttgccctgggcttcaccaacaatgacggtgtttccgcactggcggcggtggtggcttacggcatcatggtgaaaaccatggcggcgattgcgccgatagttcttaatctaccggctgccgagattactgcgaagcacttggcagataccggtgttctgggcgggatcattgccggttcgattgccgcgtatatgtttaaccgcttctaccgcatccaactgcctgagtatctgggcttctttgccggtaaacgctttgtaccgattatttcgggtctgacggcaatcattatcggtacggtgttgtctttcatatggccaccggtcggtagtgctatccaggtattctctcactgggcagcgaatgagaacccgacgttggcattcggtatttacggtgtcgttgaacgttctctggtaccgtttggtctgcaccatatctggaacgtacctttccagatgcaagtgggtgaattcaccaatgcggctggccaggttttccacggtgatatcccacgttacatcgcgggtgacccaactgcgggtaaattgtccggcggcttcctgttcaaaatgtacggtctgccagcggcggcgattgctatctggcattcggctaaaccagaaaaccgcgcgaaagtgggcggtatcatgatctctgcggcactgacctcgttcctgacgggtatcactgagccaattgagttctcattcatgtttgttgcgccgatcctgtatgtgatccatgcgattctggcgggtctggcattcccaatctgtatcctgttgggtatgcgtgatggtacaagcttctctcacggtctgatcgactttgtggtactgagcggcaacggtagcaacctgtggctgttcccgattgtgggtctgtgctatgcgttgatttactacaccattttccgcgttctgattactaagctgaacctgaaaacgccgggccgtgaagatagctcatctgagcaagtttcgcaggacagcaccgaaatggctgctgcactggttagcgcgtttggtggtaaagaaaacatcactaacctggatgcatgcatcactcgtttgcgcgttagcgtaggcgatgtggctaaagttgatcaggctggcctgaaaaaactgggcgcagcaggtgttgttgtggcaggttccggtgttcaggcaattttcggtacaaaatccgataacctgaaaaccgatatggacgactacatccgtaaccattga

SEQ ID NO: 124686 - protein, 477 aa, Erwinia carotovora subsp. atroseptica SCRI1043
MFKNAFANLQKVGKSLMLPVSVLPIAGILLGVGSANFSWLPEIVSSVMAQAGDSVFANMPLIFAIGVALGFTNNDGVSALAAVVAYGIMVKTMAAIAPIVLNLPAAEITAKHLADTGVLGGIIAGSIAAYMFNRFYRIQLPEYLGFFAGKRFVPIISGLTAIIIGTVLSFIWPPVGSAIQVFSHWAANENPTLAFGIYGVVERSLVPFGLHHIWNVPFQMQVGEFTNAAGQVFHGDIPRYIAGDPTAGKLSGGFLFKMYGLPAAAIAIWHSAKPENRAKVGGIMISAALTSFLTGITEPIEFSFMFVAPILYVIHAILAGLAFPICILLGMRDGTSFSHGLIDFVVLSGNGSNLWLFPIVGLCYALIYYTIFRVLITKLNLKTPGREDSSSEQVSQDSTEMAAALVSAFGGKENITNLDACITRLRVSVGDVAKVDQAGLKKLGAAGVVVAGSGVQAIFGTKSDNLKTDMDDYIRNH

SEQ ID NO: 124687 - DNA, 1590 bp, Erwinia carotovora subsp. atroseptica SCRI1043
  CDS (1)..(1590): transl_table=11
atgctcagtcaaattcagcggtttggtggcgcaatgttcacacccgtgctgctatttccttttaccggtatcgtcgtcgggttggcgatcatgctgtcgaatcccatacttgtcggtgagttagccaacccggacagtctatttttccagatagtttatgtgattgaagaaggtggatggaccatctttcgcaatatgccactgatttttgctttctgtctgccgattggattggcaaatcactcgcctgccagagcatgtcttgcagcactggtttcttacctgacctttaattatctaattcaagcaatggccacccaatggggcagctatttcaatattgatttcagcgctgagatcggcggcatcagtggattaacgacgatcgcaggtatcaaaacgctggataccagcattattggcgctatcgccatctccgcctttatcaccgcgcttcacaaccgttattacaataaaacgctgccggtttatctcggcatatttcaaggcactgcttttgtggtgatcatcagcttcctgctgatgcttccagccgcctggttgaccttacttgtctggcctaaaatccagatgggaatcgcgtcccttcagggattgctgctggcatcaggcgctgccggagtctgggtatacacgtttctggaacgcattttaatccccaccggactgcatcatttcgtttacggaccgtttatctatggtccagtcgcagtagaaggcggtattcaggttaactggatcgccaatattcaggctttcagtcagtccacactgccattgaagacgctttttcccgttggtggattcgcactgtttggcaacgctaagatttttggtgccatcggcatcgccgcagccatgtacgccacagccagccctgaaaacaaaagcaaagttgcaggcttgctgatccctgccgtacttacctccgtgctggttggtatcaccgaaccacttgagttcactttcttgttcatcgcccctgtcctgttcgcgatccatgctgtgctggccgccacgatggccaccgtgatgtatatgctgggcgtagtcggcaatatgggcggcgggctgattgaaatcgccacgcagaattggctccccatgttccaccatcacgccatgaatatggtcatccaaattagcgtcggcatcctgttctcttttctctatttcctgattttccgcgccgtgattttgcgtttcaacatcaaaacaccgggacgggaagacagcgaaattcgtctctattcaaaagcggatcttgctggaaaaaccacgcctcaacacatgacacaacacgcagcacaacaggacgaagccaaagcgtatctgaccgcgttgggcggagcagaaaacatagccagtctcaccaactgcgcaacccgtttacgcatcacgctggcagatccaacgctaatgcagcccgatgacgtattccgccagctcggcgcacacggcgtcgtccgcaacagtcacgccattcagattatcgtcggcctgtcggttcctcaggtacgtgatcgtctggaaaatctcatgcacaacacacatcctatggagatttaa

SEQ ID NO: 124688 - protein, 529 aa, Erwinia carotovora subsp. atroseptica SCRI1043
MLSQIQRFGGAMFTPVLLFPFTGIVVGLAIMLSNPILVGELANPDSLFFQIVYVIEEGGWTIFRNMPLIFAFCLPIGLANHSPARACLAALVSYLTFNYLIQAMATQWGSYFNIDFSAEIGGISGLTTIAGIKTLDTSIIGAIAISAFITALHNRYYNKTLPVYLGIFQGTAFVVIISFLLMLPAAWLTLLVWPKIQMGIASLQGLLLASGAAGVWVYTFLERILIPTGLHHFVYGPFIYGPVAVEGGIQVNWIANIQAFSQSTLPLKTLFPVGGFALFGNAKIFGAIGIAAAMYATASPENKSKVAGLLIPAVLTSVLVGITEPLEFTFLFIAPVLFAIHAVLAATMATVMYMLGVVGNMGGGLIEIATQNWLPMFHHHAMNMVIQISVGILFSFLYFLIFRAVILRFNIKTPGREDSEIRLYSKADLAGKTTPQHMTQHAAQQDEAKAYLTALGGAENIASLTNCATRLRITLADPTLMQPDDVFRQLGAHGVVRNSHAIQIIVGLSVPQVRDRLENLMHNTHPMEI

SEQ ID NO: 124689 - DNA, 1680 bp, Propionibacterium acnes KPA171202
  CDS (1)..(1680): transl_table=11
gtgccaactcggtccgcgacattaaggcaatcctgtccaccggagccgacatcgttgccgttggtggcacaatcacccgtcccgcccacatctgcacccacttcatcgacgcgattcgcgcccgcatcccccacacgtcgttggagaactgacatgttcaagactctgcagaagatcggtaaggcgttcatgctaccgatcgccatcctccctgccgcaggtctgctgctagggatcggtggtgcgctgtccaaccccaccactgtcaagagctacccagttctcgacaatcccatcctccaagacatcttccaggtaatgagcgcagctggaaatgtcatcttcgaaaaccttgccctgctactgtccatcggcttgtgcatcggcctggcaaaacgtgacaagggaaccgcggcactcgccggcatcaccggtttcctggtcatgacagccaccacgaaggcgcttgtcgttctctcccgtcaccccgatcggacaatcgacaccggtgtcgttggttcactcgtcatcggtgccatcgccgtatggcttcacaaccgctatcacaacatcgagctccccgctttcctcgggttcttcggaggctcacgcttcgttcccattgttacggctttcgcgggaatcatcattggcgcattcttctttgtcgtctggccaccaatccaggccgggatggtgtcagccggcactgcgatcgccgactggggtgtcattggtacgttcttctatggcttcctcatgcggctagccggcgccgtcggccttcaccacatgatctatccgatgttctggtacacacccctcggcggtaccgaggcagtcgccggcaaaacggttgtaggcgcacagaagattttcttcgcccagctggctgatcccaaccatgtcggactgttcacccattccaccaagtactttgccggtcgcttcgccaccatgatgtttggactgcctggggcctgtctggcgatgtggcgctgcgttcccaaggggcgtcgcgccaagtacaccggattgttcgcctccgtcgccttcacgtccttcctgaccggaatcaccgaacccatcgaatacatgttcctcttcgtggccccgctgctctacgtgttccattcggtcctcgatggcgtctccttcctggtggcggacctcatcaacattcgtattggcaataccttctcgggtggtgctatcgactacctcctgttcggtgtgctgcaaggtgaggccaagacccactggctgtatgtgttgcctgtcggcgcgctctggttcgtcatctactatttctccttcacctttttcatcaagaaattccggatcgccaccccgggacatctcgaggacaccatgactgccgccacacccaccgatagaaggtcccaggaaaagtccgagcggaggaacgacgggatcgacgagacagcggcggagatcatcactgccttgggcggtgccgagaacatcgaggacgtcgacgcgtgcatcacgcgtctgcgtgtgtcagtaaaagcgcctgatcaggtcagcaaagccagcctcaagaatctcggagcgaccgaggtcttcgaggtcggcggcggagtccaggccgtctacggagccaaagccatcctctacaagaacgccatcaacgcccaactcggaatcgacgactga

SEQ ID NO: 124690 - protein, 559 aa, Propionibacterium acnes KPA171202
MPTRSATLRQSCPPEPTSLPLVAQSPVPPTSAPTSSTRFAPASPTRRWRTDMFKTLQKIGKAFMLPIAILPAAGLLLGIGGALSNPTTVKSYPVLDNPILQDIFQVMSAAGNVIFENLALLLSIGLCIGLAKRDKGTAALAGITGFLVMTATTKALVVLSRHPDRTIDTGVVGSLVIGAIAVWLHNRYHNIELPAFLGFFGGSRFVPIVTAFAGIIIGAFFFVVWPPIQAGMVSAGTAIADWGVIGTFFYGFLMRLAGAVGLHHMIYPMFWYTPLGGTEAVAGKTVVGAQKIFFAQLADPNHVGLFTHSTKYFAGRFATMMFGLPGACLAMWRCVPKGRRAKYTGLFASVAFTSFLTGITEPIEYMFLFVAPLLYVFHSVLDGVSFLVADLINIRIGNTFSGGAIDYLLFGVLQGEAKTHWLYVLPVGALWFVIYYFSFTFFIKKFRIATPGHLEDTMTAATPTDRRSQEKSERRNDGIDETAAEIITALGGAENIEDVDACITRLRVSVKAPDQVSKASLKNLGATEVFEVGGGVQAVYGAKAILYKNAINAQLGIDD

SEQ ID NO: 124691 - DNA, 1629 bp, Borrelia garinii PBi
  CDS (1)..(1629): transl_table=11
atgtcaacatcatccgcatctatatctatatttacaatattgcaaaaagtaggaaaagccttcatgctttctatagcacttttaccagcagctggaattttattgggaatcggaggcgcatttactaatgagacaatgattcaggcttatggattagaagaaatccttgggaaaggaagtgtagccaactcaatactttatcttatgaaatatacaggagaagtaatttttgctaacttacctttaatgtttgcagcagcaattccaatcggacttgctaaattagaaaaaggaacagctgctttagcgggagtagtcggctttttagttatgcatcaaactataaatggaatcttgtacatacaaggaatcacaccagaaagtgcaagcttaaaagcactattggaattaggaatgcctgaaacagctgcaactgccaaaagtcaggaatatacaagtgtacttggaatattctctcttcaaatgagcgtaatgggaggactgatagcaggatttgttgctgtctttcttcataacagattttataatattcaattacccacatttttagcattttttggaggcacaagatttgtgccaatcataaccacaatgacaatgtttgttgtaggaatatttttaacatttatttggccttttatccaaggtgcaatgacttcgtttgggaacattgtagaacaatctgggctttttggaacatttgtatatggagcaataaaaagatctttaattccatttggacttcaccatatattttatttgccattttggcaaacagctgttggtggggcaatggaaataaatggagaactcatatcaggagcacaaaatatattcttcaaacaacttgcagatcccaatactgtacattttgaagttgcaaagggaacaaggttttttagcggagaatttgttgttatgatttttggactacctggggctgcacttgctatgtaccatacatcaaagcctgaaaataaaaaaaacgtagcttcattgctaatatctgctagctttacatcaatgttaacaggaattacagaacctcttgaatttgcattccttttcgcagcaccagcactttattactttatatatgttcctctttttggattggcatatcttttaacacaccttttaaacgtaggggttggactaacattttctggaggatttatagatatgtttctatttggaatacttcaggggaatagtaaaacaaattggatagcaattcctatcttaggaatcttctactttattggattttactttatatttaaatttgtaatcatgaaattcaatcttaaaacaataggaagagaagatgaagaaatggaaaaagatgaaataagtttggaaaaaacaaatttatcagaaactgcttcaaaggtattagaaggtcttggaggaaaagataatattacatatattgacgcatgtgcatcaagactaagaattaatctaaaacaaatagaattcatcaaatcagatgcctattttaagcatctgggtgctagcggaatgttaaaaaaaggaaatagtgtccaaattgtatttggaggattatcagataacataaaaatggaaatcgacaagcttatgtaa

SEQ ID NO: 124692 - protein, 542 aa, Borrelia garinii PBi
MSTSSASISIFTILQKVGKAFMLSIALLPAAGILLGIGGAFTNETMIQAYGLEEILGKGSVANSILYLMKYTGEVIFANLPLMFAAAIPIGLAKLEKGTAALAGVVGFLVMHQTINGILYIQGITPESASLKALLELGMPETAATAKSQEYTSVLGIFSLQMSVMGGLIAGFVAVFLHNRFYNIQLPTFLAFFGGTRFVPIITTMTMFVVGIFLTFIWPFIQGAMTSFGNIVEQSGLFGTFVYGAIKRSLIPFGLHHIFYLPFWQTAVGGAMEINGELISGAQNIFFKQLADPNTVHFEVAKGTRFFSGEFVVMIFGLPGAALAMYHTSKPENKKNVASLLISASFTSMLTGITEPLEFAFLFAAPALYYFIYVPLFGLAYLLTHLLNVGVGLTFSGGFIDMFLFGILQGNSKTNWIAIPILGIFYFIGFYFIFKFVIMKFNLKTIGREDEEMEKDEISLEKTNLSETASKVLEGLGGKDNITYIDACASRLRINLKQIEFIKSDAYFKHLGASGMLKKGNSVQIVFGGLSDNIKMEIDKLM

SEQ ID NO: 124693 - DNA, 1434 bp, Yersinia pseudotuberculosis IP 32953
  CDS (1)..(1434): transl_table=11
atgtttaagaacgcatttgcaaacctgcaaaaggtaggtaaatcgctaatgctaccggtatccgtgttgcccatcgcaggtattctgctgggtgtcggttccgcgaattttagctggctaccgtcggtagtctctcacgtaatggcagaagccggtggttccgtctttgctaacatgccattgatttttgctattggtgttgcgcttggctttaccaacaacgacggtgtatctgcgttggcggcggttgtggcttacggcatcatggtaaaaaccatggcggtagtcgcacctctggtcttgcatctgccagcagaagaaattgcgactaagcatttagctgataccggggtattgggcgggattattgccggttcggttgccgcctatatgtttaaccgtttctaccgtattcagttaccagaatatttgggcttctttgcgggcaaacgttttgtgccgattatctccgggtttaccgcgattttcttaggcatactgctgtccttcatctggccacctatcggcaaagctatccaaattttctccgagtgggcggcttatcagaactcggtcgtcgcttttggtatttacggcgttgttgaacgttcattggtaccattcggtctgcaccatatctggaacgtgccattccaaatgcaaattggtgagtacaccaacgcagcgggtcaggtattcaacggtgatatcccacgttatatggcgggtgacccaacagcgggtaagttatcggggggtttcctgtttaaaatgtacggtctgccagcggcagccattgcgatttggcattcagccaaaccagaaaaccgtgcaaaagtgggcgggatcatgatctcggcagcactgacatcattcctgaccggtattaccgagccaatcgaattctcctttatgttcgtggcaccaattttgtattttatccatgcaatcttggcaggtttggccttcccaatctgtattctgttagggatgcgtgatgggaccagtttctctcatggcttgattgattttgttgtcctgagcggtaacagcagccgtatctggttgttccctctggtaggtatctgctacggtctggtgtattacaccatcttccgtgtattgattactaaactgaatttgaaaacaccgggacgtgaagattcgtctactgagcaatcagtacagggtggcacagaaatgtcagccgctctggttgaagcatttggtggtaaagacaacattactaacctggatgcttgtatcactcgccttcgtgttagcgtggcagatgtgtccaaggttgatcaggctgggctgaagaagttaggtgctgcgggtgttgttgtggcaggctctggtgttcaggctatcttcggtaccaaatctgacaacctgaaaactgatatggacgaatacattcgtaaccattaa

SEQ ID NO: 124694 - protein, 477 aa, Yersinia pseudotuberculosis IP 32953
MFKNAFANLQKVGKSLMLPVSVLPIAGILLGVGSANFSWLPSVVSHVMAEAGGSVFANMPLIFAIGVALGFTNNDGVSALAAVVAYGIMVKTMAVVAPLVLHLPAEEIATKHLADTGVLGGIIAGSVAAYMFNRFYRIQLPEYLGFFAGKRFVPIISGFTAIFLGILLSFIWPPIGKAIQIFSEWAAYQNSVVAFGIYGVVERSLVPFGLHHIWNVPFQMQIGEYTNAAGQVFNGDIPRYMAGDPTAGKLSGGFLFKMYGLPAAAIAIWHSAKPENRAKVGGIMISAALTSFLTGITEPIEFSFMFVAPILYFIHAILAGLAFPICILLGMRDGTSFSHGLIDFVVLSGNSSRIWLFPLVGICYGLVYYTIFRVLITKLNLKTPGREDSSTEQSVQGGTEMSAALVEAFGGKDNITNLDACITRLRVSVADVSKVDQAGLKKLGAAGVVVAGSGVQAIFGTKSDNLKTDMDEYIRNH

SEQ ID NO: 124695 - DNA, 1695 bp, Borrelia garinii PBi
  CDS (1)..(1695): transl_table=11
atgattaattttattaaaataattaacttttcaagtttgcaaaaattttctaaagcactacgggtgcctatttctattctaccagtttcatgtttattgattggcattggatctgtattttcaaatccttctaatattgtttatgttgataaattcttttttcaagatgttttaggtttaatgaaggctataggtaatgctattcttctcaatatgcctttgattttttctgttgggatttctattggagttgcaagaattgggcaaggaacagctgctttagggggtcttgttggttatttgacatttaatattactggaaattattttattgagactttttcaggacttgttgaagcagaagcgatgtcttctgtggggcgtataaattttctcggtgttcaaactttaaatacgggaattgcaggttctttggcggtagggcttttggttggttatttgcataacaaattttataatatgaagctgccaaaggcttttgtttttttttcagagtgccattttgcgcccatagtaatagttttgcctttttgtgttattttggctatatgtttttgtttgatttggtcaagtgttgacaagttaattgcatctttaggtttgtttgtttttagatttgaacattttggcagtttcctttatggatttttaaatagacttttattgcctttgggattgcattctattttatcttttccttttgagtttacttctttaggtggagtggagacaattaatggcaatacctttagaggtattaagaatatatttcatgcgcagttattagacccatcgcttgctaaattttcaccaggccttgctaagattagtagcggattttatctctctatcatgttcggactacctggagcagcattaggggtttacaaaggaattgttcatgaagataaaagtaaggttgcagcgcttcttttttccggcgctttgacggcttttttgacaggaataaccgaacctttagaatttttatttattttcacggcgcctttgctttattttgttcatgccatttattctggatttgcattattgtttgctaatttttttgatgttaggattggcaataccttttctactggatttttggatttttttatgtttggaatacttcaaggaaattctagaacaaattggattagtatagtacctttaggagtaatcttttttgctctttattattttacttttagttggctttatagatattttgattttcagatatttgttgcagacgatccatttttcgaaggtcaagaaggcaagctagagagtcttggtattgctcatcttttaattcaaggtcttggtggatttgataatattaaaaagattgatgtttgttctacaagattgcatgtagatgttgttaatactgagcttattgataatgatttgctaaaagaggctggagttcttaagatagggcttgttaatggcaaagtgcaacttttttatggatctaattcatattatattaaaaaggctattgatacctattctccaaaaagtctttttgaagctagtgttatggttgcagttgataatgtaaaaaaaggccttaagacttatattgaaatgaaagaagataaaaaacttgaaaagcagggcaaatcgggaaaaacttataagcttagcgaattagaagaagattaa

SEQ ID NO: 124696 - protein, 564 aa, Borrelia garinii PBi
MINFIKIINFSSLQKFSKALRVPISILPVSCLLIGIGSVFSNPSNIVYVDKFFFQDVLGLMKAIGNAILLNMPLIFSVGISIGVARIGQGTAALGGLVGYLTFNITGNYFIETFSGLVEAEAMSSVGRINFLGVQTLNTGIAGSLAVGLLVGYLHNKFYNMKLPKAFVFFSECHFAPIVIVLPFCVILAICFCLIWSSVDKLIASLGLFVFRFEHFGSFLYGFLNRLLLPLGLHSILSFPFEFTSLGGVETINGNTFRGIKNIFHAQLLDPSLAKFSPGLAKISSGFYLSIMFGLPGAALGVYKGIVHEDKSKVAALLFSGALTAFLTGITEPLEFLFIFTAPLLYFVHAIYSGFALLFANFFDVRIGNTFSTGFLDFFMFGILQGNSRTNWISIVPLGVIFFALYYFTFSWLYRYFDFQIFVADDPFFEGQEGKLESLGIAHLLIQGLGGFDNIKKIDVCSTRLHVDVVNTELIDNDLLKEAGVLKIGLVNGKVQLFYGSNSYYIKKAIDTYSPKSLFEASVMVAVDNVKKGLKTYIEMKEDKKLEKQGKSGKTYKLSELEED

SEQ ID NO: 124697 - DNA, 1545 bp, Borrelia garinii PBi
  CDS (1)..(1545): transl_table=11
atggtaaagggttttgaacaagctcaaaaatttgggcgttctttcatgcttcccattgctattttgccagcagcagggttgcttttaggaattggaggctctctttctaatccggaaactgttaagtcgtattcttttttagatatatttttcttacaatcagttttcaagataatgagtgcatcaggttctattattttttcgaatttagcgccaatattttctattggggttgctgttgggcttgccaagtcagataggggtacagctggaattgcagcatttattggttaccttgtaatgaatgctactattggggttttaattgatatgtcgggcaaagcagagtctctttctagcggtgctgtgggtttgattcttggaattaagacgttagaaacaggggtttttggcggagttgtagttggtattttgacctattatcttcattctaggtttaacaaggtagatttacccaaggctcttgggtttttttcgggatccagatttgtgccgattattgtgtctttttctagtatttttcttgctgtaattatgtttattttttggccatttgtacaaaatggaattaataaagtaggaggcttggtagattcaaccggctatatcggaacacttatttttggaatttttttaagaatgcttggaccttttggcctgcatcacatattttatttaccattttggacaacaggccttgggggatctgttattattgatggaaagttgattgaagggactcaaaatatcttctttgcagaacttgcttctcaaggtacaagtagattttttgttggaactagtcgttttatgagtggacgatttattactatgatgtttggtttgccaggagccgcacttgcgctatactacaccgcaaagtatgatgagagaacaaaagtttttggtcttttaatgtctgcagccctaacatcatttttaacaggcataacagagcctcttgaattttcttttctgttcgtagctcctattctttatattgttcatgctacatttgatggatttgcttttatgctggcgcatattcttcaaattacaataggtcaaacattttctggggggtttattgattttattctttttggtattttgcaggggaattcaagaactaattggcttttggtgccagttgtaggcactgtttggtttttcctttattactttacttttgtatttttaataaataaatttgattttaaaacccctggtagaacgcaagatttaaattctggagattctccaaattctaagagtagtgaattcgaagaaaattatgctactaaggttattattgggcttggcggtgcttcaaatattgttgagcttgattgttgtgcacccaggttaagagttacagtaagagatgctcttaaagtttctgaaaaaattttaaaaaaaaccggttccaaaggagtaattattaaaggtaatggggttcaggttgtttatggaccaggtgttagcgttcttaaaaatgaaatagaagaattgctagatgattga

SEQ ID NO: 124698 - protein, 514 aa, Borrelia garinii PBi
MVKGFEQAQKFGRSFMLPIAILPAAGLLLGIGGSLSNPETVKSYSFLDIFFLQSVFKIMSASGSIIFSNLAPIFSIGVAVGLAKSDRGTAGIAAFIGYLVMNATIGVLIDMSGKAESLSSGAVGLILGIKTLETGVFGGVVVGILTYYLHSRFNKVDLPKALGFFSGSRFVPIIVSFSSIFLAVIMFIFWPFVQNGINKVGGLVDSTGYIGTLIFGIFLRMLGPFGLHHIFYLPFWTTGLGGSVIIDGKLIEGTQNIFFAELASQGTSRFFVGTSRFMSGRFITMMFGLPGAALALYYTAKYDERTKVFGLLMSAALTSFLTGITEPLEFSFLFVAPILYIVHATFDGFAFMLAHILQITIGQTFSGGFIDFILFGILQGNSRTNWLLVPVVGTVWFFLYYFTFVFLINKFDFKTPGRTQDLNSGDSPNSKSSEFEENYATKVIIGLGGASNIVELDCCAPRLRVTVRDALKVSEKILKKTGSKGVIIKGNGVQVVYGPGVSVLKNEIEELLDD

SEQ ID NO: 124699 - DNA, 1479 bp, Symbiobacterium thermophilum IAM 14863
  CDS (1)..(1479): transl_table=11
gtgcgagagaaggcggcgttcttccagcgggcctcggccagcctgatggttcccctgaccttcgtgccgctcccggcggtgctggtggccctgggaaccgtcctggggatcggcccgctggagtcggcggggctggagctgctgcgggtgtggctgccgctgttcttcgcgatgggcatcgccgtgggcttcgcccaggccgagggtatggcggtgctctccgccgccgccgggtacctgacgatgatggccgtggcggagggcgtggccggcgatccggcggtgaacttcggggccctgggcggggtggcggtcggcgccgccgccgtctggctgtaccggtacgcggcgaaggtcaggttgcccgagttcctcgcgctcttttcgggccggcggctggggccgatcctggcggccctggccggggtggtcctgggctgggggttcggcctcgtgtggccgggcttccaccgggccgtcgtcctgctgggcgagtggatctacgccgccggcggcgccggggcgttcgtctacggcggcatcatccggatgctcatccccaccggcctgcaccacctcctgatgcagctcatggactaccagatgggcgcgtggaccgacccggccacaggccaggtggtgatgggcgagtacatccgtttcctgcacggcgatcccagcgcggggcggctgctctccgggttcttcctcaccctggccttcgggccgctgggcgccgccctggcgatggtgcacgaggcccggcccgagcagcgccgccgggtgagcgggatgatgctcaccggcgtgctcacggccatggtgctgggcatcacggagccgatcgagttcgccttcatcttcgcctccccgctcctgttcgggatccacgtgctcttttcggccgcggcctctctgctggggtacgtgctggacatccacctgggggggtacgccctgcccctggcggtcgtcaactggcaccggcagcagaacggctggctgctcctgcccctgggggcggcctggacggcgctctactacgtcaccttccgtctgatcatccggtggcggcggccgccggtgctgggacagaccgacgccgtccccgtggcgggcgccgggggttcggacgcccgggcggccgcaggggagccgtcagaggcggcgcgtccggccggggccgctgggccttcggcggccgccattctggatgccctgggcgggccggccaacgtgcgcagcctcaccgcctgcatgacccggctgcggctggaggtcaacgatcccgcagcggtggatgacgccgcgctgcgcgccttcggcgcggccggggtggtgcggtccgggtcctccgtccaggtggtgatgggcgcccgggccggcgacatcgagcaggccctgcaggccgaactggcggaggcggcggggcagggcggagccgggcagaccgcggggaggcaggagccgtgcaggtga

SEQ ID NO: 124700 - protein, 492 aa, Symbiobacterium thermophilum IAM 14863
MREKAAFFQRASASLMVPLTFVPLPAVLVALGTVLGIGPLESAGLELLRVWLPLFFAMGIAVGFAQAEGMAVLSAAAGYLTMMAVAEGVAGDPAVNFGALGGVAVGAAAVWLYRYAAKVRLPEFLALFSGRRLGPILAALAGVVLGWGFGLVWPGFHRAVVLLGEWIYAAGGAGAFVYGGIIRMLIPTGLHHLLMQLMDYQMGAWTDPATGQVVMGEYIRFLHGDPSAGRLLSGFFLTLAFGPLGAALAMVHEARPEQRRRVSGMMLTGVLTAMVLGITEPIEFAFIFASPLLFGIHVLFSAAASLLGYVLDIHLGGYALPLAVVNWHRQQNGWLLLPLGAAWTALYYVTFRLIIRWRRPPVLGQTDAVPVAGAGGSDARAAAGEPSEAARPAGAAGPSAAAILDALGGPANVRSLTACMTRLRLEVNDPAAVDDAALRAFGAAGVVRSGSSVQVVMGARAGDIEQALQAELAEAAGQGGAGQTAGRQEPCR

SEQ ID NO: 124701 - DNA, 1662 bp, Bacillus licheniformis ATCC 14580
  CDS (1)..(1662): transl_table=11
atgtttaaatcgctatttggcgttctgcaaaaaattggacgagcgctgatgcttcctgttgccatcctgccggctgcagggattctgctcgcgcttggtaatgccatgcaaaatccgcagatgacaaaagtcgcaccattcttaacgaacagcaccgttcagcttgttgcgaaagtgatggaaagttcaggtgacgttgtgttcaccaacttggcgctccttttcgctgtcggggttgccatcggtttggctaacggcgacggcgttgccggaatcgctgctattatcggatatcttgttatgaatgtcacgatgagtgcagtgctccttcaaaacggttcaattccaagcgatgcagttgaaagagcacagttctttactcaaaaccatccggaatacacgacaatgctcgggataccgacattggcaacgggagtattcgggggtattattgtcggtgtcctggccgcagccatgtacaatcgattctacacaatcgagcttccgcaatatttaggattctttgccggaaagcgctttgttccgattattacatctatttgtgcattgctgctgggacttgttatgctgtttatctggccgccaattcaaggcgcactgaacagcttttcaacgaacctgcttgcagccaatgaagcggtcgcagctctcatcttcggaatgattgagcgggctctgattccgttcggtctgcaccatattttctactcgccgttctggtatgagttcttcagctatacgaaccaggcgggagaaattgtccgcggtgaccaaagaattttcatggcgcaaatcaaagacggcgtcgaattgacagcgggtacatttatgaccggtaagtatccgttcatgatgttcggtcttcctgcggcagcgcttgccatttatcatgaagcaaaaccgcagaacaaaaagcttgttgccggtattatggggtcagcagccttaacatcattcttaacagggatcactgagccgatcgaattctcattcctgttcgtcgcaccgattctgtttgcgattcactgtgtgtttgccggcctgtcattcatgatgatggacatcttgaatgttaagatcgggatgacgttctccggcggtttgatcgactacttcctgttcggaattctgccgaaccgtacagcttggtggcttgtcattcctgtcggtttagtcctggctgtcatctactacttcggattcagatttgccatccgcaagttcaacttgaaaacgcctggacgcgaagatgcagctgcagaacccgctgatgaaggcaaagaagcagcaggagatcttccttatcaaattcttgaagcgatgggtgaccaggaaaatatcaagcaccttgacgcttgtatcacaagacttcgcgtaacagtcaacgatcagaagaaagttgacaaagagcgcttgaaaaaactcggcgcttccggcgtgctggaagtcggcaataacatccaagcgatattcggaccaagatccgacaatttaaaatcacaaatgcaagacattatgtcaggccggacgcctcgtcctgaaaaagcgacctgcgagggacgctgtcgaggaattggtgagctctcaaatcaggaagaatcgtcactggtcatgagcctctcgtcaaaacgaatcaggtga

SEQ ID NO: 124702 - protein, 553 aa, Bacillus licheniformis ATCC 14580
MFKSLFGVLQKIGRALMLPVAILPAAGILLALGNAMQNPQMTKVAPFLTNSTVQLVAKVMESSGDVVFTNLALLFAVGVAIGLANGDGVAGIAAIIGYLVMNVTMSAVLLQNGSIPSDAVERAQFFTQNHPEYTTMLGIPTLATGVFGGIIVGVLAAAMYNRFYTIELPQYLGFFAGKRFVPIITSICALLLGLVMLFIWPPIQGALNSFSTNLLAANEAVAALIFGMIERALIPFGLHHIFYSPFWYEFFSYTNQAGEIVRGDQRIFMAQIKDGVELTAGTFMTGKYPFMMFGLPAAALAIYHEAKPQNKKLVAGIMGSAALTSFLTGITEPIEFSFLFVAPILFAIHCVFAGLSFMMMDILNVKIGMTFSGGLIDYFLFGILPNRTAWWLVIPVGLVLAVIYYFGFRFAIRKFNLKTPGREDAAAEPADEGKEAAGDLPYQILEAMGDQENIKHLDACITRLRVTVNDQKKVDKERLKKLGASGVLEVGNNIQAIFGPRSDNLKSQMQDIMSGRTPRPEKATCEGRCRGIGELSNQEESSLVMSLSSKRIR

SEQ ID NO: 124703 - DNA, 1638 bp, Bacillus cereus E33L
  CDS (1)..(1638): transl_table=11
atgaaaattacgtcttttgatttttggcaaaagttcggaaaagcattattagttgttgtagctgtaatgccagcagctggtttaatgatttctatcggtaagttaattggaatgtctgctggggatattaacgcagttcatacaatcgctcgcgtaatggaagacatcggttgggcaattattacaaatctacacatcttattcgcagtagcaattgggggatcttgggcgaaagatcgcgcaggtggtgcatttgcagcgctattagcattcgtcttaacgaatagaattacaggagctatatttggcgtaaacgctgaaatgttagcggattcaaaagcgaaagtttcttcagtattagcaggagatttaattgtaaaagattactttacttctgtacttggtgcaccagcattaaacatgggagttttcgtagggatcatcacaggtttcttaggagctactttatataacaaatattataactataacaaactgccacaggcattagcattctttaacggaaaacgattcgtaccattcgttgtaattgtttggtctacagtaactgcaattgtattatcacttttatggccattcatccaaagtggattaaatgaattcggtcgctggatcgcagcttcaaaagatagtgcaccaattgttgcaccatttgtatatggaacattagagcgtttactattaccattcggtttacaccatatgttaacaattccgatgaactatacagagctaggtggaacatatacgatgttaactggctcaaaagttggacaagttgtagcaggacaagatcctttatggcttgcatggattacagatttaaataacttattagcaaatggagatacaaaagcatataacgatttattaaataacgttgtaccagctcgtttcaaagctggacaagttatcggttcaacagcagcattaatgggtattgctttcgcaatgttccgtaatgttgataaagaaaaacgtgcaaaatataaaccaatgttcttatcagcagcattagcagtattcttaacaggtgtaacagaaccaattgaattcatgttcatgtttattgctccagtattatatgttgtatatgcaattacaacaggacttgcattcgcattagcagatttaattaacttgcgtgttcacgcatttggatttattgagttaattactcgtacaccgatgatggtgaatgcaggactaactagagatttaatcaatttcgttatcgtttcattagtattcttcggtctgaactttacattattcaacttcttaattaaaaagttcaacttaccaacaccaggacgtgcaggtaactatattgataatgaagatgaggcatcagaaggaacaggaaatgtacaagatggttcattagcaacaaaggttattgatttattaggtggaaaagaaaatattgctgacgtagatgcttgtatgacacgtttacgtgtaacagtaaaagatttagatgttgttgcaccagaagcacagtggaaacaaaatggtgctttaggacttatcgtaaaagataaaggtgtacaagcagtatatggtccgaaagctgacgtattaaagtcagacattcaagatatgttaggtgcgtaa

SEQ ID NO: 124704 - protein, 545 aa, Bacillus cereus E33L
MKITSFDFWQKFGKALLVVVAVMPAAGLMISIGKLIGMSAGDINAVHTIARVMEDIGWAIITNLHILFAVAIGGSWAKDRAGGAFAALLAFVLTNRITGAIFGVNAEMLADSKAKVSSVLAGDLIVKDYFTSVLGAPALNMGVFVGIITGFLGATLYNKYYNYNKLPQALAFFNGKRFVPFVVIVWSTVTAIVLSLLWPFIQSGLNEFGRWIAASKDSAPIVAPFVYGTLERLLLPFGLHHMLTIPMNYTELGGTYTMLTGSKVGQVVAGQDPLWLAWITDLNNLLANGDTKAYNDLLNNVVPARFKAGQVIGSTAALMGIAFAMFRNVDKEKRAKYKPMFLSAALAVFLTGVTEPIEFMFMFIAPVLYVVYAITTGLAFALADLINLRVHAFGFIELITRTPMMVNAGLTRDLINFVIVSLVFFGLNFTLFNFLIKKFNLPTPGRAGNYIDNEDEASEGTGNVQDGSLATKVIDLLGGKENIADVDACMTRLRVTVKDLDVVAPEAQWKQNGALGLIVKDKGVQAVYGPKADVLKSDIQDMLGA

SEQ ID NO: 124705 - DNA, 1494 bp, Bacillus cereus E33L
  CDS (1)..(1494): transl_table=11
atgttgcagtttctacaacgtattggtaaagcgttaatgcttccaatcgccgtactaccagcagcaggattattgcttcgtttaggacaagaagacgtatttaacattcctgttatggcacaggccggtgcagcaatttttgataatttagcacttatttttgcaattggtgttgcaatcggtttgtctgttgacggtagtggagcagctggacttgccggagcaatcggatatcttgttttacaaaatacaacgaatgctctaagtaagacgtattcagcagcagagttaaatgataaattaaaaagtgttcaagatttagtcggttcagtagatccaactaaattagcagatacaatgacaaaggtttcaaaagcagcggcgttaacgccaaaaataaatatggccatactcggtggtattattgcaggggttgttgcgggattactatacaacaaattccataagattaaactaccagaatggttaggattctttgcaggaaaacgcttcgtaccaatcattacttcaatcgtaatgttacttttaggattggtattcggtcaaatttggccaacgattcaaagtggtattgatgcagtggcacatggtatcgtgaacttaggttcaattggtgctggtttatttggattattaaaccgtttattaattccaattggtttacaccacgtaatgaacacatacttctggttcgtacttggtgactttacaaatgcagctggcgatattgttcatggtgatatcgcacgtttctttgcaaaagatccatcagcaggtatgtttatgactggtttcttcccagttatgatgttcggtttaccagcagcatgtttcgcaatgattgcagctgctaaaccagaaaaacgtaaaatggttacaggtatgttaggtggtctagcattaacttcattcttaactggtattacagagccaattgaattctcattcatgttcttatcaccagtactatatggaattcatgctgtattaacaggtctgtctctattcattacaacaacacttggcattcatgatggtttctcatttagtgccggggcaatcgattacgtcttaaacttcggtattgcaacaaaaccattgttactagcaggaatcggtttaatttacgcagcaatttactttgtagtattctacttcttaattaagaagtttgacctaaaaactcctggtcgtgaagatgaagaggaaatggctgaaggcgaagaagctccagttgcaggttcaattggtgaaacttacgtagcagctttaggtggaaaagaaaacttaacagttattgataactgtgcaacacgtctacgcttacaagtgaaagatgctggtcaagtaaacgaagcagcattaaaacgtgctggtgcaaaaggtgttatgaaattaagtaacacgagtgtccaagttatcgtaggtacaaatgttgaatctgttgccgatgatatgaaaaaacacgtataa

SEQ ID NO: 124706 - protein, 497 aa, Bacillus cereus E33L
MLQFLQRIGKALMLPIAVLPAAGLLLRLGQEDVFNIPVMAQAGAAIFDNLALIFAIGVAIGLSVDGSGAAGLAGAIGYLVLQNTTNALSKTYSAAELNDKLKSVQDLVGSVDPTKLADTMTKVSKAAALTPKINMAILGGIIAGVVAGLLYNKFHKIKLPEWLGFFAGKRFVPIITSIVMLLLGLVFGQIWPTIQSGIDAVAHGIVNLGSIGAGLFGLLNRLLIPIGLHHVMNTYFWFVLGDFTNAAGDIVHGDIARFFAKDPSAGMFMTGFFPVMMFGLPAACFAMIAAAKPEKRKMVTGMLGGLALTSFLTGITEPIEFSFMFLSPVLYGIHAVLTGLSLFITTTLGIHDGFSFSAGAIDYVLNFGIATKPLLLAGIGLIYAAIYFVVFYFLIKKFDLKTPGREDEEEMAEGEEAPVAGSIGETYVAALGGKENLTVIDNCATRLRLQVKDAGQVNEAALKRAGAKGVMKLSNTSVQVIVGTNVESVADDMKKHV

SEQ ID NO: 124707 - DNA, 2097 bp, Bacillus licheniformis ATCC 14580
  CDS (1)..(2097): transl_table=11
atgtttaaatcgctatttggcgttctgcaaaaaattggacgagcgctgatgcttcctgttgccatcctgccggctgcagggattctgctcgcgcttggtaatgccatgcaaaatccgcagatgacaaaagtcgcaccattcttaacgaacagcaccgttcagcttgttgcgaaagtgatggaaagttcaggtgacgttgtgttcaccaacttggcgctccttttcgctgtcggggttgccatcggtttggctaacggcgacggcgttgccggaatcgctgctattatcggatatcttgttatgaatgtcacgatgagtgcagtgctccttcaaaacggttcaattccaagcgatgcagttgaaagagcacagttctttactcaaaaccatccggaatacacgacaatgctcgggataccgacattggcaacgggagtattcgggggtattattgtcggtgtcctggccgcagccatgtacaatcgattctacacaatcgagcttccgcaatatttaggattctttgccggaaagcgctttgttccgattattacatctatttgtgcattgctgctgggacttgttatgctgtttatctggccgccaattcaaggcgcactgaacagcttttcaacgaacctgcttgcagccaatgaagcggtcgcagctctcatcttcggaatgattgagcgggctctgattccgttcggtctgcaccatattttctactcgccgttctggtatgagttcttcagctatacgaaccaggcgggagaaattgtccgcggtgaccaaagaattttcatggcgcaaatcaaagacggcgtcgaattgacagcgggtacatttatgaccggtaagtatccgttcatgatgttcggtcttcctgcggcagcgcttgccatttatcatgaagcaaaaccgcagaacaaaaagcttgttgccggtattatggggtcagcagccttaacatcattcttaacagggatcactgagccgatcgaattctcattcctgttcgtcgcaccgattctgtttgcgattcactgtgtgtttgccggcctgtcattcatgatgatggacatcttgaatgttaagatcgggatgacgttctccggcggtttgatcgactacttcctgttcggaattctgccgaaccgtacagcttggtggcttgtcattcctgtcggtttagtcctggctgtcatctactacttcggattcagatttgccatccgcaagttcaacttgaaaacgcctggacgcgaagatgcagctgcagaacccgctgatgaaggcaaagaagcagcaggagatcttccttatcaaattcttgaagcgatgggtgaccaggaaaatatcaagcaccttgacgcttgtatcacaagacttcgcgtaacagtcaacgatcagaagaaagttgacaaagagcgcttgaaaaaactcggcgcttccggcgtgctggaagtcggcaataacatccaagcgatattcggaccaagatccgacaatttaaaatcacaaatgcaagacattatgtcaggccggacgcctcgtcctgaaaaagcgccgaacgctgccgaggaagtggagcagcaaatcgaagaagctatggttgagcctcttcaaaacgaatcaggtgaagaagtattcgtttcaccgcttgcgggtgaacttcatccgattgcagatgttccggaccaagtattctccggaaaaatgatgggtgacggatttgcgattcttcctgcagaaggcacagttgtgtcacctgtaagagggaaagtgctgaacgtgttcccgacaaagcatgcgatcggtctgcagtctgacggcggcagagaaattctgatccactttggaatcgacacagtcagtctgaaaggagaaggcttcacttcatttgtttctgaaggtgacagggttgagcctggccagaaactgcttgaagtcgacattgaaaaagtgaaggacaatgtaccttccctgatgacgccgatcgtgttcacgaaccttcaagaaggagaaagcgtgagcttgcaggcagaaggcaatgtcagcctgacacaggacgacatcgtccgcatcgaaaaataa

SEQ ID NO: 124708 - protein, 698 aa, Bacillus licheniformis ATCC 14580
MFKSLFGVLQKIGRALMLPVAILPAAGILLALGNAMQNPQMTKVAPFLTNSTVQLVAKVMESSGDVVFTNLALLFAVGVAIGLANGDGVAGIAAIIGYLVMNVTMSAVLLQNGSIPSDAVERAQFFTQNHPEYTTMLGIPTLATGVFGGIIVGVLAAAMYNRFYTIELPQYLGFFAGKRFVPIITSICALLLGLVMLFIWPPIQGALNSFSTNLLAANEAVAALIFGMIERALIPFGLHHIFYSPFWYEFFSYTNQAGEIVRGDQRIFMAQIKDGVELTAGTFMTGKYPFMMFGLPAAALAIYHEAKPQNKKLVAGIMGSAALTSFLTGITEPIEFSFLFVAPILFAIHCVFAGLSFMMMDILNVKIGMTFSGGLIDYFLFGILPNRTAWWLVIPVGLVLAVIYYFGFRFAIRKFNLKTPGREDAAAEPADEGKEAAGDLPYQILEAMGDQENIKHLDACITRLRVTVNDQKKVDKERLKKLGASGVLEVGNNIQAIFGPRSDNLKSQMQDIMSGRTPRPEKAPNAAEEVEQQIEEAMVEPLQNESGEEVFVSPLAGELHPIADVPDQVFSGKMMGDGFAILPAEGTVVSPVRGKVLNVFPTKHAIGLQSDGGREILIHFGIDTVSLKGEGFTSFVSEGDRVEPGQKLLEVDIEKVKDNVPSLMTPIVFTNLQEGESVSLQAEGNVSLTQDDIVRIEK

SEQ ID NO: 124709 - DNA, 2046 bp, Bacillus clausii KSM-K16
  CDS (1)..(2046): transl_table=11
ttgtttaaaaatgcatttggcaaattgcaaaaaattgggaaggcgttgatgctcccggttgcgatgttgcctgtagccggattgctgctgggcattggtgccgctttgcaaatggaaaacacattgaactacatgccgttcttagaagcaggctggattcaacatacggctggtgtgatggaagcagctggcggcgttatttttgacaacttgtctcttattttcgctgtcggggtcgcgatcggccttgccggtgacggtgcagctgcacttgcagcattagtcggctatttggtgatgaataccgtgatgggccaatggcttggggtgagcgcggaaatggtagccgaagacccgagctttgctaatattctaggaattgacaccctgcaaacaggcgtatttggcgggattatcgtcggcttaattgcggcttactgctataaccgcttctatgatatagaaatgcctgcttttcttggcttttttgccggcaaacggtttgttcctattatcacagcggttgctacgtttttaatggcgcttcttttgcttgttgtttggccgccgatccaacacggcttaaacagcttttctgagtttttgttagggtcgagcttgtatgtagctgtgtttttgtttggctttatcagacggcttttaattccttttggactgcaccatattttccatgctccgttctggtatgaatttggttcatacaccaatgcggcaggggaaattgtccgtggcgatatgctgattttcttcgcccaactccgtgatggcgcggagttgacggctggccacttcatggcaggcgaatttccgatttttatgtttggcctgccagctgcagcactggcgatgtaccattgtgccaagcctgagaagaaaaaactggttgccggtttgtttgcttctgcagcgctgacatcgtttttgacaggaatcacagaaccgattgaatttacgttcttgttcatcgcgccagtactgtttgtgctacatgcaatcctcgatggcttatcgtttgttttgatgacgttattcgatgttcatgttgggttcaccttttcaggcggagcgattgactttttcctattcgggatcttgccgaatgaagaacaatggtggattacgattctcattggtctcgtatttgcggccatttattatgtcgttttccgctttgcgattcaaaaatttaatttaatgacgccagggcgagaaaatgacacggctaatgattacaaaggcaaaggaaaaacaggcgagctagcaggacaagtcttgcaagcgatgggcgggaaagacaatattgctcatcttgacgcatgcattacgcgcctgcgagtatcggtgaatgatattaaagctgtcaataaagacgaattaaaggcgcttggtgcagctggagtgctagaagtaggcaacaacatccaagcgatttttggccctcgctcagagacgcttaaaggccaaattcaagatgtcatggcgggaaaaacgcctcggccactaaaaacgaatcaacaagaagaagtcagtgagcaactggaagaaatccagccagacgcattgatgaatgagggggcgttccttgcaccaatggcaggtacgttgatgccgctcgcggaggtgccagatcaagtcttttccgaaaaaatgatgggcgacggctttgcgatagatccagaagacggcatggtttattcgcctgttgaaggaaaagtgacgaccgtctttccgacgaaacatgcaattggactgacgacctctacgggaatggaagtgttgatccatatcggcatcgatacagttaaacttcaaggagaaggatttgacgtccttgtggaagaaggcgatcaaataagcgaaggtgacaaattggccgaatttgatttagattatatccgtaaccatgctgcttctacgattacgccagtcgtgtttaccaacttaggagcggacaaggctgtcgtcatcaacaaaaaaggacgagttctggcaaaagaaaaaggcattgtcgcggtgaacggctaa

SEQ ID NO: 124710 - protein, 681 aa, Bacillus clausii KSM-K16
MFKNAFGKLQKIGKALMLPVAMLPVAGLLLGIGAALQMENTLNYMPFLEAGWIQHTAGVMEAAGGVIFDNLSLIFAVGVAIGLAGDGAAALAALVGYLVMNTVMGQWLGVSAEMVAEDPSFANILGIDTLQTGVFGGIIVGLIAAYCYNRFYDIEMPAFLGFFAGKRFVPIITAVATFLMALLLLVVWPPIQHGLNSFSEFLLGSSLYVAVFLFGFIRRLLIPFGLHHIFHAPFWYEFGSYTNAAGEIVRGDMLIFFAQLRDGAELTAGHFMAGEFPIFMFGLPAAALAMYHCAKPEKKKLVAGLFASAALTSFLTGITEPIEFTFLFIAPVLFVLHAILDGLSFVLMTLFDVHVGFTFSGGAIDFFLFGILPNEEQWWITILIGLVFAAIYYVVFRFAIQKFNLMTPGRENDTANDYKGKGKTGELAGQVLQAMGGKDNIAHLDACITRLRVSVNDIKAVNKDELKALGAAGVLEVGNNIQAIFGPRSETLKGQIQDVMAGKTPRPLKTNQQEEVSEQLEEIQPDALMNEGAFLAPMAGTLMPLAEVPDQVFSEKMMGDGFAIDPEDGMVYSPVEGKVTTVFPTKHAIGLTTSTGMEVLIHIGIDTVKLQGEGFDVLVEEGDQISEGDKLAEFDLDYIRNHAASTITPVVFTNLGADKAVVINKKGRVLAKEKGIVAVNG

SEQ ID NO: 124711 - DNA, 1536 bp, Bacillus clausii KSM-K16
  CDS (1)..(1536): transl_table=11
atgagtgttttctttgaaaaggcacaacggttcggtaaatcgtttatgcttcccatcgccgtgttacctgccgctggtttactattaggcattggcggcgctttaagcaacccgaatacgctggttgcttatccgtttttggaccagccgtttttgcaaggcttgtttacgatcatgagctcagcaggaaacattgtctttgctaatcttccgcttttatttgcgatcggccttgcggtcggactagcacgggccgataaaggcaccgtcggccttgccgccgttatcggctactttgttatgaatgcgacgattaatgccatgctaacgattaccggcacgctcgcggaggactctcttgctgatgtcggccaaggaatgagcgtaggcattcaaacactggaaacaggcgtttttggcggtgtactcgtcggaattatggcgtatgttctccataaacgttactataaaattgagctccctcgttttcttggtttctttggcggctcccgttttattccgattattacctctgtcgttgcgatggttcttggtgtcctattgttttatgtatggccctttattcaacaaggcattttctcgctcggttctttagtagaaatgaccggctatattggaacatttttatacggctttattctacgtttgttagggccatttggcttgcaccatattttttacatgccattttggacaacaagccttggcggctcgatgattgtcgatggcacacttgtcgaaggcacacagcgaattttcttcgcacagctcgctgatccaagcgtgactcaattctacgaaggcacgtctcgctttatgtccgggcattttattacgatgatgttcggtttgctcggtgcatgcttagccatttaccacacagcaaaacctaaaaacaaaaagatcgttgctggccttttactctcagcagggctcacttcctttttgacaggcattactgagccaattgagttctcattcctgttcattgctcctgctctttatgtcgtccatgccttttttgatggtctcgcctttatgctcgcccacatcttttcgattacaatcgggcagacattttctggcggcttcatcgattttatgttgttcggcgtgcttcaaggcaacgataaaaccaattgggtgtttgtcccgcttattggcattgtctggtttttcctttactatttcacgttccgctttatgattaggaaattcaattacaagacgccaggccgagaagacgaggaaatcactgcacaaactgtatctggcacagagagagccaccgccatcgtcgctgctctcggggctgcggcaaacattaaagatgttgatgcctgcgctacccgccttcgcgttagtgtccaagatggtgagaaagtcgataaagatcaattcaaagcaacaggcgccaaaggtgttattgttaacggcaatggcgtacaagtgatctacggaccggaagtgacggtcattcgtaatgaagttgatgaactgttaggagataaatga

SEQ ID NO: 124712 - protein, 511 aa, Bacillus clausii KSM-K16
MSVFFEKAQRFGKSFMLPIAVLPAAGLLLGIGGALSNPNTLVAYPFLDQPFLQGLFTIMSSAGNIVFANLPLLFAIGLAVGLARADKGTVGLAAVIGYFVMNATINAMLTITGTLAEDSLADVGQGMSVGIQTLETGVFGGVLVGIMAYVLHKRYYKIELPRFLGFFGGSRFIPIITSVVAMVLGVLLFYVWPFIQQGIFSLGSLVEMTGYIGTFLYGFILRLLGPFGLHHIFYMPFWTTSLGGSMIVDGTLVEGTQRIFFAQLADPSVTQFYEGTSRFMSGHFITMMFGLLGACLAIYHTAKPKNKKIVAGLLLSAGLTSFLTGITEPIEFSFLFIAPALYVVHAFFDGLAFMLAHIFSITIGQTFSGGFIDFMLFGVLQGNDKTNWVFVPLIGIVWFFLYYFTFRFMIRKFNYKTPGREDEEITAQTVSGTERATAIVAALGAAANIKDVDACATRLRVSVQDGEKVDKDQFKATGAKGVIVNGNGVQVIYGPEVTVIRNEVDELLGDK

SEQ ID NO: 124713 - DNA, 1551 bp, Bacillus clausii KSM-K16
  CDS (1)..(1551): transl_table=11
atgaataaaagaaaaattggtgactccatacagcaattcggcagaacgttgcttctcccgattggggtattggctccgatcgggatgcttttggggatcagcggagcgcttacgcaagactatatggtagaaaaagttcctttcctcggtaacgaggccgtcaatactatcttggtaagtataaaaacaatcagtaatgttgtgttcgataatatccctttattgtttgcgatgggtgtcgcttatggaatggggaaaaaggataaaggtatttcggtgtttgcctctgtggcaggatatctgaccttaattgttgcaatgaatgtatggctgaccatcacaggaacgatggccgatcccgatgtgatgacgcagcagggtcagatcaatatacttggcattcaaacggtcaatattagtgctgccggagggattctaaccggtctaatcgcggcctgggccacggaacggttctataacctagaactaccggctgcactggcgttcttttctgggaagaaatcagttccaatcatcacgatcggattgatggctaccgttgggatgttgcttccgtttgtctggacctattttgtaggtttattgacgaacttgtctaccatctttttaagtgtggtcggtcctttctttacagcggcgggcgaacggctattcattccgtttggtcttcatcatgtctggaatgccttgttccgatttacggaagcaggtgggtcctatgtcattgatgggaaaacgtatgtcggtgttgtcccagcgattacggaaattttgtttaatcaggggccaaacagtgagtattggtccatgatgccaaagctgtcccgattcatggctcagcagcaaatgcttgtcgtcctgtttttattccctgccattgcctttgctatgtacaaggctgcttacaaggaaaataaagtctatgtgaaatcgatgttggttactatggtgcttacggctgttctaggtaacgtaacggaaccgctggagttcacttttgttttccttgctccgttgttatacatcgtctacgcatgtatcgttggcatcggtgctgtattgctgtcgcttgcagatgtttccattggatatatccgggggaccatttttgattttacgatctttggactcctttatgaaaactcacgatggctctttttggtgttaattggtctaggattagctgtcgtcacttatttcattttttattgggcgattatccggtttgatattaaaacaccaggcagggaagaactgcaaaacgttgacagtaccctacttaaagaaaagcgctacgacgagattgccagtaaagtagtggaagcgttgggaggaaaagaaaacattctgaacgtggataactgtattaccaggcttcggattgatctaaaagaagttagggagattgacaaagagttattgaacagcactggctgctccggcttctttttcccaacagcgaagcatattcatatcgtctatgggacgcaggtagaatttatcaaaaatgcagtcgatgaaaaagtttag

SEQ ID NO: 124714 - protein, 516 aa, Bacillus clausii KSM-K16
MNKRKIGDSIQQFGRTLLLPIGVLAPIGMLLGISGALTQDYMVEKVPFLGNEAVNTILVSIKTISNVVFDNIPLLFAMGVAYGMGKKDKGISVFASVAGYLTLIVAMNVWLTITGTMADPDVMTQQGQINILGIQTVNISAAGGILTGLIAAWATERFYNLELPAALAFFSGKKSVPIITIGLMATVGMLLPFVWTYFVGLLTNLSTIFLSVVGPFFTAAGERLFIPFGLHHVWNALFRFTEAGGSYVIDGKTYVGVVPAITEILFNQGPNSEYWSMMPKLSRFMAQQQMLVVLFLFPAIAFAMYKAAYKENKVYVKSMLVTMVLTAVLGNVTEPLEFTFVFLAPLLYIVYACIVGIGAVLLSLADVSIGYIRGTIFDFTIFGLLYENSRWLFLVLIGLGLAVVTYFIFYWAIIRFDIKTPGREELQNVDSTLLKEKRYDEIASKVVEALGGKENILNVDNCITRLRIDLKEVREIDKELLNSTGCSGFFFPTAKHIHIVYGTQVEFIKNAVDEKV

SEQ ID NO: 124715 - DNA, 1461 bp, Bacillus clausii KSM-K16
  CDS (1)..(1461): transl_table=11
atgatgaattacttacagcgcattgggcgctcattgatgttgccagttgccgtgctgcctgcagctgcgatattaatgggaatcggctattggatggacccgagcggttggggagaaggcaatccggtcgctgcctttttaattgcagcaggcgaatctcttgttagcgggccgagcatgggccttttgtttgcaatcggtgtagctctaggcatggcaaaggagcgtgatggatcagctgcactaagcgggctcgttgctttcctcgttgtaacccacttgttgtctaccgattcagttgcactgctgacaagcacggacccagaaaatgtaaatgccgcgtttggttcgattcagacgcaatttattgggattttatccggtattgtcgctgctatgatgtataaccgtttcagccatgtccaacttccggccgcatttgcttttttcagcggaaaacggctcgtgccaattatgacggcagcttccatgttggtcatttccgccgttctttttatcgtctggccatttgtttactctggccttgtcacatttggaacgtggattagcaacttgcactatgtaggcgctggtgtatatggattttttaaccgccttctcatcccaactggtcttcaccatgccttaaattccgtcttttggtttgacgttgctggcatcaatgacattgcgaatttctggtctggaagcggtgaaaaaggcattacaggcatgtaccaagctggcttttttccagttatgatgtttggtcttccagccgcagcgctagcaatgtaccatacggcgaaaacgaaacgcaaaaaacaaacagcgtcgttgctactcgctgcaggatttgcttcgtttttcacaggtgtgaccgagccatttgaattcgcgtttatgtttgtagcacctgttctttatgtaatccacgcggtgcttaccggcttatcgttggccattgccgcctattttcagtggacagctggatttggctttagcgccggactaattgactttattttaagctcaaggctgccgctagcgaaccagccatggatgctgcttgtgcaagggcttggctttgctgtcgtttattacgcgctattccgctttacgattgtcaaatttaatttgatgacgcctgggcgtgaagaggagaacgatgaagaaaaagtgccagaggatactgaaaacgctcaagacaagagcaagtatacagcaatggcggccatgatctatgatggactaggcggtgatcgtaatgtcgtctcaattgagaactgtgtcacccgcttacgtgtcgaagtcaaaaatatggctcaagtcgaccaaacaaaaattaaacgtaccggcattcctggcattaatgtcgtatccaatcataatattcaagtcattattggcccacatgtacaatttgtcgctgacgaaatcgagaaaatccgcagtcgttaa

SEQ ID NO: 124716 - protein, 486 aa, Bacillus clausii KSM-K16
MMNYLQRIGRSLMLPVAVLPAAAILMGIGYWMDPSGWGEGNPVAAFLIAAGESLVSGPSMGLLFAIGVALGMAKERDGSAALSGLVAFLVVTHLLSTDSVALLTSTDPENVNAAFGSIQTQFIGILSGIVAAMMYNRFSHVQLPAAFAFFSGKRLVPIMTAASMLVISAVLFIVWPFVYSGLVTFGTWISNLHYVGAGVYGFFNRLLIPTGLHHALNSVFWFDVAGINDIANFWSGSGEKGITGMYQAGFFPVMMFGLPAAALAMYHTAKTKRKKQTASLLLAAGFASFFTGVTEPFEFAFMFVAPVLYVIHAVLTGLSLAIAAYFQWTAGFGFSAGLIDFILSSRLPLANQPWMLLVQGLGFAVVYYALFRFTIVKFNLMTPGREEENDEEKVPEDTENAQDKSKYTAMAAMIYDGLGGDRNVVSIENCVTRLRVEVKNMAQVDQTKIKRTGIPGINVVSNHNIQVIIGPHVQFVADEIEKIRSR

SEQ ID NO: 124717 - DNA, 1584 bp, Bacillus clausii KSM-K16
  CDS (1)..(1584): transl_table=11
atgaacgcaatcaagcggtttggcagcgcgatgattgtccctgttctcttattcgcattttttggcattgtcgtcggcctggcaactttatttaaaaacccggcgattatgggagacatcgctgcagaagggacgatgtggtacaaggtttggtcactgattgaaagtggaggctggaccatttttaatcatatggagctggcgtttgttatcggcttgcccatttcattggcaaaaaaagcgcaagcacgggccacacttgcagcattgatggtttaccttgttttcaataattttattaatgcgattttgacactttggccgtccactttcggcgtcgatctatcacaaggggtcgagaacataacaggtgttaaagaaattgccggtatccctacattggatacaaatatcattggcgccattgtcatatctgcggttgtgatttggatccataatcgtttttatgatcaaaagcttcctgaaatgcttggcattttccagggtctcgtctttgtggtgatcattggcttttttgtaatgattcctttcgcttttctcgttgcttttgtatggccgtatgtccagcaaggcattggttccctccaagggttcatctcacaagctggttatgttggtgtctggctgtttcatttcttggaaagggttttaataccgacggggctgcatcattttatttacactccttttgaatttggtccggctgctgtaaatgaagggttaaaaccatattggattgccaatttaaatgattttgctacttcaacttcagcgttaaaagatctttatccatatgggtttttactgcatggaaatattaagatgttcggctgtttagggatcgcactcgccatgtattattcaacaccaaaagaaaaccgaaaaaaagtgcttgcgctcgtattgcctgcaacattaacagcgatatttgcgggaattacagaaccgcttgaatttacatttctatttatcgcgccctatttatttgtgatccatgcccttcttggcgcgactatggtaacgctgatgaacatgtttggcgtcgtcggcatgatgggcggcggattaattgaaatagccgcgttaaactggattccactcgcttctaaccacggaagcatttatatcgtccaagccatgattgggcttatatttgcagcactgtactttgtcctgttcagatggatgattgttaaatttgatattccattaccagggcgaaaaaaggaagagaaggctaggctatacacaaaacaagattatcagaaggttaaaaaagggagtaactctgaaaaacaagctgcggcaacttacgagtctgagtatgaagagaaagcggtctattacttagaaggccttggcggcaaagaaaacattaaagatgtgacaaactgtgcaacgcgtctgcgtgttacagtgattgatcctagtttggtcaaagatagcgactacttcacaaacaataaaatggctcatgggttggctaaaagcggccaaagcatacaaattattgttggtttgagtgtaccgcaagtgagagattcctttgaagcaaaattataa

SEQ ID NO: 124718 - protein, 527 aa, Bacillus clausii KSM-K16
MNAIKRFGSAMIVPVLLFAFFGIVVGLATLFKNPAIMGDIAAEGTMWYKVWSLIESGGWTIFNHMELAFVIGLPISLAKKAQARATLAALMVYLVFNNFINAILTLWPSTFGVDLSQGVENITGVKEIAGIPTLDTNIIGAIVISAVVIWIHNRFYDQKLPEMLGIFQGLVFVVIIGFFVMIPFAFLVAFVWPYVQQGIGSLQGFISQAGYVGVWLFHFLERVLIPTGLHHFIYTPFEFGPAAVNEGLKPYWIANLNDFATSTSALKDLYPYGFLLHGNIKMFGCLGIALAMYYSTPKENRKKVLALVLPATLTAIFAGITEPLEFTFLFIAPYLFVIHALLGATMVTLMNMFGVVGMMGGGLIEIAALNWIPLASNHGSIYIVQAMIGLIFAALYFVLFRWMIVKFDIPLPGRKKEEKARLYTKQDYQKVKKGSNSEKQAAATYESEYEEKAVYYLEGLGGKENIKDVTNCATRLRVTVIDPSLVKDSDYFTNNKMAHGLAKSGQSIQIIVGLSVPQVRDSFEAKL

SEQ ID NO: 124719 - DNA, 1605 bp, Staphylococcus aureus subsp. aureus COL
  CDS (1)..(1605): transl_table=11
atgaatgcgataaagcgtttcggtagtgcaatgattgtaccggtattaatgttcgctttctttgggatagtgcttggctttgcgacattatttaaaaatcctacaatcatggggagtttagcagatcaacatacgttttggtttaaattttggtcagtaatagaatctggtggctgggttatttttacgcatatggaagttgtatttgttgtaggtctaccactttctttagctaaaaaagcaccaggtcatgcagcacttgcagcattgatgggttacttaatgtttaatacatttataaatgccattttaacacaatggccacatacgtttggcgctaatttagaaaaaggcgttgaaaatgtacctggtttaaaatcaattgcaggtattgccacattggatacgaatattctaggtggtattattatttcagctattattacttggattcacaatagatactatagtaaacgattaccagaaatggttggtgtattccaaggtttaacatttgtagttacgatttcattttttgtgatgttaccattagcagcaattacttgtgttatttggccaactgttcagcacggtattggttcaatgcaacactttatcattgcttcaggctatatcggtgtatggttgtatcacttcttagaacgtgtattaataccaacaggattacatcactttatttatgcaccaattgaagttggaccagtagtagtcaatcacggcttgaaagctgaatggttacaacatttaaatgagtttgctaagagtactaagccattaaaagagcaattcccttatggctttatgcttcaaggaaatgggaaagtatttggatgtttaggtattgctttagcaatgtatgctacgacacctaaagaaaatcgtaaaaaggtggcggcactacttattcctgccacattaacagcagtcgttgtaggtattactgagccattagagtttacattcttattcatcgcaccatacttatttgttttacacgcagttttagcagcttcaatggatactttaatgtacgcatttggtgttgtaggtaacatgggtggtggcttgttagactttatttcaacaaactggttgccattaggtaaagaacattggggtacttatgttgcacaagttattatcggtctgatatttgtagcgatttacttcttcttattcagattcttaattttgaaatttgatattccattacctggacgtaagaaaacagaagaggaagttaaattattttctaagcaagattacaaaaataaaaaaggtgatagcgtagattctaaacgtgcttcatctggtaatgaatacgaagacaaagctgcatattacctcgacggtttaggcggcaaagaaaatatcaaagatgttactaactgtacaacaagattacgcttaactgtttatgatgaaagtaaagttgcagatacggaatatttcacgcatcaacaaatggcacacggattagtaaagagtggtaagagtatccaagttgtagtaggtatgacagtaccacaagttcgtgaagcatttgaacaaatggttgaggatcaatcgcccgaagataaataa

SEQ ID NO: 124720 - protein, 534 aa, Staphylococcus aureus subsp. aureus COL
MNAIKRFGSAMIVPVLMFAFFGIVLGFATLFKNPTIMGSLADQHTFWFKFWSVIESGGWVIFTHMEVVFVVGLPLSLAKKAPGHAALAALMGYLMFNTFINAILTQWPHTFGANLEKGVENVPGLKSIAGIATLDTNILGGIIISAIITWIHNRYYSKRLPEMVGVFQGLTFVVTISFFVMLPLAAITCVIWPTVQHGIGSMQHFIIASGYIGVWLYHFLERVLIPTGLHHFIYAPIEVGPVVVNHGLKAEWLQHLNEFAKSTKPLKEQFPYGFMLQGNGKVFGCLGIALAMYATTPKENRKKVAALLIPATLTAVVVGITEPLEFTFLFIAPYLFVLHAVLAASMDTLMYAFGVVGNMGGGLLDFISTNWLPLGKEHWGTYVAQVIIGLIFVAIYFFLFRFLILKFDIPLPGRKKTEEEVKLFSKQDYKNKKGDSVDSKRASSGNEYEDKAAYYLDGLGGKENIKDVTNCTTRLRLTVYDESKVADTEYFTHQQMAHGLVKSGKSIQVVVGMTVPQVREAFEQMVEDQSPEDK

SEQ ID NO: 124721 - DNA, 1473 bp, Staphylococcus epidermidis RP62A
  CDS (1)..(1473): transl_table=11
atgtataaacttttgcaacatttgggtaggtctctcatgttacctgtagcagttctgccagcagccgcaattattgtaggcataggtcatgttttagatgctttaaatatacttcctcaagctgcactctttttcacaagtgttgggaccactatattagagcaattaggtatattatttgctattggtgtagctatcggtatggctaagaagaatgatggcgcagtagcattagcggcagcgttaggattttttatagttacagtagtactatctccagaaaaattagcaactttgttacaaattaaagaatctaaaattgatttagcattcagtcaaatgaataatggaaatgtgtttgtagggattattataggtttgattgctgcatatagttataacaaatttagtgaaacgaatttacctatggccttatcattcttcagtgggaaacgacttgttccaatcatgacagcattcttttgtacaattttagcgattattttattattgatttggcctccagtttataatgggatagttacttttggtaagtggattgttggtatgggtccattcggtgcattattatatggtttttttaatagattgttaatacctactgggttgcatcatgcgctcaataatgtattttggtttgatactgctggaataaatgacataggtaaatttcaaagtggtaaaaatgccattaagggaattactggcagataccaagcaggatttttccctgttatgatgtttggtgtaccggcagcagctttggcgatgtatcatactgcaaagacgaatcaaaaaaaacaagtttatgcttggtttttagcaagttcagtttcggcattctttgtgggtgtaactgaacccatagagtttgcattcatgtttgtagctccagttttatttgttattcatgctgttttaactggattatcattatttatagcagcaatgtttcattggacagcaggattttcatttagtgcaggtcttatagattatgtgctttcattggttaatccgatatctaatcaaccttggatgttattattgcagggtgtagtcttttttattatctattacgttatctttagagttgtcatacaagtctttaatttaagtactataggtaggggagataatgaacttatcgatccaacatcaaatgatacttctgaaatggaagtattacagaacaaaaccactacaagtaaatattatcaaaacgcaaaacgtattttagacggattaggtggtaaagaaaacattattagtttaaatcattgtgcaacaaggcttagattggagcttaaagataattcgattatagatgagcagaaaattaaaaatgctggagctattggtataactcaaaatggacaccattatacccaagtgattattggaacacacgtacaacaagttgccaatgaaatggatcaccaaatgaattag

SEQ ID NO: 124722 - protein, 490 aa, Staphylococcus epidermidis RP62A
MYKLLQHLGRSLMLPVAVLPAAAIIVGIGHVLDALNILPQAALFFTSVGTTILEQLGILFAIGVAIGMAKKNDGAVALAAALGFFIVTVVLSPEKLATLLQIKESKIDLAFSQMNNGNVFVGIIIGLIAAYSYNKFSETNLPMALSFFSGKRLVPIMTAFFCTILAIILLLIWPPVYNGIVTFGKWIVGMGPFGALLYGFFNRLLIPTGLHHALNNVFWFDTAGINDIGKFQSGKNAIKGITGRYQAGFFPVMMFGVPAAALAMYHTAKTNQKKQVYAWFLASSVSAFFVGVTEPIEFAFMFVAPVLFVIHAVLTGLSLFIAAMFHWTAGFSFSAGLIDYVLSLVNPISNQPWMLLLQGVVFFIIYYVIFRVVIQVFNLSTIGRGDNELIDPTSNDTSEMEVLQNKTTTSKYYQNAKRILDGLGGKENIISLNHCATRLRLELKDNSIIDEQKIKNAGAIGITQNGHHYTQVIIGTHVQQVANEMDHQMN

SEQ ID NO: 124723 - DNA, 2028 bp, Staphylococcus epidermidis RP62A
  CDS (1)..(2028): transl_table=11
atgtttaaaaagctatttggtcaaatgcaacgtatcggtaaagctttaatgttaccagttgcgattttaccggctgcagggttgctattagcaattgggactgcgtttcaaggcgaagcgttacaacattatcttccatttataaaaaatgatattgttcaacaaatcgctaatatgcttacaggtgctggtggtattatatttgataatctacctattatctttgctttaggtgtagcaattggtcttgcaggtggagatggtgtagctgctattgctgcatttgttggttttatcattttaaataaaacaatgggggctttcttgcatgtaactccagataaattatctgatccaactaatggatatgcaaatgtattagggattcctacacttcaaacaggtgtgttcggaggtattattattggtgcactagcagcctggtgttataacaaattctataatattaccttaccatcatatttaggattctttgcaggtaaacgttttgtaccaattatgatggcaacaacatctttcattttagcctttccgatggcaattatttggccaacgattcaaaacggtttaaatgcatttagtgaggggttattagattcaaatacaggtttagctgtatttttatttggatttattaagcgattattaataccatttggtttacatcacattttccatgcaccattctggtttgaatttggttcttggaaaaatgctgctggagagataattagaggcgaccaacgtatttttattgaacaaatccgtgaaggtgctcatttaacttctggtaaattcatgcaaggggaattcccagtcatgatgtttggattaccagctgcagcattggctatttatcaaacagcaaaacctgagaataagaaagtagttgcaggtttaatgatttctgctgcattaacatcatttttaactggtattactgaaccattagaattctcattcttatttgtagcaccattcttattcgtaattcatgcagtattagatggtttatcattcttgacactatacttgttaaatgtacatttaggatatactttctctggaggatttatagattatgttttattaggtattctacctaataaaacagcatggtggcttgtcatcccagtaggtattatttatgcagtgatttactactttgtatttagattccttattgttaaatttaactataaaacaccaggtcgtgaagataaaaaatcatctgtaacaactacatcggctagtcaactgccattcgatgttttgaaagcaatgggtggtaaagaaaatattaaacatctagatgcttgtattactagactaagagtagaagtaaatgaaaaatcaaaagttgatgttgccggccttaaatcattaggtgcttcaggagtacttgaagtcggtaacaatatgcaagctattttcggtcctaaatctgatcaaatcaaacatgatatggctaagataataagtggagaaattacaaaaccaagtgaaacaacaattgatgaagaagtgtcagatgatcctgtacatgtggaagatattgtagaaacagaaatttacgcacctggacatggtgagataataccgttatctgaagtacctgataaagttttctctgaaaagatgatgggtgatggtatcggatttgtaccagattcaggagaaattgtagcaccatttgatggtacagttaaaacaattttccctacaaaacatgcgataggattggagtctgatagtggtgttgaagtgttaattcacattggtatcgatacagttaaattaaatggtgaaggttttgaaagtttggtaaatactgatgaaccagtaacacaaggtcaaccattaatgaagattgatttagaatacttaaaggaacatgctccaagtattattacaccagtaatcataacaaaccaagaagacaaaacattaacaattgaagatgtaaaacaagtcgatcctggtaaagcgattatgacaattaaataa

SEQ ID NO: 124724 - protein, 675 aa, Staphylococcus epidermidis RP62A
MFKKLFGQMQRIGKALMLPVAILPAAGLLLAIGTAFQGEALQHYLPFIKNDIVQQIANMLTGAGGIIFDNLPIIFALGVAIGLAGGDGVAAIAAFVGFIILNKTMGAFLHVTPDKLSDPTNGYANVLGIPTLQTGVFGGIIIGALAAWCYNKFYNITLPSYLGFFAGKRFVPIMMATTSFILAFPMAIIWPTIQNGLNAFSEGLLDSNTGLAVFLFGFIKRLLIPFGLHHIFHAPFWFEFGSWKNAAGEIIRGDQRIFIEQIREGAHLTSGKFMQGEFPVMMFGLPAAALAIYQTAKPENKKVVAGLMISAALTSFLTGITEPLEFSFLFVAPFLFVIHAVLDGLSFLTLYLLNVHLGYTFSGGFIDYVLLGILPNKTAWWLVIPVGIIYAVIYYFVFRFLIVKFNYKTPGREDKKSSVTTTSASQLPFDVLKAMGGKENIKHLDACITRLRVEVNEKSKVDVAGLKSLGASGVLEVGNNMQAIFGPKSDQIKHDMAKIISGEITKPSETTIDEEVSDDPVHVEDIVETEIYAPGHGEIIPLSEVPDKVFSEKMMGDGIGFVPDSGEIVAPFDGTVKTIFPTKHAIGLESDSGVEVLIHIGIDTVKLNGEGFESLVNTDEPVTQGQPLMKIDLEYLKEHAPSIITPVIITNQEDKTLTIEDVKQVDPGKAIMTIK

SEQ ID NO: 124725 - DNA, 1707 bp, Pseudomonas fluorescens Pf-5
  CDS (1)..(1707): transl_table=11
atgtaccagtatttcatcgagggcctgcaacgcctcggccgggcgctgatgctgcccatcgccatcttgcccatcgccggtctgctgctgcgcctgggcgacaccgacctgctgaacatcgcgatcatccacgatgccgggcagtcgatcttcggcaacctggcgctgatcttcgccatcggtatcgccgtcggctttgccaaggacaacaatggcaccgccgggctggccggggccattggctacctggtaatgatctcgaccctcaaggtgctggacgccagcatcaacatgggcatgctcgccgggatcatcagcgggctgatggccggcgcgctgtacaaccgcttcaaggacatcaagctgccggagtacctggcgtttttcggcggccggcgcttcgtgcccatcgccaccggtttcaccgccgtgggcctgggggtggcgttcggcctgatctggccgccgatccagcacggcatcaacagcttcggccagttgctgctggagagcggcagcttcggcgcctttgtcttcggcgtgttcaaccggctgctgatcgtcaccggcctgcaccacatcctcaacaacatggcctggttcatcttcggcagcttcaccgacccgagcaccggcgccgtggtcaccggcgacctgacccgctactttgccggcgaccccaagggcggccagttcatgaccgggatgttcccgatgatgctgttcggcctgcccgccgcctgcctggcgatgtaccgcaacacaccgccggaacggcgcaaggtaatgggcgggatcttcctgtccatggccctgacatccttcctcaccggggtcaccgagccgatcgaattcgccttcatgttccttgcccccctgctgtacctggtgcatgccctgctcaccgggctggccatggccctgaccaacctgctgaacatccacctgggctttaccttttccggcggcgccatcgacatggccctgggctggggccgctccaccaacggctggaaggtgtttccggtgggcctgctgtacgcggtggtgtactacctggtgttcgatttctgcatccgtcgcttcaacctcaagaccccgggccgtgaagacagcccctccagcgaaaagactgaactgagcgtcgaccagcgcgccgcagcctacatcaaggccctgggtggcgccggcaacctgcttaccgtcggtgcctgcaccacgcgcctgcgcctggagctggcagaccgcaacctggcttcggacagcgagctcaaggccctgggcgccatggccgtggtgcgccccggcaagggcggcagcttgcaggtggtggtggggccgctggcagacagcatcgccgacgagatccgcctggcgtcacccgtttcggccagggctgcggtggcacaggcgcctgttgaagaacccccgcaggtcgacatttccatccacgaagcccagcagtggctcaacgccctgggcggtcgggacaacctgctgcagatggactgtgtggcgctgacccggttgcgagtgcgagtgaacaatagccgcagcctgtcggagccgatgctcaaggggctgggctgccagggcatgcggcgtatggagggggacgtctggcacgtgctgattggcgaaaaggccgggggcttgcaggtggcgctgacgggcttgctgcaccaagaggtcggcgcaggtgcttga

SEQ ID NO: 124726 - protein, 568 aa, Pseudomonas fluorescens Pf-5
MYQYFIEGLQRLGRALMLPIAILPIAGLLLRLGDTDLLNIAIIHDAGQSIFGNLALIFAIGIAVGFAKDNNGTAGLAGAIGYLVMISTLKVLDASINMGMLAGIISGLMAGALYNRFKDIKLPEYLAFFGGRRFVPIATGFTAVGLGVAFGLIWPPIQHGINSFGQLLLESGSFGAFVFGVFNRLLIVTGLHHILNNMAWFIFGSFTDPSTGAVVTGDLTRYFAGDPKGGQFMTGMFPMMLFGLPAACLAMYRNTPPERRKVMGGIFLSMALTSFLTGVTEPIEFAFMFLAPLLYLVHALLTGLAMALTNLLNIHLGFTFSGGAIDMALGWGRSTNGWKVFPVGLLYAVVYYLVFDFCIRRFNLKTPGREDSPSSEKTELSVDQRAAAYIKALGGAGNLLTVGACTTRLRLELADRNLASDSELKALGAMAVVRPGKGGSLQVVVGPLADSIADEIRLASPVSARAAVAQAPVEEPPQVDISIHEAQQWLNALGGRDNLLQMDCVALTRLRVRVNNSRSLSEPMLKGLGCQGMRRMEGDVWHVLIGEKAGGLQVALTGLLHQEVGAGA

SEQ ID NO: 124727 - DNA, 1770 bp, Burkholderia sp. 383
  CDS (1)..(1770): transl_table=11
atgaacgggaatccgtttctgaaaatacagggcctgggccgggcactgatgctaccgatcgcggtactgccggttgccggcatcctgctgcgactcggccagccggacgtgttcaacatcaagatgatcgccgacgccggcggcgcgattttcgacaacctgccgctgctgttcgcgatcggcgtggcggtcggtttcgcgaaggacaacaacggcgtcgcggcgctcgcgggcgcgatcggttacctgatcgaaaccgcgatcatgaaggacatcgatcccaagctgaacatgggcgtgctgtccgggatcatcgcgggtgtggtcgcgggcctgctgtacaaccgctataaagacatcaagctgccggactacctcgcgttcttcggcggcaaacggttcgtaccgatcatcacggggctggtctgcgtgatactcggcatcgcgttcggatacgtctggcagccggtccagcatctgatcgacgcggccggccagtggctgacgacggcgggcgcgatcggtgcgttcgtgttcggcttcctgaaccgcctgctgctcgtcacgggcctgcaccacatcctcaactcgctcgcatggttcgtgttcggcaacttcacgccgcccgccggcggcgagatcgtgcacggcgacctgcaccgcttcttcgcgggcgacccgaccgcgggcaccttcatggccggcttcttcccgatcatgatgttcggcctgccggcggcgtgtctggcgatgctgcacgaagcgccgaaggaacgccgcgcgatggtcggcggcctgctgctgtcgatggcgctgacgtcgttcctgaccggcgtgaccgagccgatcgaattcagcttcatgttcctcgcaccggtgctgtacgtgatccacgcggtgctgacggggctgtcgctcgcgatctgccagatcctcggcgtgaagctcggcttcacgttctcggccggtgcgatcgactacgtgctgaactacgggctgtcgacgaagggctggatcgcgattccgcttggcatcgcgtacggcgccgcgtactacgggctgttccgcttcttcatccgcaagttcaacatggccacgccgggccgtgagccggcatcggccgatgcggctgctgaatcgtacgcatcgggcggcttcgttgcgccggctgccggcgccgctgcggttgccgcagcaccgcgcgcgcagcgctatatcgccgcgctcggcggggcaggcaacctgtcggtcgtcgacgcgtgcacgacgcgcctgcgcctgaccgtcgtcgatccggagaaggtttcggagccggaactgaaatcgatcggcgcgcgcggcgtgctcaagcgcggcggcaacagcgtgcaggtgatcatcgggcccgaggccgacatcattgccgacgagatgcgtgccgccatcggcagcggtgcggcaggcgcagcatcgacggcgacggccgccgccgcgcagcccgtcacgggcgcggccgccggcccgctcgatccggagccgacgcgctggctcgcggtgttcggcggcgcgaccaacgtcgcgtcgctcgatgcggttgcgaccacgcgcctgcgtgtggtcgtacgcgatccgtcggcggtcgatcgcgatcgtctcggtgcgctcgacgtcgcgtgggtgtcgctcgacacgttccacatcgtctgcggcaacgcggcggcacgctatgccgagcagctcggcgcgcgcctgccgccgtcgggcagcggggcggccgtacaaccggcctga

SEQ ID NO: 124728 - protein, 589 aa, Burkholderia sp. 383
MNGNPFLKIQGLGRALMLPIAVLPVAGILLRLGQPDVFNIKMIADAGGAIFDNLPLLFAIGVAVGFAKDNNGVAALAGAIGYLIETAIMKDIDPKLNMGVLSGIIAGVVAGLLYNRYKDIKLPDYLAFFGGKRFVPIITGLVCVILGIAFGYVWQPVQHLIDAAGQWLTTAGAIGAFVFGFLNRLLLVTGLHHILNSLAWFVFGNFTPPAGGEIVHGDLHRFFAGDPTAGTFMAGFFPIMMFGLPAACLAMLHEAPKERRAMVGGLLLSMALTSFLTGVTEPIEFSFMFLAPVLYVIHAVLTGLSLAICQILGVKLGFTFSAGAIDYVLNYGLSTKGWIAIPLGIAYGAAYYGLFRFFIRKFNMATPGREPASADAAAESYASGGFVAPAAGAAAVAAAPRAQRYIAALGGAGNLSVVDACTTRLRLTVVDPEKVSEPELKSIGARGVLKRGGNSVQVIIGPEADIIADEMRAAIGSGAAGAASTATAAAAQPVTGAAAGPLDPEPTRWLAVFGGATNVASLDAVATTRLRVVVRDPSAVDRDRLGALDVAWVSLDTFHIVCGNAAARYAEQLGARLPPSGSGAAVQPA

SEQ ID NO: 124729 - DNA, 1770 bp, Burkholderia thailandensis E264
  CDS (1)..(1770): transl_table=11
atggacgggaatccgtttctgaaaatacagagcctcggcagggcgctgatgctgccgatcgcggtgctgccggtggcgggcatcctgctgcgcctcggtcagcaggacgtgctcaacatcaagatgatcgccgacgcgggcggcgcgatcttcgacaacctgccgctgctgttcgcgatcggcgtcgcggtgggcttcgcgaaggacaacaacggcgtggcggcgctcgcgggcgcgatcggctatctgatcgaagtcgcgatcatgaaggacatcgatccgaagctgaacatgggcgtgctgtccgggatcatcgcgggcgtcgtcgcggggctgctgtacaaccgctacaaggacatcaagctgcccgactacctcgcgttcttcggcggcaagcgcttcgtgccgatcatcacggggctcgcgtgcgtcgtgctcgggatcgtgttcggctacgtatggcagccggtgcagcacgcgatcgacgcggtcggccagtggctgctgacggcgggcgcgatcggcacgttcgtctacgggttcctgaaccgtctgctgctcgtcaccgggctgcaccacatcatcaactcgctcgtctggttcgtgttcggcacgttcacgccggcggcgggcggcgcggcggtgacgggcgatctgcatcgcttcttcgcgggcgatccgagcgcgggcagcttcatggcgggcttcttcccgatcatgatgttcggcctgccggccgcgtgtctcgcgatgtttcacgaggcgcccaaggagcgccgcgcgatcgtcggcggcctgctgttctcgatggcgctcacgtcgttcctgacgggcgtgaccgagccgatcgagttcagcttcatgttcctcgcgccgctgctctacgtgatccacgcggtgctcacgggcctctcgctcgcgatctgccaactgctcggcgtgaagctcggcttcacgttctcggcgggcgcgatcgactacgtgctgaactacgggctttcgacgaagggctggatcgcgatcccgctcggcctcgcgtacggtctcgcctactacggcctgttccgcttcttcatccgcaagttcaacatggcgacgccgggccgcgagcccgcgggcgcggacgcgcaggcgcagtcgttcgcatcgggcggcttcgtcgcgccgacggcgggcgcatcggtgccgcgcgcgcagcgctacatcgcggcgctcggcggcgcggcgaacctgtcggtggtggacgcgtgcacgacgcggctgcgtctttccgtcgtcgatcccgagaaggtgtccgaagcggatctgcgcacgatcggcgcgcgcggcgtgctcaagcgcggcggcagcagcgtgcaggtgatcatcgggccggaggcggacctcatcgccgacgagattcgcgcgacgctcggcagcggcgcggcgtcatcctcggcgacggctgcgcctgccgcgccggttgccgcgacggcaacggccgcgggcgcgcaggcgggcccgctcgatccggaaccgacgcgctggctcgcggtgttcggcggcgcgacgaacgtcgcgtcgctcgacgcggtcgcggcgacgcgtctgcgcgtcgtcgtgcgcgatccgtcggcggttgatcgccagcgcctcgcgacgctcgacgtcgcgtgggtcgcgggcgatacgttccacatcgtttgcggtccgtcggcgccgcgctatgcgcagcagctcgcggcgcgcctgccttcgccggacggcggcgcggcggctcagcccgcctga

SEQ ID NO: 124730 - protein, 589 aa, Burkholderia thailandensis E264
MDGNPFLKIQSLGRALMLPIAVLPVAGILLRLGQQDVLNIKMIADAGGAIFDNLPLLFAIGVAVGFAKDNNGVAALAGAIGYLIEVAIMKDIDPKLNMGVLSGIIAGVVAGLLYNRYKDIKLPDYLAFFGGKRFVPIITGLACVVLGIVFGYVWQPVQHAIDAVGQWLLTAGAIGTFVYGFLNRLLLVTGLHHIINSLVWFVFGTFTPAAGGAAVTGDLHRFFAGDPSAGSFMAGFFPIMMFGLPAACLAMFHEAPKERRAIVGGLLFSMALTSFLTGVTEPIEFSFMFLAPLLYVIHAVLTGLSLAICQLLGVKLGFTFSAGAIDYVLNYGLSTKGWIAIPLGLAYGLAYYGLFRFFIRKFNMATPGREPAGADAQAQSFASGGFVAPTAGASVPRAQRYIAALGGAANLSVVDACTTRLRLSVVDPEKVSEADLRTIGARGVLKRGGSSVQVIIGPEADLIADEIRATLGSGAASSSATAAPAAPVAATATAAGAQAGPLDPEPTRWLAVFGGATNVASLDAVAATRLRVVVRDPSAVDRQRLATLDVAWVAGDTFHIVCGPSAPRYAQQLAARLPSPDGGAAAQPA

SEQ ID NO: 124731 - DNA, 1689 bp, Novosphingobium aromaticivorans DSM 12444
  CDS (1)..(1689): transl_table=11
atgaggaaccttctcggcctgctccagccgatcggtcgcgcgctgatgctgccgatcgcggtgctccccgtcgcggggcttctgctgcgcctcggccagcccgacctgctcgatcttccgctgctggccgcgtccggcgatgcgctcttctccagcctcggactgcttttcgccatcggcgttgccgcgggcattgcgcgcgacggcaatggtgcggcgtgcctcgcgggggtggtctgttatctcgtcacgatgaacggcggcaaggcgctcctgccggtcccgacggacgtcacgctcggccttgccgatacgcttgcccagaccgtcgcaagggcgtggaaggccaaggcctttgcccggcttgacgtacccatcgggatcgtctcgggtctgctcggcggcgcgctctacaaccgcttctcgaccatcgccgttcctgcctatctcgccttcttcggcggaaggcgtttcgtgcccatcgtcgcgggtggcgcgggggtcgtgcttgccggggtcgtgggccttggcttcccggcactcgatgccgcgctcgatcacggtagccggggtctcgttgccgcaggtccggtcgggctcttcgccttcggggttctgaaccggctgctcctcgtcaccgggctccaccacatcctcaacaacgtcgcctggttcgtcctgggcgatttcggggggacgaccggcgacctgcgccgcttctttgccggagacccgcatgcgggcgccttcatggccgggttcttcccgatcatgatgttcggcctgcccgccgcctgcctcgccatgtaccgggccgcgttgcccgatcagcgcaaggcgaccggcggcatgcttctcagcctcgcgctcacctcgttcctgaccggcgtgaccgagccgatcgagttcagcttcatgttcctcgcaccgatgctctacgcggtccacgcggtgctgacgggcgcggcgatggttctgatggacgtgctcggcgtgcgcatgggcttcggcttttccgccggccttttcgactatgtgctgaacttcggccgagccacccggccgcttctcctgctgcccgtcggccttgcctatttcgcgatctactacgcggtcttcagctatgcgatccgccgtttcgacctcgcgacgccaggccgccagccgctcgcgccctccggccagcaggaaaccggcaccgacggcgagttgggccacgcctatgtcgaagcccttggcggcgccgccaacatcgccaccttgggcgcctgcaccacgcgcctgcgcctggtcgtccgcgatcccgcggcggtcgacgatgccgcgctcaaggcgctcggcgcggtcgcggtgctgcgccctgccgccgatgccgtgcaggtcataatcggccccatggcagaccgcatctgcgccgagatggccgacgtcgtgaagcacgcacccgccgcccccgccgccacgcctgtccgctccgaagcgttagccgtcagcctgcgcccggaaatccttgccgcgctcggcggagccgatgccgtcgtccaggcctcgcgcgcggccggacgcatccgcgtgacgtttcgccgtgacgcggatcttgcggcaatggccccggtccccggcctgcgctgcgtcgcccgcatcgacgcgcggacctggcacctcatcggccaggacctcgcggtctga

SEQ ID NO: 124732 - protein, 562 aa, Novosphingobium aromaticivorans DSM 12444
MRNLLGLLQPIGRALMLPIAVLPVAGLLLRLGQPDLLDLPLLAASGDALFSSLGLLFAIGVAAGIARDGNGAACLAGVVCYLVTMNGGKALLPVPTDVTLGLADTLAQTVARAWKAKAFARLDVPIGIVSGLLGGALYNRFSTIAVPAYLAFFGGRRFVPIVAGGAGVVLAGVVGLGFPALDAALDHGSRGLVAAGPVGLFAFGVLNRLLLVTGLHHILNNVAWFVLGDFGGTTGDLRRFFAGDPHAGAFMAGFFPIMMFGLPAACLAMYRAALPDQRKATGGMLLSLALTSFLTGVTEPIEFSFMFLAPMLYAVHAVLTGAAMVLMDVLGVRMGFGFSAGLFDYVLNFGRATRPLLLLPVGLAYFAIYYAVFSYAIRRFDLATPGRQPLAPSGQQETGTDGELGHAYVEALGGAANIATLGACTTRLRLVVRDPAAVDDAALKALGAVAVLRPAADAVQVIIGPMADRICAEMADVVKHAPAAPAATPVRSEALAVSLRPEILAALGGADAVVQASRAAGRIRVTFRRDADLAAMAPVPGLRCVARIDARTWHLIGQDLAV

SEQ ID NO: 124733 - DNA, 1998 bp, Staphylococcus aureus subsp. aureus NCTC 8325
  CDS (1)..(1998): transl_table=11
atgttacctgttgcgattttaccagcagctggtctgttattagctatcggtacagctatgcaaggtgaatcattacaacactacttgccgtttatacaaaatggtggcgtacaaactgtcgctaaattaatgacaggtgctggtggtatcatttttgataacttgcctatgattttcgcattaggtgtcgcaatcggattagctggcggtgatggcgtagcagctatcgcagcattcgtcggttacataatcatgaacaaaacaatgggcgactttttacaagttacacctaagaatattggtgatccagcgagtggttacgctagcattttaggtatcccaacattacaaacaggtgtgttcggcggtattataatcggggccctggcagcttggtgttataacaagttctataacattaacttaccatcttatttaggtttcttcgctggtaagcgtttcgtacctattatgatggctacaacatcatttattttagcattcccaatggcattaatttggccaacgattcaatcaggattaaatgcattcagtacaggattattagattcaaatactggtgttgccgtattcttatttggtttcatcaagcgtttattaattccattcggtctacatcacattttccacgcaccgttctggttcgagtttggttcatggaaaaatgcagctggtgaaattattcacggtgaccaacgtatctttatcgaacaaattcgtgaaggcgcacatttgacagctggtaaattcatgcaaggtgaattccctgttatgatgttcggtttacctgcagcagctttagcaatttatcacacagctaaacctgaaaataagaaagtagtagcaggtttaatgggttctgctgctttaacatcattcttaactggtattacagaaccattagaattctcattcttatttgtagcaccattattattctttattcacgcagtacttgatggtttatcattcttaacattgtacttattagatcttcatctaggttatacattctcaggtggtttcatcgactacttcttactcggtatactacctaataagacacaatggtggttagtcattcctgtaggtcttgtatacgcagttatttactacttcgtattccgattcttaattgtaaaattaaaatacaaaacaccaggtcgtgaagataaacaatcacaagcggctactgcttcagcaactgaattaccatatgcagtattagaagctatgggtggcaaagcaaacattaaacatttagacgcttgtatcacacgtctacgtgttgaagttaacgacaaatctaaagttgatgttcctggtttgaaagatttaggcgcatctggtgtattagaagtcggcaataatatgcaagcaatttttggtcctaaatctgaccaaatcaaacatgaaatgcaacagattatgaatggtcaagtagtagaaaatcctactactatggaagacgataaagacgaaactgttgttgttgcagaagataaatctgcaacaagcgaattgagccatatcgtgcatgcaccattaactggtgaagtaacaccattatcagaagtgcctgatcaagtgttcagcgaaaaaatgatgggtgacggtatcgctatcaaaccttcacaaggtgaagttcgtgcaccattcaacggtaaagtacaaatgattttcccaacaaaacatgcaattggtcttgtatcagatagtggtttagaactattaatccacatcggtttagacactgttaaattaaacggagaaggctttactttacatgttgaggaaggtcaagaagttaaacaaggtgatttattaatcaactttgatttagactacatccgcaatcatgcaaagagtgatattacgcctattatcgtgacacaaggaaacattacaaaccttgattttaaacaaggtgaacatggcaacatttcatttggcgatcaattatttgaagctaaataa

SEQ ID NO: 124734 - protein, 665 aa, Staphylococcus aureus subsp. aureus NCTC 8325
MLPVAILPAAGLLLAIGTAMQGESLQHYLPFIQNGGVQTVAKLMTGAGGIIFDNLPMIFALGVAIGLAGGDGVAAIAAFVGYIIMNKTMGDFLQVTPKNIGDPASGYASILGIPTLQTGVFGGIIIGALAAWCYNKFYNINLPSYLGFFAGKRFVPIMMATTSFILAFPMALIWPTIQSGLNAFSTGLLDSNTGVAVFLFGFIKRLLIPFGLHHIFHAPFWFEFGSWKNAAGEIIHGDQRIFIEQIREGAHLTAGKFMQGEFPVMMFGLPAAALAIYHTAKPENKKVVAGLMGSAALTSFLTGITEPLEFSFLFVAPLLFFIHAVLDGLSFLTLYLLDLHLGYTFSGGFIDYFLLGILPNKTQWWLVIPVGLVYAVIYYFVFRFLIVKLKYKTPGREDKQSQAATASATELPYAVLEAMGGKANIKHLDACITRLRVEVNDKSKVDVPGLKDLGASGVLEVGNNMQAIFGPKSDQIKHEMQQIMNGQVVENPTTMEDDKDETVVVAEDKSATSELSHIVHAPLTGEVTPLSEVPDQVFSEKMMGDGIAIKPSQGEVRAPFNGKVQMIFPTKHAIGLVSDSGLELLIHIGLDTVKLNGEGFTLHVEEGQEVKQGDLLINFDLDYIRNHAKSDITPIIVTQGNITNLDFKQGEHGNISFGDQLFEAK

SEQ ID NO: 124735 - DNA, 1467 bp, Staphylococcus aureus subsp. aureus NCTC 8325
  CDS (1)..(1467): transl_table=11
atgtataaatttttccaaaatttagggcgttcgttaatgttaccagttgccattttaccggctgcagcaattattgccggaattggtaatacgttaaatgcacttcatgcgacgccgaaaatcgcaatgttctttactacggtaggtactacgattttagagcaattaggtattttatttgcaattggtgtagctataggaatggcaaagaaaaatgatggtgcagtcgcgcttgcagctacgttaggatattttttagttacagttgtattatcaccaatgaaattagcgcctttattaggaatgaaagcttcggaaataaattcagcttttgaaaagatgaataatggcaatgtctttgttggtattgtaataggtttaatagcagcttatgcatacaataagtttagtgaaacagaattaccattagcattatcattttttagtggtaaacgtctagttccaattatgactgcattttactgtacatttttagttgtcatattgttattcttatggccactactttattcatggattgtaaaatttggtgaatctatagtcggtttaggatcgtttggagctttcatatatggtgttgccaatagattattaattcctacaggattacatcatgcactgaatagtgtgttctggtttgatacgattggtattaatgatattggtaaattccaaagtggcaaagatgctataaaaggtattacaggacgctatcaagcgggattcttcccaatcatgatgttcggtattccagcggctgcgttagcaatgtatcatacagctaaaactactcagaaaaaacaagtttacggttggttcctagcgagttcagttgcagcatttttcgttggtgttacagagccgattgagtttgcatttatgtttgttgtgccaatcttatatgttgttcatgcgttattaacaggattatctttatttatcgcagctacattccattggacagctggattttcatttagtgcaggtttgatagattatgtgttatcactaattaatccagtatcaaatcatccattgatgttgcttgttcaaggtgttgtatttttcatcttatactatgtgattttccgtgtagtaatccaagtatttaacttgaatacgattggtagaggtgaaaatgaattagttgacccaacagttgtaaaagataatattgctcctggtgaaaatgatattaaacaaagtaaatatcatcaacatgctatacaaatattagaaggtttaggcggtcaagagaatattgttaatttaaccaattgtgcaacaaggttgcgtctagagttaaaagacacatctattattgataaacagaagattaaaaacgccggtgcagttggtgttactgttaatggcaaacattcaactcaagttattgtcggtacacacgtacagcaggttgctgatgaaattgaaaaacatttataa

SEQ ID NO: 124736 - protein, 488 aa, Staphylococcus aureus subsp. aureus NCTC 8325
MYKFFQNLGRSLMLPVAILPAAAIIAGIGNTLNALHATPKIAMFFTTVGTTILEQLGILFAIGVAIGMAKKNDGAVALAATLGYFLVTVVLSPMKLAPLLGMKASEINSAFEKMNNGNVFVGIVIGLIAAYAYNKFSETELPLALSFFSGKRLVPIMTAFYCTFLVVILLFLWPLLYSWIVKFGESIVGLGSFGAFIYGVANRLLIPTGLHHALNSVFWFDTIGINDIGKFQSGKDAIKGITGRYQAGFFPIMMFGIPAAALAMYHTAKTTQKKQVYGWFLASSVAAFFVGVTEPIEFAFMFVVPILYVVHALLTGLSLFIAATFHWTAGFSFSAGLIDYVLSLINPVSNHPLMLLVQGVVFFILYYVIFRVVIQVFNLNTIGRGENELVDPTVVKDNIAPGENDIKQSKYHQHAIQILEGLGGQENIVNLTNCATRLRLELKDTSIIDKQKIKNAGAVGVTVNGKHSTQVIVGTHVQQVADEIEKHL

SEQ ID NO: 124737 - DNA, 1788 bp, Burkholderia xenovorans LB400
  CDS (1)..(1788): transl_table=11
atggatgggaatccgtttctgaaaattcagcggctgggacgcgcgctgatgctgccgatcgcggtgctgccggttgccggcctgctgctgcgactcggccaacccgatgtgttcaacatcaagatgatcgccgacgccggcggcgcgatcttcgacaacctgccgctgctgttcgcgatcggcgtggcagtcggcttcgcgaaagacaacaacggcgtggcgggtctggccggcgcgatcggttatctggtcgaagtcgcggtgatgaaggacatcaacgacaagctcaacatgggcgtgttgtcaggtatcgtggcgggtatcgtggcgggcttgctgtacaaccgatacaaggacatcaagctgcccgactacctcgcgttcttcggagggaaacgcttcgtgccgattgtcacgggggtggtctgcctcgcgctcggtatcgtgttcggctatgtgtggcaaccggtgcaggccgtgatcgatacggccggccactggctgaccaccgccggtgcgctcggcgcgttcgtgttcggcgtgctgaaccgtttgctgctcgtcacgggtttgcatcacatcctcaattcgctgacgtggttcgtgttcggcacgttcacgccgccgggcggcgccccggtgacgggcgacctgcatcgcttcttcgcgggcgacccgactgcgggcaccttcatgacgggcttcttcccggtcatgatgttcggcctgccggctgcctgtctcgcgatgttccacgaagcgccgaaggagcgccgcgcggtggtcggcggcctgctgttctcgatggcgcttacgtcgttcctgacgggcgtgaccgagccgatcgaattcagcttcatgttcctcgcaccggtgctgtacgtgatccacgcgttgttgacgggcctttcgctcgcgatctgttcggcgctcggcattcacctcggcttcacgttctccgcaggcgcaatcgactacgtgctgaactacggtttgtcgacgcgaggctggtgggcgattccgatcggcctcgtctatatggtggtgtactacgggctgttccgcttcttcatccgcaaattcaacatggcgacgccgggccgcgaacccgccgcagccgacgaacaggtcgattcgttcagcgcgggcggctttgtctcgccggtcgccggcgcagccgtgccgcgtgcgcagcgttatatcgcggcgcttggcggtgcggcgaatctgtcggtggtggatgcgtgcacgacgcgtctgcgtctgtcggtggtcgattcgaacaaggtctccgaaaacgaactgaagacgattggcgcgcgcggcgtgctcaagcgcggctcgactaacgtgcaggtgatcatcggaccggaagcggacatcatcgccgacgaaatccgcacggtgatcgcgcaaggtggcggccatgcggtgacgccggccgctgctgccacggctactgccgctgcggcggttgcgccggtcgcggccgcgggcgatcaggcccggggcggcccgctcgatcccgatccgctgcgctggctcgccgtgttcggcggcgcgggcaacgtggtgtcgctggacgcggtggcggcaacgcgtctgcgtgtggtcgtgcgcgatccgtcggcggtcgatcgtcaacgcctggcgacgctcgataccgcatgggtttcggcggacacgttccatatcgtcgtcggcgaggccgcgcagcgctacgctgaaaagctcgcgacgcgtctgtcgccgggtacgggtgccggcgcggcgccgcagcccgcgtaa

SEQ ID NO: 124738 - protein, 595 aa, Burkholderia xenovorans LB400
MDGNPFLKIQRLGRALMLPIAVLPVAGLLLRLGQPDVFNIKMIADAGGAIFDNLPLLFAIGVAVGFAKDNNGVAGLAGAIGYLVEVAVMKDINDKLNMGVLSGIVAGIVAGLLYNRYKDIKLPDYLAFFGGKRFVPIVTGVVCLALGIVFGYVWQPVQAVIDTAGHWLTTAGALGAFVFGVLNRLLLVTGLHHILNSLTWFVFGTFTPPGGAPVTGDLHRFFAGDPTAGTFMTGFFPVMMFGLPAACLAMFHEAPKERRAVVGGLLFSMALTSFLTGVTEPIEFSFMFLAPVLYVIHALLTGLSLAICSALGIHLGFTFSAGAIDYVLNYGLSTRGWWAIPIGLVYMVVYYGLFRFFIRKFNMATPGREPAAADEQVDSFSAGGFVSPVAGAAVPRAQRYIAALGGAANLSVVDACTTRLRLSVVDSNKVSENELKTIGARGVLKRGSTNVQVIIGPEADIIADEIRTVIAQGGGHAVTPAAAATATAAAAVAPVAAAGDQARGGPLDPDPLRWLAVFGGAGNVVSLDAVAATRLRVVVRDPSAVDRQRLATLDTAWVSADTFHIVVGEAAQRYAEKLATRLSPGTGAGAAPQPA

SEQ ID NO: 124739 - DNA, 1491 bp, Rubrobacter xylanophilus DSM 9941
  CDS (1)..(1491): transl_table=11
atgagcacgacggcggcgcggggcattggttgggagcgggcgcttggggcgctgcagagcctggggcgttcgctgatgcttccgatcgcggtgcttccggcggcggcgctgttgctgaggctggggcagcaggatctgttggacctcccctggatggcggctgccgggcaggccatcttcgacaacctctccatgatcttcgccgtgggcatagccttcggtctggcggggggagacggggcggctgcgctcgccgggctggtcgggtttctggtgttcgacggggtgttcaaggctgtcatcccgcaggtggacggggagccggaccccaacataaacatgggggtgctctccggcatcatcgtcgggctcgtggcggcggggctctacaggcggttccacgacatacgcctgccggactacctggccttcttcggcgggcggcgcttcgtgcccatagtgaccgcccttgcagccctggtgctgggggcgatcttcggtctggtctggccgccggtgcaggaggtcgtgaacgccgccggccaggccatcgtcgggcttggggctgtgggaaccgggatctacggcttcctcaaccggctcctcatcccggtggggctgcaccacgtcctgaacacctacgtctggttccagctcggcacctaccaggggccggacgggacggtgcacggggatctcacccggtacttcgcgggggaccccaccgcggggttcttcatgtcgggcttcttcctggtcatgatgttcgggctccccggggcctgcctcgccatgatcgtgcacgcccgctaccgcaaggtggcggtaggcatactcggctcggccgccttcgcctccttcctcaccggcatcaccgagcccatagagttcgccttcctcttcgtcgcgccgctgctctacctggtgcacgcggtgctcaccgggctcgccctcgccatcgccaccctgatgaacatcaagataggcttcgggttctccgccggggccatcgactacttcctgaacttcaccaaggagaacaccaccggggaaggttggatctgggttctcggcgccgtctacttcgccgtctactacgccgtcttcagcttcttcataaagcggttcgacctcgccacccccgggcgcggggaggccgccaccgggctctcggccgactggatcctcccggagagccagcgcggcccccgtccggaggcgaaggggcgggagcccgccggggaggatcgcgaggacgccctcgcccgcagcgtggtcgatgcgctcggcggccgccagaacatagagagctgcgagggctgcattacccgcctgcgcctcttcgtcggggacccggaacggatcgacgaggcccggctgcgggagctcggggcctccggggtcgtgaagcgcggcaaggtggtccaggtggtcatgggcacacaatccgaccggatcgccgagcgggtgaaccggctgaggaagggctag

SEQ ID NO: 124740 - protein, 496 aa, Rubrobacter xylanophilus DSM 9941
MSTTAARGIGWERALGALQSLGRSLMLPIAVLPAAALLLRLGQQDLLDLPWMAAAGQAIFDNLSMIFAVGIAFGLAGGDGAAALAGLVGFLVFDGVFKAVIPQVDGEPDPNINMGVLSGIIVGLVAAGLYRRFHDIRLPDYLAFFGGRRFVPIVTALAALVLGAIFGLVWPPVQEVVNAAGQAIVGLGAVGTGIYGFLNRLLIPVGLHHVLNTYVWFQLGTYQGPDGTVHGDLTRYFAGDPTAGFFMSGFFLVMMFGLPGACLAMIVHARYRKVAVGILGSAAFASFLTGITEPIEFAFLFVAPLLYLVHAVLTGLALAIATLMNIKIGFGFSAGAIDYFLNFTKENTTGEGWIWVLGAVYFAVYYAVFSFFIKRFDLATPGRGEAATGLSADWILPESQRGPRPEAKGREPAGEDREDALARSVVDALGGRQNIESCEGCITRLRLFVGDPERIDEARLRELGASGVVKRGKVVQVVMGTQSDRIAERVNRLRKG

SEQ ID NO: 124741 - DNA, 1446 bp, Clostridium perfringens ATCC 13124
  CDS (1)..(1446): transl_table=11
atgagtaaaaaaggttcaaaagttttaggctttcttcaaagaataggtaaatctttaatggttcctatagcagtaatgccagctttaggattattattaagacttggagataaagacttattaaatatcccttggatcagcgctgctggtggagctgcctttggagataatatggcaatgctttttgctgtaggtataggatttggactttcagatgaaaataatggagttggaggattagcaggtcttttaggatttttagttatgaaaaatgttgcaacttcatttgatccaagtataaatatgggagcttttggtggagttgtagccggagttgttggaggacttttatataataaatttaaagatattaaagttcctcaatttttaggattctttggtggaaaaagatttgttccaataataacatcagcggtatgtcttattttaggggtattctttggatatacttggccaacattccaagctggattagacggatttgctaatataatggtagcggcaggtgctattggggctggaatatatggaatattaaatagattattaataccaattggattacaccatgtaatgaacacagtaatttggttccaattaggaagctttacagatccagtttcaggtcaaattgcaactggagatattgcaagatttttagctggagatccaacagctggggtttacacagcaggcttttatccaataatgatgtttggtttaccagctgcatgtttagcaatgtatgtttgtgctaagaagaaaaacaaggcagtggttgggggaatgttcttatcattagcattaacagctataataacaggtattacagaaccaatagaatttgcttttatgttcttatcaccaatactttatgttatacatgcaatattaacaggtatatcattagcagtggcatatgctcttaatgtacatctagcatttagtttctcaggtggattaattgactatattttatactttggaaaaggtcaaaatcaattaataatattattaatgggacttgttgcatttgtagtttattatttcttatttatgttctttattaagaagtttaatcttaaaacacctggtagagaagatgattttgatgatgaaaatgaagatacagaaactaattcaaaaacagtatcaaaatcagaagacaatccatctaagggtggtactttagctgaaaaggcagaagttgttttagaagctcttggaggaaaagaaaatatagaagttctagacaactgtataacaagattaagattaactttaaaagatgcttctaaaatagatgaagttactttaaaaaaggctggagctagcggaataatgaaattagatggaaagaatgttcaagtaattatgggaactttagcagatcctttagctagccaaatgaaaaaattactttaa

SEQ ID NO: 124742 - protein, 481 aa, Clostridium perfringens ATCC 13124
MSKKGSKVLGFLQRIGKSLMVPIAVMPALGLLLRLGDKDLLNIPWISAAGGAAFGDNMAMLFAVGIGFGLSDENNGVGGLAGLLGFLVMKNVATSFDPSINMGAFGGVVAGVVGGLLYNKFKDIKVPQFLGFFGGKRFVPIITSAVCLILGVFFGYTWPTFQAGLDGFANIMVAAGAIGAGIYGILNRLLIPIGLHHVMNTVIWFQLGSFTDPVSGQIATGDIARFLAGDPTAGVYTAGFYPIMMFGLPAACLAMYVCAKKKNKAVVGGMFLSLALTAIITGITEPIEFAFMFLSPILYVIHAILTGISLAVAYALNVHLAFSFSGGLIDYILYFGKGQNQLIILLMGLVAFVVYYFLFMFFIKKFNLKTPGREDDFDDENEDTETNSKTVSKSEDNPSKGGTLAEKAEVVLEALGGKENIEVLDNCITRLRLTLKDASKIDEVTLKKAGASGIMKLDGKNVQVIMGTLADPLASQMKKLL

SEQ ID NO: 124743 - DNA, 1482 bp, Shewanella sp. MR-7
  CDS (1)..(1482): transl_table=11
atggttggaaagctggaatcaaatcgtcaaatccgaacgcgccgcttaggtcatttcgttactcagcagtggtttaaatttgcccagcgcttaagtcaggcgctgttaattcctattgcgattttgcccgcagcgggtgtgatgttgggcttaactgtgagcccaatcccttttatgcccgaggtgctaaccgtattaatgctggcggttggcaagctgattttcgccatcatgcccattttgttcgcggtggcggtggcgatagggttttgccgcgatcaaggcatcgccgcttttactgccgtatttggttatggggtgatgacggccaccttagccgcgctagcggatctttaccaactgccgacccaattactgctcggcatggaaaccttagacacagggattgccggcggcatgttaataggtggcgtgacttgctttgccgtgcgctggagtcaatatattcgcctgcccgcgattttctccttttttgaggggcgacgtagcgcctctttattgatcattccgttggcgatgggtttaggttatatccttgcccatgtgtggccgccgttatctctgctcatcgagcatgtgtccgactgggcggtttaccaaaagccggccattgcctttggggtttatggcgcgctcgaacgtttactcattcccctcggtttgcatcatatctggaatgcgcctttctatttagaagttggccaataccagttacagaactctgaagtggttcggggggaagtggcacgctatttagccggcgatccgcaggcagggaatttagcgggcggttatttgattaaaatgtggggactccccgctgcggcgctggccatttggcgctgcgccgatccttcggagcgtaatcgggtcgcgggaattatgctttctgctgctgcggccagttggctgaccggagtcactgagccgattgagttcgcctttatgtttgtggcacctatcttgtttcttatccatgtgttgctgtcgggattggcatattttgtctgcatcatgctcgatattcaccacagtatcgtgttctcccatgggctggtggatttcacgctgctgttttccctctcgcgcaatacgggctggtttgtattcttagggccgctgacggcgctgatttattacctgctgtttaggggaagtattctggcatttaatttaaagacgccaggacgactcgaacccgatgaaccccatggcgccaaagagagcttaagagccatcattgcggcattaggaggtcgtgagaatattgtcgaacttaatgcttgtcttactcggttacgcttgagtgtgcacagcccggagctcgtcaataaagtgcggctcagccagctcggtgctaagggcgtgattgtgatgggcaaaggcgttcaagtggtctacggcactaaggccgaaaccctacgcaaagtcttgcagcgctatttagatacgaggcgctga

SEQ ID NO: 124744 - protein, 493 aa, Shewanella sp. MR-7
MVGKLESNRQIRTRRLGHFVTQQWFKFAQRLSQALLIPIAILPAAGVMLGLTVSPIPFMPEVLTVLMLAVGKLIFAIMPILFAVAVAIGFCRDQGIAAFTAVFGYGVMTATLAALADLYQLPTQLLLGMETLDTGIAGGMLIGGVTCFAVRWSQYIRLPAIFSFFEGRRSASLLIIPLAMGLGYILAHVWPPLSLLIEHVSDWAVYQKPAIAFGVYGALERLLIPLGLHHIWNAPFYLEVGQYQLQNSEVVRGEVARYLAGDPQAGNLAGGYLIKMWGLPAAALAIWRCADPSERNRVAGIMLSAAAASWLTGVTEPIEFAFMFVAPILFLIHVLLSGLAYFVCIMLDIHHSIVFSHGLVDFTLLFSLSRNTGWFVFLGPLTALIYYLLFRGSILAFNLKTPGRLEPDEPHGAKESLRAIIAALGGRENIVELNACLTRLRLSVHSPELVNKVRLSQLGAKGVIVMGKGVQVVYGTKAETLRKVLQRYLDTRR

SEQ ID NO: 124745 - DNA, 1980 bp, Pediococcus pentosaceus ATCC 25745
  CDS (1)..(1980): transl_table=11
atgaaagcatatttgcaacgcatgggtcgttctttacaacttcccgtagccgttttgcctgccgccgctttgttggttggtattggtaactggtgggcttcttacagtaatgacgtagttgctcatttcttacaagccggtggtaacgctgttttaggtcaactaccgctattatttgccgttggtttagccctcgggatgtctgtcgatcaatctggggctgctgccctcgctgggttagttgcctttgagctaccggtcaatgtattaaagcctgaatcggttgctacattaatgaacatcaaacctacagccgttgatgcttcgtttgctcaaattggaaatgtatttatcggtattatcgctggtttgattgctgcagcattatacaatcgattccacgaaacaaaattaccgatggctctttccttctttagtggtaagcgtttagtaccaattatggctgcccttgttatgctacttgtcagtgtagtgttactatttgtttggccaccagtttacggcgctctcgttgcgtttgctaagtttatcttgaacttaggctgggttggtgctggattgtacggtttcttcaaccgtctccttatcccaactggtttacatcaagctttgaattccgtattctggtttgacgtggctgggattaatgatattggtaaattcttggcttctcaaggtacaaagggtgttacaggtatgtaccaagctggattcttcccaatcatgatgtttggacttccagccggagcttacgctatttacaaaaatgctcgtcctgaaaacaaagcaactacagcatcattgatgttagctgctgcatttgcttcattcttcaccggtgttacagaaccacttgaattctcatttatgtttgttgcatggcctctatacgtattgcacgcaatctttactggtctttcactcgcatttgcggcatttatgcattggacagctggttttgcattcagtgccggtttagttgattatgtgcttagtttgaagaacccgatcgctaaccaaccattatggttaattgttcaaggcctcgtaatggctgtaatttactattttggtttcgattttgcgattaagaaattccatttgatgaccccaggtcgcgaagaattagctgaggacgatggtgttgaagaagttgcaactaatgattcagatgataagtatactgttcaagctaaaaagatctacgctgctctaggcggttcagacaacttacaagtcgtggacaactgtacaacacgtcttcgtcttaaattgaatgatacagataatattaatgaaaatgcaatcaaacgcagtggtgctgcaggattgaataagattgataagaataatctacaaattattattggtactgaagttcaattcgtttcagatgcacttgcaaaattagagaatgctaaggccccaatttcttcagtgaagactgctgatgaaacagcttcaacagaagaaacggttgctgatggtattaaacgggatgttacggaagagttctatagtgttgctaatggacaatacatggatattgaggaagttcctgatgacacgtttgctcaaaagatgttgggtgacggatatgctattaatcctactgatggaacgattactgctccagttgatggaacaattacatcagtattccctactaaacatgcaattggtttcaagacagatgctggtttagaaatccttcttcatatgggaatcgacactgttgaattaaatggtgctccattcgatgttaaggtagaagatggacaaacggttaaacatggtgacgttgtagctaaagttgacttagacgcaattaaaaatgcgggtaagcagacaccaatgatcgtcatcgttacgaacatggatgcagttcgggtgatgaagttcaaaggtaatgcattagttacaccagaatccttagttcttaaaacaactactaagtaa

SEQ ID NO: 124746 - protein, 659 aa, Pediococcus pentosaceus ATCC 25745
MKAYLQRMGRSLQLPVAVLPAAALLVGIGNWWASYSNDVVAHFLQAGGNAVLGQLPLLFAVGLALGMSVDQSGAAALAGLVAFELPVNVLKPESVATLMNIKPTAVDASFAQIGNVFIGIIAGLIAAALYNRFHETKLPMALSFFSGKRLVPIMAALVMLLVSVVLLFVWPPVYGALVAFAKFILNLGWVGAGLYGFFNRLLIPTGLHQALNSVFWFDVAGINDIGKFLASQGTKGVTGMYQAGFFPIMMFGLPAGAYAIYKNARPENKATTASLMLAAAFASFFTGVTEPLEFSFMFVAWPLYVLHAIFTGLSLAFAAFMHWTAGFAFSAGLVDYVLSLKNPIANQPLWLIVQGLVMAVIYYFGFDFAIKKFHLMTPGREELAEDDGVEEVATNDSDDKYTVQAKKIYAALGGSDNLQVVDNCTTRLRLKLNDTDNINENAIKRSGAAGLNKIDKNNLQIIIGTEVQFVSDALAKLENAKAPISSVKTADETASTEETVADGIKRDVTEEFYSVANGQYMDIEEVPDDTFAQKMLGDGYAINPTDGTITAPVDGTITSVFPTKHAIGFKTDAGLEILLHMGIDTVELNGAPFDVKVEDGQTVKHGDVVAKVDLDAIKNAGKQTPMIVIVTNMDAVRVMKFKGNALVTPESLVLKTTTK

SEQ ID NO: 124747 - DNA, 1359 bp, Shewanella sp. ANA-3
  CDS (1)..(1359): transl_table=11
ttgcccgcagcgggtgtgatgctgggcctaaccgtgagtccaatcccttttatgcccgaggtgctaaccgtattaatgctggcggttggcaaactgattttcgccatcatgcccattttgttcgcggtagctgtggcgatagggttttgccgcgatcaaggcatcgccgcttttactgccgtatttggttatggggtgatgacggccaccttagccgcattagcggatctctaccaactgccgacccaattactactcggcatggaaaccttagacactgggattgccggtggcatgttgattggtggcgtgacttgctttgccgtgcgctggagccaatatattcgcctgccagcgattttctcctttttcgaagggcgacgtagcgcctctttattgatcattccgttggcgatgggcttaggttatatccttgcccatgtgtggccgccgttatctctgctcatcgagcgggtttccgactgggcggtttaccaaaagccggccatcgcctttggggtctatggcgcgctcgaacgtttactcatacccctcggtttacatcatatctggaatgcacctttctatttagaagtcggccaataccagttacagaattcggaagtggttcggggggaagttgcgcgttatttagctggcgatccgcaggcggggaatttagcgggcggttatttgataaaaatgtggggactccccgcagcggcgctagccatatggcgctgcgccgaaccctcggagcgtaatcgggtcgcgggtattatgctttccgcggcggcggccagttggctgaccggagtcacagagcctatcgagttcgcctttatgtttgtggcgccatttttgtttcttatccatgtgctgctgtcggggctggcatattttgtctgcatcatgctcgatattcaccacagtattgtgttctcccatgggctggtggatttcacgctgctgttttcgctgtcgcgcaatacgggttggttcgtattcttagggccgctgacggcggtgatttattatctgctgtttaggggcagtattctggcatttaatttaaagacgccaggacgactcgaacccgatgaaccccatggtgccaaagagagcttaagggccatcattgcggcattgggcggtcgtgagaatattgtcgagctcaatgcttgtctcacccgtttacgcttgagtgtgcacagcccagaactcgtcaataaagtgcggctcagccagctcggtgctaagggcgtgattgtgatgggcaaaggtgtgcaagtggtatatggcactaaggccgaaaccctacgcaaagtcttgcagcgttatttagatactcggcgctga

SEQ ID NO: 124748 - protein, 452 aa, Shewanella sp. ANA-3
MPAAGVMLGLTVSPIPFMPEVLTVLMLAVGKLIFAIMPILFAVAVAIGFCRDQGIAAFTAVFGYGVMTATLAALADLYQLPTQLLLGMETLDTGIAGGMLIGGVTCFAVRWSQYIRLPAIFSFFEGRRSASLLIIPLAMGLGYILAHVWPPLSLLIERVSDWAVYQKPAIAFGVYGALERLLIPLGLHHIWNAPFYLEVGQYQLQNSEVVRGEVARYLAGDPQAGNLAGGYLIKMWGLPAAALAIWRCAEPSERNRVAGIMLSAAAASWLTGVTEPIEFAFMFVAPFLFLIHVLLSGLAYFVCIMLDIHHSIVFSHGLVDFTLLFSLSRNTGWFVFLGPLTAVIYYLLFRGSILAFNLKTPGRLEPDEPHGAKESLRAIIAALGGRENIVELNACLTRLRLSVHSPELVNKVRLSQLGAKGVIVMGKGVQVVYGTKAETLRKVLQRYLDTRR

SEQ ID NO: 124749 - DNA, 1584 bp, Mycobacterium smegmatis str. MC2 155
  CDS (1)..(1584): transl_table=11
atgagcaacgcggcgaaacctgaagcaacacagaggaaatcagggctgcggatcccagggttcgcacagctgcagcgcctcggcaaaagcctcatgctgcccatcgcggtgctgcccgcggcgggcatcctgctgcgcataggccagcctgatctgctcggtcgcatcgaatcaccggtcatcggcccgttcttcaaggccatgagcgctgcgggcgacgcgcttttcagcaatcttcccctgttgtttgcggtgggtgtcgccatcggattcgcgcgcaaggccgacggatcgaccgcgctcgcggcagtcgtcggctatctcgtggtggaggccgtgttcaagaccatgtcgccgatcgtgctggccggtgaggtggacaaggcaggcgatcaggcgcagatcaactacagcgtgttcgccggtatcgtcgtcggcctgctcaccgcatggttgttcgaccggtaccacaccatccaattaccgtcgtatctgggctttttcggcggaagacgattcgtccccatcgtggtgtcactggcgtcgctgttcgtggcgttcctgatgagctacttctaccccatcttcgacgcaggcctgaccgcgctcggccggttcatcggcggggcaggcgcgctcggcgcgttcgtctacggattcgccaaccgcatgctgattcccctgggcctgcaccacatccccaactcgtatgtctggttcatctacggcgactaccagaccgcggacggccaggtggtcaccggcgagctcaccagatttgccgcgggcgatcccaccgcgggcatcctcacgtcaggcttctacccgatcctgatgttcgggttgccggccgccgcgctggcgatgatccacgtcgccaacaaaaggcagcgcaaggtcgcggtgggcatcctgtcggccgcggcgctcaccgcgttcctcacgggcgtgaccgaaccgctcgagttcgccttcatgttcgtggcattcccgctctacgtcatccacgcggtgctcaccgggttgtcgctggcgatcgcctacctgctcgacatccatctgggcttctcgttctcggcaggtctgatcgacctgctgctctacggcacggcgccggccgcgaagaacatcccgctgctgatcgcgatgggtgtggtgttcttcgtcgtctactacctgatgttccggttcgcgatcaccaagtggaacatgcggaccccgggccgggagcccgagtcggagttcgccgccgaggaggcggccaacctcggcgagggcgagacgtcggcgacggccgtcaccgcgggcggcgcggcgggcgccgccggtactgtcgcggcgcccgagcgcgccgacagcgaggccgagcagctcatcgcggccttcggggggcgggagaacctggtcaacgtcgacgcgtgcatcacgcggttgcgcatggaggtcgccgacaagacaaaggtggatcacgaccggctccgcgcgctcggcgccgcaggcgtcctcgaggtcggcaacagtgtccaggcggtgttcggcaccaactccgaggcgctcaagaacgccatcatcgacagcctgtga

SEQ ID NO: 124750 - protein, 527 aa, Mycobacterium smegmatis str. MC2 155
MSNAAKPEATQRKSGLRIPGFAQLQRLGKSLMLPIAVLPAAGILLRIGQPDLLGRIESPVIGPFFKAMSAAGDALFSNLPLLFAVGVAIGFARKADGSTALAAVVGYLVVEAVFKTMSPIVLAGEVDKAGDQAQINYSVFAGIVVGLLTAWLFDRYHTIQLPSYLGFFGGRRFVPIVVSLASLFVAFLMSYFYPIFDAGLTALGRFIGGAGALGAFVYGFANRMLIPLGLHHIPNSYVWFIYGDYQTADGQVVTGELTRFAAGDPTAGILTSGFYPILMFGLPAAALAMIHVANKRQRKVAVGILSAAALTAFLTGVTEPLEFAFMFVAFPLYVIHAVLTGLSLAIAYLLDIHLGFSFSAGLIDLLLYGTAPAAKNIPLLIAMGVVFFVVYYLMFRFAITKWNMRTPGREPESEFAAEEAANLGEGETSATAVTAGGAAGAAGTVAAPERADSEAEQLIAAFGGRENLVNVDACITRLRMEVADKTKVDHDRLRALGAAGVLEVGNSVQAVFGTNSEALKNAIIDSL

SEQ ID NO: 124751 - DNA, 1503 bp, Bacillus cereus G9241
  CDS (1)..(1503): transl_table=11
atgttgcagtttctacaacgtattggtaaagcgttaatgcttccaatcgcagtactaccagcagcaggattattgcttcgtttagggcaaccagatgtatttgatattcctgttatggcacaggctggcgcagcagtttttgataatttagcacttatttttgcaattggtattgcaatcggtctttcagttgatggtagtggtgcagcaggtcttgcaggtgcaattggttatctagttatgaaaaacagtattgatgcactgagcaaagggtattctactgctgaattacaagataaattaggcaaagtccaagatttaataggtaatagcgctaatgttgatccatctaagcttgcagatacaatgacacaagtatctaaggcggccgaattatcgactaaagtggatatgaaagttttaggtggtattattgttggtgttatagcaggacttctttataataaattccataaaattaaacttccagaatggttagggttctttgctggaaaacgttttgttccgattgttacatcggtagtaatgctaatactaggaattttatttgcacaaatttggccaacaattcaaaatggcattgatgcattagctcacggaattgttaatttaggtgcaattggttcaggattgtttggtttattaaaccgtctattaatcccaatcggtttacaccacgtaatgaacacatatttctggttcgtatttggggactttacaaatgcagcaggtaatgttgtgaatggtgatattgctcgtttccttgcgggtgataaaacagcaggtatgttcatgacaggtttcttcccagttatgatgttcggtttaccagcagcatgtttcgcaatgattgcggctgctaaaccagaaaaacgtaaaatggttacaggtatgttaggtggtctagcattaacttcattcttaactggtattacagaaccaattgaattctcattcatgttcttatcaccagtattatatggtattcatgctgtattaacaggtctttctttattcattacaacatcacttggtattcacgatggtttctcatttagtgccggtgcaattgattatgctttaaacttcggtattgcaacaaaaccagtattattagctggaatcggtttaatttacgcagcaatttactttgtagtattctacttcttaattaagaagttcgatctaaaaactcctggtcgtgaagacgaagaggaagtagctgaaggcgaagaagctccagttgcaggttcaattggtgaaacttacgtattagctttaggcggaaaagaaaacttaacagttattgataactgtgcgacacgtctacgcttacaagtgaaagatgctggtcaagtaaacgaagcagcattaaaacgtgctggtgcaaaaggtgttatgaaattaagtaacacgagtgtccaagttatcgtaggtacaaatgttgaatctgttgccgatgatatgaaaaaacacgtataa

SEQ ID NO: 124752 - protein, 500 aa, Bacillus cereus G9241
MLQFLQRIGKALMLPIAVLPAAGLLLRLGQPDVFDIPVMAQAGAAVFDNLALIFAIGIAIGLSVDGSGAAGLAGAIGYLVMKNSIDALSKGYSTAELQDKLGKVQDLIGNSANVDPSKLADTMTQVSKAAELSTKVDMKVLGGIIVGVIAGLLYNKFHKIKLPEWLGFFAGKRFVPIVTSVVMLILGILFAQIWPTIQNGIDALAHGIVNLGAIGSGLFGLLNRLLIPIGLHHVMNTYFWFVFGDFTNAAGNVVNGDIARFLAGDKTAGMFMTGFFPVMMFGLPAACFAMIAAAKPEKRKMVTGMLGGLALTSFLTGITEPIEFSFMFLSPVLYGIHAVLTGLSLFITTSLGIHDGFSFSAGAIDYALNFGIATKPVLLAGIGLIYAAIYFVVFYFLIKKFDLKTPGREDEEEVAEGEEAPVAGSIGETYVLALGGKENLTVIDNCATRLRLQVKDAGQVNEAALKRAGAKGVMKLSNTSVQVIVGTNVESVADDMKKHV

SEQ ID NO: 124753 - DNA, 1830 bp, Bacillus anthracis str. A2012
  CDS (1)..(1830): transl_table=11
atgcttccagttgcgattttaccggcagcaggtattttacttggatttggtaatgcatttcaaaatccacagttaacaaatgttattcctgcattaaaagcagattggttcgtaatggtagcaaaaattatggaacaatctggtgatattattttcgctaaccttgcattattattcgcagttggggtagcgattggtttagctggtggagatggagtagctggtttagcagcgttcgtcggctacttaattatgaacaaaacgatgagtgtgttcttagaagtagataagctagtgaaagtaacaagttctggagcagatccagtgaaaattggatttacggatccagcatacgcaaacgtattaggaattccaacattacaaacaggagtatttggtggtattatcgtcggtatagtagcggcatattgctataataaatacttcaacattgaattaccatcatacttaggtttcttcgcaggtaagcgtttcgtaccgatcgcaactgcaacattctctttagtagtaggtattatcatgtgcttcgtttggccatacattcaaggtggcttaaatacgttctcacatcaaatgattgatgcaaatagaacattagcagcattcatattcggtttaattgaacgttcattgattccatttggattacatcacattttctattcaccgttctggttcgaattcggtcagtatacaaatgcagctggcgaattaatccgtggtgaccaaaaaatctttatggcacagttaaaagacggtgtagaattaacagcaggtacatttacaactggtaagtatccgttcatgatgttcggtcttccagcagcagctttagcgatgtaccatgaagcacgtccagaaaataaaaaattagcagctggtattttaggttctgctgcattaacatctttcttaacaggtattacagaaccacttgaattttcattcttattcgtagcaccagtactattcggaattcatgccgtattcgctggtctatcatttatgacaatgcaaattttaggtgttaaaattggtatgacattctctggtggtttaattgactttatgttattcggtgtattaccaggccgtacagcatggtggtgggtaattgttgttggtcttgtactagcagttatttactacttcggattccgctttgcaatccgtaaatggaatctaaaaacacctggtcgtgaagtagcaaatgcgaatgacggcgcagggaaagcagaagctggtgaacttcctcgtgaagtactagtagcacttggtggtaaagaaaacattgcttctttagacgcttgtattactcgtttacgtgttcaagttaacgaacaaaagaatgtaaacaaagatcgtttaaaagagcttggagcagctggtgtacttgaagttggaaataacattcaagctatttttggaccgaaatctgacacattaaaatcacaaattcacgatattatgtcaggtcgtacacctcatgttgaaaaagaagagcctgtaaaagtagaagaagctcttcaaaaagttgatgcaaacgaaacaatcgtttcaccaattgaagggaaaatcctaccaattacagaagtacctgatcaagtattctcaggaaaaatgatgggagacggatttgcaattgagccgacagaaggaacagtagtttctccagttaacggtgaaattgtcaacgtattccctacaaaacatgcaattggtattcaatctgaaggcggaaaagaaattttaatccacttcggtattgatactgtaaaattaaatggtgaaggttttgaagcactttag

SEQ ID NO: 124754 - protein, 609 aa, Bacillus anthracis str. A2012
MLPVAILPAAGILLGFGNAFQNPQLTNVIPALKADWFVMVAKIMEQSGDIIFANLALLFAVGVAIGLAGGDGVAGLAAFVGYLIMNKTMSVFLEVDKLVKVTSSGADPVKIGFTDPAYANVLGIPTLQTGVFGGIIVGIVAAYCYNKYFNIELPSYLGFFAGKRFVPIATATFSLVVGIIMCFVWPYIQGGLNTFSHQMIDANRTLAAFIFGLIERSLIPFGLHHIFYSPFWFEFGQYTNAAGELIRGDQKIFMAQLKDGVELTAGTFTTGKYPFMMFGLPAAALAMYHEARPENKKLAAGILGSAALTSFLTGITEPLEFSFLFVAPVLFGIHAVFAGLSFMTMQILGVKIGMTFSGGLIDFMLFGVLPGRTAWWWVIVVGLVLAVIYYFGFRFAIRKWNLKTPGREVANANDGAGKAEAGELPREVLVALGGKENIASLDACITRLRVQVNEQKNVNKDRLKELGAAGVLEVGNNIQAIFGPKSDTLKSQIHDIMSGRTPHVEKEEPVKVEEALQKVDANETIVSPIEGKILPITEVPDQVFSGKMMGDGFAIEPTEGTVVSPVNGEIVNVFPTKHAIGIQSEGGKEILIHFGIDTVKLNGEGFEAL

SEQ ID NO: 124755 - DNA, 1518 bp, Exiguobacterium sibiricum 255-15
  CDS (1)..(1518): transl_table=11
atgaagtatatgttgcagtttcttcaacgaatcggtaaagctttaatgctgccgatcgccgttttaccagccgcgggaattgtccttcgactcggttcagccgatatgttggatattccgttaatggtggcagcaggtggtgcgatttttgataatcttccactaatttttgcgattggtgtcgcgatcggattatcgattgatgcaagtggcgctgccggcttggcaggagcagtcgggtatctggtcttaaaaacgggtgtcgactccatgaacaaggattattcgaacgctcaaattcaggctaagtacgatgcaatcgccgccattgtcaatgactcctcgacgaaagtggatggggcgaccttaagttccattgccaatcaggcaactttaggttcgatggtcaatatggctgtgttcggcgggatcattgccggtattgtcgccggtttgttgtacaaccgattttacaatattaaattaccggattggttagcattcttcggcggacgccgttttgttccgatcatcacgtcagccgctatgctggtcttagcgtttgtctttggttacttatggccgttcattgaagacggaatcaataatgcgggagaatggatggtcagccttggagcaggaggggccgcactgtttggattcttcaaccgtctgttaattcctgtcggtcttcaccatgtcttgaacaatattttctggtttgtcttcggttcatatgaaaaagcggatggaacaattgcgaatggagatatcgcacgcttcttcgctggagatccgacagccggtatttatcaagccggatttttcccgatcatgatgttcgctttaccggctgcagcagcagccatggtcatggcggcacgcaaagaaaatcggaaagccgtcgcaggggcgatgattggtcttggattaacatcattcctgacagggattacggaaccgattgagttttcattcatgttcttgtcaccggtcttatatgtcatgcacgccgtgttgacgggtgtttccatggcagtcgtcaatttactcggtatcttgcacgggttctccttctctgccggtttcattgactatgtcctgaacttcggaatcgcgacaaaaccgttgcttttactcgttgtcggtctcgtattcgccgtcatttattacttcctgttctacttcatgatcacgaaatttgatctgaaaacgccgggtcgtgaagatgaatcacttgtaacggatgcaggccctgtcacgggtgtatcagacgataagtacgagcaacaagcagcgcggatttttgcaggcttacaaggaacggacaacgtcacagcgattgataactgtgcgacacgtctccgtctccaggtaaaagattcaacgatcattgacgaagcggcaattaaagcggccggcgcaaaaggtgtgatgaagatgggcgcgaaaaacgtccaaatcatcatcggtacggatgttgagttcgtcgctgatgcgatgaaacgtcaaaaataa

SEQ ID NO: 124756 - protein, 505 aa, Exiguobacterium sibiricum 255-15
MKYMLQFLQRIGKALMLPIAVLPAAGIVLRLGSADMLDIPLMVAAGGAIFDNLPLIFAIGVAIGLSIDASGAAGLAGAVGYLVLKTGVDSMNKDYSNAQIQAKYDAIAAIVNDSSTKVDGATLSSIANQATLGSMVNMAVFGGIIAGIVAGLLYNRFYNIKLPDWLAFFGGRRFVPIITSAAMLVLAFVFGYLWPFIEDGINNAGEWMVSLGAGGAALFGFFNRLLIPVGLHHVLNNIFWFVFGSYEKADGTIANGDIARFFAGDPTAGIYQAGFFPIMMFALPAAAAAMVMAARKENRKAVAGAMIGLGLTSFLTGITEPIEFSFMFLSPVLYVMHAVLTGVSMAVVNLLGILHGFSFSAGFIDYVLNFGIATKPLLLLVVGLVFAVIYYFLFYFMITKFDLKTPGREDESLVTDAGPVTGVSDDKYEQQAARIFAGLQGTDNVTAIDNCATRLRLQVKDSTIIDEAAIKAAGAKGVMKMGAKNVQIIIGTDVEFVADAMKRQK

SEQ ID NO: 124757 - DNA, 2106 bp, Exiguobacterium sibiricum 255-15
  CDS (1)..(2106): transl_table=11
atgtggaaaaatgtgttcggtgtattgcaacggatcggtaaagctttgatgttaccggtcgcaatcctaccggcagcggggttgctcctggcgtttggtacggcgtttcaaaacccgaatctgacgcagtatcttccgtttctcgaaaatgacgcactggtcgtcatttggcgggtcatgcaggatgcaggggatatcatctttgccaacttaggattactgtttgccgtcggggttgcgattggtcttgcgaacggtgaaggggtcgcaggattggccgcaatcgtcggattcctgatcatgaacaaagttatcagttcatttttacagattacgcctgaaaagattacagaagcacaaaaatcgagtgatttatcgtatgcgaccgttttaggaattccgaccctgcaaatgggggtgttcggagggattatcgccgggttgattgcggcgtacagctataataaattctttaagattaaacttccggatttccttggattctttgccggtaaacgatttgtaccgattgctacagcgctattcagtttagtcgctggttttgccctgtcttatatttggccaccaatcgggacggggatcaatacgttctcgaaaaccatcatcgaatcaaacgaaacgttatctgccttcatctttggattagtcgaacgttctctcattccgtttggtctccaccatatttggtattcaagtttttggttccagttcggtgaatataccgataaagccggtaatctcgttaacggggatcagcggatcttcttcgcccagttaaaagatggtgttccatttacagccggaacgtatatgaccgggaaatacccgttcatgatgtttggacttcctgctgcgtgtcttgcgatgtatcatacggttgcgaaggatcgccggaaagcggttgaagggttatacttctcggctgccctgacttctttcctgacagggattactgaacctgtcgagttttcattcgtattcgttgccccgttattgtttgcagttcacgctgtgtttgccggattgtcattcatgatcatggacatcttaaacgtcaagatcgggatgaccttctccggaggattgattgactatacgttgttcggtattttaccaaaccgaacctcctggtggctcgtcattccggtcggtcttgtcttcgcggtcatttattacttcggcttccgtttcgtcatccagaaatttgatctgaagattcctggacgtgaagcgattcaggaaggggcagcgacagccggtgcgacagctggtgaattgccatatgaaattctccaggcatttggcggaccttccaatatcaaacatttggatgcctgtatcacacggctccggattaccgtcaatgataaatccggtgtcaataaagagcgcttgaaacagttgggtgctgccggtgtcctcgaagtcggggataacgttcaggctatcttcggtccgaaatcggacggtatcaagactgagatggcagaaatcatgaacgatccgaattatcaaccaccagtcaaaccggaagccgatccgattccgcaggttccgacaggcgcggaagcacggacggaaaaccggacagatgaccggtccggattagccggaacagatggtgcctatgtcccgagcgaaggatacgtctcgccactcagcggtgtgattcgttctctcgatgatgtaccggatcaagtcttctccggacggatgatgggtgacggttatgccatcgaaccgacggaaggatatgtcgtgtcacctgtttccggtgaaattacgaccttcttcccgaccaaacatgcgattggtattttggccgataacggggatgaaattttgattcatatcggtattgatacagtatcgctcgaaggaaaaggatttgaagcgctcgcgaaagccggcgaccgggtcgaaccaggttcaccgttattgaacgtcgatctggaacaaatccgaccacttgtcccatcattgctcacaccaatcatcgtcacgaacagcggcgaccggaaagtctccgttgatgttggtaaaaccgttgaagcgggtgaaaagatttcgtatgacattaaataa

SEQ ID NO: 124758 - protein, 701 aa, Exiguobacterium sibiricum 255-15
MWKNVFGVLQRIGKALMLPVAILPAAGLLLAFGTAFQNPNLTQYLPFLENDALVVIWRVMQDAGDIIFANLGLLFAVGVAIGLANGEGVAGLAAIVGFLIMNKVISSFLQITPEKITEAQKSSDLSYATVLGIPTLQMGVFGGIIAGLIAAYSYNKFFKIKLPDFLGFFAGKRFVPIATALFSLVAGFALSYIWPPIGTGINTFSKTIIESNETLSAFIFGLVERSLIPFGLHHIWYSSFWFQFGEYTDKAGNLVNGDQRIFFAQLKDGVPFTAGTYMTGKYPFMMFGLPAACLAMYHTVAKDRRKAVEGLYFSAALTSFLTGITEPVEFSFVFVAPLLFAVHAVFAGLSFMIMDILNVKIGMTFSGGLIDYTLFGILPNRTSWWLVIPVGLVFAVIYYFGFRFVIQKFDLKIPGREAIQEGAATAGATAGELPYEILQAFGGPSNIKHLDACITRLRITVNDKSGVNKERLKQLGAAGVLEVGDNVQAIFGPKSDGIKTEMAEIMNDPNYQPPVKPEADPIPQVPTGAEARTENRTDDRSGLAGTDGAYVPSEGYVSPLSGVIRSLDDVPDQVFSGRMMGDGYAIEPTEGYVVSPVSGEITTFFPTKHAIGILADNGDEILIHIGIDTVSLEGKGFEALAKAGDRVEPGSPLLNVDLEQIRPLVPSLLTPIIVTNSGDRKVSVDVGKTVEAGEKISYDIK

SEQ ID NO: 124759 - DNA, 1431 bp, Streptococcus suis 89/1591
  CDS (1)..(1431): transl_table=11
ctgggaattggaggcgccttatcaaatagtaatgctgtagcacaattccctgtattggatcaagcgtggttgcaagctgtattcactatcatgagtacggcaggtagtgcggtatttgcgaatttagcattgatttttgcaattggtgttgctgtaggtttggcagatgctgataaggggactgctggcctatctgctggggttgcatacttggtttatacggctactattagtggatttttaactctttttgcagataagggagcaagcattgatactggagttttgggcgctttagcgattggtatcactgttgcaactttacacaataaatatcgaaaaattgaattaccagcctttcttggtttcttcgggggctctcgctttattccaattatttcatcatttgcagcaattgcgattggctccattttttatataatttggccaccgattcagaatttgttagttgattttggtaaggcaatagcagagatgggaagttttggaactttcttatatggttttggattacgtttgacaggtgcatttggcttgcaccataccatctatccaatgttttggtatacttcattaggcggaagtgaagtggtagcaggtgagacaatccaaggtgcgcaaaatattttctttgctcaattagcagatgcgaatcacacaggcttatttacttatggaactcgattttttgctggtcgatttgcaacgatgatttttggtctaccagcatcttgtttggctatgtatcacgcaattcctaaggaaaatcgtaagaaggttggcagtttttattcaagtagtgcattaacttccctattaacaggaattaccgagccaatcgagttttctttcttgtttgttgctccatggctatatgttgttcacgcatttttagatggactatcattcttagtcgcagatctcctgcaaattcgtattgggaactcattttctggtgggcttattgattacttgatttttggtgttttccaaggaaatgacaaaaccaattggatttacgtgattcctgttggcttgctttgggcagcagtttattatctagttttcaaatttttagtaaccaaatttcacgtgctagttcctggtatggaaagtagtgaccaagcatcacattctgaaaaagttttatcaaacggttctagtcttcgtgataatgcaattgctatcatcgatgctcttggtggtgcagataatattgagaatgtaactgcctgtgcaactcgattaagagtatcgctcagaaatagtggtcttgtggataagggagttattcagtctataggtgcaacggctgttttggatgtaaaaggaggaatacaggctattttcggaggtaaggctattctgtatagccaagaaatcaatcaaattcttgggcttgaagaatag

SEQ ID NO: 124760 - protein, 476 aa, Streptococcus suis 89/1591
MGIGGALSNSNAVAQFPVLDQAWLQAVFTIMSTAGSAVFANLALIFAIGVAVGLADADKGTAGLSAGVAYLVYTATISGFLTLFADKGASIDTGVLGALAIGITVATLHNKYRKIELPAFLGFFGGSRFIPIISSFAAIAIGSIFYIIWPPIQNLLVDFGKAIAEMGSFGTFLYGFGLRLTGAFGLHHTIYPMFWYTSLGGSEVVAGETIQGAQNIFFAQLADANHTGLFTYGTRFFAGRFATMIFGLPASCLAMYHAIPKENRKKVGSFYSSSALTSLLTGITEPIEFSFLFVAPWLYVVHAFLDGLSFLVADLLQIRIGNSFSGGLIDYLIFGVFQGNDKTNWIYVIPVGLLWAAVYYLVFKFLVTKFHVLVPGMESSDQASHSEKVLSNGSSLRDNAIAIIDALGGADNIENVTACATRLRVSLRNSGLVDKGVIQSIGATAVLDVKGGIQAIFGGKAILYSQEINQILGLEE

SEQ ID NO: 124761 - DNA, 1491 bp, Photobacterium sp. SKA34
  CDS (1)..(1491): transl_table=11
gtgaatattcttggatattttcaaaaagtaggtaaggcattaatggtgccagttgcagtacttcctgcagcggcaatcttaatgggtatcggttactggattgatccgactggctggggggcaaattctgcattagctgctttcttgatcaaggcaggcgcggcaattattgataacatgtctgtactgtttgcagttggtgttgcatacggtatgtctaaagataaagatggtgcagcagcactatcaggttttgttggtttccttgtggtaacaacgcttcttgcaccaggtgcagtcgcgcaaatccaaggtattgacccaagcgcagtaccagctgcatttggtaaaatcaataaccaattcgtaggtatcttagtcggtatcgtgtcagctgagttgtacaaccgtttctcaagcgtagaactacataaagcattagctttctttagtggcaagcgtttggtaccaatcttaacatctgttgctggtattgttattgcgggtatcttgatgtttgtttggccaacaatttacaacggtctagtacattttggtgaaagcattcaaggtatggggtctgtaggtgcgggtatctacgcattcttcaaccgtcttttgattcctgtaggtcttcaccacgcactaaactcagtattctggtttgacgtagcaggtattaacgatattcctaacttcttaggtggcgcgaaatctatcgctgaaggtacagcaactccaggtgtaactggtatgtaccaagctggtttcttcccaatcatgatgtttggtctaccaggtgcggcacttgcgatgtaccacactgcgaaagcgaagaacaaagagcgtgtagcatcactactaatcgctgctggttttgcatcattcttcacaggtgttactgagccgctagaattttcatttatgttccttgcacctgtattatacgtaattcacgcagcactagcgggtctatctgtatacatcgctgcatcaatgcagtggattgcaggtttcggtttctctgctggtctagttgatatgttcttgtcatcacgcaacccactagctgttcagtggtacatgctgattgttcaaggtattgcattcttcttcatctactactttatcttccgtttcgcgattgttaagttcaaccttaaaacgcctggccgtgaagacgacgacgaagagacttcatcagttgcaggttctgcagaaactggcgagctagctaagcagtacttaaaagcactgggtggtcacggtaacctagagaacatcgatgcttgtattacacgcctacgtctaacgttaaaagacagcagccttgctaacgagaaaacgttaaaagcgctaggtgctatgggtgtagttaagctaggttcaaataaccttcaggttattctcggcccactagctgaaatcgttgctggcgaaatgaagaaaatcccagcgtcagaagatctatcttctgtaaaacttccataa

SEQ ID NO: 124762 - protein, 496 aa, Photobacterium sp. SKA34
MNILGYFQKVGKALMVPVAVLPAAAILMGIGYWIDPTGWGANSALAAFLIKAGAAIIDNMSVLFAVGVAYGMSKDKDGAAALSGFVGFLVVTTLLAPGAVAQIQGIDPSAVPAAFGKINNQFVGILVGIVSAELYNRFSSVELHKALAFFSGKRLVPILTSVAGIVIAGILMFVWPTIYNGLVHFGESIQGMGSVGAGIYAFFNRLLIPVGLHHALNSVFWFDVAGINDIPNFLGGAKSIAEGTATPGVTGMYQAGFFPIMMFGLPGAALAMYHTAKAKNKERVASLLIAAGFASFFTGVTEPLEFSFMFLAPVLYVIHAALAGLSVYIAASMQWIAGFGFSAGLVDMFLSSRNPLAVQWYMLIVQGIAFFFIYYFIFRFAIVKFNLKTPGREDDDEETSSVAGSAETGELAKQYLKALGGHGNLENIDACITRLRLTLKDSSLANEKTLKALGAMGVVKLGSNNLQVILGPLAEIVAGEMKKIPASEDLSSVKLP

SEQ ID NO: 124763 - DNA, 1617 bp, Photobacterium sp. SKA34
  CDS (1)..(1617): transl_table=11
atgaaagccttctttagtaaactatcgcaagcagtgatgctgccgatagcgctattaccagctgcaggtattatgctaggtcttggtggtagttttaccaaccagagtatgattgacgcatacaatattggtattttgcaagacggaacacttttaaatagttttctacaggtgatgaccgctgcaggcgatatcatttttgcaaatctacctttactgttcgcgcttgcgattgcaatcggctttgctcgagcagaaaaaggcgcagcagcattagcagcaacaatttcttatttaatcatgaatactgcgattgcgaaaacgctatcagttgctggcatggtcgatacaacaaataacactgtaatcttaatgggcactcattatgcgggagtgttagctgatgtattaggtattcacaacacgctaagtatgggtgtattcggtggtcttatcgctggtggtattaccgctgttcttcataacaagtaccatgacattaagcttcctgagttcttaggtttctttggtggtgcgcgtttcgttcctatcgttagtgcgttttctgcattgttctacggtatagcacttgtattcatttggccttacatcggtgcagtattcggttctatcggggcaacattgggtgaaatgacagcttctggtcatggttatattgcttctttcatcttcggtattattgaacgtgcgcttatccctgttggtctacaccacgtattctatcttcctttatggcagacagagataggcggtactgctgaaattgcaggtcaggtttacaaaggaacacaaaatgtcttctttggctctttagctaacggtgattattctcagttctcttcaactaactttatgacaggtaaattcccattcatgatgtttggtctacctgcagctgcatacgcgatgtacacgctggctgataaagagaataagaaagaagttgcgggtctattgttctctgttgcgctaacagcgttcctaacaggtattacagagccgattgaatttacattcctattcttatctgcaccgctttactactttattcacgtaccactagcaggtctatcatttatgatcatggacttactaaacgtgaaagttggtatgacgttcagtggtggtttcattgactttacactgtttggtatgcttcctggcctaacggggactgaaaaccactggtactacatcccactactcggtctaatttatggtcctgtttacttcttgttgttccgttggttcattctgaagtttgatatcaagacaccgggtcgtaaggggagtgctgttgcggttgttcgtaagaaagattaccaagcagcaaaagggagtggttctgatgacagccaaatcaatgaaatgatcgaagcattaggtggtaaagataacattgttgatgttgatgcatgtattacacgtctacgtattacagttaaagacggtgagcttgttaaagataataaatactggactgaaaacctaggcgctaaaggtttagtaaaagtaggtggtacgggcattcaagctatctatggtgcacaagcggcaggctttaaagctcaaattaattcaaaacttggtaagtaa

SEQ ID NO: 124764 - protein, 538 aa, Photobacterium sp. SKA34
MKAFFSKLSQAVMLPIALLPAAGIMLGLGGSFTNQSMIDAYNIGILQDGTLLNSFLQVMTAAGDIIFANLPLLFALAIAIGFARAEKGAAALAATISYLIMNTAIAKTLSVAGMVDTTNNTVILMGTHYAGVLADVLGIHNTLSMGVFGGLIAGGITAVLHNKYHDIKLPEFLGFFGGARFVPIVSAFSALFYGIALVFIWPYIGAVFGSIGATLGEMTASGHGYIASFIFGIIERALIPVGLHHVFYLPLWQTEIGGTAEIAGQVYKGTQNVFFGSLANGDYSQFSSTNFMTGKFPFMMFGLPAAAYAMYTLADKENKKEVAGLLFSVALTAFLTGITEPIEFTFLFLSAPLYYFIHVPLAGLSFMIMDLLNVKVGMTFSGGFIDFTLFGMLPGLTGTENHWYYIPLLGLIYGPVYFLLFRWFILKFDIKTPGRKGSAVAVVRKKDYQAAKGSGSDDSQINEMIEALGGKDNIVDVDACITRLRITVKDGELVKDNKYWTENLGAKGLVKVGGTGIQAIYGAQAAGFKAQINSKLGK

SEQ ID NO: 124765 - DNA, 1389 bp, Photobacterium sp. SKA34
  CDS (1)..(1389): transl_table=11
atgagtattctcggaaatttccaaaaattaggaaatgcaattatgtttcctatcgcagtattaccgattgccggtatcttactgcgtataggtcaacctgatctattaaacattccatttattgccgctggtggtcaggctgtatttaccaaccttgctttactttttgctatgggggttgccgctggtttctctaaagacaattcggctcctgcagcaattgcagctgctgttggttactttatcttaatggcggctcttaaaacattaaacccagatgtcgatcctggtgtcgctggcggtatcattataggtgtctttgctggcttactatataatcgtttccatgcaatcaaattacctgaattcttaggcttctttggcggtaagcgttttgtgcctatcattactggtcttgttgcacttgtgcttgcttttgcattcagcgttatctggccaccaattcaagatggtatcaaccaccttggtcaatggatcttatcaagtggtgcgcctggtgagtttgtgtacggtgttgctaaccgtctacttattccacttggtttacaccacatcctaaacagcatggtttggtttgtattcggtagctacactgctgctgatgggcatgttgtaacaggtgaaatctctcgtttctttgctggtgacccaacggcaggacgaatcctaagtggtttcttcccagttgttatgtttggtttgccaagtgctgcgcttgcattctatgtaacagcgaagaaagaaaacaagaaagtggttggtggtatgttgttaagtgttgcattaactgcattcttaactggtattacagagccaatcgaattcatgttcatgttcctagctcctgcattatatctagtacacgctattttaatgggtgtgagcattgttgtagcgtcaacacttgatattcatatggcatttagcttctcttcaggcttgattgactacatcttgaactacaacgcaccagctgcacacaactcatgggaaattatcccaatgggtcttgtggttggcgcaatctacttcgtaatcttcgttgcagtaattaagatgtttaatcttaaaacaccgggtcgtgaagatacaccagctgaaaattcaaacccttcaaaagctaatgacggtagcaaagaagatttagcaaaagcttacctagcagcattaggcggtaaagataacttaactgatatttcagcctgtatcacacgcttacgtttaggtattgttgaccgttcagttatcgatgatacaacacttaaacaacttggtgctaaaggcgtagtgaatgtaggttctaataaccttcaagttatccttggtcctcaagctgaaattattgctaaccagatgaagtcactttaa

SEQ ID NO: 124766 - protein, 462 aa, Photobacterium sp. SKA34
MSILGNFQKLGNAIMFPIAVLPIAGILLRIGQPDLLNIPFIAAGGQAVFTNLALLFAMGVAAGFSKDNSAPAAIAAAVGYFILMAALKTLNPDVDPGVAGGIIIGVFAGLLYNRFHAIKLPEFLGFFGGKRFVPIITGLVALVLAFAFSVIWPPIQDGINHLGQWILSSGAPGEFVYGVANRLLIPLGLHHILNSMVWFVFGSYTAADGHVVTGEISRFFAGDPTAGRILSGFFPVVMFGLPSAALAFYVTAKKENKKVVGGMLLSVALTAFLTGITEPIEFMFMFLAPALYLVHAILMGVSIVVASTLDIHMAFSFSSGLIDYILNYNAPAAHNSWEIIPMGLVVGAIYFVIFVAVIKMFNLKTPGREDTPAENSNPSKANDGSKEDLAKAYLAALGGKDNLTDISACITRLRLGIVDRSVIDDTTLKQLGAKGVVNVGSNNLQVILGPQAEIIANQMKSL

SEQ ID NO: 124767 - DNA, 1518 bp, Photobacterium sp. SKA34
  CDS (1)..(1518): transl_table=11
atgttgccagtggcgcttttggcgttttccggtattttactgggtgttggtagctcgttatcaagtgctgcagtaaaagaaagtatgccttttcttgataataccgtactgcaattgctgttcatgtggatgaccaaaattggtttagttgcatttatctatctacctatcatgttcgcggtagcgatcccattaggccttgctcgtgaagaaaaaggcgtcgccgcgtttgcaggttttgttggttacgcagcacttaacttatcgattaacttctacctaacagtggctgacgtattaggcaatgcgacagaagaaaaagcttacggtgtaaagtctattttaggcatagagtcgattgataccggtattttaggtgcagtgatcgtcggtattattgtggcgaaactgcatgcacgtttctatacatacaagatgccagatgcattagctttctttggtggtgcgcgttttgttccgatcatctcaactttaacgctaggtgtggttggcctattagtaccgctagtatggccttactttgctatgggtattaatggtattggtagcttaatctctcaatctggtccatttggtccattccttttcggtgcaggtgagcgtttgttattgccattcggcttacaccacattcttgttgcactggtgcgctttacggaagctggcggtacgatggatgtgtgtggtaatacggtaagtggcgcattaaatatattctatgcagagctttcttgcccaacaactaacggtttttctaactctgctacatcattcttatcgcaaggtaaaatgccggctttccttggtggattaccaggcgctgctcttgcgatgtaccactgtgctcgcgttgaaaatcgcagcaaggtaaaagcgttattgttatcaggtgtggttgcgtgtgtgattggtggtatcacagagccactagagttcttatttctgttcgttgcaccagcactgtactttgttcacgctattttaacgggtattggctttatggcgatgcacctattaggcgtaacgattggtaatactgatggcaacattatcgactttttgattttcggtgtacttcaaggtacggcaacgaaatggtacttagtacctcttgttgctgcagtatggtttgtgatgtattacagcgtattccgctttgtgatcacgcgctttaatttaaaaaccccaggccgtgaagtggctgatgtaaaagatgagttagcctttgcggaaacgggtgataaaacgacgggttacaaaggcgatattatcttagaagccctaggcggtgctgcaaacattacgtcacttgataactgtattactcgtttacgtttatcggttaacgatatgagtttagttaatgacgccgtgctcaaagccaacggtgctttgggtgttgttaagcttgacgatcataacttacaagtcgtgattgggcctcaggtgcatatggtaaaaaatgaaatgcagggcttaatgccaacgacggcataa

SEQ ID NO: 124768 - protein, 505 aa, Photobacterium sp. SKA34
MLPVALLAFSGILLGVGSSLSSAAVKESMPFLDNTVLQLLFMWMTKIGLVAFIYLPIMFAVAIPLGLAREEKGVAAFAGFVGYAALNLSINFYLTVADVLGNATEEKAYGVKSILGIESIDTGILGAVIVGIIVAKLHARFYTYKMPDALAFFGGARFVPIISTLTLGVVGLLVPLVWPYFAMGINGIGSLISQSGPFGPFLFGAGERLLLPFGLHHILVALVRFTEAGGTMDVCGNTVSGALNIFYAELSCPTTNGFSNSATSFLSQGKMPAFLGGLPGAALAMYHCARVENRSKVKALLLSGVVACVIGGITEPLEFLFLFVAPALYFVHAILTGIGFMAMHLLGVTIGNTDGNIIDFLIFGVLQGTATKWYLVPLVAAVWFVMYYSVFRFVITRFNLKTPGREVADVKDELAFAETGDKTTGYKGDIILEALGGAANITSLDNCITRLRLSVNDMSLVNDAVLKANGALGVVKLDDHNLQVVIGPQVHMVKNEMQGLMPTTA

SEQ ID NO: 124769 - DNA, 1623 bp, Photobacterium sp. SKA34
  CDS (1)..(1623): transl_table=11
atgagtaaattgttatcgtttgatttttggcaacgatttggtaagtcgttgattgtagttattgctgtaatgccagcagccggcattatgatttcgcttggtaaagtacttgcgatgtatgctggtgggttaggcgcactcgaaacccttggtcatattatggaaaacattggctggggtatcatcgttaatttgcatttattatttgcagtagcgattggtggttcatgggcaaaagagcgagctggtggtgcatttgccgcgttaatcgcctttattttaattaaccggacgacaggcgttatatttggggtcaataccagtatgatgactgaccctaatgctattgtaaccagcctatttggtactgatttacctgtgacacaattttttaccacaatattaggtgcgccagcacttaatatgggggtgtttatcggcattatttcaggttatctcggtgcaaacttatacaatcgctattacgattactctcgattacctgaagccttagccttttttaatggtaaaaggtttgttccttttgttgtgattttttactccgtaatcattgcttttgttttagccgttatttggccgttagtgcaaggcgcattgaatgattttggattgtggattgcctcatctaaagacagcgcaccaattattgccccttttgtttatggtacgcttgagcgtttattactgccatttggtctacatcatactttaacgatcccgatgaactacaccgagttaggtggagcttatcaattactaacaggtccaaatgcaggaactagtgtgtatggacaagatccattatggcttgcttgggttagtgatcttaacaacattagattaaccgatccggcgatgtatcagcagcttttagatacagttcatcctgcacgctttaaagtcgggcaggttattatcgcaacatcttctcttattggtattggtttagcgatgtatcacagtgtcgatcatgacaaacgtttgcaatataaaccaatgtttctctctgcgtgtcttgctgttttactaacaggcgtaactgaacctattgagtttatgtttatgttcatcgcacctgtattgtatgtcgctcatgccttgtttacggggattgcttttgcacttgcagacttcattgatctgcgcattcatgcatttggcttaattgagttgttaacgcgtgtaccaatgatgatatcagcagggataggaagcgatttgatcagctttattattgtgtgcatcgttttctttgctgttaattatggcttattccgatttttaatcatgaagtttaacttaccaacgccaggccgtgccggtaattatattgatgaaaaatcagatacgatgtcgcaggacgataagctggaaattattatccaaaacttaggtgggcgcgataatatttctgaaatcgatgcgtgcatgacacgtttacgtattacggtaaaagatccttcattagttgcagattatacgttgtggaaatctactggtgcgatggggctagtcgtgaaagagcaaggtgttcaagcaatttatggtcctggcgttgatgttattaaatcaggtctagttgataaatttgctgctgtttaa

SEQ ID NO: 124770 - protein, 540 aa, Photobacterium sp. SKA34
MSKLLSFDFWQRFGKSLIVVIAVMPAAGIMISLGKVLAMYAGGLGALETLGHIMENIGWGIIVNLHLLFAVAIGGSWAKERAGGAFAALIAFILINRTTGVIFGVNTSMMTDPNAIVTSLFGTDLPVTQFFTTILGAPALNMGVFIGIISGYLGANLYNRYYDYSRLPEALAFFNGKRFVPFVVIFYSVIIAFVLAVIWPLVQGALNDFGLWIASSKDSAPIIAPFVYGTLERLLLPFGLHHTLTIPMNYTELGGAYQLLTGPNAGTSVYGQDPLWLAWVSDLNNIRLTDPAMYQQLLDTVHPARFKVGQVIIATSSLIGIGLAMYHSVDHDKRLQYKPMFLSACLAVLLTGVTEPIEFMFMFIAPVLYVAHALFTGIAFALADFIDLRIHAFGLIELLTRVPMMISAGIGSDLISFIIVCIVFFAVNYGLFRFLIMKFNLPTPGRAGNYIDEKSDTMSQDDKLEIIIQNLGGRDNISEIDACMTRLRITVKDPSLVADYTLWKSTGAMGLVVKEQGVQAIYGPGVDVIKSGLVDKFAAV

SEQ ID NO: 124771 - DNA, 3000 bp, Escherichia coli
  CDS (1176)..(2756): transl_table=11
tctattcttgcgggattaaagcgtattttgccgatggggcgacgctggcgagaaggggataatgtttttatttattcaatgaatttatatttcgttgaatagataacatttacctgaatattagacgctggttttgtgactgatgtcggatatttgaatgtcggcttgaaaaataagccgaccatctctttaattaagcacaattccgtgtaatgtatacgcattagttaatcatcttgtaactgttaaatcaggcaaggcaatgtttgaagtagttattacttctgacgtgccttgcctttttttttggagccatggaatgatcatcgaaaaagtcatgaacaataattgtgtgcaggcatcgatgaatggacaggaggttatcatttctgggcctggcgtcggttacaacaaaaaatatggaatgttggtccctgagcatccggctaaccggattttttatgtcagaaatgaacaaaaaaacaaactctataaattgattgaacatgtagatattgagtatgtgtccgtcgccgaaaaaatagtgcaatatgcggagaaaaatctcgaaaaaaatctcaatccatcgctactattgattcttgcggatcacatttcgaatgcaatatcccgagtcgtttcaggtatacaaattaataatgttttccttgatgaaatcaaagcgttgtacaaagcagagtatgcgataagtcgcgatgcattaactatcattaatgagcaattcagcgttcaacttcctgatgatgagattggttttatagcattgcatattttaaataattatgaaaattcagttgattatgaatcagtacggattattgagttgtcgcaaataatcacggagcttattgaagttgtttataacagaaaggtggaaagaagttcatctaactattccagatttatgatgcaccttaaatatctttcaagtcgcgtgttatgcaatgaaaaaataaaacagaaagatattggtgatatctatgaacagtttcttgaaaaggacatcctgttacagcgcgcaattcatgaaattgaacggtatctgtatgccacttttaaatatgaattaattttagaagaaaaactatatctctctattcgtaccaaagtattaatggactaattatatataacatttatatgagataacccacatgaaacaaaagaaagcctggagtttttttcagagcctggggaaggcatttatgtatcccattgctctgctaagtgtatgtggcatgatgctagggctgggaagtggtttagccagtgatgatatggcaaagttaattccatttctggctattccaataattaaaaccatacttgatttcattgttagtcttggtttgtttgcctttgttaatttacctgtattgtttgcgatagcgattcccttaggattattaaaagataaagaggataaagcctatggtgctttttctggcttaattggttttatggcgatgcatctgggaacgaacttttatcttaaacagcacgacttattggtcgttgctgaccaaatgtcgacacatgggcaaaccatcattctggggatccagtcctacaataccagcgtgttggggggaattgttgctgggttattagtcgccagcatgtataaaaagatcgttaatttacgcattcctgaatcgttaggttcttatagcggcccacgtctggtgcctatcattacactgattgtgatgagtggatttggtctgatcattccttttatctggccgccgtttttcaatcttttcatgctcattggacactggatttcaacttccggtcctgttggttatttcttctatgcagttgccgaacgcgtgacgattccttttggcttaaaccatctggtgacgtcagttttccgctttacgccaatcggcggttcggctgtgattggtggcgaagaatattacggcaccctgaacatgtttatggcatacgtcaaagagaatgcggtcattccgctggatttggcggggaaaatggagcagggcaaactgatgattcagtatggtctggctggtgccgcgctggcgatgtatcgcactgctcatgctcaaaacagaaaggctatcaaagcattgcttatttccggggtgcttacggtgattattggcggcgtcagcgaaccgattgagtttctgttcttatttgtcagtccactgctgtttgtcttccatgcctttatgaatggattcgctaacatggttctgccatatatgggcgtgaagatgggatttactggcgatctgattcaatttattagctttggcgtattgcgtggcacaagaacaggttggccgatcgcggtgtgtgtcgaagtggcatatttcttcatttattactttgtgttccgttggactattctcaaatttaacctgatgacggtaggccgtgaagagtccagtcctgtcacgctgaacgctcatgaggatacggctatagcggatatcccaactcctgataaatcagagctgcaagcggcggagcagatggttaaggcacttggtggtaaagagaatattaagtcactggataattgcgtaactcgtttacgtttaacaatcgcagatatgggattgcttgacgaggctgcaataaaaagagccggcggaattgcggttgttaaacttgatcaaaataccctacaagtcattatcggcactaaagtcatcgccctgcgtcgggatatggataactatatggggatatactgatggatgtttttaatactcctgtttcccgcaaaggaacatattgtacccaatgggacttttgcgaggacagatttggtgtaaaagatgtactaccattctctatttcagatatggatcttccgataccagacgctatcaccagagcattaaaaaaacgcctggaacacccgattttagggtacagtcgttggcaacatggtgaatatttgaatgcgatagtaaactggtattatcaacaatatca

SEQ ID NO: 124772 - protein, 526 aa, Escherichia coli
MKQKKAWSFFQSLGKAFMYPIALLSVCGMMLGLGSGLASDDMAKLIPFLAIPIIKTILDFIVSLGLFAFVNLPVLFAIAIPLGLLKDKEDKAYGAFSGLIGFMAMHLGTNFYLKQHDLLVVADQMSTHGQTIILGIQSYNTSVLGGIVAGLLVASMYKKIVNLRIPESLGSYSGPRLVPIITLIVMSGFGLIIPFIWPPFFNLFMLIGHWISTSGPVGYFFYAVAERVTIPFGLNHLVTSVFRFTPIGGSAVIGGEEYYGTLNMFMAYVKENAVIPLDLAGKMEQGKLMIQYGLAGAALAMYRTAHAQNRKAIKALLISGVLTVIIGGVSEPIEFLFLFVSPLLFVFHAFMNGFANMVLPYMGVKMGFTGDLIQFISFGVLRGTRTGWPIAVCVEVAYFFIYYFVFRWTILKFNLMTVGREESSPVTLNAHEDTAIADIPTPDKSELQAAEQMVKALGGKENIKSLDNCVTRLRLTIADMGLLDEAAIKRAGGIAVVKLDQNTLQVIIGTKVIALRRDMDNYMGIY

SEQ ID NO: 124773 - DNA, 1572 bp, Vibrio furnissii
  CDS (1)..(1572): transl_table=11
atgtctaaaagcaacaaatcgactatttgggagtttttcgaaagcctcggtaagacgttcatgctgcccgtcgcactgctggcattctcaggtattcttcttggggtcggtagttctttttccagttcagcgattaaagaagcgattccctttttagataatgcgccattcgaatatctgtttatgtggatgaccaaaattggcctcgttgctttcatttatttgcctgtgatgtttgcggtcgcgattccactcggattggcgcgtgaagaaaaaggtgtcgcagggttcgcgggatttgtcggttatgctgcgttcaatctagcgattaactttttcctcactgtcgcaggtgtattggatagtcaatctgaacgtgttgcttatggcgtcaaaaacattatcggtattgaatcgattgataccggtatcttgggtgcggtggtggtgggggtgatagtcgccaagcttcaccaacgtttctacacctttaaaatgccagatgcgctggccttctttggtggtgcccgttttgttccgatcatttctgcgctggtgctgggtgtcgtgggggtctttattccatttgtatggccttacttcgcggcaggcatcaatggcatcggtcatgtgattgaaagcgcaggcgactttggtcctatgctatttggtactggggaacgcttattgctgcccattgggcttcaccatattttggttgccttaattcgattcaccgaggctggtggcaccatggatgtgtgtggtcaaacggtgtctggtgcgttgaatatcttctactcggaactctcttgtgcggataccacgacgtttacaccagaggtcacagccttcttatctcaagggaaaatgccgactttccttggtggtttacctggtgctgctttggcgatgtaccactgtgcccgcccggagaaccgctcaaaaattaaagcgttgctcatctctggtgtagttgcatgcattgttggtggtatcactgagccgctagaattcctgttcctgtttgttgctcctgtgctttatgttgtgcatgccatcctcaccggtttgggattcatggtgatgggattgcttgatgtgaccattggtaacactgacggtaacctcattgactttttggtatttggcgtcctgcaaggtaccgcaacgaaatggtacttggtaccgcttgtcgctgctatttggttcgtggtgtattactcagtgtttaagtttgccatcaccaagttcaatttaaaaacaccgggccgtgaagtggatacggcggaagtggataaagaacttgaagcggcgttcatcaacgaatcgggtaaaggtgctgcggtgcttgcggcactgggtggaaaagagaacatcacttcgttggataactgcatcacacgtcttcgcctttctgtgaacgacatgagcttggtgaatgatgccaaattaaaagcgcatggcgctcttggcgtggtgaagctggatcagcacaacctgcaagtcgtgattggaacgcaagtccatctggttaaaaacgaaatgcaagccatcatgtcggcaagttaa

SEQ ID NO: 124774 - protein, 523 aa, Vibrio furnissii
MSKSNKSTIWEFFESLGKTFMLPVALLAFSGILLGVGSSFSSSAIKEAIPFLDNAPFEYLFMWMTKIGLVAFIYLPVMFAVAIPLGLAREEKGVAGFAGFVGYAAFNLAINFFLTVAGVLDSQSERVAYGVKNIIGIESIDTGILGAVVVGVIVAKLHQRFYTFKMPDALAFFGGARFVPIISALVLGVVGVFIPFVWPYFAAGINGIGHVIESAGDFGPMLFGTGERLLLPIGLHHILVALIRFTEAGGTMDVCGQTVSGALNIFYSELSCADTTTFTPEVTAFLSQGKMPTFLGGLPGAALAMYHCARPENRSKIKALLISGVVACIVGGITEPLEFLFLFVAPVLYVVHAILTGLGFMVMGLLDVTIGNTDGNLIDFLVFGVLQGTATKWYLVPLVAAIWFVVYYSVFKFAITKFNLKTPGREVDTAEVDKELEAAFINESGKGAAVLAALGGKENITSLDNCITRLRLSVNDMSLVNDAKLKAHGALGVVKLDQHNLQVVIGTQVHLVKNEMQAIMSAS

SEQ ID NO: 124775 - DNA, 2079 bp, Staphylococcus carnosus
  CDS (1)..(2079): transl_table=11
atgaagaatctgttgaaaaagtttttcggtcaattacagcgaattggtaaagcattaatgctgccagttgcaattttaccggccgctggtattttattaacgtttggtaatgcgatgcacaacgaacaaatcttacactttgcaccctggatgcaacatcattatattcaattaatcagtcagattatggaagcgtcaggtcaagttatctttgacaacttgccattgctgtttgctatgggtactgcacttggattagcaggcggagatggtgtagcagggattgcagcattagtcggatacttgattatgagtgcgacaatgggaaaaattgcaggtattaccattgatgatatcttcagttatgcagatggtgcaaaaacactgggacaatctgctaaagatccagcccatgctttggttttaggtataccgacactgcaaacaggtgtattcggaggtatcattatcggggcacttgcagcatggtgttataacaaattctataatatccagctgccccaattcttgggattctttgcaggtaaacgttttgtgccgattattacatcacttgtagctatcgtaactgggattgtattaagttttgtttggccgcctgtacaagatggtttgaacaacttatctaatttcttattaggtaaaaacttagcattaacgacatttatttttggtattattgaacgttctttgattccgttcggtttgcatcatattttctatgcgccgttttggtttgaatttggacattatgtcaatgaatccggtaacttagtacgtggtgaccaacgtatttggatggcacaatatcaagatggtgttccatttacagctggcgcatttacaactggtaaatatccatttatgatgttcggtctgccagcagcagcatttgcgatttatccgcaagcgaaacctgaacgccgtaaagtagtcggtggtttaatgttatcagctgcgttaacatcatttttaacaggtattactgaacctttagaattctcattcttatttgttgcgccgattctatatgtagcacatgttattttagcaggtacttcattcttgattatgcacttgctgcatgtgcaaatcggtatgacattctcaggcggatttattgattacattctatatggtttattatcttgggatcgttcaaatgcattattagtgattccagtaggtatcgcgtatgcactgatttactacttcttattcacattcttaattaaaaaattaaacttgaaaacaccaggtcgtgaggataaagaagttgaaagcaaagatgtttctgttagtgaattgccatttgaagtattagaagcaatgggtaataaagataatattaaacatttagatgcttgtattacacgcttacgtgtagaagtcagagataaaggattagtagatgtagaaaaattaaaacaactcggcgcttcaggtgtgcttgaagtcggtaataacatgcaagcaattttcggtccgaaatctgatcaaatcaaacatgatatgcagcagattatggatggtaagatcacatctccagctgaaacgacagttacagaagatggtgatgttgaaacagctgaaattgtagctgaaggcggcgcggtaatatatgcaccgattacaggtgaagcagttgatttaagcgaagtaccagacaaagtcttttctgcaaaaatgatgggggacggtattgcgatcaaacctgaaacaggagaagtcgtggcaccgtttgacggtaaagtgaaaatgattttcccaacgaaacatgctattggtttagaatctaaagatggtattgaactgttaattcacttcggtttagaaacagtgaaattagatggggaaggttttgaaatcttagtcaaagaaaatgacaatattgtattaggtcaaccattgatgaaagtagatttaaattacatcaaagaacatgcagatgatacaatcactccaattattattacgaatgcaggcagcgcaaatatcgaggtcttgcatactggtaaagtagaacaaggtgagaaactgcttttggtgaataattaa

SEQ ID NO: 124776 - protein, 692 aa, Staphylococcus carnosus
MKNLLKKFFGQLQRIGKALMLPVAILPAAGILLTFGNAMHNEQILHFAPWMQHHYIQLISQIMEASGQVIFDNLPLLFAMGTALGLAGGDGVAGIAALVGYLIMSATMGKIAGITIDDIFSYADGAKTLGQSAKDPAHALVLGIPTLQTGVFGGIIIGALAAWCYNKFYNIQLPQFLGFFAGKRFVPIITSLVAIVTGIVLSFVWPPVQDGLNNLSNFLLGKNLALTTFIFGIIERSLIPFGLHHIFYAPFWFEFGHYVNESGNLVRGDQRIWMAQYQDGVPFTAGAFTTGKYPFMMFGLPAAAFAIYPQAKPERRKVVGGLMLSAALTSFLTGITEPLEFSFLFVAPILYVAHVILAGTSFLIMHLLHVQIGMTFSGGFIDYILYGLLSWDRSNALLVIPVGIAYALIYYFLFTFLIKKLNLKTPGREDKEVESKDVSVSELPFEVLEAMGNKDNIKHLDACITRLRVEVRDKGLVDVEKLKQLGASGVLEVGNNMQAIFGPKSDQIKHDMQQIMDGKITSPAETTVTEDGDVETAEIVAEGGAVIYAPITGEAVDLSEVPDKVFSAKMMGDGIAIKPETGEVVAPFDGKVKMIFPTKHAIGLESKDGIELLIHFGLETVKLDGEGFEILVKENDNIVLGQPLMKVDLNYIKEHADDTITPIIITNAGSANIEVLHTGKVEQGEKLLLVNN

SEQ ID NO: 124777 - DNA, 2028 bp, Staphylococcus carnosus
  CDS (1)..(2028): transl_table=11
atgtggaaaaagtttttcggccagttgcagcgtattggtaaagcattaatgctaccggttgcaatcttgccagcagcaggtttactgcttgcattaggtaatgcatttcagggcgatgcattgcaaagccttatgccattcattaaagcagaaggttttcaaaatgtcgcaaaaatgatggaaggtgccggcgggattatctttgataacttggccattatcttcgcactcggtgttgcaatcggtttagcatcgggtgatggtgttgcagccattgcagcatttgtcggttttattgtgttaaataaaacaatgggaatgttcttaggagtaacacctgaaaaagcagcagatgctgcaacaggatttgcgaatgtattaggtattcctacactgcaaactggggtgttcggcggtatcatcatcggtgcactggccgcatggtgttataataaattctataacatttcattgccgagttatttagggttctttgctggtaaacgttttgtgccgattatgatggcaacttgttcgtttattttagctttcccgatggcgattatttggccgtcaatccaaggtggattaaatgcgtttagtgaaggattattagcatctaatactggtcttgctgtattcttattcggtttcatcaaacgtttattgattccattcggattacaccatattttccatgcgccattctggtttgaattcggatcatataaaaatgcagcgggacaaattattcacggtgaccaacgtatttttattgaacaaatccgtgacaatgtacctttgacagctggtaaattcatgcaaggggaattcccagtcatgatgttcggtttaccggcagcagcattagcgatttaccaaacagctaaaaaagaaaataaaaaagttgtcgcaggtttaatgttatcaggtgcgttaacttcattcttaacagggattactgaacctttagagttctcattcttgtttgtagcaccattattattctttatccatgctgtattagacggattatcattcttaattttatacttattagatcttcatctcggttacacattctcaggtggtttcatcgacttcttcttacttggaatcttgccgaataagacacaatggtggctggttattcctgtaggattagtttatgcagcgatttactatattatcttccgcttccttatcgttaagttcaacttcaaaactccaggacgcgaagataaagaagttaaatcttcaaacgttgcagcgagtgaattaccattcaaagtattagatgctatgggtggaaaagctaatattaaacatttagatgcttgtattacacgtttacgtgtcgaagtgaatgataaagcgaaagtagatgttcaagaattaaaagacttaggtgcatcaggggtacttgaagtcggcaataacatgcaagcaattttcggtccgaaatctgatcagatcaaacatgatatgcagcagattatggatggtaaaattacctcaccagaagaaacaacagtgactgaagaaggcgataaagaaacagctgaaatcgcagcagcaggcggcggtgttgtatatgcgccgattaaaggggaagttgtcgatatttcagaagtgccagataaagtcttctctgaaaaaatgatgggtgacggtattgcaatcaaacctgaaactggagaagtcgttgcaccatttgatggtgtggttaaaatggtcttcccaacgaaacacgctattggtttagaatctaaagatggtatcgaattattgattcacttcggtttagaaactgtgaaattagaaggtaaaggcttcgatatcttagtgaaagaaaacgacaatattgtattaggtcaaccgttaatgaaagttgatttagattacatcaaagaacatgcagacagtacaattacaccaatcgttgtaacgaacttaaatggtcgtacgatggaagtattgcagcacggtgaagtcaaacaaggtgataaagttattttagttaaataa

SEQ ID NO: 124778 - protein, 675 aa, Staphylococcus carnosus
MWKKFFGQLQRIGKALMLPVAILPAAGLLLALGNAFQGDALQSLMPFIKAEGFQNVAKMMEGAGGIIFDNLAIIFALGVAIGLASGDGVAAIAAFVGFIVLNKTMGMFLGVTPEKAADAATGFANVLGIPTLQTGVFGGIIIGALAAWCYNKFYNISLPSYLGFFAGKRFVPIMMATCSFILAFPMAIIWPSIQGGLNAFSEGLLASNTGLAVFLFGFIKRLLIPFGLHHIFHAPFWFEFGSYKNAAGQIIHGDQRIFIEQIRDNVPLTAGKFMQGEFPVMMFGLPAAALAIYQTAKKENKKVVAGLMLSGALTSFLTGITEPLEFSFLFVAPLLFFIHAVLDGLSFLILYLLDLHLGYTFSGGFIDFFLLGILPNKTQWWLVIPVGLVYAAIYYIIFRFLIVKFNFKTPGREDKEVKSSNVAASELPFKVLDAMGGKANIKHLDACITRLRVEVNDKAKVDVQELKDLGASGVLEVGNNMQAIFGPKSDQIKHDMQQIMDGKITSPEETTVTEEGDKETAEIAAAGGGVVYAPIKGEVVDISEVPDKVFSEKMMGDGIAIKPETGEVVAPFDGVVKMVFPTKHAIGLESKDGIELLIHFGLETVKLEGKGFDILVKENDNIVLGQPLMKVDLDYIKEHADSTITPIVVTNLNGRTMEVLQHGEVKQGDKVILVK

SEQ ID NO: 124779 - DNA, 2082 bp, Spiroplasma citri
  CDS (1)..(2082): transl_table=4
atgaatgagaaagccaagcttaaaccttttatgtcaaaggcttgatggaaacaatcaaatcaaaggacaatggggactttaagtaaattaagtaaagcatttctattaccaattgcgttgttaccaattgctggaatctttttaggagttggtgcaactatttcatcaaaagttgatcctgcttcagcagcttgatactttggaaattttttaaataaaatgggagatattgcttttggtaatttaccagtattattttgtatttctgttgcaatggcttatacggaagatgctggagtagcagcattaacttccgtagttgggtttttagtttttaatgcaattcagttgtcattattaaatgaggcatatgctcatattcaatatgttgttaatattgaagggggtgcttcaccaattatgggattaactgttgatggtgtcacatcagccaacacaactttactaacgggtgatgaattattagcatgaatgagaaccagtgatatttataaagaattagttaaagggaatgttactgtcacaattgttagttcagtacgagtaactgatcaatttaatttgttattttatactggccaaacatgagcagttcaaaataaactattgacttctaatttaggaattaattcattaaatactggtgtttttggaggaatttttgttggagcaattgcagctttcgcttataatcgttttcataaaacacaattaccttcagcgttaattttttttagtggaacaaaattagttccaattattacgtttatggcagtaattccattagcttttatttttatgtttatttgaccattaattggtactgggttagcatgattcggaaataactcaggaaaattaccaatagggttagattctttaatttttgagatttttgaacgatcattagtgccatttggcttgcatcatgtcttttattcaccattatgatgaacacaagcgggaggaagtatggcagatttaatcgctaatgtttcaaaagattctttaagttatatggcttttcttaaggatttacaagagctaaattatattgatgctaatattgatttaaatacaattacagttggagcagcacaggcagcaattactagatgagtatcagaactaaatgcttcaacaatagcagcagttggtgatcaaacaattatgtataaagttattgctgatccaaaaattaccttcacaatggttcaacatatggggttaaatttaggacgattccaaactggtaagtttccatttatgatgtttggtttaccagcagcagcagcaggaatgtactttagtgttccaaaagaaaatcgaaaaccagtaatgggaatttatttttcagcagcctttacttgtttcttaacaggaattactgaaccaattgaatttactttcttatttgtagcaccatggttattttatggtgttcatatgccattgtgtgcaatttcatttatgttaatgggattattacatgtacatacatcaatgaccgtatcgggtggatttattgactttattgtatttggtattattccatttgttggtggaaaaggaacaaacttctattgaattcttgcagttggaattccatatattggaatttatttttcagctttctacttcgcaattaaatatggagaagttcaaattccgggtcgtgatggcgccacaaaactatatactaaagctgattttaaagcaaaaaaaggtactaatgaaacaacttcatcaggaccagcaaaaggtgatgcgacaaaacgggaaaaagcccgtaaaattattgattttttaggtggggctgataatattacggcagttgactcatgtgcgtcacgtttacgaattacagttgttgatagtaaacttgtcaatcaagatggaattcaagcattaggtggcagcgccggaatgcttattcgtggtcaatcagtccaaattatttatggtggagaacaagaagtaattaaaccatatatgcgtgaattattagctgaaatgcgtaataataaagaaacaccaaaattaaactcaaaacaaggttaa

SEQ ID NO: 124780 - protein, 693 aa, Spiroplasma citri
MNEKAKLKPFMSKAWWKQSNQRTMGTLSKLSKAFLLPIALLPIAGIFLGVGATISSKVDPASAAWYFGNFLNKMGDIAFGNLPVLFCISVAMAYTEDAGVAALTSVVGFLVFNAIQLSLLNEAYAHIQYVVNIEGGASPIMGLTVDGVTSANTTLLTGDELLAWMRTSDIYKELVKGNVTVTIVSSVRVTDQFNLLFYTGQTWAVQNKLLTSNLGINSLNTGVFGGIFVGAIAAFAYNRFHKTQLPSALIFFSGTKLVPIITFMAVIPLAFIFMFIWPLIGTGLAWFGNNSGKLPIGLDSLIFEIFERSLVPFGLHHVFYSPLWWTQAGGSMADLIANVSKDSLSYMAFLKDLQELNYIDANIDLNTITVGAAQAAITRWVSELNASTIAAVGDQTIMYKVIADPKITFTMVQHMGLNLGRFQTGKFPFMMFGLPAAAAGMYFSVPKENRKPVMGIYFSAAFTCFLTGITEPIEFTFLFVAPWLFYGVHMPLCAISFMLMGLLHVHTSMTVSGGFIDFIVFGIIPFVGGKGTNFYWILAVGIPYIGIYFSAFYFAIKYGEVQIPGRDGATKLYTKADFKAKKGTNETTSSGPAKGDATKREKARKIIDFLGGADNITAVDSCASRLRITVVDSKLVNQDGIQALGGSAGMLIRGQSVQIIYGGEQEVIKPYMRELLAEMRNNKETPKLNSKQG

SEQ ID NO: 124781 - DNA, 1503 bp, Enterococcus faecalis
  CDS (1)..(1503): transl_table=11
atgtttaagaagttttcacaattaggtcgcgcatttatgttaccgattgcaatcttaccagtagcaggtttacttttaggccttggtggtgctttaacaaatgaaagtgcaatgaatgcgtatccaattttagaacagccatggatccatacagtattaagtattatgagttatgcaggaaatgctgtctttactaatttagcattgatttttgctataggtattgctgtagggttagcaaatggggataaaggaacagcaggtctagccggtggagtatcttacttagtgtatacagcaacgatcagcggctttcttgcgttattttctgctaaagatgcaactcttgatactggtgttgttggatctattgtaattggcggaactgttgcatttctacacaatcgatatcggaaaattgaactaccgcaatttttgggcttttttggcggatcgcgttttattccaatcatttctagtttagcggcaattattatcggttctttcttttatttaatttggccaccaattcaaaatggattagcagtagttggagaacatattgcacaaatgggaagtctaggtacttttttgtatggatttttacttcgtttgactggcgcagtaggattacatcatactatttatccacttttttggtatacgtctttaggaggtacagaaagtgtagctggagttactgtttctggtgcacaaaatattttctttgcgcaactagctgatccaaaccatacaggactatttacttatggtactcgtttctttgcaggtagattcgcgacaatgatgtttggtttaccagcagcttgttatgctatgtatcgtgctatacctaaacaaaatcgtaaaaagaatggtggactttattttagtggtggcttgacttcatttttaacagggattactgaaccagttgaatatatgtttttatttgtagccccatggttatatataattcatgcattcttagatggtctatctttttattttgctgatattttaaatatccgagtaggaaattcattttctggtggattaattgatttcttattatttggtgtactccaaggaaacgataagacaaattggctgaaattaattcctttcggaattgcttgggcaattgtttatttctgcgtatttactttcttcattaagaaatttaaagtagctattcctggaatgggagaagagttgccaacgactactgaaaataaattaaataaaaaaacatcattaaatgatgaagctcaaataatcattaaagctcttggtagtaaaaccaatattgaatccgttgaagcttgtgctactcgtttacgtttagctgttgtagatggccgaatggttgacaaagaaactattaaacaactaggtgctactgctgtttttgaagtgaatggtggtattcaggcagtttttggcggtaaagctgatttacttagtcaagaaattaatcaaattttagaaattgagaattag

SEQ ID NO: 124782 - protein, 500 aa, Enterococcus faecalis
MFKKFSQLGRAFMLPIAILPVAGLLLGLGGALTNESAMNAYPILEQPWIHTVLSIMSYAGNAVFTNLALIFAIGIAVGLANGDKGTAGLAGGVSYLVYTATISGFLALFSAKDATLDTGVVGSIVIGGTVAFLHNRYRKIELPQFLGFFGGSRFIPIISSLAAIIIGSFFYLIWPPIQNGLAVVGEHIAQMGSLGTFLYGFLLRLTGAVGLHHTIYPLFWYTSLGGTESVAGVTVSGAQNIFFAQLADPNHTGLFTYGTRFFAGRFATMMFGLPAACYAMYRAIPKQNRKKNGGLYFSGGLTSFLTGITEPVEYMFLFVAPWLYIIHAFLDGLSFYFADILNIRVGNSFSGGLIDFLLFGVLQGNDKTNWLKLIPFGIAWAIVYFCVFTFFIKKFKVAIPGMGEELPTTTENKLNKKTSLNDEAQIIIKALGSKTNIESVEACATRLRLAVVDGRMVDKETIKQLGATAVFEVNGGIQAVFGGKADLLSQEINQILEIEN

SEQ ID NO: 124783 - DNA, 2624 bp, Bacillus subtilis
  CDS (452)..(2551): transl_table=11
gatcaggcatatcagatttacaatagaaagaattaaaaaagaagaaccgactaaagaaccagaaaaattaatgttgttattgaaaaatgaatatcgctatgctacaatacagcttggaaattgattaaaatcttgcagcaaacattgaagaaaccagttcatgaggcggaagcggtttatctgacgcttcatctgataccgattaaccaataaaatttcataaattcagtttatccttataacgtgttactgattcgatcaggcatcagtgattgagggaaaaaaacgggaagttcattctcgttcttttgcgcacccaattttgctcatgcctttttgttgtgtaaaagggcaaatgtaaacggttaaactggaagacttacgcctgtgaattcgttgtcatgatttttagctgtaaggtcagactagtaaaaagaggaggtcaattcttatgtttaaagcattattcggcgttcttcaaaaaattgggcgtgcgcttatgcttccagttgcgatccttccggctgcgggtattttgcttgcgatcgggaatgcgatgcaaaataaggacatgattcaggtcctgcatttcttgagcaatgacaatgttcagcttgtagcaggtgtgatggaaagtgctgggcagattgttttcgataaccttccgcttcttttcgcagtaggtgtagccatcgggcttgccaatggtgatggagttgcagggattgcagcaattatcggttatcttgtaatgaatgtatccatgagtgcggttcttcttgcaaacggaaccattccttcggattcagttgaaagagccaagttctttacggaaaaccatcctgcatatgtaaacatgcttggtatacctaccttggcgacaggggtgttcggcggtattatcgtcggtgtgttagctgcattattgtttaacagattttacacaattgaactgccgcaataccttggtttctttgcgggtaaacgtttcgttccaattgttacgtcaatttctgcactgattctgggtcttattatgttagtgatctggcctccaatccagcatggattgaatgccttttcaacaggattagtggaagcgaatccaacccttgctgcatttatcttcggggtgattgaacgttcgcttatcccattcggattgcaccatattttctattcaccgttctggtatgaattcttcagctataagagtgcagcaggagaaatcatccgcggggatcagcgtatctttatggcgcagattaaagacggcgtacagttaacggcaggtacgttcatgacaggtaaatatccatttatgatgttcggtctgcctgctgcggcgcttgccatttatcatgaagcaaaaccgcaaaacaaaaaactcgttgcaggtattatgggttcagcggccttgacatctttcttaacggggatcacagagccattggaattttctttcttattcgttgctccagtcctgtttgcgattcactgtttgtttgcgggactttcattcatggtcatgcagctgttgaatgttaagattggtatgacattctccggcggtttaattgactacttcctattcggtattttaccaaaccggacggcatggtggcttgtcatccctgtcggcttagggttagcggtcatttactactttggattccgatttgccatccgcaaatttaatctgaaaacacctggacgcgaggatgctgcggaagaaacagcagcacctgggaaaacaggtgaagcaggagatcttccttatgagattctgcaggcaatgggtgaccaggaaaacatcaaacaccttgatgcttgtatcactcgtctgcgtgtgactgtaaacgatcagaaaaaggttgataaagaccgtctgaaacagcttggcgcttccggagtgctggaagtcggcaacaacattcaggctattttcggaccgcgttctgacgggttaaaaacacaaatgcaagacattattgcgggacgcaagcctagacctgagccgaaaacatctgctcaagaggaagtaggccagcaggttgaggaagtgattgcagaaccgctgcaaaatgaaataggcgaggaagttttcgtttctccgattaccggggaaattcacccaattacggatgttcctgaccaagtcttctcagggaaaatgatgggtgacggttttgcgattctcccttctgaaggaattgtcgtatcaccggttcgcggaaaaattctcaatgtgttcccgacaaaacatgcgatcggcctgcaatccgacggcggaagagaaattttaatccactttggtattgataccgtcagcctgaagggcgaaggatttacgtctttcgtatcagaaggagaccgcgttgagcctggacaaaaacttcttgaagttgatctggatgcagtcaaaccgaatgtaccatctctcatgacaccgattgtatttacaaaccttgctgaaggagaaacagtcagcattaaagcaagcggttcagtcaacagagaacaagaagatattgtgaagattgaaaaataagggtgttagtacgccgtgcttgtcagatgacaagtacggttgtatgatataatattgtgaagtaataaagctt

SEQ ID NO: 124784 - protein, 699 aa, Bacillus subtilis
MFKALFGVLQKIGRALMLPVAILPAAGILLAIGNAMQNKDMIQVLHFLSNDNVQLVAGVMESAGQIVFDNLPLLFAVGVAIGLANGDGVAGIAAIIGYLVMNVSMSAVLLANGTIPSDSVERAKFFTENHPAYVNMLGIPTLATGVFGGIIVGVLAALLFNRFYTIELPQYLGFFAGKRFVPIVTSISALILGLIMLVIWPPIQHGLNAFSTGLVEANPTLAAFIFGVIERSLIPFGLHHIFYSPFWYEFFSYKSAAGEIIRGDQRIFMAQIKDGVQLTAGTFMTGKYPFMMFGLPAAALAIYHEAKPQNKKLVAGIMGSAALTSFLTGITEPLEFSFLFVAPVLFAIHCLFAGLSFMVMQLLNVKIGMTFSGGLIDYFLFGILPNRTAWWLVIPVGLGLAVIYYFGFRFAIRKFNLKTPGREDAAEETAAPGKTGEAGDLPYEILQAMGDQENIKHLDACITRLRVTVNDQKKVDKDRLKQLGASGVLEVGNNIQAIFGPRSDGLKTQMQDIIAGRKPRPEPKTSAQEEVGQQVEEVIAEPLQNEIGEEVFVSPITGEIHPITDVPDQVFSGKMMGDGFAILPSEGIVVSPVRGKILNVFPTKHAIGLQSDGGREILIHFGIDTVSLKGEGFTSFVSEGDRVEPGQKLLEVDLDAVKPNVPSLMTPIVFTNLAEGETVSIKASGSVNREQEDIVKIEK

SEQ ID NO: 124785 - DNA, 2727 bp, Mycoplasma genitalium
  CDS (1)..(2727): transl_table=4
atgcagattagtttagttaaaatccgcaataagtttaaacaaagaaaccgtggttcttttcgtcagtgagttggtaagctttccaacggtttgatgatccctattgcagttttgcctttagcaggtatttttttaggaatcggtgatgccatttcttccaattcatctggcattgttggtgtgaaattttttggtgaatttattaaacaaggtggtaatgtagtttttgctaacttacctattttgtttgcagttgcaattgcgatcaccttttctcaagatgcaggggttgctggattttctgcttttgttttttgggccacaatgaacgcgtttatgagttcattaattattcctgttgatgcaaataatactgcttcaggttataacatcctttattgaaaagcagtacctcagtcagcaattgcttctactttaggattaaattcactttcaacttcagtttttggtgggattatagtaggggctttaactgcatatttatataacaagttttatgcaattagattgcctgatgtaattgggttttttagtggtactaggtttgttcctattatttgtatgactattgctattccagtagcattacttttattgatggtttgacctggtgtttctatcttattaaatttaataggaactgggcttggaatcttaggtggaagaggatatggtgctaacagtttaatctttggatatatagaaagagcactaattccttttggagtacatcatgccttttatgcaccattatgatatacaagtgcaggcggtagtttgcaagaaattgcaaatcaacaagtttggattagagctcctggtagtgattatgtaaccagagtgataggttgagaagattttaatactccaggaaaatgagttattcctgctgctttagctaatggaacaagtggaatgatgaatggagctactacaacaggacaagatagtacatctgcactttcaaaatacatgagtaaagaatcaacaaactttctaagttgaaaagaacttgttgatggtcttacacgtaaaggtaactttgatgaattggctaaaaacggtttattagatggttctaacaagatttgaattggtttaaaccagtcagggatcttaggtaaaaaagtactgttaagtgatggtaaggactacactattacctttaaaacttttgctaacaccacgccaacattctgaagccatggtgctcatgcacttttaccaattagtggaactccaagtgcaataactaatggagttactgttaatggtactgctaattctaaaacctataatgtcagtcagttcactgttgcagttccttctttaaacccagcacaatattcccaaggtaaattcccattcatgctaattggaattccagcagctggacttgcaatgatcttagctgctcctaagggtagaagaaaagaagctagttctattattggtagtgctgcattcactagttttctaacagggatcaccgaaccttttgaatttacctttcttttcttagcaccatggttattctatggtatccacgctgtattagctgcagtaagcttttgattaatgaacttattgagtgctaacgttggacaaaccttctcaggttctttcattgactttatcttgtatggggctttacctgatggtaggggttgattagcaaactcttacttagtacctattattggtatctttttagcattgatttatttccctaccttctatttcttgacaattcgctttaacttagcaactcctggtagaggtggtaagttaattactaaaaaggaatatttagcagcaaaagcagctcaaaaaactgatcaaactactaacactaactttaatcaaacccaaattgaagctggtatgttactaagagcttatggtggaagtgaaaacattgctgaattaggggcttgcattactaaattaagagtaacagttaaaaaccctgaacttgttaatgaaactattattaaagacttgggagcagctggggtaatgcgtaccactccaacattctttgtagcagtgtttggtactcgagctgctgtttataaatcagcaatgcaagatattatccaaggcaaagtaaattgaacagagttgcaaaaagtcttagataaaaatgatagtactgttgaaaaaccagaaataaaaccaaccccagttttaaaagttcaagatgaaattgtgatcctctcaccagttaatggcaccttaaaaccgctcacccaagttcctgatgataccttcaaaaatcgtttggtaggagatggaattgctatcttacctagcgatgggcacttcaaagcaccaggtgatgtgggtgtgaaaactgaacttgctttccctactggtcatgcctttatctttgatgttgatggtgtgaaagtaatgcttcacattgggattgatacagtaaaaattaatgctgataaaaaaccaggggaacaacttgaagtgtttgatgtaaaaacaaaacaaggagaatacactaaattaaagagtgaaagtgttgttgaagttgatttaaagaaacttaaacgaaagtatgatccaatcactcctttcattgtgatgcaagaatcacttgataacttcaagttggtgccaattcgccaacgtggtgaaattaaagttggccaacctttatttaaactaatttataaagataagaagagttaa

SEQ ID NO: 124786 - protein, 908 aa, Mycoplasma genitalium
MQISLVKIRNKFKQRNRGSFRQWVGKLSNGLMIPIAVLPLAGIFLGIGDAISSNSSGIVGVKFFGEFIKQGGNVVFANLPILFAVAIAITFSQDAGVAGFSAFVFWATMNAFMSSLIIPVDANNTASGYNILYWKAVPQSAIASTLGLNSLSTSVFGGIIVGALTAYLYNKFYAIRLPDVIGFFSGTRFVPIICMTIAIPVALLLLMVWPGVSILLNLIGTGLGILGGRGYGANSLIFGYIERALIPFGVHHAFYAPLWYTSAGGSLQEIANQQVWIRAPGSDYVTRVIGWEDFNTPGKWVIPAALANGTSGMMNGATTTGQDSTSALSKYMSKESTNFLSWKELVDGLTRKGNFDELAKNGLLDGSNKIWIGLNQSGILGKKVLLSDGKDYTITFKTFANTTPTFWSHGAHALLPISGTPSAITNGVTVNGTANSKTYNVSQFTVAVPSLNPAQYSQGKFPFMLIGIPAAGLAMILAAPKGRRKEASSIIGSAAFTSFLTGITEPFEFTFLFLAPWLFYGIHAVLAAVSFWLMNLLSANVGQTFSGSFIDFILYGALPDGRGWLANSYLVPIIGIFLALIYFPTFYFLTIRFNLATPGRGGKLITKKEYLAAKAAQKTDQTTNTNFNQTQIEAGMLLRAYGGSENIAELGACITKLRVTVKNPELVNETIIKDLGAAGVMRTTPTFFVAVFGTRAAVYKSAMQDIIQGKVNWTELQKVLDKNDSTVEKPEIKPTPVLKVQDEIVILSPVNGTLKPLTQVPDDTFKNRLVGDGIAILPSDGHFKAPGDVGVKTELAFPTGHAFIFDVDGVKVMLHIGIDTVKINADKKPGEQLEVFDVKTKQGEYTKLKSESVVEVDLKKLKRKYDPITPFIVMQESLDNFKLVPIRQRGEIKVGQPLFKLIYKDKKS

SEQ ID NO: 124787 - DNA, 1440 bp, Buchnera aphidicola subsp
  CDS (1)..(1440): transl_table=11
atgtttaaaaatgcgttttcaaatttacaaaaaataggtagatcacttatgttaccagtttctgtacttcccattgctggtattttacttggtataggttctgcaaattttaaaataattcctcatactatttccaacatcatgacagaagctggttcatcagtattttctaacatgcctttaatttttgcaattggaatcgcactaggatttactaaaaatgatggagtttcagctttagcagcagtagtatcgtatggaattatgacgaaaacattgtctataactatacctattttttcaaatctttcggatatcaatgtcaatcaaaaatatttgctagatacaggaatattaggaggaattatagctggttctatttctgcatatatatttaatacgttttatcgcattcaacttccagaatatctaggattttttgcaggacgaagattcgttccaattgcttctggattgatttcaataattttcggttgtatattatccattatatggccaccaattggaaatgttattaaaacgttttctgaatgggctgcatatcaaaatcctactctagcatttggaatatatggaacagttgaacgtgcactagtaccgttcgggttacaccatatatggaatgtaccatttcaaatgcaaatcggagaatacaataattctataggacaaatttttcatggagatattgcaagatatatggctggtgattccactgcgggaaaactatcaggtggttttatatttaaaatgtatggacttcctttcgcagcactagctatgtggcattgtgccaataaaaaaaataaagcaaaaattggtggtattatgatgtctggagctttaacagctattttaactggtatcacagaaccaattgagttttcatttatattagttgctccaatattatacgtaattcatgctattttagcaggtttagcatttcctatttgtattcttttaaatatgcgatctggaactagtttttcgcatggattaatagattttatagttttaagtggaaatagtaataatttttggttgtttccaatagttggattattttacggaatactctattatggtatcttttattttatgataaaaaaatttaatttaaaaacacctggaagagaaaaaagcataacatatattaatcagaaaactataaaagaaacagcattattagtgatatcaattttaggcgggaaaactaatattattaatttagatgcttgtattacacgcttgcgtattactgtactagatatctcaaaggtcaatcaaaaaaaattaaaaaatcttggtgcttctggcgtaatagtttctggatcaggaattcaaatagtatttggtactcaatctgaccacattaaaaccgaaatagataattatatgtcaaatacgaatcaataa

SEQ ID NO: 124788 - protein, 479 aa, Buchnera aphidicola subsp
MFKNAFSNLQKIGRSLMLPVSVLPIAGILLGIGSANFKIIPHTISNIMTEAGSSVFSNMPLIFAIGIALGFTKNDGVSALAAVVSYGIMTKTLSITIPIFSNLSDINVNQKYLLDTGILGGIIAGSISAYIFNTFYRIQLPEYLGFFAGRRFVPIASGLISIIFGCILSIIWPPIGNVIKTFSEWAAYQNPTLAFGIYGTVERALVPFGLHHIWNVPFQMQIGEYNNSIGQIFHGDIARYMAGDSTAGKLSGGFIFKMYGLPFAALAMWHCANKKNKAKIGGIMMSGALTAILTGITEPIEFSFILVAPILYVIHAILAGLAFPICILLNMRSGTSFSHGLIDFIVLSGNSNNFWLFPIVGLFYGILYYGIFYFMIKKFNLKTPGREKSITYINQKTIKETALLVISILGGKTNIINLDACITRLRITVLDISKVNQKKLKNLGASGVIVSGSGIQIVFGTQSDHIKTEIDNYMSNTNQ

SEQ ID NO: 124789 - DNA, 1434 bp, Salmonella typhimurium
  CDS (1)..(1434): transl_table=11
atgtttaagaatgcatttgctaacctgcaaaaggtcggtaaatcgctgatgctgccggtatccgtactccctatcgcaggtatcctgctgggtgtcggttccgctaacttcagctggctgccagccgttgtatcgcacgttatggcagaagcgggcggatctgtttttgccaatatgccgctgattttcgctatcggcgtggcgttgggcttcaccaacaacgacggcgtttcggctctggcggcggtagtcgcgtatggcatcatggtgaaaaccatggctgtggttgcgccgctggttctgcatttacctgctgaagagatcgccgctaaacaccttgctgatacgggtgttctcggggggattatctccggtgcaatcgcagcgtatatgtttaaccgcttctaccgtatcaaactgcctgagtatctgggcttctttgcgggcaaacgcttcgtgccgatcatttcgggtctggccgctatttttaccggtgtggtgctgtctttcgtatggccgccaatcggtacggctatccaggcgttctcgcagtgggcggcttatcagaacccggttgtcgcgtttggtatttacggttttatcgagcgttgcctggtgccgtttggtctgcatcatatctggaacgttcctttccagatgcagatcggcgaatataccaacgcagcgggtcaggtattccacggcgacattccgcgctatatggcgggcgacccgacggcaggtatgttgtctggcggcttcctgttcaaaatgtacggtctgccggctgcggccattgctatctggcactctgctaaaccggaaaaccgcgcaaaagtgggcggtatcatgatttccgccgcgctgacctcgtttttgacgggtattaccgagcctatcgagttctccttcatgttcgtggcgccgatcctgtacattattcacgcgattctggcaggtctggcattcccgatctgtatcctgctggggatgcgtgacggtacgtcgttctcccacggtctgatcgactttatcgtgctgtccggtaacagcagcaaattgtggctgttcccgattgttggcgccggttatgcgattgtgtactacaccgtgttccgcgtgctgatcaaagcgttggatctgaaaacgccgggtcgtgaagacactactgatgacgcaaaagcgggggcgaccagcgaaatggcgccggctttggttgcggcgtttggcggtaaagagaacatcactaacctggatgcctgtatcacgcgtctgcgcgtgagcgtagccgatgtagcgaaagtggatcaggctggcctgaagaaactgggcgcggcaggcgttgtcgtcgcgggttccggcgttcaggctattttcggtacgaaatccgataacctgaaaacggaaatggatgagtacatccgtaacagctaa

SEQ ID NO: 124790 - protein, 477 aa, Salmonella typhimurium
MFKNAFANLQKVGKSLMLPVSVLPIAGILLGVGSANFSWLPAVVSHVMAEAGGSVFANMPLIFAIGVALGFTNNDGVSALAAVVAYGIMVKTMAVVAPLVLHLPAEEIAAKHLADTGVLGGIISGAIAAYMFNRFYRIKLPEYLGFFAGKRFVPIISGLAAIFTGVVLSFVWPPIGTAIQAFSQWAAYQNPVVAFGIYGFIERCLVPFGLHHIWNVPFQMQIGEYTNAAGQVFHGDIPRYMAGDPTAGMLSGGFLFKMYGLPAAAIAIWHSAKPENRAKVGGIMISAALTSFLTGITEPIEFSFMFVAPILYIIHAILAGLAFPICILLGMRDGTSFSHGLIDFIVLSGNSSKLWLFPIVGAGYAIVYYTVFRVLIKALDLKTPGREDTTDDAKAGATSEMAPALVAAFGGKENITNLDACITRLRVSVADVAKVDQAGLKKLGAAGVVVAGSGVQAIFGTKSDNLKTEMDEYIRNS

SEQ ID NO: 124791 - DNA, 1584 bp, Bacillus subtilis
  CDS (1)..(1584): transl_table=11
atgatgcaaaaaattcagcgctttggaagcgcgatgtttgtgcctgttttattattcgcgttcgccggcattatcgtcggtatcagcacgctctttaaaaataaaaccctcatgggaccgctcgccgatcctgacggtttttggtatcagtgctggtatatcattgagcagggcggctggactgtttttaaccaaatgccgctcttattcgccattggcatcccggttgctttggcgaagaaagctcaggcacgcgcctgtttggaagcgcttactgtctacctgacattcaactattttgtcagcgcgatattgacggtatggggaggagcatttggcgtcgacatgaatcaagaggtcggcggaacgagcgggttaacgatgattgcgggcataaaaacgctcgataccaacatcatcggagccatctttatttcttcgattgtcgtctttttgcataatcgctattttgataaaaaactgcccgattttctcggcatctttcaaggctcaacatatatcgtgatgatttccttctttattatgatcccaattgcgttggctgtgtcttatatttggccgatggttcaatcgggaatcggctcgcttcaaagcttcctggttgcttctggggcggtgggcgtttggatatacacgtttttggaacggattttaattccgaccggccttcatcactttatttacacgccgtttatttatggcccggctgtagcggaaggcgggatcgtcacgtattgggcacagcatctcggcgaatattcgcaaagcgccaaaccgctgaaggagctctttccgcaaggcggattcgcgcttcacggcaactcgaaaatcttcggtattccgggtatcgccctggctttttatgtgacagccaaaaaggaaaagaaaaaactcgtcgcagggctgctgattcctgtcacactgacagcgattgtcgccggtattacagagccgattgagtttacgttcttattcatttcacctttcttatttgcggttcacgccgtgcttgccgccacaatgtcgacagttatgtatatggccggcgtcgtcggaaatatgggaggcggactgattgaggcggtaaccttgaactggattccgctctttggcagccacggtatgacatatgtgtatcaaattttgatcgggctctcgtttacagcaatttattttttcgtcttcagatttttaatcctcaaattcaatatcgctacaccaggacgggaaaaggatgaacagcaggaaacaaagctatattcgaaaaaggaatacagagaacgaaaaaacaaggatgaaacggcctccgctgctgaaacggctgatgacaccgcttttctgtatattgaagcgctgggcggaaaagacaacatcactgaagtcacaaactgcgccacccgcctcagagtcagtgtcaaggatgaaacaaaggttgaacccgacagcgtattccgcgcgcttggcgcacacggcgttgtcaggaacgggaaggcgtttcaggtaattatcggattaagcgtgccgcagatgcgggagcgtgtggaaaaaatattgaatcaataa

SEQ ID NO: 124792 - protein, 527 aa, Bacillus subtilis
MMQKIQRFGSAMFVPVLLFAFAGIIVGISTLFKNKTLMGPLADPDGFWYQCWYIIEQGGWTVFNQMPLLFAIGIPVALAKKAQARACLEALTVYLTFNYFVSAILTVWGGAFGVDMNQEVGGTSGLTMIAGIKTLDTNIIGAIFISSIVVFLHNRYFDKKLPDFLGIFQGSTYIVMISFFIMIPIALAVSYIWPMVQSGIGSLQSFLVASGAVGVWIYTFLERILIPTGLHHFIYTPFIYGPAVAEGGIVTYWAQHLGEYSQSAKPLKELFPQGGFALHGNSKIFGIPGIALAFYVTAKKEKKKLVAGLLIPVTLTAIVAGITEPIEFTFLFISPFLFAVHAVLAATMSTVMYMAGVVGNMGGGLIEAVTLNWIPLFGSHGMTYVYQILIGLSFTAIYFFVFRFLILKFNIATPGREKDEQQETKLYSKKEYRERKNKDETASAAETADDTAFLYIEALGGKDNITEVTNCATRLRVSVKDETKVEPDSVFRALGAHGVVRNGKAFQVIIGLSVPQMRERVEKILNQ

SEQ ID NO: 124793 - DNA, 1581 bp, Fusobacterium mortiferum
  CDS (1)..(1581): transl_table=11
atgttaaaacattttcaaagattaggaggagcattatttgcaccagtattgctatttccttttgcggggttagtagtagctttaacaatcattttaaaaaatccagattttgtaggagaacttgctaatacaaatgggactttttataaaatgattacagttattgaagagggaggatggactgtatttagacaattacctttaatatttgctatagggttaccaataggacttgctaaaaaagcacatcctagagcttgtttagctgttttagcaacatatttaacttacaactattttatcagtgcaattttaacattttggggaccaagttttggggttgattttacacaaaatgtaggaggagttagtggacttactacaattgcaggaataaaaacattagacacaagtattgtaggagcaatagtaatttcaggaataacaatatatattcataataagttttttgatacaaaattaccagattttctaggaactttccaaggaacaacattagtaagtgcgatagcttttgtagtaatgataccttgtgcttacataacatgtcttgtttggccaaaaattcaaatgggaatttcatcattacaagctttaatggttacatctggaacatttggagtttggttatatacttttttagaaagaatattaattccaacaggtttacaccattttatttatggaccttttatatttggaccagcagtagttgatacaggtattcaagtagcttgggcagaaaatttgttaaattttgcaaactcaactcaaccattaaaagagttatttccacaaggaggatttgctttacatggtaatagtaaaatttttggatgtattggaatagcactggctatgtataaaacagctcgtccagaaaagaaaaaaattgtatcagggttattaattccagcagcattaacagcagcacttgtaggaataacagaaccattagaatttacattcttatttatagcaccatttttatttgtagttcatgcagtactagcggcaactatggcagctgtaatgtatgcttttggggtagtgaaatatgggtcgggaattatagaaatagcagcacttaactggttacctctcatgaaaaatcactcaggagtaatgtttacacaattagcaattggagtagtttttataggaatacattatttggtatttaaatttttaattgaaaaatataatgtaaaaacatctggaagagaagatgaagaagaggaaactaagctatatactaaggcagattggaaagctaaaaatggagaagggaaagagacaaatagttcagatctatattcaggaaaagctaaagcatttttagaagcttttggtggtaaagataatatagaacaagtaaacaattgtgctacaagacttagaataagtgttaaagatgaaaaaaaagttggaccagatattcaatttaaagcagcaggagcacatggagttgtaagaaatggaaaagcttttcaagttatagtaggactttcagtaccacaagttagagagagttttgaaaatttaatggaacaaaattaa

SEQ ID NO: 124794 - protein, 526 aa, Fusobacterium mortiferum
MLKHFQRLGGALFAPVLLFPFAGLVVALTIILKNPDFVGELANTNGTFYKMITVIEEGGWTVFRQLPLIFAIGLPIGLAKKAHPRACLAVLATYLTYNYFISAILTFWGPSFGVDFTQNVGGVSGLTTIAGIKTLDTSIVGAIVISGITIYIHNKFFDTKLPDFLGTFQGTTLVSAIAFVVMIPCAYITCLVWPKIQMGISSLQALMVTSGTFGVWLYTFLERILIPTGLHHFIYGPFIFGPAVVDTGIQVAWAENLLNFANSTQPLKELFPQGGFALHGNSKIFGCIGIALAMYKTARPEKKKIVSGLLIPAALTAALVGITEPLEFTFLFIAPFLFVVHAVLAATMAAVMYAFGVVKYGSGIIEIAALNWLPLMKNHSGVMFTQLAIGVVFIGIHYLVFKFLIEKYNVKTSGREDEEEETKLYTKADWKAKNGEGKETNSSDLYSGKAKAFLEAFGGKDNIEQVNNCATRLRISVKDEKKVGPDIQFKAAGAHGVVRNGKAFQVIVGLSVPQVRESFENLMEQN

SEQ ID NO: 124795 - DNA, 1896 bp, Bacillus subtilis
  CDS (1)..(1896): transl_table=11
atgtttaaaaaggcatttcaaattctgcagcagcttggccgcgcgttgatgactccggttgccgtcctgccggcagcaggtcttttgctccgtttcggagacaaggatttactgaacatccctattataaaggatgcgggcggcgttgtattcgataaccttccgctgattttcgccgtgggggtcgcgatcggattagccggcggagaaggtgtagccggacttgccgctgtcatcggatacttaattttaaccgtcaccctcgacaatatgggaaaattactcggccttcagcctccgtatgaaggagccgagcacctgattgatatgggggttttcggaggaatcattatcgggcttctcgccgcctatttatataagcgattttcatcaatcgagctgcatccggtccttggatttttctctggaaaacgctttgtcccgatcattacttccgtcagttcattggtgatcggcgtcattttctcattcgtttggccgctgatccaaaacggaattaacgcagccagcagtttaattgccgattcaacagtcggcctgttcttttatgcaacgatctatcgtttgctgattccttttggcctgcatcatattttttatacgcctttctattttatgatgggagaatacacagacccatcaacaggcaacaccgtaaccggcgacctgacaaggtttttcgcgggagacccgacagccgggcgctttatgatgggggatttcccttacatgattttctgtctgccggccgttgctcttgccattatccataccgcgcgtccggaaaagaaaaaaatgatctccggcgtgatgatttctgcggcgctcacatctatgctgaccggaattacagaaccggttgagttttctttcttgttcgttgcgcccgtgctctatttgattaactctattcttgccggcgtcatctttgtcgtttgtgatttattccatgtccgccacggctatacgttctcaggcggaggaattgactacgtcttgaactacggactgtctacaaacggctgggttgtcattcctgtcgggatcgtgtttgctttcatttattattatttgttccgatttgcgattctgaaatggaatttgaaaacgcccggccgtgagacagatgaagacggtcagaatgaggagaaagctccagttgcaaaagaccagcttgcctttcacgtgctgcaggccttgggcggacagcaaaatatcgctaacctggatgcatgtatcacaaggcttcgtgtgaccgttcatcagccaagccaagtctgcaaggatgaattaaaacggcttggtgcagtaggtgtgctggaggtcaacaacaacttccaggcaatattcggaaccaagtccgatgccttaaaagacgacatcaaaacaatcatggccggaggcgtccctgccaccgccgccgcgctggacacggtaactgacaaaccgctgaagcccgattccgatgagacctttatttatccgattaaaggagaaacagtctctttaggggatgtgcctgatcaggtcttttcagaaaaaatgatgggcgagggatttgcgattataccatcagaaggaaaagtcgttgcacctgcggacggcgagatcgtctcgatttttccgacaaaacacgccatcggctttatgagcgccggcggcactgaaatcctgattcatgtcggcatcgataccgtcaaactgaatggggaaggctttgaagcacatgtcacaagcggacaagccgtcaaacaaggcgaactgcttctcacctttgatctcaattacatcaagcagcatgccgcttcagccataacaccggttattttcacaaatacctctgaagaagatctaaagcacattcaaatgaagtaa

SEQ ID NO: 124796 - protein, 631 aa, Bacillus subtilis
MFKKAFQILQQLGRALMTPVAVLPAAGLLLRFGDKDLLNIPIIKDAGGVVFDNLPLIFAVGVAIGLAGGEGVAGLAAVIGYLILTVTLDNMGKLLGLQPPYEGAEHLIDMGVFGGIIIGLLAAYLYKRFSSIELHPVLGFFSGKRFVPIITSVSSLVIGVIFSFVWPLIQNGINAASSLIADSTVGLFFYATIYRLLIPFGLHHIFYTPFYFMMGEYTDPSTGNTVTGDLTRFFAGDPTAGRFMMGDFPYMIFCLPAVALAIIHTARPEKKKMISGVMISAALTSMLTGITEPVEFSFLFVAPVLYLINSILAGVIFVVCDLFHVRHGYTFSGGGIDYVLNYGLSTNGWVVIPVGIVFAFIYYYLFRFAILKWNLKTPGRETDEDGQNEEKAPVAKDQLAFHVLQALGGQQNIANLDACITRLRVTVHQPSQVCKDELKRLGAVGVLEVNNNFQAIFGTKSDALKDDIKTIMAGGVPATAAALDTVTDKPLKPDSDETFIYPIKGETVSLGDVPDQVFSEKMMGEGFAIIPSEGKVVAPADGEIVSIFPTKHAIGFMSAGGTEILIHVGIDTVKLNGEGFEAHVTSGQAVKQGELLLTFDLNYIKQHAASAITPVIFTNTSEEDLKHIQMK

SEQ ID NO: 124797 - DNA, 1947 bp, Escherichia coli
  CDS (1)..(1947): transl_table=11
atgaatattttaggttttttccagcgactcggtagggcgttacagctccctatcgcggtgctgccggtggcggcactgttgctgcgattcggtcagccagatttacttaacgttgcgtttattgcccaggcgggcggtgcgatttttgataacctcgcattaatcttcgccatcggtgtggcatccagctggtcgaaagacagcgctggtgcggcggcgctggcgggtgcggtaggttactttgtgttaaccaaagcgatggtgaccatcaacccagaaattaacatgggtgtactggcgggtatcattaccggtctggttggtggcgcagcctataaccgttggtccgatattaaactgccggacttcctgagcttcttcggcggcaaacgctttgtgccgattgccaccggattcttctgcctggtgctggcggccatttttggttacgtctggccgccggtacagcacgctatccatgcaggcggcgagtggatcgtttctgcgggcgcgctgggttccggtatctttggtttcatcaaccgtctgctgatcccaaccggtctgcatcaggtactgaacaccatcgcctggttccagattggtgaattcaccaacgcggcgggtacggttttccacggtgacattaaccgcttctatgccggtgacggcaccgcggggatgttcatgtccggcttcttcccgatcatgatgttcggtctgccgggtgcggcgctggcgatgtacttcgcagcaccgaaagagcgtcgtccgatggttggcggtatgctgctttctgttgctgttactgcgttcctgaccggtgtgactgagccgctggaattcctgttcatgttccttgctccgctgctgtacctcctgcacgcactgctgaccggtatcagcctgtttgtggcaacgctgctgggtatccacgcgggcttctctttctctgcgggggctatcgactacgcgttgatgtataacctgccggccgccagccagaacgtctggatgctgctggtgatgggcgttatcttcttcgctatctacttcgtggtgttcagtttggttatccgcatgttcaacctgaaaacgccgggtcgtgaagataaagaagacgagatcgttactgaagaagccaacagcaacactgaagaaggtctgactcaactggcaaccaactatattgctgcggttggcggcactgacaacctgaaagcgattgacgcctgtatcacccgtctgcgccttacagtggctgactctgcccgcgttaacgatacgatgtgtaaacgtctgggtgcttctggggtagtgaaactgaacaaacagactattcaggtgattgttggcgcgaaagcagaatccatcggcgatgcgatgaagaaagtcgttgcccgtggtccggtagccgctgcgtcagctgaagcaactccggcaactgccgcgcctgtagcaaaaccgcaggctgtaccaaacgcggtatctatcgcggagctggtatcgccgattaccggtgatgtcgtggcactggatcaggttcctgacgaagcattcgccagcaaagcggtgggtgacggtgtggcggtgaaaccgacagataaaatcgtcgtatcaccagccgcagggacaatcgtgaaaatcttcaacaccaaccacgcgttctgcctggaaaccgaaaaaggcgcggagatcgtcgtccatatgggtatcgacaccgtagcgctggaaggtaaaggctttaaacgtctggtggaagagggtgcgcaggtaagcgcagggcaaccgattctggaaatggatctggattacctgaacgctaacgcccgctcgatgattagcccggtggtttgcagcaatatcgacgatttcagtggcttgatcattaaagctcagggccatattgtggcgggtcaaacaccgctgtatgaaatcaaaaagtaa

SEQ ID NO: 124798 - protein, 648 aa, Escherichia coli
MNILGFFQRLGRALQLPIAVLPVAALLLRFGQPDLLNVAFIAQAGGAIFDNLALIFAIGVASSWSKDSAGAAALAGAVGYFVLTKAMVTINPEINMGVLAGIITGLVGGAAYNRWSDIKLPDFLSFFGGKRFVPIATGFFCLVLAAIFGYVWPPVQHAIHAGGEWIVSAGALGSGIFGFINRLLIPTGLHQVLNTIAWFQIGEFTNAAGTVFHGDINRFYAGDGTAGMFMSGFFPIMMFGLPGAALAMYFAAPKERRPMVGGMLLSVAVTAFLTGVTEPLEFLFMFLAPLLYLLHALLTGISLFVATLLGIHAGFSFSAGAIDYALMYNLPAASQNVWMLLVMGVIFFAIYFVVFSLVIRMFNLKTPGREDKEDEIVTEEANSNTEEGLTQLATNYIAAVGGTDNLKAIDACITRLRLTVADSARVNDTMCKRLGASGVVKLNKQTIQVIVGAKAESIGDAMKKVVARGPVAAASAEATPATAAPVAKPQAVPNAVSIAELVSPITGDVVALDQVPDEAFASKAVGDGVAVKPTDKIVVSPAAGTIVKIFNTNHAFCLETEKGAEIVVHMGIDTVALEGKGFKRLVEEGAQVSAGQPILEMDLDYLNANARSMISPVVCSNIDDFSGLIIKAQGHIVAGQTPLYEIKK

SEQ ID NO: 124799 - DNA, 22 bp, Artificial sequence
  primer
atgacggcgaaaacagcaccga

SEQ ID NO: 124800 - DNA, 24 bp, Artificial sequence
  primer
ttatgcctggacagtatgcatcag

SEQ ID NO: 124801 - protein, 780 aa, Artificial sequence
  consensus sequence
  Variant (2)..(3): Xaa in position 2 to 3 is any amino acid
  Variant (5)..(6): Xaa in position 5 to 6 is any amino acid
  Variant (7)..(9): Xaa in position 7 to 9 is any or no amino acid
  Variant (11)..(13): Xaa in position 11 to 13 is any amino acid
  Variant (16)..(16): Xaa in position 16 is any amino acid
  Variant (19)..(21): Xaa in position 19 to 21 is any amino acid
  Variant (22)..(24): Xaa in position 22 to 24 is any or no amino acid
  Variant (26)..(35): Xaa in position 26 to 35 is any amino acid
  Variant (36)..(59): Xaa in position 36 to 59 is any or no amino acid
  Variant (61)..(63): Xaa in position 61 to 63 is any amino acid
  Variant (65)..(70): Xaa in position 65 to 70 is any amino acid
  Variant (71)..(72): Xaa in position 71 to 72 is any or no amino acid
  Variant (75)..(79): Xaa in position 75 to 79 is any amino acid
  Variant (81)..(84): Xaa in position 81 to 84 is any amino acid
  Variant (85)..(88): Xaa in position 85 to 88 is any or no amino acid
  Variant (90)..(119): Xaa in position 90 to 119 is any amino acid
  Variant (120)..(215): Xaa in position 120 to 215 is any or no amino acid
  Variant (217)..(219): Xaa in position 217 to 219 is any amino acid
  Variant (221)..(234): Xaa in position 221 to 234 is any amino acid
  Variant (235)..(235): Xaa in position 235 is any or no amino acid
  Variant (238)..(239): Xaa in position 238 to 239 is any amino acid
  Variant (241)..(241): Xaa in position 241 is any amino acid
  Variant (244)..(244): Xaa in position 244 is any amino acid
  Variant (246)..(246): Xaa in position 246 is any amino acid
  Variant (248)..(248): Xaa in position 248 is any amino acid
  Variant (252)..(267): Xaa in position 252 to 267 is any amino acid
  Variant (268)..(268): Xaa in position 268 is any or no amino acid
  Variant (271)..(292): Xaa in position 271 to 292 is any amino acid
  Variant (293)..(300): Xaa in position 293 to 300 is any or no amino acid
  Variant (302)..(304): Xaa in position 302 to 304 is any amino acid
  Variant (306)..(306): Xaa in position 306 is any amino acid
  Variant (308)..(308): Xaa in position 308 is any amino acid
  Variant (310)..(310): Xaa in position 310 is any amino acid
  Variant (315)..(348): Xaa in position 315 to 348 is any amino acid
  Variant (349)..(520): Xaa in position 349 to 520 is any or no amino acid
  Variant (522)..(528): Xaa in position 522 to 528 is any amino acid
  Variant (532)..(535): Xaa in position 532 to 535 is any amino acid
  Variant (537)..(560): Xaa in position 537 to 560 is any amino acid
  Variant (561)..(563): Xaa in position 561 to 563 is any or no amino acid
  Variant (566)..(566): Xaa in position 566 is any amino acid
  Variant (570)..(570): Xaa in position 570 is any amino acid
  Variant (573)..(573): Xaa in position 573 is any amino acid
  Variant (575)..(575): Xaa in position 575 is any amino acid
  Variant (577)..(577): Xaa in position 577 is any amino acid
  Variant (580)..(584): Xaa in position 580 to 584 is any amino acid
  Variant (585)..(585): Xaa in position 585 is any or no amino acid
  Variant (587)..(590): Xaa in position 587 to 590 is any amino acid
  Variant (592)..(610): Xaa in position 592 to 610 is any amino acid
  Variant (611)..(613): Xaa in position 611 to 613 is any or no amino acid
  Variant (615)..(631): Xaa in position 615 to 631 is any amino acid
  Variant (632)..(646): Xaa in position 632 to 646 is any or no amino acid
  Variant (648)..(653): Xaa in position 648 to 653 is any amino acid
  Variant (655)..(657): Xaa in position 655 to 657 is any amino acid
  Variant (659)..(661): Xaa in position 659 to 661 is any amino acid
  Variant (663)..(668): Xaa in position 663 to 668 is any amino acid
  Variant (673)..(692): Xaa in position 673 to 692 is any amino acid
  Variant (693)..(725): Xaa in position 693 to 725 is any or no amino acid
  Variant (728)..(729): Xaa in position 728 to 729 is any amino acid
  Variant (731)..(736): Xaa in position 731 to 736 is any amino acid
  Variant (738)..(738): Xaa in position 738 is any amino acid
  Variant (743)..(759): Xaa in position 743 to 759 is any amino acid
  Variant (760)..(761): Xaa in position 760 to 761 is any or no amino acid
  Variant (764)..(764): Xaa in position 764 is any amino acid
  Variant (766)..(773): Xaa in position 766 to 773 is any amino acid
  Variant (774)..(775): Xaa in position 774 to 775 is any or no amino acid
  Variant (777)..(779): Xaa in position 777 to 779 is any amino acid
QXXGXXXXXPXXXLPXAGXXXXXXGXXXXXXXXXXXXXXXXXXXXXXXXXXXXXXXXXXGXXXFXXXXXXXXFAXXXXXGXXXXXXXXGXXXXXXXXXXXXXXXXXXXXXXXXXXXXXXXXXXXXXXXXXXXXXXXXXXXXXXXXXXXXXXXXXXXXXXXXXXXXXXXXXXXXXXXXXXXXXXXXXXXXXXXXXXXXXXXXXXXXXXXXXXXXXXGXXXGXXXXXXXXXXXXXXXLPXXLXFFXGXRXVPIXXXXXXXXXXXXXXXXXWPXXXXXXXXXXXXXXXXXXXXXXXXXXXXXXGXXXRXLXPXGLHHXXXXXXXXXXXXXXXXXXXXXXXXXXXXXXXXXXXXXXXXXXXXXXXXXXXXXXXXXXXXXXXXXXXXXXXXXXXXXXXXXXXXXXXXXXXXXXXXXXXXXXXXXXXXXXXXXXXXXXXXXXXXXXXXXXXXXXXXXXXXXXXXXXXXXXXXXXXXXXXXXXXXXXXXXXXXXXXXXXXXXXXXXXXXXXXXXXXXXXXXXXXXXXGXXXXXXXGLPXXXXAXXXXXXXXXXXXXXXXXXXXXXXXXXXTGXTEPXEFXFXFXAPXXXXXXHXXXXGXXXXXXXXXXXXXXXXXXXXXXDXXXXXXXXXXXXXXXXXXXXXXXXXXXXXXXXGXXXXXXYXXXFXXXIXXXXXXTPGRXXXXXXXXXXXXXXXXXXXXXXXXXXXXXXXXXXXXXXXXXXXXXXXXXXXXXGGXXNXXXXXXCXTRLRXXXXXXXXXXXXXXXXXXXGAXGXXXXXXXXXXQXXXG

SEQ ID NO: 124802 - protein, 21 aa, Artificial sequence
  protein pattern
  Variant (2)..(2): Xaa in position 2 is any amino acid
  Variant (3)..(3): Xaa in position 3 is Ala, Asp, Glu, Gly, Asn, Gln or Ser
  Variant (5)..(5): Xaa in position 5 is Ile, Leu or Val
  Variant (6)..(7): Xaa in position 6 to 7 is any amino acid
  Variant (8)..(8): Xaa in position 8 is Ile, Leu or Val
  Variant (9)..(9): Xaa in position 9 is Asp, Glu, Gly, Asn, Ser or Thr
  Variant (10)..(10): Xaa in position 10 is any amino acid
  Variant (12)..(12): Xaa in position 12 is any amino acid
  Variant (17)..(17): Xaa in position 17 is Ile, Leu, Met or Val
  Variant (18)..(18): Xaa in position 18 is any amino acid
  Variant (19)..(19): Xaa in position 19 is Ile, Leu or Val
  Variant (20)..(20): Xaa in position 20 is any amino acid
  Variant (21)..(21): Xaa in position 21 is Ala, Asp, Glu, Asn, Gln or Ser
GXXNXXXXXXCXTRLRXXXXX

SEQ ID NO: 124803 - protein, 10 aa, Artificial sequence
  protein pattern
  Variant (2)..(2): Xaa in position 2 is any amino acid
  Variant (4)..(4): Xaa in position 4 is any amino acid
  Variant (5)..(5): Xaa in position 5 is Pro or Val
  Variant (6)..(6): Xaa in position 6 is any amino acid
RXLXXXGLHH

SEQ ID NO: 124804 - protein, 15 aa, Artificial sequence
  protein pattern
  Variant (2)..(3): Xaa in position 2 to 3 is any amino acid
  Variant (4)..(4): Xaa in position 4 is Phe or Leu
  Variant (5)..(5): Xaa in position 5 is Ala, Asp, Glu, Gly, Ser or Thr
  Variant (8)..(8): Xaa in position 8 is Ala, Glu, Gly, Asn or Ser
  Variant (10)..(10): Xaa in position 10 is any amino acid
  Variant (12)..(12): Xaa in position 12 is any amino acid
  Variant (13)..(13): Xaa in position 13 is Ala, Ile, Leu or Val
  Variant (14)..(14): Xaa in position 14 is Pro or Ser
  Variant (15)..(15): Xaa in position 15 is Phe, Ile, Leu, Met or Val
PXXXXFFXGXRXXXX

SEQ ID NO: 124805 - DNA, 864 bp, Escherichia coli
  CDS (1)..(864): transl_table=11
atgatgaaaaatattctcgctatccagtctcacgttgtttatggtcatgcgggtaacagtgcggcagagtttccgatgcgccgcctgggcgcgaacgtctggccgctgaacaccgttcaattttctaatcacacccaatacggcaaatggactggctgcgtgatgccgcccagccatttaaccgaaattgtgcaaggcattgccgccattgataaattacacacctgtgatgccgtattaagtggctatctgggatcggcggagcagggtgaacatatcctcggtatcgtccgtcaggtgaaagccgcgaatccgcaggcgaaatatttttgcgatccggtaatgggtcatccggaaaaaggctgtatcgttgcaccgggtgtcgcagagtttcatgtgcggcacggtttgcctgccagcgatatcattgcgccaaatctggttgagctggaaatactctgtgagcatgcggtaaataacgtcgaagaagcggttctggcagcgcgcgaactcattgcgcaagggccacaaattgtgttggttaaacacctggcgcgagctggctacagccgtgaccgttttgaaatgctgctggtcaccgccgatgaagcctggcatatcagccgtccgctggtggattttggtatgcgccagccggtaggtgttggtgatgtgacgagcggtttactgctggtgaaactgcttcagggggcaacgctgcaggaggcgctggaacatgtgaccgctgcagtctacgaaatcatggtgaccaccaaagcaatgcaggaatatgagctgcaagtggtggctgctcaggatcgtattgccaaaccagaacattacttcagcgcaacaaagctctaa

SEQ ID NO: 124806 - protein, 287 aa, Escherichia coli
MMKNILAIQSHVVYGHAGNSAAEFPMRRLGANVWPLNTVQFSNHTQYGKWTGCVMPPSHLTEIVQGIAAIDKLHTCDAVLSGYLGSAEQGEHILGIVRQVKAANPQAKYFCDPVMGHPEKGCIVAPGVAEFHVRHGLPASDIIAPNLVELEILCEHAVNNVEEAVLAARELIAQGPQIVLVKHLARAGYSRDRFEMLLVTADEAWHISRPLVDFGMRQPVGVGDVTSGLLLVKLLQGATLQEALEHVTAAVYEIMVTTKAMQEYELQVVAAQDRIAKPEHYFSATKL

SEQ ID NO: 124807 - DNA, 933 bp, Zea mays
  CDS (1)..(933)
atggcgcggccgccgatcctatccgtcgcgctgccgtctgacaccggccgtgtgctcagcatccagtcccacaccgtccaggggtatgttggcaacaaatcggccgtctttcccctgcagctccttggctttgatgtggatccaataaactctgtacagttttctaatcatacaggatacccaacatttagaggtcaggttcttaatggcaaacagctctgggaccttattgaaggactggaggaaaatcagttgcttcattatacccatttattaacaggttatataggctcagtttcctttttagatactgtgctacaagttgttgagaaattgcgatcagttaatcctgatcttgtatatgtttgtgacccagttctaggtgatgaaggaaaactatatgttcctcaggaggtaatatctgtttatcaacagaaggttgttccagttgcttcaatgcttacacctaaccaatttgaagttgaactacttactggattgaggatcacctccgaagaagatggtttgacagcttgtaataccctccacagtgccggaccacagaaggtggttataactagtgctcttattgaaggtaagctgctccttatcggaagtcacaaaaaaacagaggaacaacagccagaacaatttaagattgagataccaaagatacctgcatatttcacgggaactggagatttgacaactgctctcctactaggatggagtaataaatatcctgatagcctcgagaaagcagcagaactggcagtttccagtttgcaggcacttctgaaaagaactgtggaagactataaaatggccggcttcgacccatcgaccagcagcttagagatccggttgatccaaagccaggacgagatccgaaacccaactgttacatgcaaggctgtgaagtatggaagctga

SEQ ID NO: 124808 - protein, 310 aa, Zea mays
MARPPILSVALPSDTGRVLSIQSHTVQGYVGNKSAVFPLQLLGFDVDPINSVQFSNHTGYPTFRGQVLNGKQLWDLIEGLEENQLLHYTHLLTGYIGSVSFLDTVLQVVEKLRSVNPDLVYVCDPVLGDEGKLYVPQEVISVYQQKVVPVASMLTPNQFEVELLTGLRITSEEDGLTACNTLHSAGPQKVVITSALIEGKLLLIGSHKKTEEQQPEQFKIEIPKIPAYFTGTGDLTTALLLGWSNKYPDSLEKAAELAVSSLQALLKRTVEDYKMAGFDPSTSSLEIRLIQSQDEIRNPTVTCKAVKYGS

SEQ ID NO: 124809 - DNA, 897 bp, Bombyx mori
  CDS (1)..(897)
atgtctcaagatgatactccaagagttctttccatacagagtcatgtggtacatggttatgttggtaataaaagtgcagtttttccattgcaagttctaggttttgaagtagattccataaatactgtacagttttcaacacacacagcatacaagcatatcaagggctatgtattgaataatgaccaaatgaaggaattagttgaaggcctggtactgaatgaggttgactattatacacatttcctaactggttactcaagatcgccagattctctcagagaaatagctaaaataataaaacaactgagagagaaaaacccaaacttaatatatgtctgtgacccggtgatgggtgataatggaaaaatgtacgtacccgaagagattctgccggtataccgcgacgttctggtaccgctagcagacattttgaccccaaaccaattcgaagcagaattgatcaccggcattccaatgaaggatctcgatggtgctctgagagtcatacagaggctccacgatatgggagtaaagacggtggtgctgtctagtaccgatctgggagacgaggagaatatgatcggcctggctagtactggaggatcatgttacaagatcccaatacccaaagtggaggcaacgttcacgggtaccggagacttgttcgcggcgttattcctcgcgtggtcacacttgactggcaacgacgtcaaactggccctcgaaaagacgatagcgactctgcagagtattgtggtggatacataccaaacggccagagcatctcatctgaccggaaaaatcccaccacggttcactgaactccgtctcgtgcaaaacaaaaccgtcattgaagatccaaaaattaaattaaaggctgtgaaaataaactag

SEQ ID NO: 124810 - protein, 298 aa, Bombyx mori
MSQDDTPRVLSIQSHVVHGYVGNKSAVFPLQVLGFEVDSINTVQFSTHTAYKHIKGYVLNNDQMKELVEGLVLNEVDYYTHFLTGYSRSPDSLREIAKIIKQLREKNPNLIYVCDPVMGDNGKMYVPEEILPVYRDVLVPLADILTPNQFEAELITGIPMKDLDGALRVIQRLHDMGVKTVVLSSTDLGDEENMIGLASTGGSCYKIPIPKVEATFTGTGDLFAALFLAWSHLTGNDVKLALEKTIATLQSIVVDTYQTARASHLTGKIPPRFTELRLVQNKTVIEDPKIKLKAVKIN

SEQ ID NO: 124811 - DNA, 990 bp, Deinococcus radiodurans R1
  CDS (1)..(990): transl_table=11
gtgtgcaaaatgcggcagaggccaaagccacctgaacgcggtccttcccctatcctgtcgcgcatgacgacgcccgtttcttcgtccgactctttggattctgtcacgcctaccctcccgcgcaacatcctgagcatccagtcgtgggtgagctacggccacgtcggcaacgcggcggccatttttcccctgcaacgcctgggtttcgaggtctggggcgtccacaccgtgcagttttccaaccataccggctacggcgcctggaccgggccggtgttcgagccgggcgtgattgccgagctgctcgacggcatcgaagcgcgcggcgtcctgccgcagtgtgacggcgtgctcagcggctacgtgggctcgggcggcacggtggcggcggtggtgggggcggtaggccgggtccggcaggcccacccgcaggccctctactgctgcgacccggtgatgggcgatgtggggcgcggcgtgttcgtgcatcctgacctgcccgccctcatcgccgcgcaggccatccccgccgccgacatcgtgacccctaatcagtttgaacttgagttgctcaccgggcaaaaggtggagactctggcggacgcactcgccgctgcgcacgctctgcgcgaacgcctcaaccccgctgggccgcgcatcgtgctgctgaccagtctggtccgcgcggacgccccggcgagcagcatcgagacattagccgtgacgggcgaaggctcctggctgtgccgcacgccgctgctgccgctcgaccccccgcgcaacggcaccggcgacgcgattgccgcgctgttctacggccagtttctccgcaccggcagcgccgagcaggccctcacgctttccatgagtgccctttacgccctgctcgacctcacccaccgcctcggcacccgcgagattcaactcgtggcggcccagggcgagttcgagcggccccgccacctcttcgctgccgaacgggtggaataa

SEQ ID NO: 124812 - protein, 329 aa, Deinococcus radiodurans R1
MCKMRQRPKPPERGPSPILSRMTTPVSSSDSLDSVTPTLPRNILSIQSWVSYGHVGNAAAIFPLQRLGFEVWGVHTVQFSNHTGYGAWTGPVFEPGVIAELLDGIEARGVLPQCDGVLSGYVGSGGTVAAVVGAVGRVRQAHPQALYCCDPVMGDVGRGVFVHPDLPALIAAQAIPAADIVTPNQFELELLTGQKVETLADALAAAHALRERLNPAGPRIVLLTSLVRADAPASSIETLAVTGEGSWLCRTPLLPLDPPRNGTGDAIAALFYGQFLRTGSAEQALTLSMSALYALLDLTHRLGTREIQLVAAQGEFERPRHLFAAERVE

SEQ ID NO: 124813 - DNA, 852 bp, Escherichia coli O157:H7 EDL933
  CDS (1)..(852): transl_table=11
  misc_feature (337)..(337): m is a or c
atgagtagtttgttgttgtttaacgataagagcagggcgctgcaggcggatatcgtcgccgtgcagtcgcaggtggtttacggcagcgtgggcaacagcattgccgtgcctgctatcaaacagaacggcctgaatgtctttgccgtgccgacggtattgctgagcaatacgccgcattatgacactttctacggtggtgcgattccggatgaatggtttagcggctatttgcgtgcacttcaggagcgtgatgcgctgcgccaacttcgtgctgtaaccacgggctatatgggaacggcatcgcaaatcaaaatccttgccgagtggctgactgcgmtacgcaaagaccatcctgacctattgatcatggtcgatccggtgattggcgatattgacagcggaatttatgtcaaacctgaccttcccgaagcgtatcgacaatatttactgccgctggcgcagggaattacccccaatatctttgagttggaaatcctgaccggtaaaaattgccgcgatctcgacagtgccattgctgccgcaaaaagtctgctttcagacacactaaaatgggtggtgattaccagcgcctccggtaatgaagaaaatcaggagatgctggttgtggtggtcactgccgacagcgtgaatgtcatttcccattcaagggtaaaaaccgacctgaaagggactggcgacctgttttgtgctcagcttatcagtggtttgctgaaagggaaggcattaaacgatgcggtgcaccgcgcggggttgcgcgtactggaagtgatgcgctacacccagcagcatgagagcgatgaattgattttgccgccgctggcggaagcataa

SEQ ID NO: 124814 - protein, 283 aa, Escherichia coli O157:H7 EDL933
  misc_feature (113)..(113): The Xaa at location 113 stands for Ile, or Leu.
MSSLLLFNDKSRALQADIVAVQSQVVYGSVGNSIAVPAIKQNGLNVFAVPTVLLSNTPHYDTFYGGAIPDEWFSGYLRALQERDALRQLRAVTTGYMGTASQIKILAEWLTAXRKDHPDLLIMVDPVIGDIDSGIYVKPDLPEAYRQYLLPLAQGITPNIFELEILTGKNCRDLDSAIAAAKSLLSDTLKWVVITSASGNEENQEMLVVVVTADSVNVISHSRVKTDLKGTGDLFCAQLISGLLKGKALNDAVHRAGLRVLEVMRYTQQHESDELILPPLAEA

SEQ ID NO: 124815 - DNA, 936 bp, Agrobacterium tumefaciens str. C58
  CDS (1)..(936): transl_table=11
ttgatctctaggcaggggcacttgcgcgcttctgcgatgtttgaaagcaagaaggccgtgatgcaggaaaatacacagggcgccgtcatcgtcatttccagccacgtcatgcgtggctccgtcggcaaccgcgccgccgtttttgcgctggagaccctcggttatccggtctgggcggtgcccaccatcgtcatgccctggcaccccggccacggcccatccacccgcatgcgctttcaggatgacgacttcgacaaggccatgaccgacctcggaaacgcccaatggatcggcgaggtcaaggctgttctgaccggttatttcggcagtgccgcgcaggtccgctccgtcgcaaggctgatccgcaatctgaaggaaaagaacccggcgctggtttacgcctgcgacccggtcatgggcgatctgggcgggctttatattcccctcgagaccgccgaagccatccgggatcacctcatcccgcttgccaccgtcgccacgccaaaccgttacgaactggcttggatgagcggcgcggaacttgagaccaacaatgccatcatggatgccgcgctcgcgctcgggccgccgaaaatgctggtcacctcagccgtaccgatgatgacgggcggcaccggcaatctttacctcagcggccgccacgccctgcttgccgaacaccgcgccatcgaaaatgcgccgaacggcctcggcgacctgatgtcggcgctgttcctcgcccgcctgctggaaggcgtggatgatgaaaaggcgctgcaactggcaacagccagcgtcttcgaaatcctggcccgcaccaaaaaacgcgggatgaacgaactgacgctcgagaccgactcttcaagtctctccacacccatggccatggtgcagatgcgtcatctcttgcatccttcacgcagcaagcgcaaatag

SEQ ID NO: 124816 - protein, 311 aa, Agrobacterium tumefaciens str. C58
MISRQGHLRASAMFESKKAVMQENTQGAVIVISSHVMRGSVGNRAAVFALETLGYPVWAVPTIVMPWHPGHGPSTRMRFQDDDFDKAMTDLGNAQWIGEVKAVLTGYFGSAAQVRSVARLIRNLKEKNPALVYACDPVMGDLGGLYIPLETAEAIRDHLIPLATVATPNRYELAWMSGAELETNNAIMDAALALGPPKMLVTSAVPMMTGGTGNLYLSGRHALLAEHRAIENAPNGLGDLMSALFLARLLEGVDDEKALQLATASVFEILARTKKRGMNELTLETDSSSLSTPMAMVQMRHLLHPSRSKRK

SEQ ID NO: 124817 - DNA, 930 bp, Schizosaccharomyces pombe 972h-
  CDS (1)..(930)
atgaatacaacaaagcgtattttagcgattcagtcttctgtttgtcatggatatgtaggaaatcgtgctgctacatttccacttcagcttttaggttgggacgtagatgcaattccaactgtagagctttcaaatcatgcagggtatcccattgttaaaggaaggaccttaagcgcagaacaaattctggatttgtataagggtgtttcagcagctaatcccagtggctatgaatgtttgttgacaggatatgcccgtggaataggaagtgtaaaagcaataatggagatagttcgctccgtaaaatccaagaataagaaggctttttgggtttttgatccagttttgggagataatggaaggctttatgtcgaagaaagcattatcccgctgtatagagagatgctcccttttgctgatttaattacacctaatgggtttgaagcagaaattctttcagggatgcgcataaattcaatcgacacagcatttaaatgtgtggaatgtctacaacaaaaatataaagttccacgggttgtcatttcatcttttgtcgttgaagaaaacggcgtagaaaaactctactgtataggatcttctatatattccaaaagtttttttgttctgattcccgtgattcctgggatatttcggggaactggtgatctatttacagcactaatggcagctcatattgctgagagcccggattgtactgagagccttgcctctataaaggaggataaacttaagaaatcagtagaaatggcccttagttctgtgcatgaagtgatccaaaaaactgccgaccgaatttctgcattaggtgttgaagaatatcacccagcttatgccgaactctgcatagttaatagtcaaaatagcataatagctccatccaaattattcgaagcagtatactattattaa

SEQ ID NO: 124818 - protein, 309 aa, Schizosaccharomyces pombe 972h-
MNTTKRILAIQSSVCHGYVGNRAATFPLQLLGWDVDAIPTVELSNHAGYPIVKGRTLSAEQILDLYKGVSAANPSGYECLLTGYARGIGSVKAIMEIVRSVKSKNKKAFWVFDPVLGDNGRLYVEESIIPLYREMLPFADLITPNGFEAEILSGMRINSIDTAFKCVECLQQKYKVPRVVISSFVVEENGVEKLYCIGSSIYSKSFFVLIPVIPGIFRGTGDLFTALMAAHIAESPDCTESLASIKEDKLKKSVEMALSSVHEVIQKTADRISALGVEEYHPAYAELCIVNSQNSIIAPSKLFEAVYYY

SEQ ID NO: 124819 - DNA, 864 bp, Shigella flexneri 2a str. 301
  CDS (1)..(864): transl_table=11
atgatgaaaaatattctcgctatccagtctcacgttgtttatggtcatgcgggtaacagtgcggcagagtttccgatgcgccgcctgggcgcgaacgtctggccgctgaacaccgttcaattttctaatcacacccaatacggcaaatggactggctgcgtgatgccgcccagccatttaaccgaaattgtgcaaggcattgccgccattgataaattacacacctgtgatgccgtattaagtggctatctgggatcggcggagcagggtgaacatatcctcggtatcgtccgtcaggtgaaagcagcgaatccgcaggcgaaatatttttgcgatccggtaatgggtcatccggaaaaaggctgtatcgttgcaccgggtgtcgcagagtttcatgtgcggcacggtttgcctgccagcgatatcattgcgccgaatctggttgagctggaaatactctgtgagcatgcggtaaataacgtcgaagaagcggttctggcagcgcgcgaactcattgagcaagggccacaaattgtgttggttaaacacctggcgcgagctggctacagccgtgaccgttttgaaatgctgctggtcaccgccgatgaagtctggcatatcagccgtccactggtggattttggtatgcgccagccggtaggtgttggtgatgtgacgagcggtttactgctggtgaaactgcttcagggggcaacgctgcaggaggccctggaacatgtgaccgctgcagtctacgaaatcatggtgaccaccaaagcaatgcaggaatatgagctgcaagtggtggctgctcaggatcgtattgccaaaccagaacattacttcagcgcaacaaagctctga

SEQ ID NO: 124820 - protein, 287 aa, Shigella flexneri 2a str. 301
MMKNILAIQSHVVYGHAGNSAAEFPMRRLGANVWPLNTVQFSNHTQYGKWTGCVMPPSHLTEIVQGIAAIDKLHTCDAVLSGYLGSAEQGEHILGIVRQVKAANPQAKYFCDPVMGHPEKGCIVAPGVAEFHVRHGLPASDIIAPNLVELEILCEHAVNNVEEAVLAARELIEQGPQIVLVKHLARAGYSRDRFEMLLVTADEVWHISRPLVDFGMRQPVGVGDVTSGLLLVKLLQGATLQEALEHVTAAVYEIMVTTKAMQEYELQVVAAQDRIAKPEHYFSATKL

SEQ ID NO: 124821 - DNA, 861 bp, Corynebacterium diphtheriae NCTC 13129
  CDS (1)..(861): transl_table=11
atgaaccccatgaacattttgtcgatccagtcccatgtttcctacggccacgttggtaactctgccgcagtgttcccattgcaacgcattgggcatgaagtatggccggttcatacggtgaacttctctaaccacaccggctatgggcagtggggtggcgagctcattcctgcagcgcaggtgcgtaacgtgatcgacggcatggaacagcgcggcgctttcgagcgtatcgacgccatcttgtccggctaccaaggtggttctgacatagctgatgtgatcgtcgacgcagttgcgcggatcaaagaggcgaatcctcaagctgtgtatgcctgcgatcccgtcatgggcaatgccaaatctggctgttttgtatcggatctcatcccgccattgctgcgcgacaaggtggtcccagtggcagacatcatcacgcctaaccagtttgagctggagtacttgaccggtgtgccagcgcacgatactacctcgacgcttgaagctatcgctgctgcacaggaaatggggcccaataccgtcctcgtgacctcggtgcgtcgcccagaaactcccgctgatgcgatcgagatgatcgctgctaatgagcagggagcatggttggtgcgaactccgttcatcgactttaaacgcaatggttccggtgatgtgactgctgcactgtttacgggtcattacattcgcgagcgcgacgctgcagacgctctcgcacgtacagcatcgtcagtattcgatttgatcgaaactaccttcacagcggattcgcgcgaattgcttattatcgagtcccaagaagccattgcacatcctcgccttcagtttgaggttgagcagatcgcctaa

SEQ ID NO: 124822 - protein, 286 aa, Corynebacterium diphtheriae NCTC 13129
MNPMNILSIQSHVSYGHVGNSAAVFPLQRIGHEVWPVHTVNFSNHTGYGQWGGELIPAAQVRNVIDGMEQRGAFERIDAILSGYQGGSDIADVIVDAVARIKEANPQAVYACDPVMGNAKSGCFVSDLIPPLLRDKVVPVADIITPNQFELEYLTGVPAHDTTSTLEAIAAAQEMGPNTVLVTSVRRPETPADAIEMIAANEQGAWLVRTPFIDFKRNGSGDVTAALFTGHYIRERDAADALARTASSVFDLIETTFTADSRELLIIESQEAIAHPRLQFEVEQIA

SEQ ID NO: 124823 - DNA, 867 bp, Onion yellows phytoplasma OY-M
  CDS (1)..(867): transl_table=11
atgaatatacccaccaaacccaaaagtattctttctatccaatctcatgtagtatatggctatgttggaaataaagaagcagtttatcctttgcaaaatatgaatttcgatgtttggcctatcaatacagttcaattttccaatcatacaggttatcaaaagtggcaaggacaaatttttaacaaacaaaatatagttgatttggtagaaggtctttttgctcttggagtagaaaaacagtgtcaagctattttaacaggatatatgggatctttagatatttgcgaagctgttttggaaattgttgcaagatttaaacgaacgaaccctgatattttatatttatgtgaccctgtaatgggcaataacagatgttttgttaagcctgaaataacttctttttttaaaaataatttgcaagcagatattattactcctaatcaatttgaagctgaatttttgtctggtattaaaataaataatgtctcggatgctattaaagtagcaaagcatttccataatttaggagttaaaattgtaattattacaggtattaattttcaagatgaaaaatattttcaagtgtttgcatcaaatgctacaaaaaaatatttggtgcaggctcacaacaaagaaaaaaacattgatattgcaggtacaggagatttatttgctagtctttttctgggtttttatttgaaatatgaaagaaatattaaaaatgctttggctcatgctgttttttatcttaataaagttgttcaaaatactttgttatcacagcaaaaagaattgcaatgtttatctgttttatataaacaagttaatttagcaaaattgcctcaagtcatggaaattaacgattaa

SEQ ID NO: 124824 - protein, 288 aa, Onion yellows phytoplasma OY-M
MNIPTKPKSILSIQSHVVYGYVGNKEAVYPLQNMNFDVWPINTVQFSNHTGYQKWQGQIFNKQNIVDLVEGLFALGVEKQCQAILTGYMGSLDICEAVLEIVARFKRTNPDILYLCDPVMGNNRCFVKPEITSFFKNNLQADIITPNQFEAEFLSGIKINNVSDAIKVAKHFHNLGVKIVIITGINFQDEKYFQVFASNATKKYLVQAHNKEKNIDIAGTGDLFASLFLGFYLKYERNIKNALAHAVFYLNKVVQNTLLSQQKELQCLSVLYKQVNLAKLPQVMEIND

SEQ ID NO: 124825 - DNA, 915 bp, Drosophila melanogaster
  CDS (1)..(915)
atggcaggtgcaacaaatgcggacatcaagcgggttctatccatccagagccatgtggtccacggctatgtgggaaacaaggtggccacctatccactgcagctgctgggtttcgatgtggatccactgaactcggtccagttctccaatcatacgggctacaagacctttaagggtcccgtctccaatgaaaaggaattagccaccattttcgagggtctggaggagaacgagctgctgccattgtactcacacctcttgaccggctacattggaaatccattgttcctacgccaggtgggccacattctcaagaagctgcgtcaggctaatcctggcctggtgtacgtctgtgatccggttatgggtgacaatggtcagctctatgtgcccaaggagctcttgcccgtgtatcgggacgagatcattccactagcggacatcatcactcccaatcaattcgaagtggagctgctcacggaaaaggaggtacgcagcgaggcggctgtttgggaggcaatggagtggttccatcagcgtggcatcaagactgtggtcatttccagcagtgatcttggccagcctggcgttctgcgtgctttccttagccagcagaatggtccccgcctggccattgatattccgaagcagggtggcaaggatttggtcttcactggcaccggcgatctcttcgcctcccttttcctggcccacagtcatggcagcaaggatatagccaatgttttcgagaaaaccatcgccagtttgcaggcggtgatcaagcgaactgtggcttcgctgcccaacggtggaaacggcccagtcaaagcagccgaacgggaactaaagctggtgcagtccaagacggaaattgaacagccccaggtgctcctcaaagcgcagcgacttaactag

SEQ ID NO: 124826 - protein, 304 aa, Drosophila melanogaster
MAGATNADIKRVLSIQSHVVHGYVGNKVATYPLQLLGFDVDPLNSVQFSNHTGYKTFKGPVSNEKELATIFEGLEENELLPLYSHLLTGYIGNPLFLRQVGHILKKLRQANPGLVYVCDPVMGDNGQLYVPKELLPVYRDEIIPLADIITPNQFEVELLTEKEVRSEAAVWEAMEWFHQRGIKTVVISSSDLGQPGVLRAFLSQQNGPRLAIDIPKQGGKDLVFTGTGDLFASLFLAHSHGSKDIANVFEKTIASLQAVIKRTVASLPNGGNGPVKAAERELKLVQSKTEIEQPQVLLKAQRLN

SEQ ID NO: 124827 - DNA, 891 bp, Nasonia vitripennis
  CDS (1)..(891)
atgaacggcgtaaacacgcctcgggttctctccatccagagccatgtcgtctcgggatacgtcgggaacaaaagtgctacttttccgctgcagcttctgggattcgaggtcgatgtgattaactcagtccagttgtctaatcatactgggtacaaggtttttaagggacaagtcttaaacgatgaagacctaagtcaactgatagatggattggctgaaaataacctggacaactatacccacttgttgaccggatatgtgggttctgcatcatttttgaggaggatagctcaagttgttaaaaatctgaagcagaaaaatccaaaactcgtttacgcttgtgatccagtcatgggagacaatggaaaaatgtatgttcctgctgaactgaaggacatttacaaaactgaaattgttcctcttgcagacattttaacaccaaatcattttgaactagaactcttgctgggtaagaaaattaagacaatgtctgaactaaaagatggaattcaagaacttcataaaatgggaccaaaaactgtagccatatcatctacggatatcgatgaaaaattaacgtcgatcgtgagcacggcgaaggataacaaggtgataaaaatcgatgtgccagtcatcccagctgtttacacaggttcaggcgacttatttgcggcactattcctggctcactcttacttggaagataacgtgaaaacagcttttgaaaatacgataaactcattgcacgacgttcttctcaagacttacgagcattctttgggactggaggatgagaatttacagagggcaaggaaaattgaactccgattggttcaaagtaaaaagcttatcgaaaatccttcaaaaaaattgctggccaaagatttttaa

SEQ ID NO: 124828 - protein, 296 aa, Nasonia vitripennis
MNGVNTPRVLSIQSHVVSGYVGNKSATFPLQLLGFEVDVINSVQLSNHTGYKVFKGQVLNDEDLSQLIDGLAENNLDNYTHLLTGYVGSASFLRRIAQVVKNLKQKNPKLVYACDPVMGDNGKMYVPAELKDIYKTEIVPLADILTPNHFELELLLGKKIKTMSELKDGIQELHKMGPKTVAISSTDIDEKLTSIVSTAKDNKVIKIDVPVIPAVYTGSGDLFAALFLAHSYLEDNVKTAFENTINSLHDVLLKTYEHSLGLEDENLQRARKIELRLVQSKKLIENPSKKLLAKDF

SEQ ID NO: 124829 - DNA, 1059 bp, Gibberella zeae PH-1
  CDS (1)..(1059)
atgtctgccattcctaccataccggatacgcgggttctcgcggtagcaagccatgttgtctctggttacgtgggtaacaagattgccgtctttgtgctgcagtctctaggatgcgatgtcgcagccctgaacacagttcaattcagcaaccataccggatacaggcaatggaagggaacgagagtctcggcacaagagattacggacttgtgggatggactgaagcagtcgtacctggatgactttgacgtgatgctttccggttacatcccaggtgctgaagccgttgatgccgttggcaagataggccgagagcttaaggacaagtccaaggatacgccgggcaagttcttctgggctctcgatcctgtcatgggcgacaatggaaagatctacgtctctccagaagttgtgcccgcttacaagagactcatccatgatgctgatctcatccttccgaaccagttcgaggccgagttgctctcagaggtcaagatcaacgatatggacagcctccgaaaggctatacaggttctccacgacaagtacaaagttcctcacgtcgtcattacatcggtcaatctcgaggcaccagatcatcctccatcgcacctttcagtggttggttcaaccatgacatccaccggccaagcgcgcttcttcaagatcgtcttcccatcaatcgactgctatttcagcggaacgggcgacatgtttggcgccctcatggtcatccgcatgcgcgaggccgttttcaacgccaacgaacatctgcgccacacaaccagctggcttagcgatgacgctgtgtctgccattgagctcccgcttgctcgcgcagcggaaaaagtcctaggcagcatgcatgaggttctgtccaagacttgcgagggtatgaagaaggttgttgagcgcacgacgggtgatatgaaggctgaggatcgagaaaacgatacaaaggtgcatctcgtgaaaagtaaggccgctgagttgcagctagtgaggaacctggactgtttgaggacgccagtgacacaatatcaggcgaaggccatgtag

SEQ ID NO: 124830 - protein, 352 aa, Gibberella zeae PH-1
MSAIPTIPDTRVLAVASHVVSGYVGNKIAVFVLQSLGCDVAALNTVQFSNHTGYRQWKGTRVSAQEITDLWDGLKQSYLDDFDVMLSGYIPGAEAVDAVGKIGRELKDKSKDTPGKFFWALDPVMGDNGKIYVSPEVVPAYKRLIHDADLILPNQFEAELLSEVKINDMDSLRKAIQVLHDKYKVPHVVITSVNLEAPDHPPSHLSVVGSTMTSTGQARFFKIVFPSIDCYFSGTGDMFGALMVIRMREAVFNANEHLRHTTSWLSDDAVSAIELPLARAAEKVLGSMHEVLSKTCEGMKKVVERTTGDMKAEDRENDTKVHLVKSKAAELQLVRNLDCLRTPVTQYQAKAM

SEQ ID NO: 124831 - DNA, 987 bp, Candida glabrata CBS 138
  CDS (1)..(987)
atggataaggttcgcagtgtgctggcaacacagtcacacgttgttcatggatacgttggtaacaaagcagcaactttccctttgcaatgtttgggatgggatgtagactgctgtaacagcgtgcagttctcaaaccacaccggctatggtatggataaagtttttggatcagccacaagtgaaaacgatcttgatgaaatactgaagggactcatgaagaatttcccagcaggctatgacgctctactatccggttacttacctaatgctatgtctgttcgtcgtgttggggagaactatagtagatataagaaagagaatcccggtacaatttggctgctcgatccagtaatgggagatgagggcgaactgtatgtaaatgaggatgtggttccagagtacaagaaactagcactaagtgaggataacttggttgatattatcactccaaaccagtttgaaatggagatactatatggccagcccatcaactcacaagaagagcttctcactgcactgcgagaactacataaatacatcccagttattgttgtaacatcctgcaattctaaactgttcaacgatgatgattcaatctattgtgtagcatcaatgagggattcatccgcatacgccttcagaattccactaataaagtcatactttacaggtgttggcgaccttttttcggcactattacttgatagagtgtataaactacttgacaacgaggactccacaacaaacttgacattaaaggaccaaatcaacagcgtccttaacgttatacaaaacgttctaaaggtcacaaaacatatggccccaaagaacataaactctaagatgggctcatccatagatatgaaagaaatggaattacgcatcattgcctctagagacctctatgatggcaatgcatacttcgatggttcaatccactacgaaaaatcagatattgattactcatttttaacacttagaccctag

SEQ ID NO: 124832 - protein, 328 aa, Candida glabrata CBS 138
MDKVRSVLATQSHVVHGYVGNKAATFPLQCLGWDVDCCNSVQFSNHTGYGMDKVFGSATSENDLDEILKGLMKNFPAGYDALLSGYLPNAMSVRRVGENYSRYKKENPGTIWLLDPVMGDEGELYVNEDVVPEYKKLALSEDNLVDIITPNQFEMEILYGQPINSQEELLTALRELHKYIPVIVVTSCNSKLFNDDDSIYCVASMRDSSAYAFRIPLIKSYFTGVGDLFSALLLDRVYKLLDNEDSTTNLTLKDQINSVLNVIQNVLKVTKHMAPKNINSKMGSSIDMKEMELRIIASRDLYDGNAYFDGSIHYEKSDIDYSFLTLRP

SEQ ID NO: 124833 - DNA, 939 bp, Kluyveromyces lactis NRRL Y-1140
  CDS (1)..(939)
atgcctagagttctagcatgtcaatcgcatgtggttcacgggtatgtggggaataaagcggcaacgtttcccttacaatgtgtcgggtgggacgtagactgtgttaatagtgttcaattttccaatcatactggatatgggatggataaagtattcgggtcgaaggctgacgcacaccagttaacgcaggtgttcgaaggtgttatgaggttaaaagacgattacaatgcattgctttctgggtatatgccaaataggaacacattggcttgtatggctcgattttataaagaaattaaaaggcacaacccaaatctactatggttgttggaccctgtcatgggtgatgaaggccaattgtacgtggatgaggatgtaataccggaatatcaagatattattcactccggacttgtagatatcataactcctaaccaattcgagatggaattgctatatgggaagcccatcgttaacatttctgatttgtattcggccatccaagagattcaccagtttgtgcccgtgattgtaataacgtcatgctcagcttcgcttttcgatgatccaactcacatatattcggtgtcttcgctgcgaggctcgccacaaccatatgtgtatagagtatcagtcattgagtcttatttcaccggagttggagatatgttcagtgcaatgctactacatcagttgtattacatgttcgaatctaaaaatattagccttttccacgagaaaaccaatgttgttctcaacgtcattcatagggtcttagagatcaccaaacgactctctgctaacgtaaagggttccataggagatccagttacgatgagagaaatggaacttagagtcatagaaagcatcgattgttacgaatgtaattcaatagataaggacttctctttcaagtacgactggactttgtgcagttaa

SEQ ID NO: 124834 - protein, 312 aa, Kluyveromyces lactis NRRL Y-1140
MPRVLACQSHVVHGYVGNKAATFPLQCVGWDVDCVNSVQFSNHTGYGMDKVFGSKADAHQLTQVFEGVMRLKDDYNALLSGYMPNRNTLACMARFYKEIKRHNPNLLWLLDPVMGDEGQLYVDEDVIPEYQDIIHSGLVDIITPNQFEMELLYGKPIVNISDLYSAIQEIHQFVPVIVITSCSASLFDDPTHIYSVSSLRGSPQPYVYRVSVIESYFTGVGDMFSAMLLHQLYYMFESKNISLFHEKTNVVLNVIHRVLEITKRLSANVKGSIGDPVTMREMELRVIESIDCYECNSIDKDFSFKYDWTLCS

SEQ ID NO: 124835 - DNA, 969 bp, Debaryomyces hansenii CBS767
  CDS (1)..(969)
atgaagtcggtgttatcgatacagtcacacgtgtctcacggatatgtgggtggaagagcggccatatttccactacagtgtcagggctgggaggtcgatagtatcaatactgtgaacttttcgaatcatactggatatggttcagtaagaggctcaagtattaacgaagctgatttggtcgatatttttaaagggttgaataatattcaagtatcgtacgatgcgataatcactggatatataccaaatgcatcattgattgctgtgacaaacgaaaatatcaagtcgttaaaattgaacaatgataatttattatacttattagatccggtcatgggagaccagggttttttatatgtggatgaatcatgtgttgatgagtacaaaaagatattggaggatcgtcttgtagatattattactccaaatcaatttgaattggagttgttggtaggctttaaggttaaaaatgaaagtgatctaaaccttgcaataaaccatttgcattcaaaattcaacattaagtatgtcgtgatatcgagcttgacagacataaataagagttccgaggatttaatatattgcgctatctccaccatgggtgaagagaaaatacaaatattcagtattcccgtgattaattcatatttcacaggtgttggcgatttatttagtgctttattgttggataagctttacaacagttttcggtgtcatgaatcaaagctgccaagtttatcgaaagcagttagccaagttcttactataatgctgaaaactttaagcttgacccataaattgggaatcgaatcatattgcaaggataaaaatttgacaaattcaaacggagatatgcctgtaagtaaagtcaatgatgatgtaatgaaatactttgagttgaaaatcatccaatctaaggacttctttgcttatgatgggataggcgagtttaaacccgagtacttgtag

SEQ ID NO: 124836 - protein, 322 aa, Debaryomyces hansenii CBS767
MKSVLSIQSHVSHGYVGGRAAIFPLQCQGWEVDSINTVNFSNHTGYGSVRGSSINEADLVDIFKGLNNIQVSYDAIITGYIPNASLIAVTNENIKSLKLNNDNLLYLLDPVMGDQGFLYVDESCVDEYKKILEDRLVDIITPNQFELELLVGFKVKNESDLNLAINHLHSKFNIKYVVISSLTDINKSSEDLIYCAISTMGEEKIQIFSIPVINSYFTGVGDLFSALLLDKLYNSFRCHESKLPSLSKAVSQVLTIMLKTLSLTHKLGIESYCKDKNLTNSNGDMPVSKVNDDVMKYFELKIIQSKDFFAYDGIGEFKPEYL

SEQ ID NO: 124837 - DNA, 891 bp, Apis mellifera
  CDS (1)..(891)
atgtcagaaacaccacggattctttcgatacaaagtcatgtagtgtctggttacgttggtaataaaagtgcaatatttcctttgcacttattaggctttgaggcagatgcaattaattctgttcaactttctaatcatactggatataatatttttcgaggtcaagtattgaatgataaagatttaggagatttaatagaggggttagcagaaaataatttgattaattatacacatttacttactggatatgttggctctgcatcattcttaagaaaaatagcagaagttgttcgtatgttaaaacgtaaaaatcctaaactcatatatgtatgtgatcctgttatgggtgataatggaaaattatatgttcctgaaacattggaagaaatttatagaaaagaaataatatcattagcagatattatagtaccaaatcaatttgaattagaattaataagtaatataaaaatcaatacaatgtccgatttagaaaatgctataaaaaaagtacataaaatgggtcctcaaacagtagcaatttcatcaacagaaattaataataaattaacaacaataattagcacaaataaagataataaattaataaaaattgatgttccaaaaataccaagtacattcacaggttctggagatctttttgctgctctatttttagctcatacatatttacaagatgatatgaaaattgctattgaaaaaactgtaaatagtttatataatatcttactcaaaacttatgaatattctcaagcatgtcaaaataaagaatatgagcctgtgagaaaaattgaattacgtttaatacaaaacaagaattgcattgaaaatccagaaattaatttttttgctgaaccacttatattataa

SEQ ID NO: 124838 - protein, 296 aa, Apis mellifera
MSETPRILSIQSHVVSGYVGNKSAIFPLHLLGFEADAINSVQLSNHTGYNIFRGQVLNDKDLGDLIEGLAENNLINYTHLLTGYVGSASFLRKIAEVVRMLKRKNPKLIYVCDPVMGDNGKLYVPETLEEIYRKEIISLADIIVPNQFELELISNIKINTMSDLENAIKKVHKMGPQTVAISSTEINNKLTTIISTNKDNKLIKIDVPKIPSTFTGSGDLFAALFLAHTYLQDDMKIAIEKTVNSLYNILLKTYEYSQACQNKEYEPVRKIELRLIQNKNCIENPEINFFAEPLIL

SEQ ID NO: 124839 - DNA, 885 bp, Tribolium castaneum
  CDS (1)..(885)
atgtccgaaagtccgcgcgtcctctcaatccaaagtcacgtcgtttcaggttatgttgggaacaaaagtgcaacttttccccttcaacttttgggctttgaagtggattttatcaattcagtccagttttgcaaccacactggttacaaaaaggtagccggtcaagtcttgactgagaaggatttggacgatttggctttgggacttgaggcgaacaatttggacttgtacagccaccttttgacgggctatattggagctgcaagttttctgacgaggatatgtgccttggtcaaacacttgaaggatgtcaacccatccctgacgtatgtttgcgaccctgtgatgggcgacaatgggcggatgtacgtcccagccgacttgctcccaatttacaagagcagtattttaccattggctgacataatcacaccgaatcagtacgaagtggagctgctcactgatatgaagatcaacaatgtggaagaggcttggaaggctgtggattttttgcacagcaagggccccaaaatcgtcgttgtctcgtccacagaattgggaaataacgaacacttattggctttagcgagcaagagacagggaaatagttgtgaaaaggttactataagggttccgaaattatctggctcgtttaccgggactggggatttatttgccgcgttatttttagcctggatgcacaaaactggaaataacttgaaggaatcgctggagaagaccgtgtcgacacttcaggccgttctgaaacgtacgattgagagtgcaaggggcgaagtcaccccaagggctaaagaattgaagttgattcaaagtaagaaagatattgagaatccgacgattgttgcgtcagctagtgttgtttga

SEQ ID NO: 124840 - protein, 294 aa, Tribolium castaneum
MSESPRVLSIQSHVVSGYVGNKSATFPLQLLGFEVDFINSVQFCNHTGYKKVAGQVLTEKDLDDLALGLEANNLDLYSHLLTGYIGAASFLTRICALVKHLKDVNPSLTYVCDPVMGDNGRMYVPADLLPIYKSSILPLADIITPNQYEVELLTDMKINNVEEAWKAVDFLHSKGPKIVVVSSTELGNNEHLLALASKRQGNSCEKVTIRVPKLSGSFTGTGDLFAALFLAWMHKTGNNLKESLEKTVSTLQAVLKRTIESARGEVTPRAKELKLIQSKKDIENPTIVASASVV

SEQ ID NO: 124841 - DNA, 861 bp, Burkholderia vietnamiensis G4
  CDS (1)..(861): transl_table=11
atgaaaaacgtcctcagcattcagtcgcacgtgatctacggacatgccggcaacagcgcggccgtgtttccgatgcaacggctcggcgtcaacgtctggccgctcaacaccgtccagctgtccaaccacatgcagtacgggcactgggccggcagcgcgatcgacgccgcgaagatggagcagctggtcgacggcgtcgccgcgatcggcggcctgaagcgctgcgacgcggtgctgtccggcttcgtcggctcgccggcgcaggcgcgcgccacggtcgagatcgtgcgcacggtgaaggcgatgaacccgaacgcgtggtacttctgcgatccggcgttgggccagaccggcggaatccggcccgagcccggcgtcgaggaatacatcgtcgacgagatgccggcgctcgccgacggcatgtcgccgaaccacaccgagctgcagaagctcgcggggcggcgcatcgagacggtcgccgaagccgtggacgcgtgccgcgccctgatccgccgcggcccgaagctcattctcgtcaagcacctgcacgaccgtaacagcccggccgaccgcttcaacatgctggccgtcaccgaaaccgaagcatggatcggccagcgtccgctctatgcgtttccgcgccatccggtcggcgtgggcgacctcaccagcgcgatcttcgtcgcgcgccggctgcgcggcgattccgtgcgcggcgcgttcgagcacacgctcgcggccgtgcacgcggtggtcaaggcgacctacgacgcacgccgctacgagctcgagctcgtcgccgcccaggatgaaatcgcgcggccgagcgagtggttcggcgcgtgggtgaccgacgcctga

SEQ ID NO: 124842 - protein, 286 aa, Burkholderia vietnamiensis G4
MKNVLSIQSHVIYGHAGNSAAVFPMQRLGVNVWPLNTVQLSNHMQYGHWAGSAIDAAKMEQLVDGVAAIGGLKRCDAVLSGFVGSPAQARATVEIVRTVKAMNPNAWYFCDPALGQTGGIRPEPGVEEYIVDEMPALADGMSPNHTELQKLAGRRIETVAEAVDACRALIRRGPKLILVKHLHDRNSPADRFNMLAVTETEAWIGQRPLYAFPRHPVGVGDLTSAIFVARRLRGDSVRGAFEHTLAAVHAVVKATYDARRYELELVAAQDEIARPSEWFGAWVTDA

SEQ ID NO: 124843 - DNA, 867 bp, Pseudomonas aeruginosa UCBPP-PA14
  CDS (1)..(867): transl_table=11
atgccacgtacgccccacctgctcgccatccagtcccatgtggtcttcggccacgccggcaatgccgcggcggtgttcccgatgcagcgcatcggaatcaacgtctggccgttgaacacggtgcaattctccaaccacacccagtacggtcaatggaccgggcaggtgctgccgccggagcagattccggctctggtggacggtattgccggcatcggcgaactgggcaactgcgacgcagtgctgtccggatatctcggcagcgccgcccagggccgcgccattctcgacgtggtggcacggatcaaacaggccaaccctcgggcgttgtacctctgcgacccggtcatgggccacccggaaaaaggctgcatcgtggccccggaagtcagcgacttcctgctggaagaagccgccgcggtcgccgactacctgtgccccaaccagttggagctggacagcttctgcgaccgccagccgaactccctcgccgactgcgtggaaatggcacggagcctgctggcacgcggtcccagggcaatcctggtaaagcacctgaactatccgggcaaggccggcgacaccttcgagatgctgctggtggccgccgatcaggcctggcacctgcaacgcccgctgctggccttcccgcggcaaccggtcggagtcggcgacctggcctcggggctgttcctctctcgcctgctgctcggcgacgacttgcgtaacgccttcgaattcgccggcgccgcggtccatgaagtgctgctggaaacccaggcctgcggcagctacgagctagagctggtgcgggcgcaggatcggatcgcacacccaagggttcgtttcgacgcagtgcgcctttag

SEQ ID NO: 124844 - protein, 288 aa, Pseudomonas aeruginosa UCBPP-PA14
MPRTPHLLAIQSHVVFGHAGNAAAVFPMQRIGINVWPLNTVQFSNHTQYGQWTGQVLPPEQIPALVDGIAGIGELGNCDAVLSGYLGSAAQGRAILDVVARIKQANPRALYLCDPVMGHPEKGCIVAPEVSDFLLEEAAAVADYLCPNQLELDSFCDRQPNSLADCVEMARSLLARGPRAILVKHLNYPGKAGDTFEMLLVAADQAWHLQRPLLAFPRQPVGVGDLASGLFLSRLLLGDDLRNAFEFAGAAVHEVLLETQACGSYELELVRAQDRIAHPRVRFDAVRL

SEQ ID NO: 124845 - DNA, 882 bp, Nocardioides sp. JS614
  CDS (1)..(882): transl_table=11
gtggggcggccggtgcgacacactgcacgggtgcagatcctctccatccagtcctcggtggcctacggccacgtgggcaactcggcggcggtgttcccgctgcagcgcctgggccacgaggtctggccggtgctgaccgtgcacttctccaaccacaccgggtacggcgcgtggcgcgggccgctgctcggccccgaggacgtccgcgcggtgatcgcgggcatcgacgaccgcggtgcgctggcgggcgtcgacgcggtgctgtccggctaccagggtgacccggcggtcggcggcgtgatcctggacgcggtcgcccgggtcaaggagctgaacccggacgcggtctactgctgcgacccggtcatgggcgacgtgggccgcgggatgttcgtccggccggggatcccggagttcctgcgcgacaccgtcgtgccgcacgccgacatcctcacgcccaaccacttcgagctggacttcctgaccggtcgggagacccgcacgctggccgcgatcgttgcggccgtggacgagctgcgggaacgcggcccgcgcgaggtgctggtcaccagcgtggtgcacggtgaggtgcccgaggggcgcatcgacgtggtcgcggtctccgacgagggcgcctgggccgtcgagaccccgctgctgccgatcgtcccgaacgggtgcggcgacgtgaccgccgcgctgtacctcgcccacctgcgcaccacgggctcggcgccgaccgccctcgcccggaccaccgcgtcggtgttcgcgatcctcgaggagacgatcgcggccgggacccgggagatccagctggtcgccgcccaggaggcgatcgcgcacccgccgagccggttcgaggtacgccgcctccgctga

SEQ ID NO: 124846 - protein, 293 aa, Nocardioides sp. JS614
MGRPVRHTARVQILSIQSSVAYGHVGNSAAVFPLQRLGHEVWPVLTVHFSNHTGYGAWRGPLLGPEDVRAVIAGIDDRGALAGVDAVLSGYQGDPAVGGVILDAVARVKELNPDAVYCCDPVMGDVGRGMFVRPGIPEFLRDTVVPHADILTPNHFELDFLTGRETRTLAAIVAAVDELRERGPREVLVTSVVHGEVPEGRIDVVAVSDEGAWAVETPLLPIVPNGCGDVTAALYLAHLRTTGSAPTALARTTASVFAILEETIAAGTREIQLVAAQEAIAHPPSRFEVRRLR

SEQ ID NO: 124847 - DNA, 876 bp, Magnetospirillum magnetotacticum MS-1
  CDS (1)..(876): transl_table=11
ttgatcgtctataccggctttgacatgaagattctttctttccaatcggcggtgaccttcggccatgtgggcaattccgccgccctcttcgcggtgcagcgcctggggctggacgcctgcccggtggacacggtgcagttctccaaccatcccggctatggggcatggcggggcggtgcccattccaccgacggtctgcgcgacatcgtcgaaggccttgacggagccgggctgctgcaagagtgcggcgcggtgctgtcgggctatctgggccgggccgaaaccggcgaggtggtggccgaggcggtgcggcgcctgcgtcattaccgcccggccaccccctatctctgcgacccggtgatgggcgacgagggcggcgggctttacgtggccgaggggattccgcaagtcttcgcccagacccttctgcccttggccgacatcgccacgcccaatcgcttcgagcttggcatactgaccggtcggtctgttgagaccatcggggatgccctggcggcgtcgcgccagttgatggcgcggggaacgagggcggtggtgaccaccagccttcccgccggagacggcatgatctgctgcctggcggtcgatgtccggggggcctggatggtgcgcactccgctgctgagcttcaatacgccgcccaatggcggcggcgacactttgtcggcgctgctgctggggcatgtgctgaaggggcgagatctgcccgaggccctgtcaaaggcggtctccagtctgttcggcgtgctggagttgacccaaagcaccgggggacgggaactggccctggtggcggggcagggcgagatcacacaaccctcgcggattttcccgcccatgccggtcggagcctaa

SEQ ID NO: 124848 - protein, 291 aa, Magnetospirillum magnetotacticum MS-1
MIVYTGFDMKILSFQSAVTFGHVGNSAALFAVQRLGLDACPVDTVQFSNHPGYGAWRGGAHSTDGLRDIVEGLDGAGLLQECGAVLSGYLGRAETGEVVAEAVRRLRHYRPATPYLCDPVMGDEGGGLYVAEGIPQVFAQTLLPLADIATPNRFELGILTGRSVETIGDALAASRQLMARGTRAVVTTSLPAGDGMICCLAVDVRGAWMVRTPLLSFNTPPNGGGDTLSALLLGHVLKGRDLPEALSKAVSSLFGVLELTQSTGGRELALVAGQGEITQPSRIFPPMPVGA

SEQ ID NO: 124849 - DNA, 867 bp, Haemophilus influenzae R2866
  CDS (1)..(867): transl_table=11
atgaaaaacgtactttcaatccaatcccatgtggtctatggttttgcaggtaacaaatccgcgacttttccaatgcagttgttaggcgtagatgtatgggcattaaataccgttcaattttctaatcatactcaatatggaaaatggacaggcatggtcattccacaagaacaaatccgagaaattgtaactggactcgataatattgaaaaactacaagaatgtgatgccttgttatctggttacttaggttctgcggaacaagtcgatcaaattctttttgctttagagcaaatcaaactgcgtaatccaaatgcgctttatttatgcgaccctgtaatgccacatccgaaaaaaagctgcgtagttgccaatggtgtttgcgaagcacttattgaaaaagcgattccagtggcagacattatgacgccaaacttgcatgaattgcgtcagctcacagaattcccaattaatacctttgatgatgtgttaaaagcagtgaatgcgctgattgcaaaaggcgtgaagaaagttctcgttaaacatttaggcagtgcaggtaaaattaacgatcctgatacatttgaaattattatggcaaccccagagggggtttggcatttaagccgtccactttatcaattcaattttgaaccagtgggcgtgggcgatttaatcgcagggacattcttagcaaatttactcaatggaaaatctgacgtagaagcctttgaagccatgaataacgaagtagcaggcgtaatgaaaaccacctttgaattgggttcttacgaattacaaaccattgccgcacgttttgaaatcctcaatccaagcagcaattataaagctgaaaaagttgcctaa

SEQ ID NO: 124850 - protein, 288 aa, Haemophilus influenzae R2866
MKNVLSIQSHVVYGFAGNKSATFPMQLLGVDVWALNTVQFSNHTQYGKWTGMVIPQEQIREIVTGLDNIEKLQECDALLSGYLGSAEQVDQILFALEQIKLRNPNALYLCDPVMPHPKKSCVVANGVCEALIEKAIPVADIMTPNLHELRQLTEFPINTFDDVLKAVNALIAKGVKKVLVKHLGSAGKINDPDTFEIIMATPEGVWHLSRPLYQFNFEPVGVGDLIAGTFLANLLNGKSDVEAFEAMNNEVAGVMKTTFELGSYELQTIAARFEILNPSSNYKAEKVA

SEQ ID NO: 124851 - DNA, 852 bp, Kineococcus radiotolerans SRS30216
  CDS (1)..(852): transl_table=11
atgaaggtcctctcgatccagtcggcggtggcccacggccacgtcggcaactccgcggccgtgttccccctccagcgcatcggggtcgaggtcgtccccgtccacacggtcaacttctccaaccacaccggctacgggtcgtggcggggaccggtcatggcggcttccgacgtcgccgacgtcatcgccggggtggaggaacgcggggtcttccccgagatcgacgtcgtgctgtccgggtaccagggcggcaccggcatcggcgacgtgatcgtggacaccgtccgccgcgtcaaggccgccaacccctccgcggtctacgcctgcgacccggtgatgggcaacgcgaagtccggctgcttcgtcgcccccgagatcccgcacctgctgcgcgaccgggtcgtgcccgtcgccgacctcatcaccccgaaccagttcgagctggggttcctcaccgggaccgacccctcgacgatcgagtcgacgctggcctccgccgacgccgcccgcgcgatgggcccctcgacggtgctcgtcaccagcgtcgagcgccccgaccgcgaggacgggacgatcgagatgctcgtggtcgaggacgccggggcgtgggtcgtgcagacccccctgctgccgttcaaggccaacgggtccggcgacgtcaccgccgcgctgttctccgcccaccaccgcgagaccggcgacgccgcgctcgccctggagcggaccgcctccagcgtcttcgacctcatcgaggcgacccaccgctccgggcagcgggaactgcgcatcgtgcaggcgcaggagtccttcgcgaacccgcggatgcagttcagcgcccggcgcgtgcgctga

SEQ ID NO: 124852 - protein, 283 aa, Kineococcus radiotolerans SRS30216
MKVLSIQSAVAHGHVGNSAAVFPLQRIGVEVVPVHTVNFSNHTGYGSWRGPVMAASDVADVIAGVEERGVFPEIDVVLSGYQGGTGIGDVIVDTVRRVKAANPSAVYACDPVMGNAKSGCFVAPEIPHLLRDRVVPVADLITPNQFELGFLTGTDPSTIESTLASADAARAMGPSTVLVTSVERPDREDGTIEMLVVEDAGAWVVQTPLLPFKANGSGDVTAALFSAHHRETGDAALALERTASSVFDLIEATHRSGQRELRIVQAQESFANPRMQFSARRVR

SEQ ID NO: 124853 - DNA, 858 bp, Photobacterium sp. SKA34
  CDS (1)..(858): transl_table=11
atgaaaggtattctatctattcaatcacatgttgtgtatgggcacgcaggaaatagctctgctgtttttccaatgcaacgtatgggatttgaagtatggccacttaatactgtgcaattttctaatcacacccaatataaagaaggctggacaggcaaagcattctctggtgatgatattaatgagcttgttgcaggtattgaaggcattgatcaattaaagaactgcgaagcagtactgactggttatcaaggtagtgcagcacaatgtcttgctattatcgataccgtgaaaaaggttaagcagcaaaaccctaatgcaatttatatctgtgatcctgttatgggtgacccagaaaaaggctgtattgttgcagatggtatcgctgaatacctgattaatgatgtaatgcctattgctgatgctatcgtgccaaatcaattcgaactaagccaatttgtcggcatggaaatcaatagccttgctgatgctgttactgcatgtcaaaaagccttaacaatggggcctaaaatggtacttgttaagcacttacacagtatatctgatgataagtttacgatgatgctagcaactcaaaatggttgtttccttgcgcaacgtccacatcttaagtttgataaacaacctgttggtgtgggtgatttgatctcatcattatttactgcagggctattgaaaggctgggcaccagaacaggcttttgaacatgcacataatgcttgctacgcggtgttaaaagaaacacataaacgtggcgaatgggaattacaaaccattgcagcacaagatgaaattgtatcaccaagtgaaatttttccggtcagtgaaattaactaa

SEQ ID NO: 124854 - protein, 285 aa, Photobacterium sp. SKA34
MKGILSIQSHVVYGHAGNSSAVFPMQRMGFEVWPLNTVQFSNHTQYKEGWTGKAFSGDDINELVAGIEGIDQLKNCEAVLTGYQGSAAQCLAIIDTVKKVKQQNPNAIYICDPVMGDPEKGCIVADGIAEYLINDVMPIADAIVPNQFELSQFVGMEINSLADAVTACQKALTMGPKMVLVKHLHSISDDKFTMMLATQNGCFLAQRPHLKFDKQPVGVGDLISSLFTAGLLKGWAPEQAFEHAHNACYAVLKETHKRGEWELQTIAAQDEIVSPSEIFPVSEIN

SEQ ID NO: 124855 - DNA, 849 bp, Xanthobacter autotrophicus Py2
  CDS (1)..(849): transl_table=11
atgaatctcctctccatccagtcccatgtcgcctacggccatgtgggcaatgcctccgccgtatttccgctccagcggctcggggtggaggtgtgggccatcaacaccgtgcagttctccaatcacaccggctacggggcgtggcgcgggcaggtgttcgaggcggcggtcatcggcgagctggtggagggcatcaccgagcgcggggtgctgccgcgctgcgacggcgtgctctccggctacatgggctcggcggacatcggcgccgccatcctcgacgcggtggcgcgggtgaaggcggccaaccgcaatgccgcctattgctgcgacccggtgatcggcgacgttgggcgcggcatcttcgtgcgccccggcatccccgaactgatgcgcgatctcgcggtgccggcggcggacgtgatcacccccaaccagttcgagctggagctgctctcgggccgcgcctgcgcctatatcgacgatgcgatcgcggcttgcgacgccctccacgcccggggtccgaaggtgattctcgtcaccagcctcaacgtggcggagaccccgcccgattgcatcgacctgatcgcctcggggccggacgggcgcttcctggtgcgcacgccgcgcctcgcagtctcgctcaacggggcgggggatgccatcgccgccctgttcttcttccacgtccagcgcacgggatcgaccgccgaggcggtttccgccgccgcatcctccatttacggggtgctggagcggacggaaaaagcacagtctcgggaattgctgctggtggaggcccaggacgagttcgtgcggccctcccggctctttcccgcctcggtgatctga

SEQ ID NO: 124856 - protein, 282 aa, Xanthobacter autotrophicus Py2
MNLLSIQSHVAYGHVGNASAVFPLQRLGVEVWAINTVQFSNHTGYGAWRGQVFEAAVIGELVEGITERGVLPRCDGVLSGYMGSADIGAAILDAVARVKAANRNAAYCCDPVIGDVGRGIFVRPGIPELMRDLAVPAADVITPNQFELELLSGRACAYIDDAIAACDALHARGPKVILVTSLNVAETPPDCIDLIASGPDGRFLVRTPRLAVSLNGAGDAIAALFFFHVQRTGSTAEAVSAAASSIYGVLERTEKAQSRELLLVEAQDEFVRPSRLFPASVI

SEQ ID NO: 124857 - DNA, 861 bp, Rickettsiella grylli
  CDS (1)..(861): transl_table=11
atgaatattttatccattcaatcacatgtgagttacggctatgtgggaaataaagctgctacatttcctttacaagccttaggctttgaagtctggcctgttaacaccgttcaattttcaaaccatactggctatggtcattggcaaggaaatatctgcacagcaaagcaaatacgtgccattattcaaggtttaatcgacttagatcacgcaaaacaatgtgacgccattttatcgggctatcttggcgataaggaaattggcgctgttatcgttgatacggtacgtcaatttcaacgcgttaatcctcagctgatttatctctgcgaccctgtcatggcaacacccaatgggaaagcgtgttttgttaaaccggatattcctgacttctttcgtaccgaatgtttagacgtcgccaacatcatcacgcccaatcatttcgaaacagaatatttatatggtaaaaaaataaatactttacatgaactgaagcaagccgcgaattttttccatcaaaaaggaatacgtattgtcgtcataaccagcttgaatttaaaaaaagaaaataatttgatggataattatgctttcctttcaagtcctcagggccagtttattgcaacccgttcttctccaaagagtcccaggattatcaatggaactggcgatcttttttcagccctttatttaggctatttcttattaaataacaatgcactcactgcgttccaatgtgcattaaataaaacgcatcaggttgttcaggcaacacagattgcacattgccgggagttaaaaattattcatactgattataaacaagtttccccaaattatgttatgctacggcaaatagaataa

SEQ ID NO: 124858 - protein, 286 aa, Rickettsiella grylli
MNILSIQSHVSYGYVGNKAATFPLQALGFEVWPVNTVQFSNHTGYGHWQGNICTAKQIRAIIQGLIDLDHAKQCDAILSGYLGDKEIGAVIVDTVRQFQRVNPQLIYLCDPVMATPNGKACFVKPDIPDFFRTECLDVANIITPNHFETEYLYGKKINTLHELKQAANFFHQKGIRIVVITSLNLKKENNLMDNYAFLSSPQGQFIATRSSPKSPRIINGTGDLFSALYLGYFLLNNNALTAFQCALNKTHQVVQATQIAHCRELKIIHTDYKQVSPNYVMLRQIE

SEQ ID NO: 124859 - DNA, 870 bp, Vibrio sp. Ex25
  CDS (1)..(870): transl_table=11
atgcaaggtatcctctctatacaatctcatgtttcttttggtcatgctggtaacagcagtgccgttttcccaatgcaacgcatgggcttcgaagtatggccgattcataccgttcaattttctaaccacacgcagtatcaagaaggttggactgggcgagcgtttgcggctgaagacatcagcgagttagtgcgtggtcttagtaacatcggtgcattggaaaagtgccaagcggtgttgacgggctaccaaggcagcgcagagcagtgccttgctgtcgaagaaaccgtgacgaaggtgaagcaagcgaacccgaaggcactgtatgtttgcgaccctgtgatgggcgcgccagacaaaggctgtattgtggcgccgggtattgcagaaaacttgttaaaccgtctgatgccaatggcagatgtgatcgtgcctaaccagttcgagctaagccaatttgcagagatggaaatccactcgttagacgatgcgatcacggcatgccaacgtgcactagcgaaaggtccaaaaatagtgctagtgaagcacctttactgcctagagaatggcagcttcaacatgttactggcaacgcaagaaggcatttacttagcgaagcgccctcagtttgagtttgtcaaacaacctgtgggtgtaggcgaccttatttcggctatcttcaccgctggattattgaagggttggtctcctaaacaagctttccaacactgccatgacgcgtgttatggggtattaagcgccacttaccatgcaggggagtgggagctgcaaactatcgcggcacagcaagagtttgttgagccaagtaagcatttctcaattgaagaggtggctctggccaccgcgtaa

SEQ ID NO: 124860 - protein, 289 aa, Vibrio sp. Ex25
MQGILSIQSHVSFGHAGNSSAVFPMQRMGFEVWPIHTVQFSNHTQYQEGWTGRAFAAEDISELVRGLSNIGALEKCQAVLTGYQGSAEQCLAVEETVTKVKQANPKALYVCDPVMGAPDKGCIVAPGIAENLLNRLMPMADVIVPNQFELSQFAEMEIHSLDDAITACQRALAKGPKIVLVKHLYCLENGSFNMLLATQEGIYLAKRPQFEFVKQPVGVGDLISAIFTAGLLKGWSPKQAFQHCHDACYGVLSATYHAGEWELQTIAAQQEFVEPSKHFSIEEVALATA

SEQ ID NO: 124861 - DNA, 987 bp, Pseudomonas putida GB-1
  CDS (1)..(987): transl_table=11
atgctccaaacaggtgtatccagcttaactgcgtccctggcctgtcgtacaggtggcaatcgcgttcatactgcgctgcgtacaatccttgaaacagctttggaaaccacccgcatgaaacgtaccccgcacctgctcgccattcagtctcatgtggtgttcggccacgccggcaacagcgccgcggtgttccccatgcagcgtatcggggtcaatgtctggccgctcaataccgtgcagttctccaatcacacacagtatggccagtgggcgggtgaagtgcttgccccggcgcaaattcctgcgttggtggaaggtatttccaacatcggcgagctgggccactgcgatgcggtgctttccggctacctgggcagtgccgaacaggggcgagcgatcctggccggcgtcgagcggatcaaggcggtgaacccaaaggctttgtacctgtgcgacccggtcatggggcacccggagaagggctgcatcgtcccgcccgaagtcagtgcgtttctgctcgaggaggcggcggccagggcggacatcctgtgccccaaccaactggagctggacagcttttgtgggcgccgcgcgcagtcactggaagattgcgtgaacatggcgcgcagcttgctgaagcgtgggccgcaggtggtggtggtcaagcacctggcctaccctgggcgcgccgaggaccagttcgaaatgctgctggtgactgccgaacacagctggcacctacgccgcccgctgctggcgtttccacgccagccggtgggggtgggtgacctcacctccggtttgttcctggcccgtgtaatgctgggcgacagctgggtgcaggcattcgagttcacggctgcagcggtgcatgaagtgctgctggaaacccaggcctgcgccagctacgaattgcagctggtgcgggctcaggaccgcattgcgcacccacgggtacgcttcgaggcgcagttgctggcgctttag

SEQ ID NO: 124862 - protein, 328 aa, Pseudomonas putida GB-1
MLQTGVSSLTASLACRTGGNRVHTALRTILETALETTRMKRTPHLLAIQSHVVFGHAGNSAAVFPMQRIGVNVWPLNTVQFSNHTQYGQWAGEVLAPAQIPALVEGISNIGELGHCDAVLSGYLGSAEQGRAILAGVERIKAVNPKALYLCDPVMGHPEKGCIVPPEVSAFLLEEAAARADILCPNQLELDSFCGRRAQSLEDCVNMARSLLKRGPQVVVVKHLAYPGRAEDQFEMLLVTAEHSWHLRRPLLAFPRQPVGVGDLTSGLFLARVMLGDSWVQAFEFTAAAVHEVLLETQACASYELQLVRAQDRIAHPRVRFEAQLLAL

SEQ ID NO: 124863 - DNA, 1005 bp, Brassica napus
  CDS (1)..(1005)
atgccattctctctgtcgacgacaaccaccactctcagatctcctaatccaaactttagatcgagaaaatcgagaatgtcgacgcctcctgttctctcgcttgctctgccttcagacactggtcgtgttcttagtatccaatctcacactgtacagggatatgttggtaacaagtcagctgtgtttcctcttcaattgttggggtatgatgtggctccaatcaactcggttcagttctccaaccatacagggtatcctacattcaaaggacaggttttgaatggtgaacaattgtgggagttgattgaaggccttgaagctaatgatttattgttctacactcacttattaacaggctatattggatctgtatcttttctgaatacaatcttggaggttatcaataagcttcgttctgtaaacccgaatcttacatatgtatgtgatccggtgatgggtgatgaaggaaagttgtatgtacctgaagaattggtgcatgtttatcgtgagaaggtagttcccctggcttctatgttgactcctaaccagtttgaggcagagaaattaacaggactaaggataaattctgaggaagatggcagagaagcttgtgctattcttcatgcagctggtccttcaaaggtggtgatcactagcattactataggaggcctgctattgcttattggaagccaccagaaagaaaaggggcagaagcctgagcaattcaagattttgatagacaaaattcctgcgtattttacgggaacaggagatctcatgactgctcttctacttggttggagtaataaataccctgacagtcttgacaaggctgccgagcttgcagtttcaacgttgcaggcgcttctgcgaaggacgcttgatgattacaaacgagctgggtatgatcccacctcaagtagcttggagattagattgatacagagccaggacgatattcgaaacccaaatgttgaactgaaagctgagagatacaggtga

SEQ ID NO: 124864 - protein, 334 aa, Brassica napus
MPFSLSTTTTTLRSPNPNFRSRKSRMSTPPVLSLALPSDTGRVLSIQSHTVQGYVGNKSAVFPLQLLGYDVAPINSVQFSNHTGYPTFKGQVLNGEQLWELIEGLEANDLLFYTHLLTGYIGSVSFLNTILEVINKLRSVNPNLTYVCDPVMGDEGKLYVPEELVHVYREKVVPLASMLTPNQFEAEKLTGLRINSEEDGREACAILHAAGPSKVVITSITIGGLLLLIGSHQKEKGQKPEQFKILIDKIPAYFTGTGDLMTALLLGWSNKYPDSLDKAAELAVSTLQALLRRTLDDYKRAGYDPTSSSLEIRLIQSQDDIRNPNVELKAERYR

SEQ ID NO: 124865 - DNA, 921 bp, Aedes aegypti
  CDS (1)..(921)
atgtcttctgttatgcatcgcgttctctcaattcaaagccatgtagtgcacggatatgttggtaacaaaagtgccgtttttccattgcaggttcttggtttcgaggtggataacatcaactcagtgcagttctcaaaccatacgggctacaccagtggattcaaaggtcaggtcctgaacgagaaggaactggctgagctatttgccggtctggtagccaatgacttgcacaaccaatatacccatctcctcacgggctacgtcggaaacccaacttttctgagagaaattgcgaatattcttaagattctgcggtccattaatccatcccttatttacgtctgcgatccggtgatgggtgatgatggcatcatgtacgtgccgaaggaactgctaccgatctaccgtgatgaaattgtacctttggcagacatcgtgaccccgaaccagttcgaagttgaactgctcacaggcaaaactatcagctcggaacaagacgcatgggatgctatcgagtggttccacaataaaggagtaaaaactgtggccatttcttcctctgagcttggtggatccaactccttgttagcacttgttagccataaggaaggtgccaagtcacaacgttgtcgtatggtaataccaaagcaaggaaacggaattcgcttcacaggcacgggggatctttttgcagctttatttttggctcactctaccttgaccaaatttgatatgtgcgccacgcttgaacgaacaattgctagtttacaagctgtcatcaccaaaaccttagaatacattcctgaggatgtgaaggccggtaagaaggaggtcacttctacacaacgtgagctgaaaatcatccaaagcaaaccagacatagaaaagccaaaggttacatgttactgttctaaagtttga

SEQ ID NO: 124866 - protein, 306 aa, Aedes aegypti
MSSVMHRVLSIQSHVVHGYVGNKSAVFPLQVLGFEVDNINSVQFSNHTGYTSGFKGQVLNEKELAELFAGLVANDLHNQYTHLLTGYVGNPTFLREIANILKILRSINPSLIYVCDPVMGDDGIMYVPKELLPIYRDEIVPLADIVTPNQFEVELLTGKTISSEQDAWDAIEWFHNKGVKTVAISSSELGGSNSLLALVSHKEGAKSQRCRMVIPKQGNGIRFTGTGDLFAALFLAHSTLTKFDMCATLERTIASLQAVITKTLEYIPEDVKAGKKEVTSTQRELKIIQSKPDIEKPKVTCYCSKV

SEQ ID NO: 124867 - DNA, 930 bp, Oryza sativa subsp
  CDS (1)..(930)
atggcgcggccgccggtgctctccgtcgcgcttccctccgacacgggacgcgtgctcagcatccagtcccacaccgtccagggatacgttggcaacaaatcagcagtctttcccctgcaactcctgggctttgatgtggatccgataaactcggtacagttttctaatcatacagggtacccaacatttagaggacaggtcctcaacggcagtcagctgtgggatcttattgaagggctggcggaaaacgatttattgcattatacccatttattaacaggttatattggatctgtttcctttttaactactgtactacaagttgttgacaaattacgatcagtcaatcctgatcttgtatatgtttgtgacccggttctaggtgatgaagggaaactatatgtccctcaggatttaatatctgtttatcaacagaaggttgtcccagttgctacaatgcttacacctaaccaatttgaagttgaactactcactggtttaaggattacctgtgaagaagatggcttgaaagcttgcaatgcgctacatagtgctggaccgcgaaaggtggtaataactagtgcacttattgaagataagctgctcctcattggaagccacaaaaaagcaaaggaacaaccaccagaacaatttaagattgagatacccaagatacctgcatatttcacgggcactggagatttaacaactgcccttctactaggatggagtaataaataccctgataaccttgagagggcggctgaactggcggtatccagtttgcaggcactcctaaggagaactgtggaagactataaaagagctgggtttgacccctccaccagcagcctagagatccgcttgattcaaagccaggatgaaattcgaaggccccagattacatgcaaggctgtgaagtatagctga

SEQ ID NO: 124868 - protein, 309 aa, Oryza sativa subsp
MARPPVLSVALPSDTGRVLSIQSHTVQGYVGNKSAVFPLQLLGFDVDPINSVQFSNHTGYPTFRGQVLNGSQLWDLIEGLAENDLLHYTHLLTGYIGSVSFLTTVLQVVDKLRSVNPDLVYVCDPVLGDEGKLYVPQDLISVYQQKVVPVATMLTPNQFEVELLTGLRITCEEDGLKACNALHSAGPRKVVITSALIEDKLLLIGSHKKAKEQPPEQFKIEIPKIPAYFTGTGDLTTALLLGWSNKYPDNLERAAELAVSSLQALLRRTVEDYKRAGFDPSTSSLEIRLIQSQDEIRRPQITCKAVKYS

SEQ ID NO: 124869 - DNA, 1102 bp, Glycine max
  CDS (119)..(1045)
gagttggctggctcaacgttgaacactgttccatgctgttaaagcctccgctctcactcaacttcagatttccccacaaacgagcattttccgggcacgaaactcgaggaattcgcgcatggcgcctccaatcctctcgctcgctcttccctcgaacaccggtcgagttctcagcattcaatctcacaccgttcaggggtatgttggtaataaatccgctgtcttccctctgcaactactgggatatgatgtcgatccaattaattccgtgcagttttcgaatcatacaggatatccgacgtttaagggtcaggttttgaatggacagcaactctgggatctaatcgaaggccttgaaggaaatgatttattgttctatactcacttgctaacaggttatattggttcagagtcttttctaaacactgtattgcaagttgtcagcaaacttcggtcaacaaacccaggtctttcgtatgtatgtgatccagtgatgggtgatgaaggaaagctttatgttcctcaagagctagtatcagtctatcgtgagaaggttgttccagtagcttcaatgttgactcccaaccagtttgaagcagaactactgacaggctttaggattcagtctgaaggacatggccgggaggcctgtaggcttctccatgcagctgggccttcaaaggtcataattacaagtataaatatagacgggattcttctcctcattggcagtcatcaaaaagaaaagggagagcctcccagacaatttaagattgttattccaaaaataccagcttattttacgggaacgggagatctcatgactgcacttcttcttggttggagcaataaatacccagacaaccttgagattgctgcggaacttgcagtgtcaagcttgcaggcagttttgcacaggacactcagtgactactatagtgctggacatgatcctgagtcaaccagtttagagattagattaattcaaagtcaggatgatatttgcaccccacaggtaaaacttaaagctgaaatatacagctaagttggtgatacgatttgaacatgtatgtatttgcctgtattaaattttttgaaagga

SEQ ID NO: 124870 - protein, 308 aa, Glycine max
MAPPILSLALPSNTGRVLSIQSHTVQGYVGNKSAVFPLQLLGYDVDPINSVQFSNHTGYPTFKGQVLNGQQLWDLIEGLEGNDLLFYTHLLTGYIGSESFLNTVLQVVSKLRSTNPGLSYVCDPVMGDEGKLYVPQELVSVYREKVVPVASMLTPNQFEAELLTGFRIQSEGHGREACRLLHAAGPSKVIITSINIDGILLLIGSHQKEKGEPPRQFKIVIPKIPAYFTGTGDLMTALLLGWSNKYPDNLEIAAELAVSSLQAVLHRTLSDYYSAGHDPESTSLEIRLIQSQDDICTPQVKLKAEIYS

SEQ ID NO: 124871 - DNA, 1339 bp, Solanum tuberosum
  CDS (257)..(1186)
gcagactcagtcagagaatctacctaacatcaaatctccaagtcgcaatattttaatcccaaaaaagacttttgatcaatattattgcagggtttggagactataatacagtattaatttaatgctaacatcattgaatttcaaagcttaatcttctatataatatatgtttgtttctccactcatcgctcgaattggatccagttcaatccgaagcttgttgaatttcagaaccaagtgcttgaagcaattgcacatggcccaaccaccgatcctggcgttagcaattccatcggataccggtcgtgtcctcagcattcagtcgcatactgttcagggatatgtgggcaacaagtcagcagtattccccctccaactgttgggctatgatgtggacccaatcaattctgtacagttctcaaatcacacaggatacccaacctttaagggccaggttttaaatggagaacaattgtgggaattaatagaaggtcttgaagccaatggtctattatattatactcatctgctgacaggttatattggttcagtctccttcttgaacacagtactgaaagtcgttgataagcttcggtctgtcaaccccaaacttaaatttgtttgtgatcctgtgatgggtgatgaaggtaagctatatgttcctccagagctggtgatggtataccgtgagaaggttgtccctgttgcttcagtgctgacgcctaaccagtttgaagcagagcagttgaccgggtccagtatcacttctgaaaaagatgggcaagaagcttgcaacattctgcatgctgctgggccatcaaaggttgttattactagcataaacattgatggcactcttctccttattggcagtcaccagaaagaaaagggtcaatctcctgagcaattcaagattgtgataccgaaaattcctgcatatttcacgggaacgggggatttaacgactgctttgttgcttggatggagcaataaatatcccaatgacctcgacaaagcggcagagcttgctgtctcaagtgtacaggcacttttattgagaacactagcagatttatcaaaggctggctatgactgccaatcaagcagtttggaaattcggttgatccagagcctggatgacatccacaacccagaagttaaatatagagctaaaagatacaactaagattctgttgtggtctggtctatttattcctttaggatagtctctgtagaatgaaacagtttcatttgtacacaatataaatagagtggaccatttagctcttgttgctgagacgatcatatcccccattgacttataattagatggcaacag

SEQ ID NO: 124872 - protein, 309 aa, Solanum tuberosum
MAQPPILALAIPSDTGRVLSIQSHTVQGYVGNKSAVFPLQLLGYDVDPINSVQFSNHTGYPTFKGQVLNGEQLWELIEGLEANGLLYYTHLLTGYIGSVSFLNTVLKVVDKLRSVNPKLKFVCDPVMGDEGKLYVPPELVMVYREKVVPVASVLTPNQFEAEQLTGSSITSEKDGQEACNILHAAGPSKVVITSINIDGTLLLIGSHQKEKGQSPEQFKIVIPKIPAYFTGTGDLTTALLLGWSNKYPNDLDKAAELAVSSVQALLLRTLADLSKAGYDCQSSSLEIRLIQSLDDIHNPEVKYRAKRYN

SEQ ID NO: 124873 - DNA, 1477 bp, Triticum aestivum
  CDS (98)..(1027)
tgtctgaccagctttgcttgccttcgtgctgctgcgatttcgcagggacgggcctggttggcggcgggggacgagtggaggggcggtgcatccagcgatggcacggccgccgatcctctccgttgcactgccgtctgatacggggcgcgtgctcagcatccagtcccacaccgtccagggctacgttggcaacaaatctgctgtctttccgttgcaactccttggttttgatgtggatccgataaactctgtacagttttctaatcatacaggatacccaaaatttagaggacaggttctcaatggcaatcagctgtgggatcttattgaaggactggaggaaaatgaattattgcactatacacatttgttaacaggttacatcggctctgtttcctttttaaatacagtgctacaagtcgtcgacaaattacgatcggtcaatcctgatcttatatacgtttgcgacccggttctaggtgatgaaggcaaactatatgttcctcaggatttagtatctgtttatcaggagaaggttgtcccagttgcttcaatgcttacaccaaaccaatttgaagttgaactactcacaggattaagaattacctccgaacaagatggcttgaaagcttgcaataccctgcacagtgctggaccgcggaaggtgataataactagtgcacttattgaagacaagctgctcctcattggaagttacaaaagaacagaggaacaaccgccggaacaatttaagattgagatacccaagatacctgcatatttcacggggaccggagatttaacaactgctcttctactaggatggagcaataaataccctgataaccttgagaaagcggcggaactggcagtatccagtttgcaggcactcctaagaaggacagttgaagactataaaagagcaggctttgacccatcaagcagcagcttagagatccgattaatacaaagccaggatgagatcagaaacccgcaggttacgtgcaacgccgtgaagtataaatgatcccgtagtaattctgacaagcatcaccacaaaattgaggccgtcaaactgttataaggaggaatggttgtaaacaaatgttggtctcctcgaagcatgccaagattgtcactgtcaacatgcaccgcatatcgacacggtttctggcttcagttttgggaaagccatttctagctcgccttaggttcaaacccgtaaaggatccaaattagggaaaacaacaatatgtcatcatgcttttgatataatctgtcacttttatttgtggctgtgagaatgaattgtacagaaggtttagttgcatctttgtagctttgttgtgttggtgttacaatgattaaacagcatcttattgatgtgttctgtacctactcttctttattaaattattatgtgtaaactcattggtgaatattcaaggaatgatccacacaaaaaaaaaaaaaaaaa

SEQ ID NO: 124874 - protein, 309 aa, Triticum aestivum
MARPPILSVALPSDTGRVLSIQSHTVQGYVGNKSAVFPLQLLGFDVDPINSVQFSNHTGYPKFRGQVLNGNQLWDLIEGLEENELLHYTHLLTGYIGSVSFLNTVLQVVDKLRSVNPDLIYVCDPVLGDEGKLYVPQDLVSVYQEKVVPVASMLTPNQFEVELLTGLRITSEQDGLKACNTLHSAGPRKVIITSALIEDKLLLIGSYKRTEEQPPEQFKIEIPKIPAYFTGTGDLTTALLLGWSNKYPDNLEKAAELAVSSLQALLRRTVEDYKRAGFDPSSSSLEIRLIQSQDEIRNPQVTCNAVKYK

SEQ ID NO: 124875 - DNA, 915 bp, Drosophila melanogaster
  CDS (1)..(915)
atggcaggtgcaacaaatgcggacatcaagcgggttctatccatccagagccatgtggtccacggctatgtgggaaacaaggtggccacctatccactgcagctgctgggtttcgatgtggatccactgaactcggtccagttctccaatcatacgggctacaagacctttaagggtcccgtctccaatgaaaaggaattagccaccattttcgagggtctggaggagaacgagctgctgccattgtactcacacctcttgaccggctacattggaaatccattgttcctacgccaggtgggccacattctcaagaagctgcgtcaggctaatcctggcctggtgtacgtctgtgatccggttatgggtgacaatggtcagctctatgtgcccaaggagctcttccccgtgtatcgggacgagatcattccactagcggacatcatcactcccaatcaattcgaagtggagctgctcacggaaaaggaggtacgcagcgaggcggctgtttgggaggcaatggagtggttccatcagcgtggcatcaagactgtggtcatttccagcagtgatcttggccagcctggcgttctgcgtgctttccttagccagcagaatggtccccgcctggccattgatattccgaagcagggtggcaaggatttggtcttcactggcaccggcgatctcttcgcctcccttttcctggcccacagtcatggcagcaaggatatagccaatgttttcgagaaaaccatcgccagtttgcaggcggtgatcaagcgaactgtggcttcgctgcccaacggtggaaacggcccagtcaaagcagccgaacgggaactaaagctggtgcagtccaagacggaaattgaacagccccaggtgctcctcaaagcgcagcgacttaactag

SEQ ID NO: 124876 - protein, 304 aa, Drosophila melanogaster
MAGATNADIKRVLSIQSHVVHGYVGNKVATYPLQLLGFDVDPLNSVQFSNHTGYKTFKGPVSNEKELATIFEGLEENELLPLYSHLLTGYIGNPLFLRQVGHILKKLRQANPGLVYVCDPVMGDNGQLYVPKELFPVYRDEIIPLADIITPNQFEVELLTEKEVRSEAAVWEAMEWFHQRGIKTVVISSSDLGQPGVLRAFLSQQNGPRLAIDIPKQGGKDLVFTGTGDLFASLFLAHSHGSKDIANVFEKTIASLQAVIKRTVASLPNGGNGPVKAAERELKLVQSKTEIEQPQVLLKAQRLN

SEQ ID NO: 124877 - DNA, 939 bp, Saccharomyces cerevisiae
  CDS (1)..(939)
atgcctcgtctcttggccacgcagtctcatgttgtacatggatatgtgggaaataaggctgcaacgtttcccttacagtgtctaggctgggatgtggattgttgtaacagtgttcagttttccaaccataccggatatggtttagataaagtgtttgggactataacgagggaaacagatttgaaggaactcttatcaggtctttttgataatttttcccaagactaccaagccttactttcaggctacttgcccaataagaattccgttcgatgtatgggaacatactacgctaaatttaaagaggcgaatccagaaatgatatggcttatggatcctgttatgggtgacgaaggacaattatatgttagtgaggatgtcataccagaatatagaaagctggctttgtctccaaaacagctagtcgatataataactccgaatcaatttgagctggagatactttatgggggggaaatcaagactaaagaacatttgaagaaggccttaaagaaattacaccaaactatcccagtgatcattgtcacatcctgtgactgtaagatgtttgatgacaaagattttatttattgcgtagcttcaatggagggtaaaacccccattgtttacagagtgccgtttattgattcgtatttcactggggttggtgatttgttttctgctttgttattggatcgagtgtataagatcttatcgaaccctacaacaacattaaaatttgaagaccaagtcaataatgttcttaatgttattcagaaggttttgaaaattactaggagctatgcttcaggaaaaatgaaagcaaaaatgggttccgccttggaaatgaaagaaatggaattgcgtcttattgaatcaagagatatatatgaaacaatcaacattcatcaaacagattatatttacgcaaggttgtga

SEQ ID NO: 124878 - protein, 312 aa, Saccharomyces cerevisiae
MPRLLATQSHVVHGYVGNKAATFPLQCLGWDVDCCNSVQFSNHTGYGLDKVFGTITRETDLKELLSGLFDNFSQDYQALLSGYLPNKNSVRCMGTYYAKFKEANPEMIWLMDPVMGDEGQLYVSEDVIPEYRKLALSPKQLVDIITPNQFELEILYGGEIKTKEHLKKALKKLHQTIPVIIVTSCDCKMFDDKDFIYCVASMEGKTPIVYRVPFIDSYFTGVGDLFSALLLDRVYKILSNPTTTLKFEDQVNNVLNVIQKVLKITRSYASGKMKAKMGSALEMKEMELRLIESRDIYETINIHQTDYIYARL

SEQ ID NO: 124879 - DNA, 867 bp, Ralstonia metallidurans
  CDS (1)..(867): transl_table=11
atgtttggtgagacaggtaccggggacgcgctgcgccccatcttcatggacgttgtgtccgtacagtcgcaggtggtctatggccatgttggtaacaacgtggccttgccaacgttgcgcgcgcatggcctgaacgtggccgccgtgccgacggtcatgttcagcaacacccctcactacccgacgctgcacggtggagcgctacccatcgactggttcgggggatacctgagcgacctgtcggcccgtggcgcgctccagcgcctgaaagccatcctggtcggctatctcggcaatccggagcaggtggccgtgctctcccgctggatcaatcaggtgctggccgagcacccggatgtgcaggtgatcgtcgacccggtgatcggtgaccatgacaccgggatctatgtcgcggatggcatggtcgaggccgtgcgcgagctgcttctgccgctggcacatggactcacgccgaacgatttcgaactcgggcatctgagtggccgttccgccgacagcgtcgagcaggtcgtcgccgccgcgcgcagcctgctgaccgaccgcgtgcaatggatggtggtcaccagcgcggcccccggcacatggggacacgacgacatgaaactgctcatcgtcacccgggacgatgcgcaggtgctgagccatccccgcatcccggtttcgcccaagggcaccggagacctgttcagcgcgaagttgaccgcgcggctattggaaggaatgccgctggccgaggccgcggcaagcgccagcgaccacgtggtgaccgctctggaagccacccgtcgcgcgcaaagcctggagcttcaattgccatcgaacccctgtatcacgcatcgagagtga

SEQ ID NO: 124880 - protein, 288 aa, Ralstonia metallidurans
MFGETGTGDALRPIFMDVVSVQSQVVYGHVGNNVALPTLRAHGLNVAAVPTVMFSNTPHYPTLHGGALPIDWFGGYLSDLSARGALQRLKAILVGYLGNPEQVAVLSRWINQVLAEHPDVQVIVDPVIGDHDTGIYVADGMVEAVRELLLPLAHGLTPNDFELGHLSGRSADSVEQVVAAARSLLTDRVQWMVVTSAAPGTWGHDDMKLLIVTRDDAQVLSHPRIPVSPKGTGDLFSAKLTARLLEGMPLAEAAASASDHVVTALEATRRAQSLELQLPSNPCITHRE

SEQ ID NO: 124881 - DNA, 864 bp, Burkholderia mallei
  CDS (1)..(864): transl_table=11
atgaaaaacgtcctcagcatccagtcgcacgtcatctacggacatgcgggcaacagcgccgcagtgtttccgatgcaacggctcggcgtcaatgtctggccgctcaacaccgtgcagttgtcgaaccacatgcagtacggccattgggcgggcagcgcgatcgacgcggcgaagatggagcagctcgtcgacggcatcgcggcgatcggcgcgctcaagcgctgcgacgcggtgctctcgggcttcctcggctcgcccgcgcaggcgcgcgcggcggtcgagatcgtgcgcaccgtgaaggcgacgaatccgaacgcgtggtacttctgcgatccggcgatgggccagacgggcggcatccggccggagcccggcgtcgaggagttcatcgtcgccgagctgcccgagctcgcggacggcatggcgcccaatcacagcgagctgcaaaagctcgccgggcagcgcatcgagacggtcgccgaggccgtcgccgcgtgccgctcgatcatccgccgcagcccgcaggtgatcctcgtcaagcatttgcacgatcgcaacagccccgccgaccgtttcaacatgctcgtcgtcaccgagaccgaagcatggatcggccagcggccgctgtacgcgttcccgcggcatccggtcggcgtcggcgacctgacgagcgcgatcttcgtcgcacggcggctgcgcggcgacagcgtgcgcgccgcgttcgagcacacgctcgccgccgtgcacgcggtcgtcaaggcgacctacgacgcacggcgctacgagctcgagctcgtcgccgcgcaggacgagatcgcgcggccgagcgagtggttcggcgcgtgggtcacgggcgcggattga

SEQ ID NO: 124882 - protein, 287 aa, Burkholderia mallei
MKNVLSIQSHVIYGHAGNSAAVFPMQRLGVNVWPLNTVQLSNHMQYGHWAGSAIDAAKMEQLVDGIAAIGALKRCDAVLSGFLGSPAQARAAVEIVRTVKATNPNAWYFCDPAMGQTGGIRPEPGVEEFIVAELPELADGMAPNHSELQKLAGQRIETVAEAVAACRSIIRRSPQVILVKHLHDRNSPADRFNMLVVTETEAWIGQRPLYAFPRHPVGVGDLTSAIFVARRLRGDSVRAAFEHTLAAVHAVVKATYDARRYELELVAAQDEIARPSEWFGAWVTGAD

SEQ ID NO: 124883 - DNA, 864 bp, Burkholderia pseudomallei
  CDS (1)..(864): transl_table=11
atgaaaaacgtcctcagcatccagtcgcacgtcatctacggacatgcgggcaacagcgccgcagtgtttccgatgcaacggctcggcgtcaatgtctggccgctcaacaccgtgcagttgtcgaaccacatgcagtacggccattgggcgggcagcgcgatcgacgcggcgaagatggagcagctcgtcgacggcatcgcggcgatcggcgcgctcaagcgctgcgacgcggtgctctcgggcttcctcggctcgcccgcgcaggcgcgcgcggcggtcgagatcgtgcgcaccgtgaaggcgacgaatccgaacgcgtggtacttctgcgatccggcgatgggccagacgggcggcatccggccggagcccggcgtcgaggagttcatcgtcgccgagctgcccgagctcgcggacggcatggcgcccaatcacagcgagctgcaaaagctcgccgggcaacgcatcgagacggtcgccgaggccgtcgccgcgtgccgctcgatcatccgccgcggcccgcaggtgatcctcgtcaagcatttgcacgatcgcaacagccccgccgaccgtttcaacatgctcgtcgtcaccgagaccgaagcatggatcggccagcggccgctgtacgcgttcccgcggcatccggtcggcgtcggcgacctgacgagcgcgatcttcgtcgcacggcgactgcgcggcgacagcgtgcgcgccgcgttcgagcacacgctcgccgccgtgcacgcggtcgtcaaggcgacctacgacgcacggcgctacgagctcgagctcgtcgccgcgcaggacgagatcgcgcggccgagcgagtggttcggcgcgtgggtcacgggcgcggattga

SEQ ID NO: 124884 - protein, 287 aa, Burkholderia pseudomallei
MKNVLSIQSHVIYGHAGNSAAVFPMQRLGVNVWPLNTVQLSNHMQYGHWAGSAIDAAKMEQLVDGIAAIGALKRCDAVLSGFLGSPAQARAAVEIVRTVKATNPNAWYFCDPAMGQTGGIRPEPGVEEFIVAELPELADGMAPNHSELQKLAGQRIETVAEAVAACRSIIRRGPQVILVKHLHDRNSPADRFNMLVVTETEAWIGQRPLYAFPRHPVGVGDLTSAIFVARRLRGDSVRAAFEHTLAAVHAVVKATYDARRYELELVAAQDEIARPSEWFGAWVTGAD

SEQ ID NO: 124885 - DNA, 861 bp, Haemophilus somnus
  CDS (1)..(861): transl_table=11
atgaaaaatattctctcaattcaatctcacgttgtttatggctatgcaggtaataaatcagcaacatttccgatgcagttgctaggcattgatgtttgggcgttaaatacagtgcaattttctaaccatacacaatatggaaaatggaccggcatggtcattcccaaagaacaaattggtgaaattgtacaaggtattgataatattggagaacttcatcaatgtgatgctgtcctgtccggttatatcggctcagcggaacaagtagaagaaattataaaagcctttcataaaataaaagaacgtaatccaaaagcaatttatttgtgcgatccggtgatgggacatcctgataaaggctgtgttgttgcagatggtgttaaagaaggactgattaaaattgcgatggctcaggcagatattattaccccaaatttagttgaactaagagaattaagcggattagcggttgaaaattttgaacaggctattgaagcagtaaaagtgattctaagtaaaggtccgaaaaaagtattggttaaacatttaagtcgtgttggtaagaatgctgcacaatttgaaatgttattggcaaataatgatggtatttggcatatcagtcgcccattacataatttcaataaagaacctgttggcgtaggtgatttaaccgccggattattccttgcaaacctactgaatggaaaatcggatgttgaagcatttgaacatactgcaaatacagtaaatgacgtaatggaaacaacacataatgcaggcgtctatgaacttcaaactattgctgctcgtgaatggattgttaatccgaaaagccaatataaagcagtaaaaataggttaa

SEQ ID NO: 124886 - protein, 286 aa, Haemophilus somnus
MKNILSIQSHVVYGYAGNKSATFPMQLLGIDVWALNTVQFSNHTQYGKWTGMVIPKEQIGEIVQGIDNIGELHQCDAVLSGYIGSAEQVEEIIKAFHKIKERNPKAIYLCDPVMGHPDKGCVVADGVKEGLIKIAMAQADIITPNLVELRELSGLAVENFEQAIEAVKVILSKGPKKVLVKHLSRVGKNAAQFEMLLANNDGIWHISRPLHNFNKEPVGVGDLTAGLFLANLLNGKSDVEAFEHTANTVNDVMETTHNAGVYELQTIAAREWIVNPKSQYKAVKIG

SEQ ID NO: 124887 - DNA, 861 bp, Pasteurella multocida
  CDS (1)..(861): transl_table=11
atgaaacatgtgctttcaatacagtcccatgtggtctatggctatgcgggaaataaatctgctacattccctatgcaattattaggtgtggatgtttgggcattaaatacagttcaattttctaaccatacgcaatatggtaaatggactggcatggtgattccgaaagaacaaattggcgaaattgtgcgtggtattgatgccattgaagcgctccacttatgcgacgccattgtttctggttatattggttcggctgaacaagtcgaagaaattgttaatgcggtgcgttttattaaaagcaaaaatccgaatgcgctgtacttatgcgatcctgttatgggtcatcctgataaaggctgtatcgttgcagaaggcgtaaaagaagggctaattaatttagccatggcagaagccgatttgatcacaccgaatttagtcgaattacgtgagctaagtggtctccctgtcgaaaattttgcacaagcacaagatgcggtcagagcgatcctcgccaaaggaccgaaaaaagttctcgtcaaacaccttagcaaagtcggtaaagactcaagccaatttgaaatgctattggcaaccaaagacggcatgtggcacattagtcgcccattacaccaattccgtaaagaacctgttggcgtgggtgacttaaccgctggtttatttattgctaatttgctgaatggtaaatctgatattgaggcctttgaacataccgccaatgctgtcaatgatgtcatgaccgttacacaacaaaaagataactatgaattacaaattattgctgcacgtgaatacattatgcaacctagcagtcaatataaagccgtgaaaattgcttaa

SEQ ID NO: 124888 - protein, 286 aa, Pasteurella multocida
MKHVLSIQSHVVYGYAGNKSATFPMQLLGVDVWALNTVQFSNHTQYGKWTGMVIPKEQIGEIVRGIDAIEALHLCDAIVSGYIGSAEQVEEIVNAVRFIKSKNPNALYLCDPVMGHPDKGCIVAEGVKEGLINLAMAEADLITPNLVELRELSGLPVENFAQAQDAVRAILAKGPKKVLVKHLSKVGKDSSQFEMLLATKDGMWHISRPLHQFRKEPVGVGDLTAGLFIANLLNGKSDIEAFEHTANAVNDVMTVTQQKDNYELQIIAAREYIMQPSSQYKAVKIA

SEQ ID NO: 124889 - DNA, 867 bp, Pseudomonas aeruginosa
  CDS (1)..(867): transl_table=11
atgccacgtacgccccacctgctcgccatccagtcccatgtggtcttcggccacgccggcaatgccgcggcggtgttcccgatgcagcgcatcggaatcaacgtctggccgttgaacacggtgcaattctccaaccacacccagtacggtcgatggaccgggcaggtgctgccgccggagcagattccggcgctggtggacggtattgccggcatcggcgaactgggcaactgcgacgcggtgctgtccggctatctcggcagcgccgcccagggccgcgccattctcgatgtggtggcacggatcaaacaggccaaccctcgggcgttgtacctctgcgacccggtcatgggccacccggaaaaaggctgcatcgtggccccggaggtcagcgacttccttctggaagaagccgccgcggtcgccgactacctgtgccccaaccagttggagctggacagcttctgcgaccgccagccgaactccctcgccgactgcgtggaaatggcacggagcctgctggcacgcggtcccagggcaatcctggtaaagcacctgaactatccgggcaaggccggcgacaccttcgagatgctgctggtggccgccgatcaggcctggcacctgcaacgcccgctgctggccttcccgcggcaaccggtcggagtcggcgacctggcctcggggctgttcctctctcgcctgctgctcggcgacgacctgcgtaacgccttcgaattcaccggcgccgcggtccatgaagtgctgctggaaacccaggcctgcggcagctacgagctggaactggtgcgggcgcaggatcggatcgcacacccaagggttcgtttcgacgcagtgcgcctttag

SEQ ID NO: 124890 - protein, 288 aa, Pseudomonas aeruginosa [sequence omitted]

SEQ ID NO: 124891 - DNA, 873 bp, Pseudomonas putida
  CDS (1)..(873): transl_table=11
atgaaacgtaccccgcacctgctcgccattcagtcccacgtggtgttcggccacgccggcaacagcgccgcggtatttcccatgcagcgtatcggggtcaatgcctggcccctcaataccgtgcagttctccaatcacacacagtatggccagtgggcgggggaagtgcttgccccagcgcaaattcctgcgttggtggaaggcatttccaacatcggcgagctgggccactgcgatgcggtgctttccggctacctgggcagtgccgaacaagggcgagcgatcctggccggcgtcgagcggatcaaggcggtaaacccaaaagcgttatacctgtgcgacccggtcatggggcacccggaaaagggctgcatcgtgccgcccgaagtcagtgagtttctgcttgacgaggctgcagccacagcggacatcctgtgccccaaccagctggaactggacagcttctgtgggcgccgcgcccagtcgctggaggattgcgtgaacatggcgcgcagcctgctgcagcgtggaccacaggttgtactggtcaagcacctggcgtaccccgggcgggccgaagagcatttcgaaatgctgctggtgaccgccgagcacagctggcacttgcgccgcccactgctggcgtttccgcgtcagccggtaggggtgggtgacctgacctcaggcctgttcctggcgcgtgtgctgcttggcgacagctgggtgcaggcattcgaattcacggctgcggcagtgcatgaagtgctgctggaaacccaggcttgcgccagctacgaattgcagctggtacgggcccaggaccgcattgcgcacccacgggtgcgcttcgaagcgcagttactggcgctttaa

SEQ ID NO: 124892 - protein, 290 aa, Pseudomonas putida
MKRTPHLLAIQSHVVFGHAGNSAAVFPMQRIGVNAWPLNTVQFSNHTQYGQWAGEVLAPAQIPALVEGISNIGELGHCDAVLSGYLGSAEQGRAILAGVERIKAVNPKALYLCDPVMGHPEKGCIVPPEVSEFLLDEAAATADILCPNQLELDSFCGRRAQSLEDCVNMARSLLQRGPQVVLVKHLAYPGRAEEHFEMLLVTAEHSWHLRRPLLAFPRQPVGVGDLTSGLFLARVLLGDSWVQAFEFTAAAVHEVLLETQACASYELQLVRAQDRIAHPRVRFEAQLLAL

SEQ ID NO: 124893 - DNA, 861 bp, Salmonella paratyphi
  CDS (1)..(861): transl_table=11
atgaagaatatcctcgctatccagtcccatgttgttttcggacatgcgggcaacagcgccgccgaatttcccatgcgccgtcttggcgcgaatgtttggccgctgaataccgttcagttttctaaccacacgcaatatggtaaatggaccggctgtgtcatgccgcccagccatctgactgagattgtccaggggattgcggacattggccagttagcgcactgcgacgccgtacttagcggttacctgggatctgccgagcagggagaacacattctcggtattgtgcgccaggttaaagcagcaaatccgcaggcaaaatatttctgcgatcccgtgatggggcatccggaaaagggttgtatcgtggcgcctggcgtcgcagagttccatgtgcgttatgcgctacccgccagcgatattatcgcgcctaacctgattgaactggaaattctcagcaaacatagcgtgaataatgtgaatgacgccgtgcaggcggcgcgagaactgattgctcaggggccagaaattgtactggtaaaacatctcgcccgcgccggttacagttcagaacgctttgaaatgctgctggtgacagcgcaggaagcctggcatattagccgtccgctggtggatttcggctcacgtcagccggttggcgttggcgatgtcaccagtggtttattgctggtcaaacttttgcagggcgcgacgttgcagcaggcgctggagcacgttacggcggcagtctatgagattatgatcgccaccaaaacgatgcaggagtacgaactgcaggtcgtggcggcccaggacaggatcgctaaccctgaacattacttcagcgcaacgcggctgtaa

SEQ ID NO: 124894 - protein, 286 aa, Salmonella paratyphi
MKNILAIQSHVVFGHAGNSAAEFPMRRLGANVWPLNTVQFSNHTQYGKWTGCVMPPSHLTEIVQGIADIGQLAHCDAVLSGYLGSAEQGEHILGIVRQVKAANPQAKYFCDPVMGHPEKGCIVAPGVAEFHVRYALPASDIIAPNLIELEILSKHSVNNVNDAVQAARELIAQGPEIVLVKHLARAGYSSERFEMLLVTAQEAWHISRPLVDFGSRQPVGVGDVTSGLLLVKLLQGATLQQALEHVTAAVYEIMIATKTMQEYELQVVAAQDRIANPEHYFSATRL

SEQ ID NO: 124895 - DNA, 861 bp, Shigella flexneri
  CDS (1)..(861): transl_table=11
atgaaaaatattctcgctatccagtctcacgttgtttatggtcatgcgggtaacagtgcggcagagtttccgatgcgccgcctgggcgcgaacgtctggccgctgaacaccgttcaattttctaatcacacccaatacggcaaatggactggctgcgtgatgccgcccagccatttaaccgaaattgtgcaaggcattgccgccattgataaattacacacctgtgatgccgtattaagtggctatctgggatcggcggagcagggtgaacatatcctcggtatcgtccgtcaggtgaaagcagcgaatccgcaggcgaaatatttttgcgatccggtaatgggtcatccggaaaaaggctgtatcgttgcaccgggtgtcgcagagtttcatgtgcggcacggtttgcctgccagcgatatcattgcgccgaatctggttgagctggaaatactctgtgagcatgcggtaaataacgtcgaagaagcggttctggcagcgcgcgaactcattgagcaagggccacaaattgtgttggttaaacacctggcgcgagctggctacagccgtgaccgttttgaaatgctgctggtcaccgccgatgaagtctggcatatcagccgtccactggtggattttggtatgcgccagccggtaggtgttggtgatgtgacgagcggtttactgctggtgaaactgcttcagggggcaacgctgcaggaggccctggaacatgtgaccgctgcagtctacgaaatcatggtgaccaccaaagcaatgcaggaatatgagctgcaagtggtggctgctcaggatcgtattgccaaaccagaacattacttcagcgcaacaaagctctga

SEQ ID NO: 124896 - protein, 286 aa, Shigella flexneri
MKNILAIQSHVVYGHAGNSAAEFPMRRLGANVWPLNTVQFSNHTQYGKWTGCVMPPSHLTEIVQGIAAIDKLHTCDAVLSGYLGSAEQGEHILGIVRQVKAANPQAKYFCDPVMGHPEKGCIVAPGVAEFHVRHGLPASDIIAPNLVELEILCEHAVNNVEEAVLAARELIEQGPQIVLVKHLARAGYSRDRFEMLLVTADEVWHISRPLVDFGMRQPVGVGDVTSGLLLVKLLQGATLQEALEHVTAAVYEIMVTTKAMQEYELQVVAAQDRIAKPEHYFSATKL

SEQ ID NO: 124897 - DNA, 873 bp, Vibrio vulnificus
  CDS (1)..(873): transl_table=11
atgcgaggtatcctctccatccagtcacacgttgcttatggccatgccggtaacagcagtgcagtcttcccaatgcaacgcatgggctttgaagtgtggccgatccacacggttcaattttctaaccacacccagtaccaagaaggttggacagggcgtgcgttttcggctgatgacatcagcgaactggttcgtggtctgaacaatattggcgcactagagaagtgccaagcggtactgacgggctaccaaggcagtgctgagcaatgtctggccgttgaagaaaccgtcaccaaagtcaaacaagcgaatcctgacgcgctttacgtctgtgacccagtgatgggcgcgccagataaaggctgtattgtcgccccggggattgcggaaaacttgttaaaccgtctcatgccaatggcggacgtgattgtgcctaaccagttcgagttaagccaatttgccgaaatggaaatccacactctcgatgacgcgatcatcgcttgccagcgtgcactagcaaaaggccctaaagtagtgttggtgaaacatttatactgcctgtctgacgagagcttcaacatgttgttggccacgcaagaaggcacttatttagcgaagcgccctcatttcgaatttgctaaagcacccgttggcgcaggtgatttgatttcggcgatttttaccgctggcttgctgaaaggttggacgccaaaacaagccttccaacactgccacgacgcgtgttacggcgtacttaatgcgacttaccaagcgggcgaatgggaactgcaaaccattgctgcacagcaagaatttgttgagcctagtaagcactttccgctggaagaagtgacgttaaaaacggttgaatag

SEQ ID NO: 124898 - protein, 290 aa, Vibrio vulnificus
MRGILSIQSHVAYGHAGNSSAVFPMQRMGFEVWPIHTVQFSNHTQYQEGWTGRAFSADDISELVRGLNNIGALEKCQAVLTGYQGSAEQCLAVEETVTKVKQANPDALYVCDPVMGAPDKGCIVAPGIAENLLNRLMPMADVIVPNQFELSQFAEMEIHTLDDAIIACQRALAKGPKVVLVKHLYCLSDESFNMLLATQEGTYLAKRPHFEFAKAPVGAGDLISAIFTAGLLKGWTPKQAFQHCHDACYGVLNATYQAGEWELQTIAAQQEFVEPSKHFPLEEVTLKTVE

SEQ ID NO: 124899 - DNA, 861 bp, Yersinia pseudotuberculosis
  CDS (1)..(861): transl_table=11
atgaaaaatatactttctattcagtcacacgtcgtttttggccacgcagggaatagcgctgcagaatttcctatgcgtcgtatgggggtgaatgtctggccgctgaataccgttcagttttcgaatcatactcaatatggtcactggacaggttgtgtcatgcccgctagccatttaactgacattgtgcaaggcattgccgatatcgatcgactgaaagactgtgatgcggttctgagtggctatattgggtcgccagaacagggcagtcatattctggccgccgtcgcccaggttaaacaagccaatccagatgcttggtatttttgtgatccggtcatggggcaccccgaaaaagggtgtattgtggcaccgggggtggccgaatttttctgcaacgaagctttgcctgccagtgatatgattgcgccgaacctgcttgaacttgagcaactcagtggtgagcgagtagagaatgtcgaacaggcggtacaggttgcccgttctctttgcgctagggggccaaaagtcgtgttagtcaagcacctgagccgtgcaggctaccatgctgactgcttcgaaatgttattggttaccgcagatgatgcctggcatatcagccgcccgctggtggattttggcaaacgtcaaccggttggtgtcggtgatttaaccagtggtttattgctggtgaatttgttgaaaggtgagccattggataaagcactggaacatgtcaccgccgccgtgtatgaagtgatgctcaaaacacaggaaatgggggagtatgagctacaggttgtcgctgcccaagagactattgtgacgcctatctgccagtttacagcggttaggctgtaa

SEQ ID NO: 124900 - protein, 286 aa, Yersinia pseudotuberculosis
MKNILSIQSHVVFGHAGNSAAEFPMRRMGVNVWPLNTVQFSNHTQYGHWTGCVMPASHLTDIVQGIADIDRLKDCDAVLSGYIGSPEQGSHILAAVAQVKQANPDAWYFCDPVMGHPEKGCIVAPGVAEFFCNEALPASDMIAPNLLELEQLSGERVENVEQAVQVARSLCARGPKVVLVKHLSRAGYHADCFEMLLVTADDAWHISRPLVDFGKRQPVGVGDLTSGLLLVNLLKGEPLDKALEHVTAAVYEVMLKTQEMGEYELQVVAAQETIVTPICQFTAVRL

SEQ ID NO: 124901 - DNA, 25 bp, Artificial sequence
  primer
atgatgaaaaatattctcgctatcc

SEQ ID NO: 124902 - DNA, 26 bp, Artificial sequence
  primer
ttagagctttgttgcgctgaagtaat

SEQ ID NO: 124903 - protein, 343 aa, Artificial sequence
  consensus sequence
  Variant (2)..(2): Xaa in position 2 is any amino acid
  Variant (8)..(9): Xaa in position 8 to 9 is any amino acid
  Variant (11)..(12): Xaa in position 11 to 12 is any amino acid
  Variant (15)..(16): Xaa in position 15 to 16 is any amino acid
  Variant (18)..(18): Xaa in position 18 is any amino acid
  Variant (21)..(21): Xaa in position 21 is any amino acid
  Variant (23)..(24): Xaa in position 23 to 24 is any amino acid
  Variant (26)..(27): Xaa in position 26 to 27 is any amino acid
  Variant (29)..(33): Xaa in position 29 to 33 is any amino acid
  Variant (41)..(41): Xaa in position 41 is any amino acid
  Variant (43)..(46): Xaa in position 43 to 46 is any amino acid
  Variant (47)..(48): Xaa in position 47 to 48 is any or no amino acid
  Variant (50)..(62): Xaa in position 50 to 62 is any amino acid
  Variant (64)..(74): Xaa in position 64 to 74 is any amino acid
  Variant (75)..(76): Xaa in position 75 to 76 is any or no amino acid
  Variant (78)..(78): Xaa in position 78 is any amino acid
  Variant (81)..(81): Xaa in position 81 is any amino acid
  Variant (83)..(100): Xaa in position 83 to 100 is any amino acid
  Variant (103)..(105): Xaa in position 103 to 105 is any amino acid
  Variant (106)..(109): Xaa in position 106 to 109 is any or no amino acid
  Variant (111)..(111): Xaa in position 111 is any amino acid
  Variant (118)..(122): Xaa in position 118 to 122 is any amino acid
  Variant (123)..(125): Xaa in position 123 to 125 is any or no amino acid
  Variant (127)..(139): Xaa in position 127 to 139 is any amino acid
  Variant (140)..(144): Xaa in position 140 to 144 is any or no amino acid
  Variant (146)..(149): Xaa in position 146 to 149 is any amino acid
  Variant (152)..(153): Xaa in position 152 to 153 is any amino acid
  Variant (155)..(209): Xaa in position 155 to 209 is any amino acid
  Variant (210)..(222): Xaa in position 210 to 222 is any or no amino acid
  Variant (224)..(230): Xaa in position 224 to 230 is any amino acid
  Variant (231)..(233): Xaa in position 231 to 233 is any or no amino acid
  Variant (235)..(235): Xaa in position 235 is any amino acid
  Variant (238)..(241): Xaa in position 238 to 241 is any amino acid
  Variant (243)..(255): Xaa in position 243 to 255 is any amino acid
  Variant (256)..(279): Xaa in position 256 to 279 is any or no amino acid
  Variant (281)..(294): Xaa in position 281 to 294 is any amino acid
  Variant (296)..(301): Xaa in position 296 to 301 is any amino acid
  Variant (302)..(329): Xaa in position 302 to 329 is any or no amino acid
  Variant (332)..(342): Xaa in position 332 to 342 is any amino acid
LXIQSHVXXGXXGNXXAXFPXQXXGXXVXXXXXVQFSNHTXYXXXXXXGXXXXXXXXXXXXXGXXXXXXXXXXXXXLXGYXGXXXXXXXXXXXXXXXXXXNPXXXXXXXYXCDPVMGXXXXXXXXVXXXXXXXXXXXXXXXXXXAXXXXPNXXEXXXXXXXXXXXXXXXXXXXXXXXXXXXXXXXXXXXXXXXXXXXXXXXXXXXXXXXXXXXXXXXXXXXXPXXXXXXXXXXGXGDXXXXLXXXXXXXXXXXXXXXXXXXXXXXXXXXXXXXXXXXXXAXXXXXXXXXXXXXXTXXXXXXXXXXXXXXXXXXXXXXXXXXXXXXXXXXELXXXXXXXXXXXP

SEQ ID NO: 124904 - protein, 27 aa, Artificial sequence
  protein pattern
  Variant (2)..(2): Xaa in position 2 is any amino acid
  Variant (3)..(3): Xaa in position 3 is any or no amino acid
  Variant (7)..(7): Xaa in position 7 is any amino acid
  Variant (8)..(8): Xaa in position 8 is any or no amino acid
  Variant (10)..(10): Xaa in position 10 is any amino acid
  Variant (11)..(11): Xaa in position 11 is any or no amino acid
  Variant (13)..(13): Xaa in position 13 is Phe, His or Tyr
  Variant (14)..(14): Xaa in position 14 is Ala or Val
  Variant (17)..(18): Xaa in position 17 to 18 is any amino acid
  Variant (20)..(20): Xaa in position 20 is any amino acid
  Variant (21)..(21): Xaa in position 21 is Phe or Tyr
  Variant (23)..(23): Xaa in position 23 is Leu or Met
  Variant (24)..(25): Xaa in position 24 to 25 is any amino acid
  Variant (26)..(26): Xaa in position 26 is Ile, Leu or Met
  Variant (27)..(27): Xaa in position 27 is Gly or Asn
LXXIQSXXVXXGXXGNXXAXXPXXXXX

SEQ ID NO: 124905 - protein, 15 aa, Artificial sequence
  protein pattern
  Variant (2)..(5): Xaa in position 2 to 5 is any amino acid
  Variant (6)..(6): Xaa in position 6 is Ser or Thr
  Variant (8)..(8): Xaa in position 8 is Glu, Asn or Gln
  Variant (9)..(9): Xaa in position 9 is Phe or Leu
  Variant (13)..(13): Xaa in position 13 is any amino acid
  Variant (14)..(14): Xaa in position 14 is Gly or Gln
VXXXXXVXXSNHXXY

SEQ ID NO: 124906 - protein, 13 aa, Artificial sequence
  protein pattern
  Variant (3)..(5): Xaa in position 3 to 5 is any amino acid
  Variant (6)..(6): Xaa in position 6 is Trp or Tyr
  Variant (7)..(8): Xaa in position 7 to 8 is any amino acid
  Variant (11)..(11): Xaa in position 11 is Ala or Val
  Variant (12)..(12): Xaa in position 12 is Leu or Met
  Variant (13)..(13): Xaa in position 13 is Ala, Gly or Pro
NPXXXXXXDPXXX

SEQ ID NO: 124907 - DNA, 834 bp, Escherichia coli
  CDS (1)..(834): transl_table=11
atggataatgctgttgatcgccacgttttttatatttctgatggtacggcaataactgcggaggtattaggacacgcagtaatgtcacaatttcccgtcactatcagcagcatcacgctgccgtttgtcgaaaatgagagccgtgcacgggcagtgaaggatcagattgacgcaatttatcaccagacaggcgtgcgcccgctggtcttctactccatcgtgttgccggagattcgcgccatcatcttgcaaagtgaaggcttttgccaggatatcgttcaggcgctggttgccccgctacaacaagagatgaaactggatccaacgccgattgctcatcgtacccatggccttaaccctaataatctcaataaatatgatgcgcgcattgcggcgattgattacaccctcgcccacgatgacggcatttcgttgcgcaatctggaccaggctcaggtgatcctgctcggtgtttctcgctgtggtaaaacccccaccagtctgtatctggcaatgcagtttggtatccgcgcggcaaactacccctttattgccgacgatatggataatctggtgctacccgcgtcgctcaaaccgcttcagcataaattgttcggcctgactatcgacccggaacgtctggcggcgattcgcgaggaacgtcgggagaacagtcgctatgcctcgcttcgtcagtgcaggatggaagtcgcggaagtggaagccttgtaccgtaaaaatcagatcccgtggattaacagtaccaattattcggtagaagagattgccaccaagatcctcgatatcatgggccttagtcgccgaatgtactaa

SEQ ID NO: 124908 - protein, 277 aa, Escherichia coli
MDNAVDRHVFYISDGTAITAEVLGHAVMSQFPVTISSITLPFVENESRARAVKDQIDAIYHQTGVRPLVFYSIVLPEIRAIILQSEGFCQDIVQALVAPLQQEMKLDPTPIAHRTHGLNPNNLNKYDARIAAIDYTLAHDDGISLRNLDQAQVILLGVSRCGKTPTSLYLAMQFGIRAANYPFIADDMDNLVLPASLKPLQHKLFGLTIDPERLAAIREERRENSRYASLRQCRMEVAEVEALYRKNQIPWINSTNYSVEEIATKILDIMGLSRRMY

SEQ ID NO: 124909 - DNA, 1564 bp, Glycine max
  CDS (97)..(1245)
tttctgagatttttggtaatgttttcattctcctaatcttcgtctggctaaggaagaagaagaaaaaaaaaaaacagaagcgctcactaggtagcaatgccaatttcgcagttatgtccaaatatccattccgttcctcaaatcgtagcgtgcacccgcaacgacaaaacgggatcgaaatccgtttcggggagacccaaggtgagccctcaactgaaccgttggtccagagcccgagccgtacggttcggtcagaaattggaccggtccagtatgcgaactcagctaccggaacccaaccctcctgcacgtccacttcctctcccggtggacccagacggcgccgtcaatttggacggcgcagatgtcacggccgtcaaatccatctatatagtctccgacggaaccggctggaccgccgaacactgcgttaacgccgctttgggtcagttcgattactgcttggtcgaccgtggctgccccgtcagtacccatttgttttctgggattgatgatacggagaagttgttggagatcacaaagcaagcagcgaaggaaggtgctttccttgtgtatactttagctgacccatcattggcttcaactgcaaagcaggcatgtaagttatggggtgtgccttacactgatgtattgggacccattacagaggccattgcttctcatttgggtgtttctccctctggccttcctcgtggggcttctggactccccctctccgatgattactttcgtaggattgaagctgttgagtttaccatcaagcaagatgatggagcgtgtccccagaatctggccaaggctgacattgttctcaccggcgtttcacgcaccggcaagacccccttgtcaatttatctgtctcagaaggggtacaaggtggccaatgtgcccattgtcttgggcgtgggagtgccaaggactctgttcgaggtggatccaaagaaagtttttggtttgactataaatcctcttatcttacagaatattagaagaacaagggctaaaactatgggattaagttctgatggtagcagtaattactcggagatgaattatgttagggaggagcttgaatttgcgggaaggctctttgcacagagccctctttggccagtcatcgatgtgactggaaaagccatagaagagactgcagcagttgtattgaggctgtaccatgacaggaagcacaaatgcatcatgccaaggatctcaaaacgctattagagatgacaactttttctcttgaactatatagattgtaaagtaccaaaactgtatagtattatgattatgattatgatgctgagttccgagtactcataaatttcatataccatttacttgtggcggtatactttagctaaacaggtatgtctttcttaggtgttatatatcattacatgtatatggtcagatgctactatcaacttcaaaacttgtatcataagtcaattctaagaaagagttgaacagtatcttggcccaactgccgaaaaggtgttttgctctgttgaacctactaatcaattgcaaaactgctttc

SEQ ID NO: 124910 - protein, 382 aa, Glycine max
MPISQLCPNIHSVPQIVACTRNDKTGSKSVSGRPKVSPQLNRWSRARAVRFGQKLDRSSMRTQLPEPNPPARPLPLPVDPDGAVNLDGADVTAVKSIYIVSDGTGWTAEHCVNAALGQFDYCLVDRGCPVSTHLFSGIDDTEKLLEITKQAAKEGAFLVYTLADPSLASTAKQACKLWGVPYTDVLGPITEAIASHLGVSPSGLPRGASGLPLSDDYFRRIEAVEFTIKQDDGACPQNLAKADIVLTGVSRTGKTPLSIYLSQKGYKVANVPIVLGVGVPRTLFEVDPKKVFGLTINPLILQNIRRTRAKTMGLSSDGSSNYSEMNYVREELEFAGRLFAQSPLWPVIDVTGKAIEETAAVVLRLYHDRKHKCIMPRISKRY

SEQ ID NO: 124911 - DNA, 1704 bp, Zea mays
  CDS (163)..(1443)
ctcgaggccggccgccacgcgtccgtcgcgcccgcggcgccggccggcgttggtgacaccataaccactcctgttcgtcgtgcacccacgcgggcgaacagtgaaaggcatcgtctcgacgtctcgtgaccgctggactcgccgccgccccaggctagctcgatgattgggtgcgccaagccgctcgcggcgccgctgcaggcatgggctcgcccgccgtctcccgccggtcgccgcctccccccctcgttctgcgcccctgacacctccccagctctcacccgcgccgtcgagagcccaggccagtctcagtctgacgacgccccgccaccacgctcgggtgaggccgcctcgtccctggcgccgcgcgcgagctcgcatctcgaccgatggtcccggtcgcgggcgctgcggtcgggccaccggccggcgctgaaccgcgcggctctctcctcggcctcggtctcggcgccgccggtgatcaagtcgccgcggcccgaggacgctgccgtggcggtggaggatggcgaggacgacgacgtgtgcgaggccgagagggacgccgcggccgggaaggccatctacatagtgtcagacgggaccgggtggaccgcggagcactcggtgaacgccgcgctcggacagttcgagaactgcctcgccgaccgcggctgcgctgtcaacacccacctcttctccttgattgacgacatggatcgacttattgaggtaataaagcaagcagcaaaggaaggggcactggttctctacacccttgccgatccttcaatggccgaggcgactaagaaggcctgcgatttctggggtgttccatgcaccgatgttcttcggcctactgtcgaagccattgcctctcacatcggtgttgctccatctggaattccacgaagctctccgagtcgaaatggtcggctatcagaggattacttccaacggatcgatgctatcgatttcaccatcaaacaagacgacggggctctgccacagaacctctaccgcgcagacatcgtgcttgccggcgtttcgcgtacagggaagacgccactgtcgatatacctagctcaaaagggatacaaggtggcaaatgtcccaatcgtgatgggagtggaccttccaaagtccctttttgagatcaaccaggacaaggtttttggactgacaataaacccagcgatccttcaggcgattagaaagaccagggccaagactctaggttttgatgggcgtcagagcaattacgctgagatggaccatgtgaggcaggaactggtccatgcgaatcaaatctttgctcagaatccatcgtggccagtcattgcggtcactggaaaagctatcgaggaaacagctgctgtcatcttggggatcctccatgacaggaagcagaagtgctccatgccacgcatatcaaaacgatactagcactgtgttctatcccttctctactacaccttgtaacgtgtgcatgttttgaataagctttgtgtcaagcaccatagccttcatgtaatttttttttgttggaccaccttctaggtggtgccgtttgtatcataaacataacttgaagtttagcgcagcagaaacacatgtatattgcgtttcgttgaaaaaaaaaaaaaaaaaaaaacttaatgccgcacgttatttgggcattatcgaatttctattatgtcaggtaaa

SEQ ID NO: 124912 - protein, 426 aa, Zea mays
MIGCAKPLAAPLQAWARPPSPAGRRLPPSFCAPDTSPALTRAVESPGQSQSDDAPPPRSGEAASSLAPRASSHLDRWSRSRALRSGHRPALNRAALSSASVSAPPVIKSPRPEDAAVAVEDGEDDDVCEAERDAAAGKAIYIVSDGTGWTAEHSVNAALGQFENCLADRGCAVNTHLFSLIDDMDRLIEVIKQAAKEGALVLYTLADPSMAEATKKACDFWGVPCTDVLRPTVEAIASHIGVAPSGIPRSSPSRNGRLSEDYFQRIDAIDFTIKQDDGALPQNLYRADIVLAGVSRTGKTPLSIYLAQKGYKVANVPIVMGVDLPKSLFEINQDKVFGLTINPAILQAIRKTRAKTLGFDGRQSNYAEMDHVRQELVHANQIFAQNPSWPVIAVTGKAIEETAAVILGILHDRKQKCSMPRISKRY

SEQ ID NO: 124913 - DNA, 822 bp, Neisseria meningitidis
  CDS (1)..(822): transl_table=11
atgagcagtccgcgccatgtgttttacatttccgaccgtaccggtctgactgccgagaatatcggcgaggctttgctgaaccagtttggcaatctgtcgttcaaacgccatacgcatccgtttgtcgatacgccggaaaaggcgcgcgcggtggtggagaaggtcaatcggagccggcaggaaaacggtcagcgtccgattgcgtttgtcagtgtggttgatgacgaaatccgtcggattatcaaaggggcggatgcttttcagattaatttctttgagacttttttgggactgttggagaaagaactcaataccgaagccacggcatccgagcaggggcatcacagtatcggtaatacgaagcgttacgatgcgcgtatggaggcggtgaatttctcattgaaccacgatgacggggtcagcgataagaaccttcaggaagcggatgtaatcttgatgggtgtatcgcgttcgggcaaaacgccgacctgcctttacctcgccctgcaatacggcatccgtgcggcaaactatccgctgattcccgacgatttggaatcggccgatctgccgcgtatggtcaagccttatagggataagctgttcgggttgaccatccagccggaacgtttgcaggccatccgccaagagcgccgcccgaattcaacttatgccaaaatcgatacatgccgcagcgaggtggcggacgcgcagagtatgttcagacggcatgggattccgtttgcgaatacgacggataaatcagtggaagagcttgccgtacacatccttcaggcgtgcaagctcaaacgcaggttttga

SEQ ID NO: 124914 - protein, 273 aa, Neisseria meningitidis
MSSPRHVFYISDRTGLTAENIGEALLNQFGNLSFKRHTHPFVDTPEKARAVVEKVNRSRQENGQRPIAFVSVVDDEIRRIIKGADAFQINFFETFLGLLEKELNTEATASEQGHHSIGNTKRYDARMEAVNFSLNHDDGVSDKNLQEADVILMGVSRSGKTPTCLYLALQYGIRAANYPLIPDDLESADLPRMVKPYRDKLFGLTIQPERLQAIRQERRPNSTYAKIDTCRSEVADAQSMFRRHGIPFANTTDKSVEELAVHILQACKLKRRF

SEQ ID NO: 124915 - DNA, 1134 bp, Arabidopsis thaliana
  CDS (1)..(1134)
atgaatttacacggcgtctcgggccatcacgagcctaattccgaacctccaattccgacaggttcgtcgagtccgaagctgaagattagtcccaaattgaatcggtggtctaggggccgagctttaagatctggtgttaagcttgaccgtccaattccccgttccgataactcacctcgccgtcaagtaacggaagcccaaccgaccgatgaggctgataagaagacgacggcgatcgacgtggaggtaacggcgggaaagtctatatatttggtttccgacggaactgggtggacggcagagcattccgttaacgccgctttgggacaattcgaagatttttcgttgaatcgtggctcttctgtgaatacccatctcttctcctgggttgaggatgaggagaggcttatcgagattattaagcaagcggcaaaggaaggggcaatgtgtttctacactttagcaaatccttctatggcaaaatccgcaaagcaagcttgtgatcagttgggtgtgctttcggttgatattctaggaccaatcatcgaagggattgcgtctcacttaggtgtttctccgtcaggtcttacacgtggagcacctggtagggtcaagactctcaatgatgcatatttcaaaaggattgaagccattgagtttaccattaagcaagatgatgggactttacctgagaacttaagcaaggctgatatagttcttgtcggggtttcccggacagggaagacgcccttgtccacttacattgctcaaaaagggtacaaagttgctaatgtgccgtttgtgatgggcgtggaaccacccaggacgctctttcaggttgaaccgagaaaagtttttggtttgaagatccagctcgttgtactgcaagcgattagaagaacaagggttaaaacgctaggcgtagatacagaggcagagaacaattactcggggattgatcttgttcggaaagaactagatttcgcgtcaaggatctatgagcgaaaccccggatgggcagtgatagatgtgacgaataaggcgattgaagaaaccgcggctgtgattctgcggctgtaccatgacggtagagacactagtactacggtaccgcgtatctcaaaacgctactaa

SEQ ID NO: 124916 - protein, 377 aa, Arabidopsis thaliana
MNLHGVSGHHEPNSEPPIPTGSSSPKLKISPKLNRWSRGRALRSGVKLDRPIPRSDNSPRRQVTEAQPTDEADKKTTAIDVEVTAGKSIYLVSDGTGWTAEHSVNAALGQFEDFSLNRGSSVNTHLFSWVEDEERLIEIIKQAAKEGAMCFYTLANPSMAKSAKQACDQLGVLSVDILGPIIEGIASHLGVSPSGLTRGAPGRVKTLNDAYFKRIEAIEFTIKQDDGTLPENLSKADIVLVGVSRTGKTPLSTYIAQKGYKVANVPFVMGVEPPRTLFQVEPRKVFGLKIQLVVLQAIRRTRVKTLGVDTEAENNYSGIDLVRKELDFASRIYERNPGWAVIDVTNKAIEETAAVILRLYHDGRDTSTTVPRISKRY

SEQ ID NO: 124917 - DNA, 855 bp, Xylella fastidiosa Temecula1
  CDS (1)..(855): transl_table=11
atgtctcggtgccagtcaattgagggagtttgcatgtcgacaatccggcctgtgttttatgtgtccgatgggacggggattaccgctgaaacgatcggacattcgttgttgactcaatttagcggctttactttcgtcgccgagcgtatggtattcattgatgatgcagagaaggcacgcgatgccagccaacgcattttagctgcaagtgagcggtatcgggttcgcccgattgtggtcaattcttgcgtgaatccatatttgagcgtgattctggccgagagcggtgcgttgatgttggatgtattcgcgccgtttattggactgttggaacatgaactcaatacatcgcgtcactcctgtgttggtcgagcgcatggcatggtcgattttgaaacctaccaccgccgtatcaacgcgatgaattttgcgctggctcacgatgatggcgtcgctgcgagttacgatgaggcggaagtgattctcgtggctgtttcgcgtgcgggcaagacgcccacctgtatttatttggccttgcattacggaatacgcgctgctaactatcctcttattgatgaagatttgaacagtgatcaattgccgttacgcttacgcccgtatcgcaaaaagctgtttggcttaacgattaatccggagcgattgcagcagattcgccaagagcggcggcccaattcgcgttatgcggcattggatacttgcaaacgtgaggtggcagcggctgagcagatgttttctgcggagcggatcaccacgttgagtacgacgcatacctctattgaagaaatctccagcaaggtgttggtgaccctgggactgcagcgggagatgttttga

SEQ ID NO: 124918 - protein, 284 aa, Xylella fastidiosa Temecula1
MSRCQSIEGVCMSTIRPVFYVSDGTGITAETIGHSLLTQFSGFTFVAERMVFIDDAEKARDASQRILAASERYRVRPIVVNSCVNPYLSVILAESGALMLDVFAPFIGLLEHELNTSRHSCVGRAHGMVDFETYHRRINAMNFALAHDDGVAASYDEAEVILVAVSRAGKTPTCIYLALHYGIRAANYPLIDEDLNSDQLPLRLRPYRKKLFGLTINPERLQQIRQERRPNSRYAALDTCKREVAAAEQMFSAERITTLSTTHTSIEEISSKVLVTLGLQREMF

SEQ ID NO: 124919 - DNA, 819 bp, Pseudomonas fluorescens PfO-1
  CDS (1)..(819): transl_table=11
atgaaacgatctgctttctttatctccgatggcaccggcatcaccgccgaaaccctgggtcaaagccttctggcgcagttcgaaaacattaccttcagcaaattcacgcggccgtacatcgacagcgttgaaaaagcgcgggccatggtacaacaaatcaacaaagccgctgaaaccgacggtttccggccgatcatcttcgacaccatcgtcaaccaggacatccgtgagattctcgcaacctccaatggtttcatgatcgacattttctcgacgttcctcgccccgctcgagcaggaactgaccgagcattcttcctacaccgtcggcaaatcccactccatcggccacaactccaattacatggagcggatcgaggcggtgaacttcgccctcgacaacgacgacggcgcccgcacccactattacgacaaggccgacctgatactagtgggcgtgtcgcgttgtggtaagacgccgacgtgtctgtacatggcgatgcagttcggcatccgtgcggccaactacccgctgaccgaagacgacatggaacgcctgcaactgccggccgccctgcgtgctcaccagcacaagctgttcggcctgactatcgatccggaccgcctcaccgcgatccgcaacgaacgcaagcccaacagccgctattcgagctacgcccagtgcgagttcgaagtgcgcgaagtggaaaacctgttccgccgcgagaacattccgcacatcaactccacgcatttctccgttgaagaaatctccgcgaagatcctcgtggaaaaaggcgtggagcggcgcttcaaataa

SEQ ID NO: 124920 - protein, 272 aa, Pseudomonas fluorescens PfO-1
MKRSAFFISDGTGITAETLGQSLLAQFENITFSKFTRPYIDSVEKARAMVQQINKAAETDGFRPIIFDTIVNQDIREILATSNGFMIDIFSTFLAPLEQELTEHSSYTVGKSHSIGHNSNYMERIEAVNFALDNDDGARTHYYDKADLILVGVSRCGKTPTCLYMAMQFGIRAANYPLTEDDMERLQLPAALRAHQHKLFGLTIDPDRLTAIRNERKPNSRYSSYAQCEFEVREVENLFRRENIPHINSTHFSVEEISAKILVEKGVERRFK

SEQ ID NO: 124921 - DNA, 816 bp, Burkholderia thailandensis E264
  CDS (1)..(816): transl_table=11
atgcttccaaccgtattcatcgtctccgacggcaccgggatcaccgccgaaaccttcgcgcattcgatcctgtcccagttcgatcagaaattccggctcgtgcgcgtgccgttcatcgattcgatcgagaaggcgtacggcaccgtccagaagatcgacgacgccgcgcagcacgacggccgccggccgatcgtgttcacgacgctcgtcgacggtgaatcgaacgagatcgtcaagcgctcgaacgcgctcgtgctcgacatgttccagcgcttcgtcgagccgctcgagcaagaactgcagttgaaatcgagccatgcgatgggccgcgttcaccagaatgcggataccgaggaatacaagacgcggatcgaggcgatcaacttctcgctcgcgcacgacgacggccagtcgaatcgcaaccttgctgacgcggacgtgatcctgatcggcgtgtcgcgcagcggcaagacgccgacgagcctgtatctagcgatgcagtacggcgtgaaggcggcgaactacccgctgattccggaagacttcgagcgcggcaagctgccgacgccgctccatccgcatcgcgacaagctgttcgggctgtcgatcgatccgatgcgcctctcggagatccgcaacgagcgccgccccggcagcaagtacgcggcgccggagaactgccgctacgagatcaacgaggcggaggcgatgatgcggcgcgaaggggtcaagtggctgtcgtcgacacacaaatcgatcgaggagatcgcgacgacgatcctgcaggaaatcaagctcgagcggcagtcgtattga

SEQ ID NO: 124922 - protein, 271 aa, Burkholderia thailandensis E264
MLPTVFIVSDGTGITAETFAHSILSQFDQKFRLVRVPFIDSIEKAYGTVQKIDDAAQHDGRRPIVFTTLVDGESNEIVKRSNALVLDMFQRFVEPLEQELQLKSSHAMGRVHQNADTEEYKTRIEAINFSLAHDDGQSNRNLADADVILIGVSRSGKTPTSLYLAMQYGVKAANYPLIPEDFERGKLPTPLHPHRDKLFGLSIDPMRLSEIRNERRPGSKYAAPENCRYEINEAEAMMRREGVKWLSSTHKSIEEIATTILQEIKLERQSY

SEQ ID NO: 124923 - DNA, 813 bp, Methylobacillus flagellatus KT
  CDS (1)..(813): transl_table=11
atgcagaaacgcagcgtatttttcatttccgacggtaccgggattactgccgagtccgtcgggcacctgttggcgcactttcccacggtcagcttcaagcatatccgcctgcccttcaccgactctgagcaaaaggtacaggaggcattgctcaagattgccgaaacggaaaaagcggatggtgcgcggcctatcgtcgtcatgaccctggtgaataccgacctgcgcgatatgctcaagcaaagcaacgccgtgcatctggatgtattcggctccttcgtggatccgctggctgaagagttgcaggaacagccttcccgcacctctggcattgcccatagcgtgctgggcaatagctactatgagcgtatcgacgcgatcaactttacgctcaaccatgacgatggcatgactgatttcggcctcagcgaagcgcaagtgatcttggtcggtgtctcccgttgcggcaagacgccgaccagcctgtacctggcaatgcagtttggtatcaaggctgcaaattatcctttgatcccggaagacctggagcgcggctccttgcccgaggcactcaagaagtaccccgaaaagctgtacgggctctcgatcaatcctgagcgcctgcacagtgtacgtagcgagcgccgaccggacagccattatgcatccctagacaattgcaggcgcgagatccgcttggcggaagatctgatgcatcgagaaggcatcagctggatcgattccaccagtcgctcgattgaagaactctccaccatcatcctgcagaaaatccgtgtgaactcgaaccactga

SEQ ID NO: 124924 - protein, 270 aa, Methylobacillus flagellatus KT
MQKRSVFFISDGTGITAESVGHLLAHFPTVSFKHIRLPFTDSEQKVQEALLKIAETEKADGARPIVVMTLVNTDLRDMLKQSNAVHLDVFGSFVDPLAEELQEQPSRTSGIAHSVLGNSYYERIDAINFTLNHDDGMTDFGLSEAQVILVGVSRCGKTPTSLYLAMQFGIKAANYPLIPEDLERGSLPEALKKYPEKLYGLSINPERLHSVRSERRPDSHYASLDNCRREIRLAEDLMHREGISWIDSTSRSIEELSTIILQKIRVNSNH

SEQ ID NO: 124925 - DNA, 813 bp, Shewanella sp. MR-4
  CDS (1)..(813): transl_table=11
atggcaccaaaggtattttacatctccgacgggacagcgatcacagctgaggtttttgggcatgcagtactctcgcaatttccattagaatttgagtcacttacaattccatttgttgaaacattggcaaaagcagagaacgttaaacgacaaattaatgattgttttattacaacaggtgaacggccgttagtgttccattcgatcgtcaaacctgaaattcgggacattatttattcgagtgaaggcctcgattacgattttttaaataccttcgttgcaccacttgaacaacatttaggcgttagcgcctctccggtgttacatcgcacccacggaaaagccaatcacggctacgaagcccgtatcgatgccatcaattttgcgatggacaatgacgatggccaaaccatgaaacatatggatcaggccgatttaatcctgcttggcgtgtctcgctgcggcaaaaccccgtctagcctctatttatcgatgcagtttggtattaaagcggccaactatccgttcaccgaagacgatatggataacctcaaattgcccgaagcgttaaaacgcaataagaagaagttgttcggcttaaccatcgatccggtgcgtttacatgaaatccgccaaagccgcatggaaaacagccgctattcgtccttaaagcagtgtcgtttagaggtcaaagaagtcgagatgatgttcaaacgtgaacgtattccttatatcgacaccaccaaccactctgtcgaagaaatcgccactaagattttggacgtgacaggcttagaacgtcatatgttctaa

SEQ ID NO: 124926 - protein, 270 aa, Shewanella sp. MR-4
MAPKVFYISDGTAITAEVFGHAVLSQFPLEFESLTIPFVETLAKAENVKRQINDCFITTGERPLVFHSIVKPEIRDIIYSSEGLDYDFLNTFVAPLEQHLGVSASPVLHRTHGKANHGYEARIDAINFAMDNDDGQTMKHMDQADLILLGVSRCGKTPSSLYLSMQFGIKAANYPFTEDDMDNLKLPEALKRNKKKLFGLTIDPVRLHEIRQSRMENSRYSSLKQCRLEVKEVEMMFKRERIPYIDTTNHSVEEIATKILDVTGLERHMF

SEQ ID NO: 124927 - DNA, 825 bp, Alkalilimnicola ehrlichei MLHE-1
  CDS (1)..(825): transl_table=11
atgaccgaagccagacgtagcgtctatttcatctccgaccgcaccggcatcacggccgaagccttgggtcacagcctgttgacccagttctctattgacttcgaacagcggaccatccccttcgtcgataccgaggagaaggccgcccaggtggtggaacaactgaacgtcgccagccagcgctccggcttgcggcccattgtgttctccacagttgtcgatgccgaggtccgccgggtattgcagaccacggacgccgtgctgttcgactttttcgacaccttcatcgccccgctggagcaggaattgcgtatgccctccagccacgtcattgggcggtcccacggggtcgtggataataacatgtatgacgtccggattgacgccatgaactatgcgctcaaccacgacgacggggcagtgacccatcactactcccgggccgacgtcatcctcacggcggtctcgcgcagcggcaagaccccgacctgtatctatctggcgctgcagtacggcatttacgccgccaactacccgctgacccaggatgatctcaaccgcggcaagctgccgcggaagctggtggagcacaagcgcaagctgtacgggctgaccatcaacgtcgaccggctgcagacaatccgctccgggcggctgcccaacagcgattacgcctccctgcgccagtgcagctacgaggtggcgcgcgcggaggccctgttccgcagcgaaggcattccctatgtgaacaccaccaccatgtccatcgaggagatcgccaccaaaatcatccacgaggccaaattggagcggcgactttattag

SEQ ID NO: 124928 - protein, 274 aa, Alkalilimnicola ehrlichei MLHE-1
MTEARRSVYFISDRTGITAEALGHSLLTQFSIDFEQRTIPFVDTEEKAAQVVEQLNVASQRSGLRPIVFSTVVDAEVRRVLQTTDAVLFDFFDTFIAPLEQELRMPSSHVIGRSHGVVDNNMYDVRIDAMNYALNHDDGAVTHHYSRADVILTAVSRSGKTPTCIYLALQYGIYAANYPLTQDDLNRGKLPRKLVEHKRKLYGLTINVDRLQTIRSGRLPNSDYASLRQCSYEVARAEALFRSEGIPYVNTTTMSIEEIATKIIHEAKLERRLY

SEQ ID NO: 124929 - DNA, 834 bp, Azoarcus sp. BH72
  CDS (1)..(834): transl_table=11
atgagcacacttccaatccgcactgttttcttcatctcggacggcaccggcattaccgccgaaacgctcgggcacagtcttctggcgcagttccccgaggcccgtatccgccaggtgcgcgcgcccttcatcgacgatctcgacaaggccatcgactgcgccaaccagatccgcgaagcagcccgcaacgacggcgtccgccccatcgtgttcagcaccctggtcagcccggaaaccgtcgaagccctgcacaaggccgacgccctgttcctcgatctgttcgatcgcttcatcgggccgcttgaaaccgaactcggccagcgctctacccataccgtcgggcgcttccatggcatcgccgacagcctcgactacaagaatcgcatcgaggcgatcaactttgcgatggcgcacgacgacggcgtctcctcggacggcgaactcgccgaggccgacgtgatcctggtcggggtctcgcgctccggcaagaccccgacgagcctctatctggcgatgcagttcggcgtaaaggcggccaactatcctctgatccccgaagacttcgagcgcaacaagctgccgggggaactccacaactaccgcggcaagctgttcggcctcacgatcgcacccgaacgcctgtcgcagatccgtcaggaacgacgccccaacagccgctacgcctcgctcgacaactgcaagtacgagatcgacgccgcgcagaaactgatgcggcgcgagaacatccgctggctggactccacgaccaagtccatcgaggaaatctccgccaccatcctgcagtcggtgcggctcaatcggcccggctactga

SEQ ID NO: 124930 - protein, 277 aa, Azoarcus sp. BH72
MSTLPIRTVFFISDGTGITAETLGHSLLAQFPEARIRQVRAPFIDDLDKAIDCANQIREAARNDGVRPIVFSTLVSPETVEALHKADALFLDLFDRFIGPLETELGQRSTHTVGRFHGIADSLDYKNRIEAINFAMAHDDGVSSDGELAEADVILVGVSRSGKTPTSLYLAMQFGVKAANYPLIPEDFERNKLPGELHNYRGKLFGLTIAPERLSQIRQERRPNSRYASLDNCKYEIDAAQKLMRRENIRWLDSTTKSIEEISATILQSVRLNRPGY

SEQ ID NO: 124931 - DNA, 810 bp, Pseudoalteromonas tunicata D2
  CDS (1)..(810): transl_table=11
gtgcgtactgctttttatatttctgatggtactgcaataacagcagaagtttttggccatgctactctttctttatttccggttgattttaaacatattaccatcccttttgttgagacaatcgaaaaagcacttgaagtgaaagcgcaaataaatgcgtgctgccgtggtgctggtgaaaaaccattggttttttttaccttcgtaaatccagaattgtccgatatcataaatacctccgacgcaaaatgttatgattttttaaatacgattagcggtcaagtgcaagctgaattaaatgtatcaccggttcctcgaactcaccgtactcatagcattcacgaaaaaaattacgattttagaattgacgcagttaactatgcattagcaaatgatgatggggcaaacttaaaagattatgctgaagctgacatcattttaattggtgtgagtcgatgtggtaaaaccccaacaagtttataccttgcgttgcaatatggcattaaagcagccaattatccttttaccgaagatgatatggatgaactgaaattaccacgagctctagtcccctatcgcaaaaagctctttggattaacgattgatcctgaacgcttagcggcgatacgacatgagcggatggccaattctcggtatgcttcgcttcgtcagtgcaggattgaaattagagaagttgaaatgttgtataaaaatcacaaaatcccttacttaagttcaacccattattctgttgaagaaatatcagctaaaattattgctgagacaggtttagaacgtcgaaaatattaa

SEQ ID NO: 124932 - protein, 269 aa, Pseudoalteromonas tunicata D2
MRTAFYISDGTAITAEVFGHATLSLFPVDFKHITIPFVETIEKALEVKAQINACCRGAGEKPLVFFTFVNPELSDIINTSDAKCYDFLNTISGQVQAELNVSPVPRTHRTHSIHEKNYDFRIDAVNYALANDDGANLKDYAEADIILIGVSRCGKTPTSLYLALQYGIKAANYPFTEDDMDELKLPRALVPYRKKLFGLTIDPERLAAIRHERMANSRYASLRQCRIEIREVEMLYKNHKIPYLSSTHYSVEEISAKIIAETGLERRKY

SEQ ID NO: 124933 - DNA, 834 bp, Photobacterium sp. SKA34
  CDS (1)..(834): transl_table=11
atgcataccaaaattaaaactcgtgacgtattctacatttctgatggaacagcgattacttgtcagaccgttggtcacgcagtcctcgctcaattcccagttaaagtcaatgagaaaaccttcccttttattgaaaatgcgcacaaagtcactgaggtgcttaaggagattgatcgatcttttttagcgacgggagaaaagcctttaattttcttctctatggtcgtgccagaaatcaaacaacagctattgtcagccaatgctctgttctacgatgtattacaaaccatggtcaatttcgttgctgatgatctacagctagagccaaagccacaactgcaacgctcacacagtgttggtaaggatcaagacggttattttgatcgaatagcggccatcgaatacaccctttcccacgatgacggtatatctcttcgtggtttagaagaagctgatttgatattacttggcgtgtcacgcagtgggaaaacacccaccagcctttacatggcaatgcaatttggtttaagagtggtgaactacccatttattgccgaagatcttgctaaactccgtttactgcctgaatttgaaattcaccgccataagctttttggcttaaccatagatccagaaagattaacagaaatccgcaacaacaggctcgccaatagtgattatgcaagtgaaagtcagtgtgagtctgaattgttcagtgttgagagtttatttcgaagagaagcgatcccttatatcaatacatccagtatgtccgtcgaagagatctcaaccagaatattagaaagaacaggattaaagcgccgactgttttaa

SEQ ID NO: 124934 - protein, 277 aa, Photobacterium sp. SKA34
MHTKIKTRDVFYISDGTAITCQTVGHAVLAQFPVKVNEKTFPFIENAHKVTEVLKEIDRSFLATGEKPLIFFSMVVPEIKQQLLSANALFYDVLQTMVNFVADDLQLEPKPQLQRSHSVGKDQDGYFDRIAAIEYTLSHDDGISLRGLEEADLILLGVSRSGKTPTSLYMAMQFGLRVVNYPFIAEDLAKLRLLPEFEIHRHKLFGLTIDPERLTEIRNNRLANSDYASESQCESELFSVESLFRREAIPYINTSSMSVEEISTRILERTGLKRRLF

SEQ ID NO: 124935 - DNA, 819 bp, Oceanospirillum sp. MED92
  CDS (1)..(819): transl_table=11
atgaaacgaactgctttttttatctcggatggtactggtatcacttcagaagcattgggacatagccttcttgctcaattcgatgctattgagtttgaacagattacgctcccctatattgatagtgttgataaagctaatgaagccgttcataaaatcaattcagcggccgaatcagaccaggcaagaccacttatctttgacaccgtcgttgatgaaaatattcgcgcgattatcgctaattctaatgcgtttaagatcgatgttttttccagtttcttgaagccattagagagtgaactcggtgcagactcaaattattcggtaggtaaatcccacggaatagttgaacgtactcgctacaaagatcgaatagattcggtgaattttgcgatagacaacgatgatggtgcacgtaccaaacaatatgcgaacgctgacattattctcgtcggtgtatctcgatgcggaaaaacgccaacctgtctctacatggcgatgcagtttggtatacgtgcagccaattacccccttaccgaagaagatctcgaattcaataaattaccctccgttctggaggaacacaggcacaaactgtatggcctgactattgaccctttccaattagctgccattcgtcatgaacgccgacctaatagtcgatacgcttcacttgatcagtgcgactttgaagttagagaagtagaaaaactattcaagaagcttaatatttcatccattaatacgaccaatttctcgatcgaggaaatttcgacccgagtcatggcccatgccggactagagcgcagaatgaactaa

SEQ ID NO: 124936 - protein, 272 aa, Oceanospirillum sp. MED92
MKRTAFFISDGTGITSEALGHSLLAQFDAIEFEQITLPYIDSVDKANEAVHKINSAAESDQARPLIFDTVVDENIRAIIANSNAFKIDVFSSFLKPLESELGADSNYSVGKSHGIVERTRYKDRIDSVNFAIDNDDGARTKQYANADIILVGVSRCGKTPTCLYMAMQFGIRAANYPLTEEDLEFNKLPSVLEEHRHKLYGLTIDPFQLAAIRHERRPNSRYASLDQCDFEVREVEKLFKKLNISSINTTNFSIEEISTRVMAHAGLERRMN

SEQ ID NO: 124937 - DNA, 816 bp, Oceanobacter sp. RED65
  CDS (1)..(816): transl_table=11
atgaagcgacatgcgttttttatctccgatgggactgggattacagctgaagcccttggacacagtctgttggcacagtttgagagtatagagtttgaacaatctaccttgccttatattaatgatttgaccaaggccaatgaggttgtagaaaaaataaacgccctagctgagacaagcggtaataaacccattgtattcgatactattgtagatcaagaaataagggaaaccatctcaaaagccaattgctttaatgtggatattttttctacgtttttaaatccacttgagcaagaattaggtatgggctcatcctactctgtaggtaagtttcatgctggcgctgataatgataaataccgctctaggattgacgcggtgaattacgccctcgacaatgatgacggcagtcggatcaagtattacgatcaagcagatattatactggtcggtgtttctcgctcaggcaaaaccccaacctgcctttatcttgcccttcagtttggcataaaagccgcgaattacccgttaactgaggaggatttgaatcaactgtctcttccggaaccgcttaaagcacataagaagaagctttttggcctgacaattgatccagagcgccttgcagctatccgcaatacgcgtcgggcaaatagtcgttatgcttcacttaatcagtgttattacgaaatagaagaagtggaaatgctctatcagcaagagtctattcctttcttgaatacaacagatttgtcggttgaagaaatttcaaccaagattatgttggacagtaatctaagtcgtaaaatttag

SEQ ID NO: 124938 - protein, 271 aa, Oceanobacter sp. RED65
MKRHAFFISDGTGITAEALGHSLLAQFESIEFEQSTLPYINDLTKANEVVEKINALAETSGNKPIVFDTIVDQEIRETISKANCFNVDIFSTFLNPLEQELGMGSSYSVGKFHAGADNDKYRSRIDAVNYALDNDDGSRIKYYDQADIILVGVSRSGKTPTCLYLALQFGIKAANYPLTEEDLNQLSLPEPLKAHKKKLFGLTIDPERLAAIRNTRRANSRYASLNQCYYEIEEVEMLYQQESIPFLNTTDLSVEEISTKIMLDSNLSRKI

SEQ ID NO: 124939 - DNA, 837 bp, Vibrio sp. Ex25
  CDS (1)..(837): transl_table=11
atgcaaataaataaccaaagtcgtgatgtgttctatgtttctgacggtacggcgataacatgtgagacattaggacatgttgttctcggtcaatttccgttcattcctaacgaaaaaacctttccgttcgtagaaagccaggacaaagttgctgacgttgtaaaagaaattgaaacttcctaccaacgcaatggcgtcaaacctctggtgtttttctctatcgtggtgccagacgtacgtgaaatgcttctggaagcgcctgcatacagctacgatgtgttggaaagcattgtacagaaagtgcaagatgacattcagatggcgccaaaacccaagttgcaacgttctcgcagtgtggggaaagattccgatacttatttcgaccgtatcgcggccattgaatatacattggcgcatgatgatggcatcacgctaaaagggttggaacaagccgatatcatcctgctgggagtatcgcgcagcgggaaaaccccgaccagcttgtatatggcgatgcaatttggtttgcgtgtcgtgaactatccgttcattgcggaagatgtgaagatgatgcgtttgttgcctgagtttgagatccatcgtcataagttgttcgggcttactatcgaccctgaacgtttgactgaaatccgtgagaatcgtttatccggaagtgattacgccagtaccgagcagtgtaagctggagctagacaccgtagaggcgttgtttagaagagaggcgatcccatatatcaatacgtcctctctctctgtggaagagatcaccacgcgtattcttgaaaaagcagggatgaaacgccgtttgtttggttaa

SEQ ID NO: 124940 - protein, 278 aa, Vibrio sp. Ex25
MQINNQSRDVFYVSDGTAITCETLGHVVLGQFPFIPNEKTFPFVESQDKVADVVKEIETSYQRNGVKPLVFFSIVVPDVREMLLEAPAYSYDVLESIVQKVQDDIQMAPKPKLQRSRSVGKDSDTYFDRIAAIEYTLAHDDGITLKGLEQADIILLGVSRSGKTPTSLYMAMQFGLRVVNYPFIAEDVKMMRLLPEFEIHRHKLFGLTIDPERLTEIRENRLSGSDYASTEQCKLELDTVEALFRREAIPYINTSSLSVEEITTRILEKAGMKRRLFG

SEQ ID NO: 124941 - DNA, 810 bp, Alteromonadales bacterium TW-7
  CDS (1)..(810): transl_table=11
atgagaactgcattttatatatctgatggaacagcaattacatcagaagtgtttgggcatgcaacgctatctttgtttccaatcgattttaatcacaaaactattcctttcgtagaaacagaagaaaaagcacacgaaattaaagcgttaataaatgcaacagcagcaaaaacgggtgaaaagccctttgtgttttttacatttgttaatcatagtttgagcgaaatcataaagtcagcggatgctatcccatatgattttttgaccacgtatagcgaaaaaattgaaaaagaattacaggtggcacctgtaccaaaaatgcatcgtacacactctatacatgaaaaaagttatgactttagaatagacgcggtgaattatgctttaatgaatgacgacggcggcaatatcaaaaacttttctgaggcagatattattttaataggtgtgagccgaagtggtaaaaccccaacgagcttatatttagcgttgcaatatggcattaaagcagcaaactaccctattaccgaagaagatttagaaagcgaaggcttgcctaaatgtttagtaccttataaacataaattgtttggtttaactattgacccagagagacttgctgcaattaggcatcgtcgaatggccaactctaaatatgcatctataaggcagtgtcgtattgaagtacgtgaggttgaaatgctttacaagcgtcataaaattgcctacttcaattcaacccaccattctgttgaagaaatttctgcaaaaatattgatggatacggatttagagcgtcgtaagtactaa

SEQ ID NO: 124942 - protein, 269 aa, Alteromonadales bacterium TW-7
MRTAFYISDGTAITSEVFGHATLSLFPIDFNHKTIPFVETEEKAHEIKALINATAAKTGEKPFVFFTFVNHSLSEIIKSADAIPYDFLTTYSEKIEKELQVAPVPKMHRTHSIHEKSYDFRIDAVNYALMNDDGGNIKNFSEADIILIGVSRSGKTPTSLYLALQYGIKAANYPITEEDLESEGLPKCLVPYKHKLFGLTIDPERLAAIRHRRMANSKYASIRQCRIEVREVEMLYKRHKIAYFNSTHHSVEEISAKILMDTDLERRKY

SEQ ID NO: 124943 - DNA, 894 bp, Pseudomonas putida GB-1
  CDS (1)..(894): transl_table=11
atgtcgacagccgcattcggcaaaccgaatttatcatatccaagaatcttcatcagcttaaggcccagatcgcaaatgaaacgaaccgcgttcttcatctccgacggcaccggtatcactgccgaaaccctgggccagagtctgctcgcgcaattcgagagcattccgttcaacaaattcacccgtccctacatcgattcgccagacaaagcgcggaccatggtccagcaaatcaacgctgcggccgagcgtgacggggtacgcccgatcatcttcgacaccatcgtcaaccaggacattcgcgagattctggcaacgtcgaatggcttcatgatcgacatcttttcttcgtttttatccccacttgagcaagaattgaccgcccattcgtcgtattccgtgggcaaatcgcactcgatcggcggcaactcaaactacatggaacgcatcgaggcggtgaatttcgccttggataacgacgacggtgcgcgcacccactactacgacaaggccgaccttatcctggttggcgtgtcgcgctgcggcaaaacccctacctgcctgtacatggccatgcagttcggcatccgcgccgccaactacccgctgaccgaggacgacatggaacgcctgcagttgccggcggtgctgaaaaagcaccacaacaagctgttcggcctgaccatcgaccccgaccgcctcaccgccatccgccacgagcgcaagcccaacagccgctattccagctttgcccagtgcgaattcgaagtgcgcgaggtggagagcctgttccgcagggagaacattcccaacatcaattccacgcatttttcggtggaagagatttcggcgaagattctggtcgagaaaggggtggagcgcaggttcaagtaa

SEQ ID NO: 124944 - protein, 297 aa, Pseudomonas putida GB-1
MSTAAFGKPNLSYPRIFISLRPRSQMKRTAFFISDGTGITAETLGQSLLAQFESIPFNKFTRPYIDSPDKARTMVQQINAAAERDGVRPIIFDTIVNQDIREILATSNGFMIDIFSSFLSPLEQELTAHSSYSVGKSHSIGGNSNYMERIEAVNFALDNDDGARTHYYDKADLILVGVSRCGKTPTCLYMAMQFGIRAANYPLTEDDMERLQLPAVLKKHHNKLFGLTIDPDRLTAIRHERKPNSRYSSFAQCEFEVREVESLFRRENIPNINSTHFSVEEISAKILVEKGVERRFK

SEQ ID NO: 124945 - DNA, 1472 bp, Zea mays
  CDS (77)..(1357)
  misc_feature (673)..(673): n is a, g, c or t
cacgcgggcgaacagtgaaaggcatcgtctcgacgtctcgtgaccgctggactcgccgccgccccaggctagctcgatgattgggtgcgccaagccgctcgcggcgccgctgcaggcatgggctcgcccgccgtctcccgccggtcgccgcctccccccgtcgttctgcgcccctgacacctccccagctctcacccgcgccgtcgagagcccaggccagtctcagtctgacgacgccccgccaccacgctcgggtgaggccgcctcgtccctggcgccgcgcgcgagctcgcatctcgaccgatggtcccggtcgcgggcgctgcggtcgggccaccggccggcgctgaaccgcgcggcgctctcctcggcctcggtctcggcgccgccggtgatcaagtcgccgcggcccgaggacgctgccgtggcggcggaggatggcgaggacgacgacgtgtgcgaggccgagagggacgccgcggccgggaaggccatctacatagtgtcagacgggaccgggtggaccgcggagcactcggtgaacgccgcgctcggacagttcgagaactgcctcgccgaccgcggctgcgctgtcaacacccacctcttctccttgattgacgacatggatcgacttattgaggtaataaagcaagcagcaaaggaaggggcnctggttctctacacccttgccgatccttcaatggccgaggcgactaagaaggcctgcgatttctggggtgttccatgcaccgatgttcttcggcctactgtggaagccattgcctctcacatcggtgttgctccatctggaattccacgaagctttccgagtcgaaatggtcggctatcagaggattacttccaacggatcgatgctatcgatttcaccatcaaacaagatgacggggttttgccacagaacttttaccgcgcagacatcgtgcttgccggcgtttcgcgcacagggaagacaccactgtcgatatacctagctcaaaagggatacaaggtggcaaatgtcccaatcgtgatgggagtggcccttccaaagtccctttttgagatcaaccaggacaaggtttttggactgacaataaacccagcgatccttcaggggattagaaagaccagggccaagactttaggttttgatgggcgtcagagcaattacgctgagatggaccatgtgaggcaggaactggtccatgcgaatcaaatctttgttcagaatccatggtggccagtcattgcggtcactggaaaagctatcgaggaaacagctgctgtcatcttggggatcctccatgacaggaagcagaagtgctccatgccacgcatatcaaaacgatactagcgctgtgttctatcccttttttactacaccttgtaacgtgtgcatgttttgaataagtctctgtgtcaagccccaaaaaaaaaaaaaaaaaaaaaaaaaaaaaaaaaaaaaaaaa

SEQ ID NO: 124946 - protein, 426 aa, Zea mays
MIGCAKPLAAPLQAWARPPSPAGRRLPPSFCAPDTSPALTRAVESPGQSQSDDAPPPRSGEAASSLAPRASSHLDRWSRSRALRSGHRPALNRAALSSASVSAPPVIKSPRPEDAAVAAEDGEDDDVCEAERDAAAGKAIYIVSDGTGWTAEHSVNAALGQFENCLADRGCAVNTHLFSLIDDMDRLIEVIKQAAKEGALVLYTLADPSMAEATKKACDFWGVPCTDVLRPTVEAIASHIGVAPSGIPRSFPSRNGRLSEDYFQRIDAIDFTIKQDDGVLPQNFYRADIVLAGVSRTGKTPLSIYLAQKGYKVANVPIVMGVALPKSLFEINQDKVFGLTINPAILQGIRKTRAKTLGFDGRQSNYAEMDHVRQELVHANQIFVQNPWWPVIAVTGKAIEETAAVILGILHDRKQKCSMPRISKRY

SEQ ID NO: 124947 - DNA, 828 bp, Bordetella pertussis
  CDS (1)..(828): transl_table=11
atgacttctacccctattgaacgtgcagtctacatcgtttcggacagcaccggcatcaccgccgagaccttcagccactccgtgctatcgcagttcgacgaggtcaatttcaagcccgtgcgcctgcccttcatcgatacgctggacaaggcgcgcgaggtggtggcgcgcatcaaccgcaacgcgctcgaggccggcgtgccgccgattgtcttcagcaccctggtcaaccccgagatcctggcgctggttcgccagtcgaacggcgttttcctcgatctttttggaacattcgtcagccacatcgagcaggccctgggcttgaagtccagccactccatcggacgctcgcacatggcggccaactccgagaaataccgcaaccggatcgacgccatcaacttcagcctggcgcacgacgacggccagttcgtcaaccagctggaccaggccgacgtgatcctgttgggcgtgtcgcgctgcggcaagaccccgaccagcctctatctggccatgcagtacgccgtcaaggccgccaatttcccgctcaccccggacgatttcgagcgcggcgcgctgcccaagaccatcgcgccgtaccgcggcaagctgttcggcctgtcgatccagcccgagcggctggccgaggtgcgcaacgagcgccgccccaacagccattacgcgcgcctggagcaatgccgctacgaagtggccgaggccgagcgcatgatgcgccgcgagggcatttcgtggctgtcgacgaccaccaagtcgatcgaggaaatcgccaccacggtgctgcaggaggtcggactggagcgcgtctag

SEQ ID NO: 124948 - protein, 275 aa, Bordetella pertussis
MTSTPIERAVYIVSDSTGITAETFSHSVLSQFDEVNFKPVRLPFIDTLDKAREVVARINRNALEAGVPPIVFSTLVNPEILALVRQSNGVFLDLFGTFVSHIEQALGLKSSHSIGRSHMAANSEKYRNRIDAINFSLAHDDGQFVNQLDQADVILLGVSRCGKTPTSLYLAMQYAVKAANFPLTPDDFERGALPKTIAPYRGKLFGLSIQPERLAEVRNERRPNSHYARLEQCRYEVAEAERMMRREGISWLSTTTKSIEEIATTVLQEVGLERV

SEQ ID NO: 124949 - DNA, 834 bp, Photobacterium profundum
  CDS (1)..(834): transl_table=11
atgcagcgcaaatccaattttcgtgatgtgttttacgtttctgacggtacagcgatcacttctgagacacttgggcatgccgttttagggcaatttccaatagaaatacaccaaacaacgcaccctttcattgaaacaaatgaacgtgcaaaacaggtaaaaacacttgtaaatcaatctcatgaaaaaacaggcatcaagccattagtcttctattcaatcgttatacctgacgtgaaggttatcattgaacaaagtaacgctcatttctacgacgtcttgaatgtgctagtcgagcctttaaagcacgatttgcagcttgaaccagagcctcagttacaacgttcacatagtattaacaaggatgccgctagctatcaagatcgcattgcagctattgaatacaccctcgcgcatgatgatgggatttcactgaataatcttgaccaagccgatgtgattttattgggtgtatcacgctgcggaaaaaccccaacaagcctgtatcttgcgatgcaatttggcataagagcagtgaactatcccttcatcgccgaagacatggcaagccttaaactgcctgctgccatagagccttatcgctttaaaacctacgggctaaccattgatattgaacgcctcgtcgccatacgaaatgaacgctatgccaacagcgattatgcaagcttagagcagtgtgaaaaagaactgcataaagttgaaggaatgtttagacgggaagcaataccctacttaaatacatcgtctctttcagtagaagaaatcgccacccgactactcgacattagtggtttaaaacggaaaatgtgctaa

SEQ ID NO: 124950 - protein, 277 aa, Photobacterium profundum
MQRKSNFRDVFYVSDGTAITSETLGHAVLGQFPIEIHQTTHPFIETNERAKQVKTLVNQSHEKTGIKPLVFYSIVIPDVKVIIEQSNAHFYDVLNVLVEPLKHDLQLEPEPQLQRSHSINKDAASYQDRIAAIEYTLAHDDGISLNNLDQADVILLGVSRCGKTPTSLYLAMQFGIRAVNYPFIAEDMASLKLPAAIEPYRFKTYGLTIDIERLVAIRNERYANSDYASLEQCEKELHKVEGMFRREAIPYLNTSSLSVEEIATRLLDISGLKRKMC

SEQ ID NO: 124951 - DNA, 819 bp, Dechloromonas aromatica
  CDS (1)..(819): transl_table=11
atgcctaccactatcaaacgcaccgtttttttcgtgtccgacggcaccggcctgacagtcgaagccctcggccacagcctgatgacccagttcgaggacatcgagttcaagcagatccgcatccccttcctgaccagtgtcgagcaggcgcaagaagcagtggctcgaatcaacggtcagggagaaagcgacgggatgcgcccgatcgtcttcacgacgctggtcaatccggaactgtccagcatcgttcaccaagccgatgccttctgcctgtcgtacttcgacaccttcctcgccccactggaggctgaactcggcatcaagtcaaaccacacggttggccgctcgcacggctcggccgagagctcggaatacaagaagcgcatcgagtcgatcaactacacgctggcgcacgatgacggcatcaccgaccgcgacctggaagaagccgacgtgatcctggtcgccgtctcccgctgcggcaagaccccgacttcgctctatctggccatgcagttcggcctcaaagcggccaatttcccgctgattccggaagatttcgaccgcggtcgcctgcccggcacgctggaaaaacatcgttcaaagctgttcggcctgaccatccagcccgagcgtctgcatcagattcgcgaagagcgccgcgccgcgagcaattacgcctcgctggccaattgtcgtttcgagattgccgaagcagaaaagatgatgcgccgcgaaggcattcgctggctggattcatcgaccaagtcgatcgaggaaatttcgacgacgatcctgcaggaactgaagctgcgttga

SEQ ID NO: 124952 - protein, 272 aa, Dechloromonas aromatica
MPTTIKRTVFFVSDGTGLTVEALGHSLMTQFEDIEFKQIRIPFLTSVEQAQEAVARINGQGESDGMRPIVFTTLVNPELSSIVHQADAFCLSYFDTFLAPLEAELGIKSNHTVGRSHGSAESSEYKKRIESINYTLAHDDGITDRDLEEADVILVAVSRCGKTPTSLYLAMQFGLKAANFPLIPEDFDRGRLPGTLEKHRSKLFGLTIQPERLHQIREERRAASNYASLANCRFEIAEAEKMMRREGIRWLDSSTKSIEEISTTILQELKLR

SEQ ID NO: 124953 - DNA, 906 bp, Ralstonia eutropha
  CDS (1)..(906): transl_table=11
atgtctgagcctgtcgcgccggacggcgcccagccggcccctgccggtgcaacgccccagcctctccagcccattgcgggcgatcgccccgccacccgcacggtttttatcgtctcggacggtaccggcattaccgccgaaaccttcagccattcgatccttgcgcagttcgaaatgcgcttccgcaaggtacgcatgccgttcgtcgatacgcctgaaaaggcacatatcgccgtcgggaagatcaatgaggctttccacaccgaaggcgtgcctcccatcgtcttcaccacgctcgtcaaccaggaagcgaacaaggcactgcgccgcgccaaggcgatgatcctggatatgttccagaccttcatcgaaccgctggaaaaggaacttgggctcaagtcgacgcatgcgatcggccgcttccaccagaacgcggacaccgaggcgtacaagaaccgcatcgaggccatcaatttctcgctcgcgcatgatgacggccagtcacacaagaacctccaggaagccgatgtgatcctcgttggcgtctcgcgcagcggcaagacgccgaccagcctctacctggccatgcagtacggcctgaaagcggcgaactatccgctgatccccgatgatttcgagcgcggcaagctgccaaaggcgctctacgactacaagccgaagatttttggcctgtcgatcgacccgcagcgcctcacggaaatccgcaacgagcgccgcccgggcagcaaatacgccgcgatcgagaactgccgctacgaggtcaacgaggccgaggccatgatgcgacgggaaggcatcaagtggctgtcctcgacgcataagtccatcgaggaaatcgcgacgacgatccttcaggaaatcaaggtcgaccgcgacaactactga

SEQ ID NO: 124954 - protein, 301 aa, Ralstonia eutropha
MSEPVAPDGAQPAPAGATPQPLQPIAGDRPATRTVFIVSDGTGITAETFSHSILAQFEMRFRKVRMPFVDTPEKAHIAVGKINEAFHTEGVPPIVFTTLVNQEANKALRRAKAMILDMFQTFIEPLEKELGLKSTHAIGRFHQNADTEAYKNRIEAINFSLAHDDGQSHKNLQEADVILVGVSRSGKTPTSLYLAMQYGLKAANYPLIPDDFERGKLPKALYDYKPKIFGLSIDPQRLTEIRNERRPGSKYAAIENCRYEVNEAEAMMRREGIKWLSSTHKSIEEIATTILQEIKVDRDNY

SEQ ID NO: 124955 - DNA, 819 bp, Pseudomonas fluorescens
  CDS (1)..(819): transl_table=11
atgaaacgatctgctttctttatctccgacggtaccggcatcacagcggaaaccctcggccagagcctgttggcgcagttcgaaaacgttaccttcagcaaattcacgcggccgtatatcgacagcatggaaaaagcgcgggccatggtacaacaaatcaatatagccgccgaaaaagacggccatcgcccgattatcttcgacaccatcgtcaatcaggacattcgtgagatcctcgcgacctccaatggtttcatgatcgacatcttctcgaccttcctcgcgcccctggaacaggagttgagcgaacattcctcctactccgtcggcaaatcccactccattggccacaactccaactacatggagcggatcgaggcggtgaacttcgccctggacaacgacgacggcgcccgcacccactactacgacaaggccgacctgatcctggtgggcgtgtcgcgttgcggcaagaccccgacctgcctgtacatggccatgcaattcggcatccgcgcggccaactacccgctgaccgaggaagacatggagcgcctgcaactgcccaatgccctgcgcgcccacaagcacaagctgttcggcctgaccatcgaccccgaccgcctcaccgcgatccgcaacgagcgcaagcccaacagccgctattccagctacgcccagtgcgaattcgaagtgcgcgaagtggaaaacctgttccgccgcgaaaacatcccccacatcaattccacccatttctcggtggaagagatctcggccaagatcctcgtggaaaaaggcgtggaacggcgcttcaagtaa

SEQ ID NO: 124956 - protein, 272 aa, Pseudomonas fluorescens
MKRSAFFISDGTGITAETLGQSLLAQFENVTFSKFTRPYIDSMEKARAMVQQINIAAEKDGHRPIIFDTIVNQDIREILATSNGFMIDIFSTFLAPLEQELSEHSSYSVGKSHSIGHNSNYMERIEAVNFALDNDDGARTHYYDKADLILVGVSRCGKTPTCLYMAMQFGIRAANYPLTEEDMERLQLPNALRAHKHKLFGLTIDPDRLTAIRNERKPNSRYSSYAQCEFEVREVENLFRRENIPHINSTHFSVEEISAKILVEKGVERRFK

SEQ ID NO: 124957 - DNA, 828 bp, Nitrosomonas europaea
  CDS (1)..(828): transl_table=11
atgttgcaacggagcgtttttttcttgtccgatcgtacgggtatcactgctgaaacccttggtcacagtctgctgacccaattcgatggaatagagtggaagaagcattatgcttcttttctggatagtgccgccaaggcacaggcggtcattgaacagatcaataccattgcagagcaggaagggcagcctgcactggtattcagtacattactcgacccggtcatgcttgcttccatccggcgggcagattgcgttcttttcgactttttcgagacttgtctgggcacgctggaagcggtgttgcaacaaccccctgcacgtatacccggacgctctcacgttctcagacaggatgcctcctattttcgccgcatcgccgcgattcagtatgcgctcaacagtgacgacggcgccaatgccaaaatacttgcggatgccgatgtgatagtggtgggcgtctcacgcacgggtaaaaccccggtgtgtgtctatctggctttgcagtacggggtgcttgccgccaattatccgtttacaccggaagacatgggcgcgatacagcttccgccattattgcagcctctccgtaaaaaactgtttggattgaccctgaacacctcacggctccaatccatacgcgaggaacgttatcctggcagtcattatgcttcgtttgcagaatgccagcgcgaactgcagtggcagaacgaactatacagacagttcgacattccttctatcaacacaaccgatgtgtccatagaggaaatcagtgcatcgattgtcaacagagctcatttggaacggcgccagcatggaacctga

SEQ ID NO: 124958 - protein, 275 aa, Nitrosomonas europaea
MLQRSVFFLSDRTGITAETLGHSLLTQFDGIEWKKHYASFLDSAAKAQAVIEQINTIAEQEGQPALVFSTLLDPVMLASIRRADCVLFDFFETCLGTLEAVLQQPPARIPGRSHVLRQDASYFRRIAAIQYALNSDDGANAKILADADVIVVGVSRTGKTPVCVYLALQYGVLAANYPFTPEDMGAIQLPPLLQPLRKKLFGLTLNTSRLQSIREERYPGSHYASFAECQRELQWQNELYRQFDIPSINTTDVSIEEISASIVNRAHLERRQHGT

SEQ ID NO: 124959 - DNA, 810 bp, Colwellia psychrerythraea
  CDS (1)..(810): transl_table=11
atgcgatcagctttttacatttcggatggtaccgccataacttcagaagtttttggtcacgcactactatcacttttccctactgaatttgagcaccataccatttcgtttatcgaaaccactgagaaagcgctcgctgcaaaagagcggattaacaaagcaaccagccgcggtggtaaacctgcgttagtgtttcatacctttgtaaataatgagaaccgtgaaattattgagagctgtgatgccgtcctgtataattttttagaaccgtttgttgccccacttgaaaaagagttagcgataaaagctaaacctacaacccatagaacccacagcattcacgaaaagagctacgattaccgaattgaagcggtgaactatgcgttaactaatgatgacggttcaaacgtcaccaactatgaggaagcagatgttatattggtaggggtttcacgctcaggtaaaacaccaagttcactctatttagcactgcaatatggcatcaaagcagcaaactatccgtttaccgacgatgatatggaagaacttaaaatcccttcctttttaaagccttttcataaaaagttattcgggttaaccatagatgcacagcgcttaattgatattagagatggccgaatggctaacagtaaatattcctcagcaaggcaatgtcgtatggaagtgagagaagtagaaaaactctataaaaatgagcagatacctttcatcaataccaccaagctttccgtagaagaaataaccgctaagatactgactgaaacaggcttacagcgttacaaatattaa

SEQ ID NO: 124960 - protein, 269 aa, Colwellia psychrerythraea
MRSAFYISDGTAITSEVFGHALLSLFPTEFEHHTISFIETTEKALAAKERINKATSRGGKPALVFHTFVNNENREIIESCDAVLYNFLEPFVAPLEKELAIKAKPTTHRTHSIHEKSYDYRIEAVNYALTNDDGSNVTNYEEADVILVGVSRSGKTPSSLYLALQYGIKAANYPFTDDDMEELKIPSFLKPFHKKLFGLTIDAQRLIDIRDGRMANSKYSSARQCRMEVREVEKLYKNEQIPFINTTKLSVEEITAKILTETGLQRYKY

SEQ ID NO: 124961 - DNA, 822 bp, Chromobacterium violaceum
  CDS (1)..(822): transl_table=11
atgtctcaccaccgctccgccttcttcatttccgaccgcaccggcatcaccgccgaatcgctgggccataccctgctgacccagttcgacgcgctggacttccagcgcgagaccgtgcccttcgtcgacaccgtagagaaagcgcgcgcgctggccgagcgcatcagcgagatcgcggagcgcgaccacctgcgcccgctggtcttcaccagcatcgtcaacccggaagtgcgcgaggcgctgcggctgaacaacgtggtgctgatcgacttcttcgaaagcttcatcggccacctggagatcgagcttggccagaaggcgacgctgacggtgggcaaggcccacggcatggtcaacgaggagaaatacgaccaccggatcgaggcggtcaatttctcgctgaaccacgacgacggcgtcaagctgaaggacctgcacgaggccgacgtgatcctggtcggcgtgtcccgctccggcaagacgccaacctgcctgtacctggcgctgcagtacggcatacgcgcggccaactacccgctgacgccggaagacttgggcagcccgacgctgcccaagatgctgctgccgttcaaggacaagatgttcggcctcaccatcgatcccaaccggctgcaccacattcgctcggagcgccgtccggattccaagtacgccagcatggacaactgccgccgcgaggtgaacgaggcggagtcgatgttccgccatcacggggtgcccttcatcagcaccacgcacaagtcgatcgaggaaatcgcgtccaccatcatgcacaaggcggcgctgggccggaaattctga

SEQ ID NO: 124962 - protein, 273 aa, Chromobacterium violaceum
MSHHRSAFFISDRTGITAESLGHTLLTQFDALDFQRETVPFVDTVEKARALAERISEIAERDHLRPLVFTSIVNPEVREALRLNNVVLIDFFESFIGHLEIELGQKATLTVGKAHGMVNEEKYDHRIEAVNFSLNHDDGVKLKDLHEADVILVGVSRSGKTPTCLYLALQYGIRAANYPLTPEDLGSPTLPKMLLPFKDKMFGLTIDPNRLHHIRSERRPDSKYASMDNCRREVNEAESMFRHHGVPFISTTHKSIEEIASTIMHKAALGRKF

SEQ ID NO: 124963 - DNA, 834 bp, Vibrio cholerae
  CDS (1)..(834): transl_table=11
atgcaaatggaatcgcaacgccgtgatgtgttctatgtttctgacggaacggccatcacttgtgaaacgttggggcacgttgtactgggtcagtttgctgtgcaacccaatgaaaaaacctttccgtttgtggaaagtgacgaaaaattgagtgaactgctcaagcagatccaacgttcttatcaattgcacggggtaaaacctttggtgtttttctccatggtgatccccgaaatgcgtacccgtttgctgcaagcgcccgcgcatttttacgatgtgttggagagcatagtgcagcgggtgagtctggatattgagatggagcctgcgcctaagttgcaacgctcgcgcagtgtcggcaaggactcggacacctattttgaccggatcgctgccattgaatacaccttggcacatgatgatggcgtttcgcttaaagacctcgatcgcgcagacatcattttgcttggcgtatcgcgcagcggaaaaacgcccaccagtttgtacatggcgatgcagtttggcctgcgcgtggtgaactacccctttatcgccgaagatatgcatgcgatgcgcctgttgcctgagtttgagtttcatcgtcataaactgtttggtcttaccatcaatgcggagcgtttgactgaaattcgcgaaaaccgcttagccggcagcgaatacgccagcaaccagcagtgccaacaggaacttgccaccgtggaagcgctatttcgccgagaggcgatttcgtacatcaatacgtcctctttgtcggtggaggaaatttccacccggatccttgaacgaacaggcttaaaacgtcgtttattctaa

SEQ ID NO: 124964 - protein, 277 aa, Vibrio cholerae
MQMESQRRDVFYVSDGTAITCETLGHVVLGQFAVQPNEKTFPFVESDEKLSELLKQIQRSYQLHGVKPLVFFSMVIPEMRTRLLQAPAHFYDVLESIVQRVSLDIEMEPAPKLQRSRSVGKDSDTYFDRIAAIEYTLAHDDGVSLKDLDRADIILLGVSRSGKTPTSLYMAMQFGLRVVNYPFIAEDMHAMRLLPEFEFHRHKLFGLTINAERLTEIRENRLAGSEYASNQQCQQELATVEALFRREAISYINTSSLSVEEISTRILERTGLKRRLF

SEQ ID NO: 124965 - DNA, 834 bp, Vibrio vulnificus
  CDS (1)..(834): transl_table=11
atgcaaacagaaaagcaaagtcgtgatgtgttctacgtttctgacggaacggcaattacctgtgaaacgttagggcacgtcgttttggggcagttcccctttgtggccaatgagaaaacctttccattcgtcgaaagtgaagagaaactcactgaattaatcaaacacattgaaatttcattccaaaccaatgggataaaacctctggtgttcttttctttggtgttgcccgatctcaaagcgcgtttaatggagtctccggcgtattgctacgatgtgttggaaagcattgtgcagcgggtgaaagatgatatccaaatggaaccgacgccaaagttgcaacgctcgcgcagtgtcggaaaagacaccgatacctattttgatcgtattgcggcgattgagtacaccttggcgcacgacgatggcatttcgctaaaaggtttagagctggcggacattattttgctgggcgtttcacgcagtggcaaaacacccaccagtttatacatggcgatgcagtttggtttgcgggtggtgaattacccttatattgatgacgacatcaaggggctgaaactgttaccggagtttgaaattcatcgtcataaattgtttggtttgacgattgatcccgagcggttgaccgagattcgcgaaaaccgtttggcgggcagtgattacgctagcaccgagcagtgtcagcatgaactggccaatgttgaagccttgttcaggcgtgaagccattccgtatatcaatacgacatcgctgtctgttgaagagatttcgaccagagtgcttgaaaaaacgggcttaaagcgccgcttgttctaa

SEQ ID NO: 124966 - protein, 277 aa, Vibrio vulnificus
MQTEKQSRDVFYVSDGTAITCETLGHVVLGQFPFVANEKTFPFVESEEKLTELIKHIEISFQTNGIKPLVFFSLVLPDLKARLMESPAYCYDVLESIVQRVKDDIQMEPTPKLQRSRSVGKDTDTYFDRIAAIEYTLAHDDGISLKGLELADIILLGVSRSGKTPTSLYMAMQFGLRVVNYPYIDDDIKGLKLLPEFEIHRHKLFGLTIDPERLTEIRENRLAGSDYASTEQCQHELANVEALFRREAIPYINTTSLSVEEISTRVLEKTGLKRRLF

SEQ ID NO: 124967 - DNA, 837 bp, Vibrio parahaemolyticus
  CDS (1)..(837): transl_table=11
atgcaaataaataaccaaagtcgtgatgtgttctatgtttctgacggtacggcgataacatgtgagacattgggccatgttgttcttggtcaatttcctttcattcctaatgaaaaaacctttccttttgtagaaagccaagacaaagttgcggatgttgttaaagaaattgaaacatcctaccaacgcaacggcgttaaaccgttggtgtttttctcgattgtggtgcctggtgtacgcgaaatgctgctagaagctccggcatacagctacgatgtgcttgaaagcattgtacaaaaggtgcaagacgacattcagatggcacctgccccgaagttgcagcgctctcgcagtgtagggaaagattccgatacctattttgaccgtattgcggcgatcgaatacaccttggctcacgacgatggcattacactgaaaggcttggaacaggcggacatcattctgcttggtgtatcgcgcagcggcaaaacaccaaccagtttgtacatggcgatgcagtttggcttgcgcgtggtgaactacccgtttattgccgaagacgtcaagatgatgcgtttgttgccagagttcgaggtacatcgccacaaactgtttggcttaaccatcacacctgaacgtttgaatgagattcgtgagaatcgtctgtcgggcagcgactatgccagtgaagagcaatgcaagttggagttggacacggttgaagctttattcagaagagaagcgattccttacatcaacacgtcgtcattgtcggtagaagaaatttcaacgcgcattcttgagagagccggaatgaaacgccgtttgttcggctag

SEQ ID NO: 124968 - protein, 278 aa, Vibrio parahaemolyticus
MQINNQSRDVFYVSDGTAITCETLGHVVLGQFPFIPNEKTFPFVESQDKVADVVKEIETSYQRNGVKPLVFFSIVVPGVREMLLEAPAYSYDVLESIVQKVQDDIQMAPAPKLQRSRSVGKDSDTYFDRIAAIEYTLAHDDGITLKGLEQADIILLGVSRSGKTPTSLYMAMQFGLRVVNYPFIAEDVKMMRLLPEFEVHRHKLFGLTITPERLNEIRENRLSGSDYASEEQCKLELDTVEALFRREAIPYINTSSLSVEEISTRILERAGMKRRLFG

SEQ ID NO: 124969 - DNA, 777 bp, Thiobacillus denitrificans
  CDS (1)..(777): transl_table=11
atgaatggctacagcgtattttgcgtgtccgatcacacgggactcacgatcgaggcggtcgccaagagtgtgctggcgcagttcccacgtatcgagtttagcctgattacgctgcccttcatcgacgacgcggccaaggcccgcgccgccgccgggcgggtcgcggtgaccgctcgcgccctcgtgttttcctcgctgaccgaccccgcgttgcgtgcgcacttcaaggacgcggggctgcacgtgttcgacctgttcgaacacgtcagccccgcggtcgaacgtgtgctcggcgagccggcgacgccgagcggcggccacacgcacggcatggcgagcgactacgaggcgcgcatggacgccgtcaatttcgcgctccggctcgacgacggcctgagcccggaacacctcggccaagccgacctcatcctggtcggcgtctcacgcgtcggcaagacgccgaccgcgctgtatctcgccctgcattacgggctgcgcgcggcgaactacccgctcaccccggacgacctcgcgaacgacggcttgccgcgggcgctgcaaccgcacctgccgcgcctgcgcggcctcacgctggcccccgagcgcctcgcggcgatccgcgaggcgcggctcccaggtagccgctatgcgagcgtcgcgcaatgcagaagcgaactcgacgccgccgaacgccttttagccgcgcacgcgatccccctcatcgacacgagccgcatgtcggtcgaggaaatcgcagcccgcctgagagcgtcctag

SEQ ID NO: 124970 - protein, 258 aa, Thiobacillus denitrificans
MNGYSVFCVSDHTGLTIEAVAKSVLAQFPRIEFSLITLPFIDDAAKARAAAGRVAVTARALVFSSLTDPALRAHFKDAGLHVFDLFEHVSPAVERVLGEPATPSGGHTHGMASDYEARMDAVNFALRLDDGLSPEHLGQADLILVGVSRVGKTPTALYLALHYGLRAANYPLTPDDLANDGLPRALQPHLPRLRGLTLAPERLAAIREARLPGSRYASVAQCRSELDAAERLLAAHAIPLIDTSRMSVEEIAARLRAS

SEQ ID NO: 124971 - DNA, 822 bp, Neisseria meningitidis serogroup B
  CDS (1)..(822): transl_table=11
atgagcagtccgcgccatgtgttttacatttccgaccgtaccggtctgactgctgagaatatcggcgaggcgttgctgaaccagtttggcaatctgtcgttcaaacgccatacgcatccgtttgtcgatacgccggaaaaggcgcgcgcggtggtggagaaggtcaatcggagccggcaggaaaacggtcagcgtccgattgcgtttgtcagtgtggttgatgacgaaatccgtcggattatcaaaggggcggatgcttttcagattaatttctttgagacttttttgggactgttggagaaggaactcaataccgaagccacggcatccgggcaggggcatcacagtatcggtaatacgaagcgttatgatgcgcgtatggaagcggtcaatttttctttgaaccacgacgacggggtcagcgataagaaccttcaggaagcggatgtaatcttgatgggtgtatcgcgttcgggcaaaacgccgacctgcctttacctcgccctgcaatacggcatccgtgcggcaaactatccgctgattcccgacgatttggaatcggccgatctgccgcgtatggtcaagccttatagggataagctgttcgggttgaccatccagccggaacgtttgcaggccatccgccaagagcgccgcccgaattcaacttatgccaaaatcgatacatgccgcagcgaggtggcggacgcgcagagtatgttcagacggcatgggattccgtttgcgaatacgacggataagtcggttgaggaattggcggtacacatccttcaggcgtgcaagctcaaacgcaggttttga

SEQ ID NO: 124972 - protein, 273 aa, Neisseria meningitidis serogroup B
MSSPRHVFYISDRTGLTAENIGEALLNQFGNLSFKRHTHPFVDTPEKARAVVEKVNRSRQENGQRPIAFVSVVDDEIRRIIKGADAFQINFFETFLGLLEKELNTEATASGQGHHSIGNTKRYDARMEAVNFSLNHDDGVSDKNLQEADVILMGVSRSGKTPTCLYLALQYGIRAANYPLIPDDLESADLPRMVKPYRDKLFGLTIQPERLQAIRQERRPNSTYAKIDTCRSEVADAQSMFRRHGIPFANTTDKSVEELAVHILQACKLKRRF

SEQ ID NO: 124973 - DNA, 873 bp, Enterobacter agglomerans
  CDS (1)..(873): transl_table=11
atggcccatgctgaatgctcactcttgtctgaggctgatttcgttatgacaactgacagaagcgttttttatatctccgatggtacggccattacggctgaagtgctgggtcatgcggtgctgtcgcagtttccggtcaatatcaccagcctgacgctgccgtttgtggaaaatgttcagcgggcgctggcggttaaagcccagattaacgcgctctatcagcagagcggtgtcaggccgctggtctttttctccatcgtgacgccggaagtgcgcgacatcatcgtacagagtgacggcttttgtcaggatatcgtccaggcgctggtcgccccgcttcagcaggagctgggtttatcgcccgccccggtggcacaccgtacccatggactggatgccagtaacctgggtaaatatgacgcacgtatcgcggccatcgattacaccctggcgcatgatgacggcatctcgctgcgcgggctggaagatgcgcaggtgattctgttaggcgtctcacgctgtggcaaaacccccaccagcctctatctggcaatgcagtttggtattcgcgccgccaactatccattcattgccgacgatatggacaaccttaaactcccacccgcgctgcgcgcgcatcagaataaactgttcgggctgaccatcgacccggaacggctggctgcgatacgtcaggagcgggcggaaaatacccgttacgcctcgatgcgtcagtgccggctggaggtaggcgaagtggaagcgctgtttcgcactcatcagatccgctatctcaacagcaccaactactccgtggaggagattgcgaccaaaattctcgacattatgggcctgactcgccgcatgtactga

SEQ ID NO: 124974 - protein, 290 aa, Enterobacter agglomerans
MAHAECSLLSEADFVMTTDRSVFYISDGTAITAEVLGHAVLSQFPVNITSLTLPFVENVQRALAVKAQINALYQQSGVRPLVFFSIVTPEVRDIIVQSDGFCQDIVQALVAPLQQELGLSPAPVAHRTHGLDASNLGKYDARIAAIDYTLAHDDGISLRGLEDAQVILLGVSRCGKTPTSLYLAMQFGIRAANYPFIADDMDNLKLPPALRAHQNKLFGLTIDPERLAAIRQERAENTRYASMRQCRLEVGEVEALFRTHQIRYLNSTNYSVEEIATKILDIMGLTRRMY

SEQ ID NO: 124975 - DNA, 816 bp, Thiocapsa roseopersicina
  CDS (1)..(816): transl_table=11
atgaaccgcaccgtcttctttgtctcggagagcaccggcatcaccgccgagacgctcggtcacagcctgctgtcgcagttcgacaccatcgacttcgagcaggtctacatgccttacatcaacaccgacctgcgcgcgaaggcgctgacgcagcggatgcaggaggctgccgaccgcgacggggtgcgtccgatcgtgtttgcgaccatgctcaacaacgagatccgcgagatcctcgagagcggcaactgctactacgtcgagctcttcgagggcttcgtcgagccgctctccagagagctgggcgtgccgccgagccgcaaatccgggcgcagccacgccatcaccaagccgagttattacacaaagcggatcgaggcgatcaatttcgccatggcgaacgacgacgggatccggccggataatttccatcgcgccgacgtcgtcttgatcggtgtctcgcgctcgggcaagacgccgacctgtctctatctcgccatgcactacggtctgcgctcggcgaactatccggtcaccgaagaggacttcgagcgaggcgacgtcccccagttggtttgggattgtcgccacaaactcttcgcgctcaccatcgatccgcagcggctgcaactgatccgcgaagagcgacgtccaggcagtagctatgcgtcgcttgcgcgctgtcaagacgacatccggatggctgcgcagatctacaagcgactccagatcccggtgctcaacaccaccagccagtcgatcgaggagatctcctcgcacatcatcaaggcgcttcgcgggagcggagagcactga

SEQ ID NO: 124976 - protein, 271 aa, Thiocapsa roseopersicina
MNRTVFFVSESTGITAETLGHSLLSQFDTIDFEQVYMPYINTDLRAKALTQRMQEAADRDGVRPIVFATMLNNEIREILESGNCYYVELFEGFVEPLSRELGVPPSRKSGRSHAITKPSYYTKRIEAINFAMANDDGIRPDNFHRADVVLIGVSRSGKTPTCLYLAMHYGLRSANYPVTEEDFERGDVPQLVWDCRHKLFALTIDPQRLQLIREERRPGSSYASLARCQDDIRMAAQIYKRLQIPVLNTTSQSIEEISSHIIKALRGSGEH

SEQ ID NO: 124977 - DNA, 1416 bp, Oryza sativa
  CDS (1)..(1416)
atgtcgtcgtcgtcgtcgacgtccccgcggttcggctcgatgataagcgcgaagctggcgtcgccgccgccgtcgctgctcctcccgccgtcgcctcgcctacagggccgccgcctgacgccgccctcgtgcacgcccggcacccccgccgcgctgccgagcccggggccggacaaggagccggagcgggaggcggcggggtcggggtccgggtcggccaccaccccgcgctcccccgcgcagctcgggagctcgcagctgcaccggtggtcgcgggcccgcgcgcaccggtccgggcggcggctggagtggccgacgatacgggaccgcggcagcggcggggcctcgtcgccgccgaccccgaccaggccgcacccgtcgtccgacgaggcggcgtccgcggcggcgaaggtcgcggtggaggaggaggatggctacggggtggttgggagggacgaggcggcgaagtcgatctacatggtgtccgacgggacggggtggacggcggagcactccgtcaacgccgcgctcggccagttcgagcactgcctcgtcgaccgcggctgcgccgtcaacacacacctcttcaacgggattgatgacatggatagacttattgagatagtaaagcaagcagcaaaagaaggagcactggttttatatactcttgctgatccttcaatggctgaggcaactaagaaggcctgtgagctttggggtgttccatccaatgatattcttcgtcctactattgaagccatagcttcccatattggtgttgctccatctggaattccacgaagttctcctagccggaagggtcaacttactgaggattacttccgacgaattgaagctattgattttaccatcaaacaagatgacggtgctcagccacagaaccttaaccgtgcacacattgtacttgttggtgtttcacgtactggaaagacaccattgtcaatatatctggctcaaaaagggtataaagtggcaaatgttccaattgtaatgggagtgaatcttccaaagtccctttttgagattgatcaagacaagatttttggattgacaataaaccctgtggttcttcaagcaatcaggaaggcaagggccaaaactctaggatttcatgggcaaaaaagcaattatgctgaaatggaacatgtcaggggggagttggatcatgccaatcaaattttcgcccagcatcctatatggccagtcatcgaagtcactggaaaagctatagaggaaacagctgctgtcgttgtgaggatattccatgataggaaacagaagtgcgccatgccacgcatatcaaaacgggtggctccaattagaatctacgattatctgtcagagatggttaacactcacgttgagtatcaaaagatttttgctagggacttttaa

SEQ ID NO: 124978 - protein, 471 aa, Oryza sativa
MSSSSSTSPRFGSMISAKLASPPPSLLLPPSPRLQGRRLTPPSCTPGTPAALPSPGPDKEPEREAAGSGSGSATTPRSPAQLGSSQLHRWSRARAHRSGRRLEWPTIRDRGSGGASSPPTPTRPHPSSDEAASAAAKVAVEEEDGYGVVGRDEAAKSIYMVSDGTGWTAEHSVNAALGQFEHCLVDRGCAVNTHLFNGIDDMDRLIEIVKQAAKEGALVLYTLADPSMAEATKKACELWGVPSNDILRPTIEAIASHIGVAPSGIPRSSPSRKGQLTEDYFRRIEAIDFTIKQDDGAQPQNLNRAHIVLVGVSRTGKTPLSIYLAQKGYKVANVPIVMGVNLPKSLFEIDQDKIFGLTINPVVLQAIRKARAKTLGFHGQKSNYAEMEHVRGELDHANQIFAQHPIWPVIEVTGKAIEETAAVVVRIFHDRKQKCAMPRISKRVAPIRIYDYLSEMVNTHVEYQKIFARDF

SEQ ID NO: 124979 - DNA, 1335 bp, Oryza sativa
  CDS (1)..(1335)
atgtcgtcgtcgtcgtcgacgtccccgcggttcggctcgatgataagcgcgaagctggcgtcgccgccgccgtcgctgctcctcccgccgtcgcctcgcctacagggccgccgcctgacgccgccctcgtgcacgcccggcacccccgccgcgctgccgagcccggggccggacaaggagccggagcgggaggcggcggggtcggggtccgggtcggccaccaccccgcgctcccccgcgcagctcgggagctcgcagctgcaccggtggtcgcgggcccgcgcgcaccggtccgggcggcggctggagtggccgacgatacgggaccgcggcagcggcggggcctcgtcgccgccgaccccgaccaggccgcacccgtcgtccgacgaggcggcgtccgcggcggcgaaggtcgcggtggaggaggaggatggctacggggtggttgggagggacgaggcggcgaagtcgatctacatggtgtccgacgggacggggtggacggcggagcactccgtcaacgccgcgctcggccagttcgagcactgcctcgtcgaccgcggctgcgccgtcaacacacacctcttcaacgggattgatgacatggatagacttattgagatagtaaagcaagcagcaaaagaaggagcactggttttatatactcttgctgatccttcaatggctgaggcaactaagaaggcctgtgagctttggggtgttccatccaatgatattcttcgtcctactattgaagccatagcttcccatattggtgttgctccatctggaattccacgaagttctcctagccggaagggtcaacttactgaggattacttccgacgaattgaagctattgattttaccatcaaacaagatgacggtgctcagccacagaaccttaaccgtgcacacattgtacttgttggtgtttcacgtactggaaagacaccattgtcaatatatctggctcaaaaagggtataaagtggcaaatgttccaattgtaatgggagtgaatcttccaaagtccctttttgagattgatcaagacaagatttttggattgacaataaaccctgtggttcttcaagcaatcaggaaggcaagggccaaaactctaggatttcatgggcaaaaaagcaattatgctgaaatggaacatgtcaggggggagttggatcatgccaatcaaattttcgcccagcatcctatatggccagtcatcgaagtcactggaaaagctatagaggaaacagctgctgtcgttgtgaggatattccatgataggaaacagaagtgcgccatgccacgcatatcaaaacggtactag

SEQ ID NO: 124980 - protein, 444 aa, Oryza sativa
MSSSSSTSPRFGSMISAKLASPPPSLLLPPSPRLQGRRLTPPSCTPGTPAALPSPGPDKEPEREAAGSGSGSATTPRSPAQLGSSQLHRWSRARAHRSGRRLEWPTIRDRGSGGASSPPTPTRPHPSSDEAASAAAKVAVEEEDGYGVVGRDEAAKSIYMVSDGTGWTAEHSVNAALGQFEHCLVDRGCAVNTHLFNGIDDMDRLIEIVKQAAKEGALVLYTLADPSMAEATKKACELWGVPSNDILRPTIEAIASHIGVAPSGIPRSSPSRKGQLTEDYFRRIEAIDFTIKQDDGAQPQNLNRAHIVLVGVSRTGKTPLSIYLAQKGYKVANVPIVMGVNLPKSLFEIDQDKIFGLTINPVVLQAIRKARAKTLGFHGQKSNYAEMEHVRGELDHANQIFAQHPIWPVIEVTGKAIEETAAVVVRIFHDRKQKCAMPRISKRY

SEQ ID NO: 124981 - DNA, 1281 bp, Zea mays
  CDS (1)..(1281)
atgattgggtgcgccaagccgctcgcggcgccgctgcaggcatgggctcgcccgccgtctcccgccggtcgccgcctccccccgtcgttctgcgcccctgacacctccccagctctcacccgcgccgtcgagagcccaggccagtctcagtctgacgacgccccgccaccacgctcgggtgaggccgcctcgtccctggcgccgcgcgcgagctcgcatctcgaccgatggtcccggtcgcgggcgctgcggtcgggccaccggccggcgctgaaccgcgcggcgctctcctcggcctcggtctcggcgccgccggtgatcaagtcgccgcggcccgaggacgctgccgtggcggcggaggatggcgaggacgacgacgtgtgcgaggccgagagggacgccgcggccgggaaggccatctacatagtgtcagacgggaccgggtggaccgcggagcactcggtgaacgccgcgctcggacagttcgagaactgcctcgccgaccgcggctgcgctgtcaacacccacctcttctccttgattgacgacatggatcgacttattgaggtaataaagcaagcagcaaaggaaggggcactggttctctacacccttgccgatccttcaatggccgaggcgactaagaaggcctgcgatttctggggtgttccatgcaccgatgttcttcggcctactgtcgaagccattgcctctcacatcggtgttgctccatctggaattccacgaagctctccgagtcgaaatggtcggctatcagaggattacttccaacggatcgatgctatcgatttcaccatcaaacaagacgacggggctctgccacagaacctctaccgcgcagacatcgtgcttgccggcgtttcgcgtacagggaagacgccactgtcgatatacctagctcaaaagggatacaaggtggcaaatgtcccaatcgtgatgggagtggaccttccaaagtccctttttgagatcaaccaggacaaggtttttggactgacaataaacccagcgatccttcaggcgattagaaagaccagggccaagactctaggttttgatgggcgtcagagcaattacgctgagatggaccatgtgaggcaggaactggtccatgcgaatcaaatctttgctcagaatccatcgtggccagtcattgcggtcactggaaaagctatcgaggaaacagctgctgtcatcttggggatcctccatgacaggaagcagaagtgctccatgccacgcatatcaaaacgatactag

SEQ ID NO: 124982 - protein, 426 aa, Zea mays
MIGCAKPLAAPLQAWARPPSPAGRRLPPSFCAPDTSPALTRAVESPGQSQSDDAPPPRSGEAASSLAPRASSHLDRWSRSRALRSGHRPALNRAALSSASVSAPPVIKSPRPEDAAVAAEDGEDDDVCEAERDAAAGKAIYIVSDGTGWTAEHSVNAALGQFENCLADRGCAVNTHLFSLIDDMDRLIEVIKQAAKEGALVLYTLADPSMAEATKKACDFWGVPCTDVLRPTVEAIASHIGVAPSGIPRSSPSRNGRLSEDYFQRIDAIDFTIKQDDGALPQNLYRADIVLAGVSRTGKTPLSIYLAQKGYKVANVPIVMGVDLPKSLFEINQDKVFGLTINPAILQAIRKTRAKTLGFDGRQSNYAEMDHVRQELVHANQIFAQNPSWPVIAVTGKAIEETAAVILGILHDRKQKCSMPRISKRY

SEQ ID NO: 124983 - DNA, 24 bp, Artificial sequence
  primer
atggataatgctgttgatcgccac

SEQ ID NO: 124984 - DNA, 24 bp, Artificial sequence
  primer
ttagtacattcggcgactaaggcc

SEQ ID NO: 124985 - protein, 277 aa, Artificial sequence
  consensus sequence
  Variant (3)..(3): Xaa in position 3 is any amino acid
  Variant (5)..(6): Xaa in position 5 to 6 is any amino acid
  Variant (8)..(8): Xaa in position 8 is any amino acid
  Variant (10)..(14): Xaa in position 10 to 14 is any amino acid
  Variant (15)..(15): Xaa in position 15 is any or no amino acid
  Variant (17)..(17): Xaa in position 17 is any amino acid
  Variant (20)..(43): Xaa in position 20 to 43 is any amino acid
  Variant (44)..(44): Xaa in position 44 is any or no amino acid
  Variant (46)..(74): Xaa in position 46 to 74 is any amino acid
  Variant (75)..(83): Xaa in position 75 to 83 is any or no amino acid
  Variant (85)..(114): Xaa in position 85 to 114 is any amino acid
  Variant (115)..(118): Xaa in position 115 to 118 is any or no amino acid
  Variant (120)..(121): Xaa in position 120 to 121 is any amino acid
  Variant (124)..(124): Xaa in position 124 is any amino acid
  Variant (126)..(132): Xaa in position 126 to 132 is any amino acid
  Variant (136)..(142): Xaa in position 136 to 142 is any amino acid
  Variant (143)..(144): Xaa in position 143 to 144 is any or no amino acid
  Variant (147)..(148): Xaa in position 147 to 148 is any amino acid
  Variant (150)..(150): Xaa in position 150 is any amino acid
  Variant (155)..(155): Xaa in position 155 is any amino acid
  Variant (160)..(162): Xaa in position 160 to 162 is any amino acid
  Variant (164)..(164): Xaa in position 164 is any amino acid
  Variant (166)..(167): Xaa in position 166 to 167 is any amino acid
  Variant (168)..(168): Xaa in position 168 is any or no amino acid
  Variant (170)..(172): Xaa in position 170 to 172 is any amino acid
  Variant (175)..(175): Xaa in position 175 is any amino acid
  Variant (177)..(180): Xaa in position 177 to 180 is any amino acid
  Variant (182)..(194): Xaa in position 182 to 194 is any amino acid
  Variant (195)..(196): Xaa in position 195 to 196 is any or no amino acid
  Variant (198)..(198): Xaa in position 198 is any amino acid
  Variant (204)..(204): Xaa in position 204 is any amino acid
  Variant (206)..(207): Xaa in position 206 to 207 is any amino acid
  Variant (209)..(210): Xaa in position 209 to 210 is any amino acid
  Variant (213)..(214): Xaa in position 213 to 214 is any amino acid
  Variant (216)..(218): Xaa in position 216 to 218 is any amino acid
  Variant (219)..(226): Xaa in position 219 to 226 is any or no amino acid
  Variant (228)..(228): Xaa in position 228 is any amino acid
  Variant (231)..(234): Xaa in position 231 to 234 is any amino acid
  Variant (236)..(237): Xaa in position 236 to 237 is any amino acid
  Variant (239)..(256): Xaa in position 239 to 256 is any amino acid
  Variant (257)..(257): Xaa in position 257 is any or no amino acid
  Variant (259)..(260): Xaa in position 259 to 260 is any amino acid
  Variant (262)..(262): Xaa in position 262 is any amino acid
  Variant (265)..(275): Xaa in position 265 to 275 is any amino acid
  Variant (276)..(276): Xaa in position 276 is any or no amino acid
SDXTXXTXEXXXXXXLXQFXXXXXXXXXXXXXXXXXXXXXXXXXIXXXXXXXXXXXXXXXXXXXXXXXXXXXXXXXXXXXXXXDXXXXXXXXXXXXXXXXXXXXXXXXXXXXXXXXXXYXXRIXAXXXXXXXDDGXXXXXXXXXADXXLXGVSRXGKTPXXXYXAXXXGXXXANXPXXXXDXXXXXXXXXXXXXXXKXFGLTIXPXXLXXIRXXRXXXXXXXXXXXSXYAXXXXCXXEXXXXXXXXXXXXXXXXXXXTXXSXEEXXXXXXXXXXXXR

SEQ ID NO: 124986 - protein, 23 aa, Artificial sequence
  protein pattern
  Variant (2)..(2): Xaa in position 2 is Asp or Gln
  Variant (3)..(3): Xaa in position 3 is Ile, Leu or Val
  Variant (4)..(4): Xaa in position 4 is Ile or Val
  Variant (6)..(7): Xaa in position 6 to 7 is any or no amino acid
  Variant (9)..(10): Xaa in position 9 to 10 is any or no amino acid
  Variant (13)..(13): Xaa in position 13 is Cys, Ser or Thr
  Variant (18)..(18): Xaa in position 18 is any amino acid
  Variant (19)..(19): Xaa in position 19 is Cys or Ser
  Variant (20)..(20): Xaa in position 20 is any amino acid
  Variant (22)..(22): Xaa in position 22 is Ile, Leu or Met
AXXXLXXVXXSRXGKTPXXXYXA

SEQ ID NO: 124987 - protein, 28 aa, Artificial sequence
  protein pattern
  Variant (2)..(2): Xaa in position 2 is Ala or Gly
  Variant (4)..(4): Xaa in position 4 is Ser or Thr
  Variant (5)..(5): Xaa in position 5 is Ile or Leu
  Variant (6)..(6): Xaa in position 6 is Ala, Asp, Asn, Gln or Thr
  Variant (7)..(7): Xaa in position 7 is Ala, Pro or Thr
  Variant (8)..(9): Xaa in position 8 to 9 is any amino acid
  Variant (11)..(12): Xaa in position 11 to 12 is any amino acid
  Variant (15)..(16): Xaa in position 15 to 16 is any amino acid
  Variant (18)..(20): Xaa in position 18 to 20 is any amino acid
  Variant (21)..(27): Xaa in position 21 to 27 is any or no amino acid
FXLXXXXXXLXXIRXXRXXXXXXXXXXS

SEQ ID NO: 124988 - protein, 9 aa, Artificial sequence
  protein pattern
  Variant (3)..(3): Xaa in position 3 is any amino acid
  Variant (5)..(5): Xaa in position 5 is Ala or Gly
  Variant (6)..(6): Xaa in position 6 is any amino acid
  Variant (8)..(8): Xaa in position 8 is Ala, Cys or Ser
SDXTXXTXE

SEQ ID NO: 124989 - protein, 17 aa, Artificial sequence
  protein pattern
  Variant (2)..(3): Xaa in position 2 to 3 is any amino acid
  Variant (6)..(6): Xaa in position 6 is Ala, Asp or Glu
  Variant (8)..(8): Xaa in position 8 is Ile or Val
  Variant (9)..(9): Xaa in position 9 is Asp, Glu, Asn or Gln
  Variant (10)..(10): Xaa in position 10 is Phe or Tyr
  Variant (11)..(11): Xaa in position 11 is Ala, Ser or Thr
  Variant (12)..(12): Xaa in position 12 is Ile, Leu or Met
  Variant (13)..(14): Xaa in position 13 to 14 is any amino acid
YXXRIXAXXXXXXXDDG

SEQ ID NO: 124990 - protein, 15 aa, Artificial sequence
  protein pattern
  Variant (2)..(2): Xaa in position 2 is any amino acid
  Variant (4)..(4): Xaa in position 4 is any amino acid
  Variant (5)..(5): Xaa in position 5 is Lys or Arg
  Variant (6)..(7): Xaa in position 6 to 7 is Ala or Val
  Variant (9)..(9): Xaa in position 9 is any amino acid
  Variant (11)..(11): Xaa in position 11 is Phe, Ile or Leu
  Variant (12)..(13): Xaa in position 12 to 13 is any amino acid
  Variant (14)..(14): Xaa in position 14 is Asp, Glu or Gly
  Variant (15)..(15): Xaa in position 15 is Asp or Val
QXGXXXXNXPXXXXX

SEQ ID NO: 124991 - protein, 13 aa, Artificial sequence
  protein pattern
  Variant (2)..(2): Xaa in position 2 is any amino acid
  Variant (3)..(4): Xaa in position 3 to 4 is any or no amino acid
  Variant (6)..(6): Xaa in position 6 is Ile or Val
  Variant (9)..(9): Xaa in position 9 is Ile or Leu
  Variant (10)..(10): Xaa in position 10 is Ala, Ser or Thr
  Variant (11)..(11): Xaa in position 11 is Ala, Ser, Thr or Val
  Variant (12)..(12): Xaa in position 12 is any amino acid
  Variant (13)..(13): Xaa in position 13 is Ile, Leu or Val
TXXXSXEEXXXXX

SEQ ID NO: 124992 - DNA, 1686 bp, Escherichia coli
  CDS (1)..(1686)
atgtacgattttaatctggtgttgctgctgcttcagcagatgtgcgtttttttagtcattgcatggttaatgagtaaaacgccattattcataccgttaatgcaggtcacggttcgtctgccgcataaatttctctgctacatcgtcttttccatcttctgcatcatgggcacctggtttgggttgcacattgacgattctattgccaatacccgtgcgataggcgcggtaatgggcggcttactcggcggtccggtcgtcggtgggctggttgggctgaccggcggcttacatcgatattcgatggggggcatgaccgcgttaagttgcatgatctcgaccatcgttgaaggattactcggtggcctggtacacagcatcctgatccgccgcgggcgcactgataaagtctttaaccccattaccgccggtgccgtcacgttcgtcgctgaaatggtgcaaatgctgatcatccttgcgatcgcccgaccttatgaagatgcggtgcgtctggtgagtaatattgctgcgccaatgatggtcaccaataccgtcggcgcggcgctgtttatgcgtatattgctcgataaacgcgcgatgtttgaaaaatacacttcggctttttctgccactgcgctgaaagtggcagcctcgacggaaggcattttgcgccaggggtttaacgaagtgaacagcatgaaagtggctcaggtgctgtatcaggaactggatattggtgcagtcgcgattaccgatcgagagaaattgctggcctttaccggaattggtgacgaccaccatttacccggcaaaccgatttcttcaacttatactttaaaagcgattgaaaccggtgaagtggtctacgctgatggcaacgaagtaccttaccgttgctctttgcatccgcaatgcaaactggggtcgacgctggtaattccgttgcgtggtgaaaatcagcgggtgatgggcaccatcaaattgtatgaagccaaaaaccgtttattcagttcaatcaaccgcacgttgggtgaggggattgcgcaattgctttcggcgcagatccttgccgggcaatatgagcggcaaaaagcgatgctcacccagtcagagatcaaactgcttcacgcccaggtgaatccccattttttgtttaatgcgcttaacaccattaaagcggtgatccgccgcgacagcgaacaggccagccagctggtgcagtatctttccacttttttccgcaaaaacttaaagcggccttcggagtttgttactctcgccgacgaaattgaacatgtgaatgcttatctgcaaattgaaaaggcgcgcttccagtcgcggttgcaggtcaacattgctattccgcaagaattatcccagcagcaattgcccgcgtttaccctgcaaccgatagtggaaaacgccattaaacatgggacatcacaactgctggatacagggcgagtggcaatcagcgcccgacgtgaggggcaacatttgatgctggagatcgaagacaatgccggtttgtatcaaccggtaaccaatgccagtgggctggggatgaatctggtggataagcgtttacgtgaacggtttggcgatgactatggaataagcgtcgcctgtgagcctgatagttacacccgaataacgttacgactaccatggagggacgaggcataa

SEQ ID NO: 124993 - protein, 561 aa, Escherichia coli
MYDFNLVLLLLQQMCVFLVIAWLMSKTPLFIPLMQVTVRLPHKFLCYIVFSIFCIMGTWFGLHIDDSIANTRAIGAVMGGLLGGPVVGGLVGLTGGLHRYSMGGMTALSCMISTIVEGLLGGLVHSILIRRGRTDKVFNPITAGAVTFVAEMVQMLIILAIARPYEDAVRLVSNIAAPMMVTNTVGAALFMRILLDKRAMFEKYTSAFSATALKVAASTEGILRQGFNEVNSMKVAQVLYQELDIGAVAITDREKLLAFTGIGDDHHLPGKPISSTYTLKAIETGEVVYADGNEVPYRCSLHPQCKLGSTLVIPLRGENQRVMGTIKLYEAKNRLFSSINRTLGEGIAQLLSAQILAGQYERQKAMLTQSEIKLLHAQVNPHFLFNALNTIKAVIRRDSEQASQLVQYLSTFFRKNLKRPSEFVTLADEIEHVNAYLQIEKARFQSRLQVNIAIPQELSQQQLPAFTLQPIVENAIKHGTSQLLDTGRVAISARREGQHLMLEIEDNAGLYQPVTNASGLGMNLVDKRLRERFGDDYGISVACEPDSYTRITLRLPWRDEA

SEQ ID NO: 124994 - DNA, 1686 bp, Salmomella typhi
  CDS (1)..(1686)
atgtacgagtttaatctggtgttgctgctgcttcagcagatgtgcgtgtttctggtcattgcgtggctaatgagtaaaacgcgcctgttcatcccgcttatgcaggtcacggttcgtctgccgcacaagcttctgtgttatgtcatgttttctatcttctgcattatgggcacttattttgggctacatatcgaagattcgattgccaatacccgcgcgattggcgcggtgatgggcggcctactcggcgggccggtcgtcggcgggctggtcggtctgaccggtgggttacatcggtattctatgggcggcatgacggcgctgagctgtatgatttccaccatcgtcgaagggctgctgggcgggttggtacacagcgttctcatacgtcgcggacgcccggacaaagtgtttagcccgctgacggcgggagcaattacgtgtgttgccgaactggtgcagatgctgatcattttactgatagccaggccgtttgacgatgccctgcatctggtcagtaatattgccgcgccgatgatgatgacgaataccgttggcgccgcgctgtttatgcgtattttgctcgataagcgcgccatgttcgaaaaatatacttcggcattttctgttaccgcgctgaaggtcgccgcgtcaacggaggggattctgcgtcagggatttaacgaagtgaacagtatgaaggtggcgcaggtgttatatcaggagctggatattggcgccgtcgccatcaccgatcgcgaaaaactgctggcttttactggtattggcgacgatcaccatctaccgggcaaacccatttcatcaggttatacgctgaaagcaattgaaaccggagaggtggtttatgccgatggcaacgaagtgccgtatcgctgttcgctacacccgcagtgtaaactcggctcgacgctggtgatcccgctgcgtggcgaaaatcagcgagtcatgggcaccattaaattgtacgaagcgaaaaaccgactgttcagctcaattaaccgtactctgggggagggtattgcgcagcttttatccgcgcagatcctggccgggcagtatgaacggcagaaggcgttgctgacgcagtcagagatcaagctgttgcacgcgcaggtgaatccgcattttctgtttaatgcgctcaataccattaaagcggtgattcgccgcgacagcgaacaggccagccaactggtgcagtacttgtcgaccttttttcgcaaaaatttaaaacgcccgtcggaaatcgtcacgctggcggatgaaattgaacacgtgaacgcttacctgcaaattgaaaaagcgcgttttcagtcgcgtctgcaggtacagcttgatgttccatcgacgctttcacgtcagaaattgcctgcgtttacattacagccgattgttgagaacgccattaaacatggcacgtcgcaactgcttgataccggcaacgtcgctattcgcgcccggcgcgaagggcagcatttgatgttagatattgaagataatgcgggactgtatcagccttccgccggcagtagcgggctggggatgagcttggtggataaacgtctgcgcgaacactttggcgatgattatggtattagcgtggcctgcgagccggactgttttacccgaattacattacgacttccactggaggaggacgcatga

SEQ ID NO: 124995 - protein, 561 aa, Salmomella typhi
MYEFNLVLLLLQQMCVFLVIAWLMSKTRLFIPLMQVTVRLPHKLLCYVMFSIFCIMGTYFGLHIEDSIANTRAIGAVMGGLLGGPVVGGLVGLTGGLHRYSMGGMTALSCMISTIVEGLLGGLVHSVLIRRGRPDKVFSPLTAGAITCVAELVQMLIILLIARPFDDALHLVSNIAAPMMMTNTVGAALFMRILLDKRAMFEKYTSAFSVTALKVAASTEGILRQGFNEVNSMKVAQVLYQELDIGAVAITDREKLLAFTGIGDDHHLPGKPISSGYTLKAIETGEVVYADGNEVPYRCSLHPQCKLGSTLVIPLRGENQRVMGTIKLYEAKNRLFSSINRTLGEGIAQLLSAQILAGQYERQKALLTQSEIKLLHAQVNPHFLFNALNTIKAVIRRDSEQASQLVQYLSTFFRKNLKRPSEIVTLADEIEHVNAYLQIEKARFQSRLQVQLDVPSTLSRQKLPAFTLQPIVENAIKHGTSQLLDTGNVAIRARREGQHLMLDIEDNAGLYQPSAGSSGLGMSLVDKRLREHFGDDYGISVACEPDCFTRITLRLPLEEDA

SEQ ID NO: 124996 - DNA, 1677 bp, Vibrio cholerae
  CDS (1)..(1677): transl_table=11
atggatctcatcctctcattactgcaacagatgtgtgtttaccttgttctcgcctatatgttgagtaaaacgccgatcttcattcctttgctgaacatttctggtcggtttgaccacaaaatcagtgtttatgttctgttttcgctgttttgcattatgggcacctactttggcctgcagatcaatgatgcgattgccaatacgcgtgccatcggcgctgtgatggggggtctgtttggtggacctgtgattggttttgcggtgggcctcaccggaggcttacaccgctataccttagggggatttaccgatctcgcctgcgcgatttccaccaccgctgaaggtttaattggcggcttgctacacacctatttgctgcgcaaaggcaaagggaagttactgtttagcccaagtattgtctttgcggtcaccttatttgccgaaattgtgcagatgctgatcatcttggtcgtggcgaaaccgtttgaacagtcttacgcgctggtttccaccatcgccgcgccgatgatcattgctaactcagtcggtgccgcactgtttatgagcatcttgctcgatcgcaaaaccatttttgaagagtattccgcgacgttttcacgccgcgctctgaatattgccgagcgttctgttggtatccttgctgccggttttaacccagaaaacgccaacaaaattgcccgaatcgtgtatgaacagaccaatgtcggcgcggtctcgatcaccgatcgcgaaaaaatcctcgcctttgtcgggattggcgatgatcaccataaaccgaatacaccgatcagctcgcaaagcacgctcgatgcgattaatcgcaacgccatcatctatctcgatggcaaagaacatccttatcaatgttctttgtctccgacctgcaaactggggtctgcgttaatcattccgttgcgagctggcgatcgagtgatcggcaccatcaagctctacgagccaaaacgtaagctgttttccaccatcaatatgtcaatggcacagggcatcgcccaactgctatccagccaaattttgtatggcgaatatcagcaaaaacaaatcctgctctcgcgagcggaaatcaaactcctgcaagcgcaggtcaatccgcattttttgtttaacgcactcaataccatcagtgcggtgatccgccgtgagccagataaagctcgcgagctgattttgcatctgtcgcaatttttccgcagcaacctcaaacagaacgtcgaaaccgtcactttgcgtgaagagcttgcccacgtgaacgcttacctcactattgaaaaagcgcgctttagtgacaggctcgatgtggaaattgcgattgatgatgccctgctagaacgcaatgtcccgagcttcactttgcagcctttggtggaaaatgccatcaaacacggcacctctaacctactcgaagctggcaaagtgcgcatttacagtgaagtggttgaagggggaatgcgcgtcgtggtggaagacaacgccgggctctatcagcctccgagtgaagattatgatggtttagggatgcaaattgttgaaaagcgcctcaccaacaaatttggtcttaagtcagggctacagattgaggtcgcgccacaagagtacacgcgaatgagctttgtcattccacagcaaggcacttactaa

SEQ ID NO: 124997 - protein, 558 aa, Vibrio cholerae
MDLILSLLQQMCVYLVLAYMLSKTPIFIPLLNISGRFDHKISVYVLFSLFCIMGTYFGLQINDAIANTRAIGAVMGGLFGGPVIGFAVGLTGGLHRYTLGGFTDLACAISTTAEGLIGGLLHTYLLRKGKGKLLFSPSIVFAVTLFAEIVQMLIILVVAKPFEQSYALVSTIAAPMIIANSVGAALFMSILLDRKTIFEEYSATFSRRALNIAERSVGILAAGFNPENANKIARIVYEQTNVGAVSITDREKILAFVGIGDDHHKPNTPISSQSTLDAINRNAIIYLDGKEHPYQCSLSPTCKLGSALIIPLRAGDRVIGTIKLYEPKRKLFSTINMSMAQGIAQLLSSQILYGEYQQKQILLSRAEIKLLQAQVNPHFLFNALNTISAVIRREPDKARELILHLSQFFRSNLKQNVETVTLREELAHVNAYLTIEKARFSDRLDVEIAIDDALLERNVPSFTLQPLVENAIKHGTSNLLEAGKVRIYSEVVEGGMRVVVEDNAGLYQPPSEDYDGLGMQIVEKRLTNKFGLKSGLQIEVAPQEYTRMSFVIPQQGTY

SEQ ID NO: 124998 - DNA, 1686 bp, Escherichia coli O157:H7 EDL933
  CDS (1)..(1686): transl_table=11
atgtacgattttaatctggtgttgctgctgcttcagcagatgtgcgtttttttagtcattgcgtggttaatgagtaaaacgccattattcataccgttaatgcaggtcacggttcgtctgccgcataaatttctctgctacatcgtcttttccatcttctgcatcatgggcacctggtttgggttgcacattgacgattctattgccaatacccgtgcgataggcgcggtaatgggcggcttactcggcggtccggtcgtcggtgggctggttggcctgaccggcgggttacatcgatattcgatggggggcatgaccgcgctaagttgcatgatctcgaccatcgttgaaggattgctcggcggcctggtacacagcatcctgatccgtcgcgggcgcactgataaagtctttaaccccattaccgctggtgccgtcacgttcgtcgctgaaatggtgcaaatgctgatcatcctggcgatcgcccgaccttatgaagatgcggtgcgtctggtgagtaatattgctgcgccaatgatggtcaccaataccgtcggcgcggcgctgtttatgcgtatattgctcgataaacgcgcgatgtttgaaaaatacacttcggctttttctgccactgcgctgaaagtggcagcctcgacggaaggcattttgcgccaggggtttaacgaagtgaacagcatgaaagtggctcaggtgctgtatctggagctggatattggtgcagtcgcgattaccgatcgagagaaattgctggcctttaccggaattggtgacgaccaccatttacccggcaaaccgatttcttcaacttatactttaaaagcgattgaaaccggtgaagtggtctacgctgatggcaacgaagtaccttatcgttgctctttgcatccgcaatgcaaactggggtcgacgctggtaattccgttgcgtggtgaaaatcagcgggtgatgggcaccatcaaattgtatgaagccaaaaaccgtttatttagttcaatcaaccgcacgctgggcgaggggattgcgcaactgctttcggcgcagatcctcgccgggcaatatgagcggcaaaaagcgatgctcacccagtcagagatcaaactgcttcacgcccaggtgaacccccattttttgtttaatgcgcttaacaccattaaagcggtgatccgtcgcgacagcgaacaggccagccagctggtgcagtatctttccacttttttccgcaaaaacttaaagcggccttcggagtttgttactctcgccgacgaaattgaacatgtgaatgcttatctgcaaattgaaaaggcgcgcttccagtcgcggttgcaggtcaacattgctattccgcaagaattatcccagcagcaattgcccgcgtttaccctgcaaccgatagtggaaaacgccattaaacatgggacatcacaactgctggatacagggcgagtggcaatcagcgtccgacgtgaggggcaacatttgatgctggagatcgaagacaatgccggtttgtatcaaccggtaaccaatgccagtgggctggggatgaatctggtggataagcgtttacgtgaacggtttggcgatgactatgggataagcgtcgcctgtgagcctgatagttacacccgaataacgttacgactaccatggagggacgaggcatga

SEQ ID NO: 124999 - protein, 561 aa, Escherichia coli O157:H7 EDL933
MYDFNLVLLLLQQMCVFLVIAWLMSKTPLFIPLMQVTVRLPHKFLCYIVFSIFCIMGTWFGLHIDDSIANTRAIGAVMGGLLGGPVVGGLVGLTGGLHRYSMGGMTALSCMISTIVEGLLGGLVHSILIRRGRTDKVFNPITAGAVTFVAEMVQMLIILAIARPYEDAVRLVSNIAAPMMVTNTVGAALFMRILLDKRAMFEKYTSAFSATALKVAASTEGILRQGFNEVNSMKVAQVLYLELDIGAVAITDREKLLAFTGIGDDHHLPGKPISSTYTLKAIETGEVVYADGNEVPYRCSLHPQCKLGSTLVIPLRGENQRVMGTIKLYEAKNRLFSSINRTLGEGIAQLLSAQILAGQYERQKAMLTQSEIKLLHAQVNPHFLFNALNTIKAVIRRDSEQASQLVQYLSTFFRKNLKRPSEFVTLADEIEHVNAYLQIEKARFQSRLQVNIAIPQELSQQQLPAFTLQPIVENAIKHGTSQLLDTGRVAISVRREGQHLMLEIEDNAGLYQPVTNASGLGMNLVDKRLRERFGDDYGISVACEPDSYTRITLRLPWRDEA

SEQ ID NO: 125000 - DNA, 1686 bp, Salmonella typhimurium LT2
  CDS (1)..(1686): transl_table=11
atgtacgagtttaatctggtgttgctgctgcttcagcagatgtgcgtgtttctggtcattgcgtggctaatgagtaaaacgcgcctgttcatcccgcttatgcaggtcacggttcgtctgccgcacaagcttctgtgttacgtcacgttttctatcttctgcatcatgggcacttattttgggctgcatatcgaagattcgattgccaatacccgcgcaattggcgcggtgatgggcggcctactcggcgggccggtcgtcggcgggctggtcggtctgaccggtgggttacatcggtattctatgggcggcatgacggcgctgagctgtatgatttccaccatcgtcgaagggctgttgggcgggttggtacacagcgttctcatacgtcgcggacgcccggacaaagtgtttagcccgctgacggcgggagcaattacgtgtattgccgaactggtgcagatgctgatcattttactgatagccaggccgtttgacgatgccttgcatctggtcagtaatattgccgcgccgatgatggtgacgaataccgttggcgccgcgctgttcatgcgtattttgctcgataagcgcgccatgttcgaaaaatatacttcggcattttctgctaccgcgctgaaggtcgccgcgtcaacggaggggattctgcgtcagggatttaacgaagtgaacagtatgaaggtggcgcaggtgttatatcaggagctggatattggcgccgtcgccatcaccgatcgcgaaaaactgctggcttttactggtattggcgacgatcaccatctaccgggcaaacccatttcatcaggttatacgctgaaagcaattgaaaccggagaggtggtttatgccgatggcaacgaagtgccgtatcgctgttcgctacacccgcagtgtaaactcggttcgacgctggtgatcccgctgcgtggcgaaaatcagcgagtcatgggcaccattaaattgtacgaagcgaaaaaccgactgttcagctcaattaaccgcaccctgggagagggtattgcgcagcttttatccgcgcagatcctggccgggcagtatgaacggcagaaggcgttgctgacgcagtcagagatcaagctgttgcacgcgcaggtgaacccgcattttctgtttaacgcgctcaataccattaaagcggtgattcgccgcgacagcgaacaggccagccaactggtgcagtacttgtcgaccttttttcgcaaaaatttaaaacgcccgtcggaaatcgtcacgctggcggatgaaattgaacacgtaaacgcttatctgcaaattgaaaaagcgcgttttcagtcgcgtctgcaggtacagcttgatgttccatcgacgctttcacgtcagaaattgcctgcgtttacattacagccgattgttgagaacgccattaaacatggcacgtcgcaactgcttgataccggcaacgtcgctattcgcgcccggcgcgaagggcagcatttgatgttagatattgaggataatgcgggactgtatcagccttccgccggcagtagcgggctggggatgagtctggttgataaacgtctgcgcgaacactttggcgatgattatggtattagcgtggcctgcgagccggactgttttacccgaattacattacgacttccactggaggaggacgcatga

SEQ ID NO: 125001 - protein, 561 aa, Salmonella typhimurium LT2
MYEFNLVLLLLQQMCVFLVIAWLMSKTRLFIPLMQVTVRLPHKLLCYVTFSIFCIMGTYFGLHIEDSIANTRAIGAVMGGLLGGPVVGGLVGLTGGLHRYSMGGMTALSCMISTIVEGLLGGLVHSVLIRRGRPDKVFSPLTAGAITCIAELVQMLIILLIARPFDDALHLVSNIAAPMMVTNTVGAALFMRILLDKRAMFEKYTSAFSATALKVAASTEGILRQGFNEVNSMKVAQVLYQELDIGAVAITDREKLLAFTGIGDDHHLPGKPISSGYTLKAIETGEVVYADGNEVPYRCSLHPQCKLGSTLVIPLRGENQRVMGTIKLYEAKNRLFSSINRTLGEGIAQLLSAQILAGQYERQKALLTQSEIKLLHAQVNPHFLFNALNTIKAVIRRDSEQASQLVQYLSTFFRKNLKRPSEIVTLADEIEHVNAYLQIEKARFQSRLQVQLDVPSTLSRQKLPAFTLQPIVENAIKHGTSQLLDTGNVAIRARREGQHLMLDIEDNAGLYQPSAGSSGLGMSLVDKRLREHFGDDYGISVACEPDCFTRITLRLPLEEDA

SEQ ID NO: 125002 - DNA, 1740 bp, Thermoanaerobacter tengcongensis MB4
  CDS (1)..(1740): transl_table=11
atgtatgaccttttaatcattctggcggaaagatttagcataattgcacttttagcctttctcctctcaaaagccgaatttttcaaaaaaatggtatacaatactgctctcaccaaaaaagacctgctcatcaccatgcttatatttggcctgattggaatagcaggaacttacctaggagtccccataaatgacgcaatagcaaattcaagagtagtgggccctatggtggcagggcttataggcggacctcttgtaggcctgggcgcaggccttatagcaggtgtacatcgcttcttcctaggaggcttcacagccatctcctgtggaatatccaccattattgaaggttttgcaggtggcctcatacgaaaatactacaaaggtgaatatataccctgggaatacgcatttatggcaggatttataggcgaaggagtgcagatgctgataattttggcgacagctaaaccttttcatcaggccgttgaacttgtaaaaatcataggaatccctatgatggtagtaaatgctacaggaataggcatttttatgataatgataaaatccatattcgacgaaaaagaacagattgctgcaatgcaggcaaaaatagctttagatatcgcctccaaaactcttccttatttgagaaaaggcttaaatgaagaatccgctcaaaagacagcagaaataatcttagagtgcacaaatgtctccgcagtagcaatcactgacaaaaagagaatactggcccatgtcggaatagcttctgaccaccacaaaccagggatgtccatactaacaaatgccacaaaagaagcaatacaaaaaggagaaataaggattgcaaagtctaaagaagaaataggctgtccttatgaaaactgtgaacttcactctgctgtaattgtaccactttttaaatatgacaaactagtaggtactctaaaactttacaaaggaggaaaaaaatcgcgcggcaatgtaataaccaatacagagatagaactggcgaaggggctgggacatttgatatcatatcagctagaaattgcagatgcagagtaccagaaaaaattggcaaccgaggcaaaattaaatgcccttcagtcccaaataaaccctcattttctgtttaactctttaaatactgttatttccttcatacgcacaaatccagaaagggcaagagaacttttaataaatttgagtgaatatttcaggcacaatctgagaaatgtaggaaaatatataaccattgaagaagaattaaacaatataaacgcgtatctgtatattgaaaaagctcgttttggcgacaaactgaatgtagagcaagatgtagatataagtgtgctttcctgttacatgccctcatttatactgcagcctattgtagaaaatgctgtaaagcatggaattttaccaaaaggcgaaagagggacggtaaaaataaaaataaaagatgaaggagattatataagcttctatgtggaagatgatggggtaggaatgactgaagaagaactgcaaaatctctttaagaagggagtaggaaaaggagcaggaataggtctttacaatgtcaacgaaaggctcactgtggctttttgcaaggaatgtgccttgtcaattgaaagtaaattaggtgaaggcacaaaagtatccttcaaaattcctaaaatttacctgcagaggaatgatatttatgaagaagctgagagcgttaattattga

SEQ ID NO: 125003 - protein, 579 aa, Thermoanaerobacter tengcongensis MB4
MYDLLIILAERFSIIALLAFLLSKAEFFKKMVYNTALTKKDLLITMLIFGLIGIAGTYLGVPINDAIANSRVVGPMVAGLIGGPLVGLGAGLIAGVHRFFLGGFTAISCGISTIIEGFAGGLIRKYYKGEYIPWEYAFMAGFIGEGVQMLIILATAKPFHQAVELVKIIGIPMMVVNATGIGIFMIMIKSIFDEKEQIAAMQAKIALDIASKTLPYLRKGLNEESAQKTAEIILECTNVSAVAITDKKRILAHVGIASDHHKPGMSILTNATKEAIQKGEIRIAKSKEEIGCPYENCELHSAVIVPLFKYDKLVGTLKLYKGGKKSRGNVITNTEIELAKGLGHLISYQLEIADAEYQKKLATEAKLNALQSQINPHFLFNSLNTVISFIRTNPERARELLINLSEYFRHNLRNVGKYITIEEELNNINAYLYIEKARFGDKLNVEQDVDISVLSCYMPSFILQPIVENAVKHGILPKGERGTVKIKIKDEGDYISFYVEDDGVGMTEEELQNLFKKGVGKGAGIGLYNVNERLTVAFCKECALSIESKLGEGTKVSFKIPKIYLQRNDIYEEAESVNY

SEQ ID NO: 125004 - DNA, 1698 bp, Yersinia pestis KIM
  CDS (1)..(1698): transl_table=11
atgggcattagccaaacagaactgatcttttcccttttacaacagatgtgtgtgtatttggttattgcctatctgctgagtaaaacaccgctttttatccccttgatgcaagttactatcaggttgccccataaactggtgtgctatctcaccttttccatgttttgcattatgggcacctactttggtcttaacattgatgattctatcgcgaatactcgtgctatcggcgcagtcttgggtggaatgctaggggggccatcggtcgggtttctggtagggctaaccggaggcctgcatcgttattcaatgggggggatgaccgcaaccgcctgtatgttatcaaccattgctgaagggttattgggcggccttctccacctttatctgacacgtaaaaaccgcctcgatttattgtttcagccactggtggtcgcgggcattacactggtagccgaagtgctacaaatgatgattattctggccgtcgcccgccccttcaatgaagcggtcgaattggttgaaaatattgccttgccgatgatgatcaccaataccattggtgccgccatgtttatgcgtatcttattagaccgccgggccattttcgaaaaatacaccacggcattttctgccaaggcgctacaaattgctgcacgggcggaggggctactgcgccatggctttgaccagcagaacagtatgcgggtggctcgtatcttgtatgaggagttgggtgtgggcgcagtagccattactgatcgcgaaaaattactggcctttatcggtagcggtgccgaccaccatcaggtgggcagtgctattacctccagccatacccaccgcgcgattgaactcaatcaggtggtgtatgccgacggcaatgccgtgccttatacctgctcaatttcacccacctgtaagctgggttcaacactggttatccctttgcgaggtgaagagcaccgggtgatcggcagtatcaaattgtatgagccaaaaagtaaattattctccagcattaaccgcaccttaggagagggtattgcgcacttattgtcagcacagattttggcgggagaattcgaacaacaaaaacaattactggcgcaatctgaaatcaaactgctccatgcacaggtcaacccacatttcttgtttaatgcgctcaataccctatcagtggtgatccgccgtaatccagatcatgcccgcaatttggtgctttctttatcaacctttttccgtaaaaacctaaaacgcagccatgacgtggtcacgttaagtgatgagattgaacatgtgaatgcgtatcttgaaatagaaaaggcacgctttgctgatcgtctgaccgtcacggtttcactaccgaatgaactgatggaggcgcacttacccgcgttctccctgcaacccgtggtagaaaatgcaatcaaacatggtatctcacagatgttcagtaacggacgggtcacgttgcgcggtaaattggatgacaacacgttggtattggaagtcgaagataacgccggtttatatcagccgcagccggatggcgatggtctgggaatgagtttggttgatcggcggattaaagcgcgctatggcaaggaatatggcatcaccgtcgtcagtaacgcggaagtatttacccgtattattattaagttaccgtttattaccgtgagcgagcagtaa

SEQ ID NO: 125005 - protein, 565 aa, Yersinia pestis KIM
MGISQTELIFSLLQQMCVYLVIAYLLSKTPLFIPLMQVTIRLPHKLVCYLTFSMFCIMGTYFGLNIDDSIANTRAIGAVLGGMLGGPSVGFLVGLTGGLHRYSMGGMTATACMLSTIAEGLLGGLLHLYLTRKNRLDLLFQPLVVAGITLVAEVLQMMIILAVARPFNEAVELVENIALPMMITNTIGAAMFMRILLDRRAIFEKYTTAFSAKALQIAARAEGLLRHGFDQQNSMRVARILYEELGVGAVAITDREKLLAFIGSGADHHQVGSAITSSHTHRAIELNQVVYADGNAVPYTCSISPTCKLGSTLVIPLRGEEHRVIGSIKLYEPKSKLFSSINRTLGEGIAHLLSAQILAGEFEQQKQLLAQSEIKLLHAQVNPHFLFNALNTLSVVIRRNPDHARNLVLSLSTFFRKNLKRSHDVVTLSDEIEHVNAYLEIEKARFADRLTVTVSLPNELMEAHLPAFSLQPVVENAIKHGISQMFSNGRVTLRGKLDDNTLVLEVEDNAGLYQPQPDGDGLGMSLVDRRIKARYGKEYGITVVSNAEVFTRIIIKLPFITVSEQ

SEQ ID NO: 125006 - DNA, 1683 bp, Shewanella oneidensis MR-1
  CDS (1)..(1683): transl_table=11
atgtccttgatcttgcttctgacccaacagatgtcactctatttagtgatcgtttatttagtcagtaaaacaccgctttttaaactgtttgcagaaacgtcaccgcgcctgcctcacaagatatttatttatctggttttttctagcttttgtatcatggcgacctactttggtgagcaaacctcgggggctattgccaatactcgtgccatgggcgccgtattaggcggattgctcggcggccctgttacaggttttttggtggggctcactggtggattacaccgctatagtatgggcggctttaccgatttagcctgtgctatctcgacaacactcgaagggctctcggcgggaatgatcagtttttacctgcgccgcgcaggtaagagtgagcttatctacaatccactcttggtttgtctagtgaccttttacgccgaaataatgcagatgagccttattttgctcatcgcttgcccctttgatgccgcttgggagttagttcgtcagattgctccaccgatgttgttggtcaactccatcggcgcggcactatttatgagtatgatccgcgaccaaaaaaccatgttcgataagctctcatctagcttttcaaccaaagcacttaaaatcgctgaacgcagtgtaggtttactttccaagggatttaatgaagaaagtagcggtaaggtcgcgcaaattgtgattgaagaaaccaatgttggtgcggtggccattacggatagagaaaagctcttggcctttatcgggattggcgccgaccaccatatccctggcacgccgatttcctcccaaatcacccttgaggccatcaatcaaaacaaagtaatgtttgccgatggggtcgaaatcccctattcctgctcgatttcgagccagtgtaaactcggctctagtctggttatcccgctgcgcagcgacactgaagtcattggcaccataaagttatacgaacctaaaaataaactgttcttgaacattaaccgtaccttgggtgaagggatcgctcggctattatcgaaccaaattctttatggccgttttgaacaacagcaaaacctactcacccaagccgaattaaaattgctgcaagcacaagtcaatccacactttttattcaacgctctcaatactattagtgcaattattaagcgcgatccggatatgtcgaaacaactgttacaacagttatcacagtttttacggatcaatttaaaacgcacgacgggtttagtcacacttggggatgagctcgatcacatcgcctcctatctcaccatcgagaaagcaagatttattaataaattacaagtcaatattgccattccagagtcactttatcactgtaaagtccctgcatttaccctacagcctattattgagaatgcggtaaaacatggcacctcccatatgattgaccaagggcagatcaaggtcactgggcgtttggatgaacatgtattggcgttagaggtcattgataatgctggcctatatcaaccttctactgactctgaagggttgggaatgaatctagtccataaacggatccaaaacctgtttggcgaacagtacgggctccaagttgaatgcgagccggatgaatacaccaaagtcatcattcgcttacccatagaaaagacggaaactagcacgtga

SEQ ID NO: 125007 - protein, 560 aa, Shewanella oneidensis MR-1
MSLILLLTQQMSLYLVIVYLVSKTPLFKLFAETSPRLPHKIFIYLVFSSFCIMATYFGEQTSGAIANTRAMGAVLGGLLGGPVTGFLVGLTGGLHRYSMGGFTDLACAISTTLEGLSAGMISFYLRRAGKSELIYNPLLVCLVTFYAEIMQMSLILLIACPFDAAWELVRQIAPPMLLVNSIGAALFMSMIRDQKTMFDKLSSSFSTKALKIAERSVGLLSKGFNEESSGKVAQIVIEETNVGAVAITDREKLLAFIGIGADHHIPGTPISSQITLEAINQNKVMFADGVEIPYSCSISSQCKLGSSLVIPLRSDTEVIGTIKLYEPKNKLFLNINRTLGEGIARLLSNQILYGRFEQQQNLLTQAELKLLQAQVNPHFLFNALNTISAIIKRDPDMSKQLLQQLSQFLRINLKRTTGLVTLGDELDHIASYLTIEKARFINKLQVNIAIPESLYHCKVPAFTLQPIIENAVKHGTSHMIDQGQIKVTGRLDEHVLALEVIDNAGLYQPSTDSEGLGMNLVHKRIQNLFGEQYGLQVECEPDEYTKVIIRLPIEKTETST

SEQ ID NO: 125008 - DNA, 1701 bp, Escherichia coli CFT073
  CDS (1)..(1701): transl_table=11
gtgtggtttgcgggtatgtacgattttaatctggtgttgctgctgcttcagcagatgtgcgtttttttagtcattgcgtggttaatgagtaaaacgccattattcataccgttaatgcaggtcacggttcgtctgccgcataaatttctctgctacatcgtcttttccatcttctgcatcatgggcacctggtttgggttgcacattgacgattctattgccaatacccgtgcgataggtgcggtaatgggcggcttactcggcggtccggtcgtcggtgggctggttggtctgaccggcgggttacatcgatattcgatggggggcatgaccgcgctaagttgcatgatctcgaccatcgttgaaggattgctcggtggcctggtacacagcatcctgatccgtcgcgggcgcactgataaagtctttaaccccattaccgccggtgccgtcacgttcgtcgctgaaatggtgcaaatgttgattatcctggcgatcgcccgaccttatgaagatgcggtgcgtctggtgagtaatattgctgcgccaatgatggtcaccaataccgtcggcgcggcgttgtttatgcgtatattgctcgataaacgcgcgatgtttgaaaaatacacttcggctttttctgccactgcgctgaaagtggcggcctcgacggaaggcattttgcgccaggggtttaacgaagtgaacagcatgaaagtggcacaggtgctgtatcaggagctggatattggtgcagtcgcgattaccgatcgagagaaattgctggcctttaccggaattggtgacgaccaccatttacccggcaaaccaatttcttcgacttataccttaaaagcgattgaaaccggtgaagtggtctacgctgatggcaacgaagtgccttaccgttgctctttgcatccgcaatgcaaactggggtcgacgctggtcattccgttgcgtggtgaaaatcagcgagtgatgggtaccatcaaattgtatgaagccaaaaaccgtttattcagttcaatcaaccgcacgttgggcgaggggattgcgcaactgctttcggcgcagatcctcgccgggcaatatgagcggcaaaaagcgatgctcacccagtcagagatcaaactgcttcacgcccaggtgaatccccattttttgtttaatgcgcttaacaccattaaagcggtgatccgccgcgacagcgaacaggccagccagctggtgcagtatctttccacttttttccgcaaaaacttaaagcggccttcggagtttgttactctcgccgacgaaattgaacatgtgaacgcttatctgcaaattgaaaaggcgcgcttccagtcgcggttgcaggtcaacattgctattccgcaagaattatcccagcagcaattgcccgcgtttaccctgcaaccgatagtggaaaacgccattaaacatgggacatcacaactgctggatacagggcgagtggcaatcagcgcccgacgtgaggggcaacatttgatgctggagatcgaagacaatgccggtttgtatcaaccggtaaccaatgccagtgggctggggatgaatctggtggataagcgtttacgtgaacggtttggcgatgactatgggataagcgtcgcctgtgagcctgatagttacacccgaataacgttacgactaccatggagggacgaggcatga

SEQ ID NO: 125009 - protein, 566 aa, Escherichia coli CFT073
MWFAGMYDFNLVLLLLQQMCVFLVIAWLMSKTPLFIPLMQVTVRLPHKFLCYIVFSIFCIMGTWFGLHIDDSIANTRAIGAVMGGLLGGPVVGGLVGLTGGLHRYSMGGMTALSCMISTIVEGLLGGLVHSILIRRGRTDKVFNPITAGAVTFVAEMVQMLIILAIARPYEDAVRLVSNIAAPMMVTNTVGAALFMRILLDKRAMFEKYTSAFSATALKVAASTEGILRQGFNEVNSMKVAQVLYQELDIGAVAITDREKLLAFTGIGDDHHLPGKPISSTYTLKAIETGEVVYADGNEVPYRCSLHPQCKLGSTLVIPLRGENQRVMGTIKLYEAKNRLFSSINRTLGEGIAQLLSAQILAGQYERQKAMLTQSEIKLLHAQVNPHFLFNALNTIKAVIRRDSEQASQLVQYLSTFFRKNLKRPSEFVTLADEIEHVNAYLQIEKARFQSRLQVNIAIPQELSQQQLPAFTLQPIVENAIKHGTSQLLDTGRVAISARREGQHLMLEIEDNAGLYQPVTNASGLGMNLVDKRLRERFGDDYGISVACEPDSYTRITLRLPWRDEA

SEQ ID NO: 125010 - DNA, 1683 bp, Vibrio vulnificus CMCP6
  CDS (1)..(1683): transl_table=11
atggaactggtgatttcactgctacaacagatgtgtgtctatcttgttttagcctatatgctcagcaagacccccatcatcttaccactgctgaacatctcatcgcgtttgagccaccgcgttctgtgctacttattgttttccgccttctgtatcttgggcacctactttggtttacacatcaatgacgccatagccaatactcgtgcaattggggcagtcatgggcggcttgtttggcgggccgattgtgggctttgccgtgggattaaccggtggtttacatcgctacaccttaggaggattcaccgatttagcctgcgcgatttcgaccacagcggaaggcttgattggtggcttgctgcatatctatctaatcaagaaaaacaaaggtgcccaactgttcaacccctccgtggtgtttagcatcaccttcgtcgccgaaataatacaaatgatcattttgctggtggtcgctaagccctttgatcaagcgtacagcctcgtttcgaccattgccgcccccatgatcattgccaactcggtgggtgccgcgttgtttatgagcattttacaagacagaaaaaccatctttgaaaagtactccgccaccttttcgcgtcgggcattgaccattgcggatcgctctgtgggtatcttgcacacgggctttaacagtgccaacgcagaaaaaatcgcccgcattatttatgaagaaaccaatgtgggcgcggttgcgatcaccgaccaagagaagattctcgcgtttgtcggcattggggatgatcaccacaagcctaatacgcccatttcgtcgcaaagcacccttgattcgatgagtcaaaacgccatcatttatctcgatggtagcgagcgtccatatcaatgctctctcgcttccgactgtaaattaggctcggcactgatcattccactacgagcaggcaaagaggtggtgggaaccattaagctgtacgagccaaagcgcaagttgttttcaaccattaatatgtcgatggccgaaggcattgcccaactgctttccagccaaattctctatggcgattatcagcaacaacaaacgctgctgacgcaatcggagattaagctgctgcatgctcaagtgaatccgcatttcttattcaacgcgctaaacacgattagcgcggtgattcgtcgcgatcctgacaaagcacgtgaactgattcaaaatttgtcacacttctttcgcagcaacttaaaacagaacatcaacaccgtcacactgaaagaagagctggcgcatgtgaatgcctacctcagcattgaaaaagcacgttttgctgaccgcctagagatagagattgatatcacgccagagctgttcgacacaaaactgcccagctttaccttgcagcctttggtggaaaacgccattaagcatggtatttcaaatatgcttgagggaggacgggtgcgcatttacagccaatcttgtgagcaaggtgatgtcatcgtggtcgaagataatgcaggtagctatcagcccccagcagaaaatcattcaggactgggaatggaaatagtcgataaacggctgacgcaccattttgggcgtgactcagcactaaaaatcgaggcgaaagagcatcaatttactaaaatgagctttatcattccccgcagccatcacactgcaatttag

SEQ ID NO: 125011 - protein, 560 aa, Vibrio vulnificus CMCP6
MELVISLLQQMCVYLVLAYMLSKTPIILPLLNISSRLSHRVLCYLLFSAFCILGTYFGLHINDAIANTRAIGAVMGGLFGGPIVGFAVGLTGGLHRYTLGGFTDLACAISTTAEGLIGGLLHIYLIKKNKGAQLFNPSVVFSITFVAEIIQMIILLVVAKPFDQAYSLVSTIAAPMIIANSVGAALFMSILQDRKTIFEKYSATFSRRALTIADRSVGILHTGFNSANAEKIARIIYEETNVGAVAITDQEKILAFVGIGDDHHKPNTPISSQSTLDSMSQNAIIYLDGSERPYQCSLASDCKLGSALIIPLRAGKEVVGTIKLYEPKRKLFSTINMSMAEGIAQLLSSQILYGDYQQQQTLLTQSEIKLLHAQVNPHFLFNALNTISAVIRRDPDKARELIQNLSHFFRSNLKQNINTVTLKEELAHVNAYLSIEKARFADRLEIEIDITPELFDTKLPSFTLQPLVENAIKHGISNMLEGGRVRIYSQSCEQGDVIVVEDNAGSYQPPAENHSGLGMEIVDKRLTHHFGRDSALKIEAKEHQFTKMSFIIPRSHHTAI

SEQ ID NO: 125012 - DNA, 1698 bp, Clostridium tetani E88
  CDS (1)..(1698): transl_table=11
atgatattaatgatatatatacaacttttaggtagtatgtctacaatagctttatccgcctatattttcaatcagtactacatatctaaaaaacttttttgcttagataaagaatttaataaacttgctttaatagtttttttcagtcttctatccatattgggtacctacactggagttaatatagattctatggccccagctagttttaataaatctacattaattaatttaaatccccatgccatagctaatactcgccccataggagctataactgctggatatttaggtggccctctggttggtatatgtgtaggacttattgcaggtttacaaaggtattatgtagggggctttacagcattagcctgtgcagtagccacaataatgggaggaatttgtggtggtttagccagaaaacactctaaatctaaaacccttaatccaaaacttgcttttataaccacaataattgcagaaatattggaaatgattataatacttattttatccaaaccctttaatcatgccctacaattagaaaaaatttttgctctacctatgataattataaattctgtaggagttttcgtttttgtatatattacaaaagatgccttagagcaatataacagaataggtgccacagaggcacaaaaagctttaaatatagctgaaaaaactctaaattactttaaaaagggttttcacaaagataattctgaaaaaatagcaaaaatcatttggcaaaatacttcctttgaaagtgtttttattgcagatactaaaaaaatgatctcatattatggagaagatataaattctaatcttttaaatgaatccttaaaaaattactataaatctgctgactataaaataattaaatatagagactcttcatctgaaacagttgaaaatatatttttttgtattccaatatatgatgaaaataatttagaattagtaattggcttaaatatagtatccgaaagttttgtagataaatattttacattgtttgttaagcaattaagcacattgctctctaatcaattaaagctttacaaattaaataaaatagccaatgaagtttatgtagctgaatttaaagcattaaaagctcaaatacaccctcattttttatttaatgcactaaacactatttcctctttttgcagaacaaaccctaataaagcaagagaacttatactaaatttatctagctactttagacagactttgaaaagagaagaagattttattacaattaaagaagagtatgattttttaaattcttatctttctatagaaaacgcacgttttggagaaagattaaaagtgaatataaatttccctaaaaatttattaaactataaaattcctgtttttttattacaacctctagtagagaactctataaatcatggaattttacctaaaccctctggtggaacagttattatagaggcttactcctctaatgaaaatttaaattttattgtaaaagataatggagttggtatgaaagaaactgatcttaaaaagatacattctttttctactggtataggactaaacaatgtaaatgaaaggctaaaacttctcttcggagaagactataaaataaatataaaaagcaaccctaataaaggtacttctatatctttttcaatacctaaggagatgaatttatga

SEQ ID NO: 125013 - protein, 565 aa, Clostridium tetani E88
MILMIYIQLLGSMSTIALSAYIFNQYYISKKLFCLDKEFNKLALIVFFSLLSILGTYTGVNIDSMAPASFNKSTLINLNPHAIANTRPIGAITAGYLGGPLVGICVGLIAGLQRYYVGGFTALACAVATIMGGICGGLARKHSKSKTLNPKLAFITTIIAEILEMIIILILSKPFNHALQLEKIFALPMIIINSVGVFVFVYITKDALEQYNRIGATEAQKALNIAEKTLNYFKKGFHKDNSEKIAKIIWQNTSFESVFIADTKKMISYYGEDINSNLLNESLKNYYKSADYKIIKYRDSSSETVENIFFCIPIYDENNLELVIGLNIVSESFVDKYFTLFVKQLSTLLSNQLKLYKLNKIANEVYVAEFKALKAQIHPHFLFNALNTISSFCRTNPNKARELILNLSSYFRQTLKREEDFITIKEEYDFLNSYLSIENARFGERLKVNINFPKNLLNYKIPVFLLQPLVENSINHGILPKPSGGTVIIEAYSSNENLNFIVKDNGVGMKETDLKKIHSFSTGIGLNNVNERLKLLFGEDYKINIKSNPNKGTSISFSIPKEMNL

SEQ ID NO: 125014 - DNA, 1671 bp, Vibrio parahaemolyticus RIMD 2210633
  CDS (1)..(1671): transl_table=11
atggaactggttatctctctcttgcagcaaatgtgtgtttacttagtcttggcttacatgctgagtaaaacacccatcatcttaccgttactgagtatttcgtctcgccttagccatcgtttaatttgctacgtgctcttttctggcttttgtatcctcgggacgtactttggcctgcacatcaatgatgcgatcgccaacacgcgtgccattggcgctgtcatgggcgggttgttcggcgggccagtagtcggttttgctgtcggcttaaccggcgggattcatcgttattcccttggtggctttaccgacctagcctgtgctatttcaaccactgctgaaggcgtgattggtggcttgttacatgtctaccttatcaaacgcaacaagggcgcattgctgttcaacccaagtgtggtgttcagcgtgacatttgttgccgaagttgtgcagatgattttgttgttggcggtagccaaacccttcgaccaagcctacgaactggtgtcagcgattgccgctccgatgatcattgccaactcgttcggtgccgcacttttcatgagcatcctacaagatagaaaaaccatttttgaaaagtactccgctaccttttcacgccgcgcgcttaccatcgccgatcgctccgtaggcattttgagcaacggttttaacaccgagaatgcagaaaaaatcgctcgtatcatttacgaagaaaccaaggttggcgcagttgcaattactgatcaagagaagattttggcgtttgtcggcattggcgatgaccaccatagaccgaatacgcctatttcatcgcaaagcacattagattcgatggagaaaaacgacatcatctaccttgatggtacagagcgtccgtatcagtgttctttggcgaaagattgcaaactcggttcggcgttgatcattccattgcgtgcgggtaaagcggtcatcggaacaatcaaactctatgaacctaagcgtaagctgttctcaaccgccaacatgtcaatggcagaagggatagctcagttgctctccagccaaattttgtatggcgattatcaacaacaacaagcgctgttagcgcaggcagaaatcaaactgttgcacgcgcaggtaaaccctcactttttgtttaacgcgctcaataccatcagtgcgattacgcgccgcgatccagataaagcccgcgaattaattcaaaatttatcgcactttttccgcagtaacttaaaacagaacatcaatacggtgacgctgaaagaagagcttgcacacgtcaattcttacctcagtatcgaaaaagcacgcttcacggatcgcttggaagtagaaatagatatcgacccagagttgctcgatatcaagctgccaagtttcacacttcaacccttggtggaaaatgccatcaaacacggcatctccaatatgcttgaaggtggaaaagttaaaatttacagcgaaatgcaccctcaaggacacctgattacagtcgaggacaacgcaggcagtttccagccaccaaaagacaaccactcaggtttaggcttggaaattgtagacaaacgtctcactaatcaatttgggcgtgattcagcgctaaaaattgcgtgtgtgacgcatcaatttactaaaatgagctttatcattcccccgaaatcataa

SEQ ID NO: 125015 - protein, 556 aa, Vibrio parahaemolyticus RIMD 2210633
MELVISLLQQMCVYLVLAYMLSKTPIILPLLSISSRLSHRLICYVLFSGFCILGTYFGLHINDAIANTRAIGAVMGGLFGGPVVGFAVGLTGGIHRYSLGGFTDLACAISTTAEGVIGGLLHVYLIKRNKGALLFNPSVVFSVTFVAEVVQMILLLAVAKPFDQAYELVSAIAAPMIIANSFGAALFMSILQDRKTIFEKYSATFSRRALTIADRSVGILSNGFNTENAEKIARIIYEETKVGAVAITDQEKILAFVGIGDDHHRPNTPISSQSTLDSMEKNDIIYLDGTERPYQCSLAKDCKLGSALIIPLRAGKAVIGTIKLYEPKRKLFSTANMSMAEGIAQLLSSQILYGDYQQQQALLAQAEIKLLHAQVNPHFLFNALNTISAITRRDPDKARELIQNLSHFFRSNLKQNINTVTLKEELAHVNSYLSIEKARFTDRLEVEIDIDPELLDIKLPSFTLQPLVENAIKHGISNMLEGGKVKIYSEMHPQGHLITVEDNAGSFQPPKDNHSGLGLEIVDKRLTNQFGRDSALKIACVTHQFTKMSFIIPPKS

SEQ ID NO: 125016 - DNA, 1686 bp, Salmonella enterica subsp. enterica serovar Typhi Ty2
  CDS (1)..(1686): transl_table=11
atgtacgagtttaatctggtgttgctgctgcttcagcagatgtgcgtgtttctggtcattgcgtggctaatgagtaaaacgcgcctgttcatcccgcttatgcaggtcacggttcgtctgccgcacaagcttctgtgttatgtcacgttttctatcttctgcattatgggcacttattttgggctacatatcgaagattcgattgccaatacccgcgcgattggcgcggtgatgggcggcctactcggcgggccggtcgtcggcgggctggtcggtctgaccggtgggttacatcggtattctatgggcggcatgacggcgctgagctgtatgatttccaccatcgtcgaagggctgctgggcgggttggtacacagcgttctcatacgtcgcggacgcccggacaaagtgtttagcccgctgacggcgggagcaattacgtgtgttgccgaactggtgcagatgctgatcattttactgatagccaggccgtttgacgatgccctgcatctggtcagtaatattgccgcgccgatgatggtgacgaataccgttggcgccgcgctgtttatgcgtattttgctcgataagcgcgccatgttcgaaaaatatacttcggcattttctgttaccgcgctgaaggtcgccgcgtcaacggaggggattctgcgtcagggatttaacgaagtgaacagtatgaagatgacgcaggtgttatatcaggagctggatattggcgccgtcgccatcaccgatcgcgaaaaactgctggcttttactggtattggcgacgatcaccatctaccgggcaaacccatttcatcaggttatacgctgaaagcaattgaaaccggagaggtggtttatgccgatggcaacgaagtgccgtatcgctgttcgctacacccgcagtgtaaactcggctcgacgctggtgatcccgctgcgtggcgaaaatcagcgagtcatgggcaccattaaattgtacgaagcgaaaaaccgactgttcagctcaattaaccgtactctgggggagggtattgcgcagcttttatccgcgcagatcctggccgggcagtatgaacggcagaaggcgttgctgacgcagtcagagatcaagctgttgcacgcgcaggtgaatccgcattttctgtttaatgcgctcaataccattaaagcggtgattcgccgcgacagcgaacaggccagccaactggtgcagtacttgtcgaccttttttcgcaaaaatttaaaacgcccgtcggaaatcgtcacgctggcggatgaaattgaacacgtgaacgcttacctgcaaattgaaaaagcgcgttttcagtcgcgtctgcaggtacagcttgatgttccatcgacgctttcacgtcagaaattgcctgcgtttacattacagccgattgttgagaacgccattaaacatggcacgtcgcaactgcttgataccggcaacgtcgctattcgcgcccggcgcgaagggcagcatttgatgttagatattgaagataatgcgggactgtatcagccttccgccggcagtagcgggctggggatgagtctggtggataaacgtctgcgcgaacactttggcgatgattatggtattagcgtggcctgcgagccggactgttttacccgaattacattacgacttccactggaggaggacgcatga

SEQ ID NO: 125017 - protein, 561 aa, Salmonella enterica subsp. enterica serovar Typhi Ty2
MYEFNLVLLLLQQMCVFLVIAWLMSKTRLFIPLMQVTVRLPHKLLCYVTFSIFCIMGTYFGLHIEDSIANTRAIGAVMGGLLGGPVVGGLVGLTGGLHRYSMGGMTALSCMISTIVEGLLGGLVHSVLIRRGRPDKVFSPLTAGAITCVAELVQMLIILLIARPFDDALHLVSNIAAPMMVTNTVGAALFMRILLDKRAMFEKYTSAFSVTALKVAASTEGILRQGFNEVNSMKMTQVLYQELDIGAVAITDREKLLAFTGIGDDHHLPGKPISSGYTLKAIETGEVVYADGNEVPYRCSLHPQCKLGSTLVIPLRGENQRVMGTIKLYEAKNRLFSSINRTLGEGIAQLLSAQILAGQYERQKALLTQSEIKLLHAQVNPHFLFNALNTIKAVIRRDSEQASQLVQYLSTFFRKNLKRPSEIVTLADEIEHVNAYLQIEKARFQSRLQVQLDVPSTLSRQKLPAFTLQPIVENAIKHGTSQLLDTGNVAIRARREGQHLMLDIEDNAGLYQPSAGSSGLGMSLVDKRLREHFGDDYGISVACEPDCFTRITLRLPLEEDA

SEQ ID NO: 125018 - DNA, 1773 bp, Chromobacterium violaceum ATCC 12472
  CDS (1)..(1773): transl_table=11
ttgagccagaacaaggccgcggggacggcacggtcgttaaactgttctcgcgcaaacaatccatgccatcgaatgatcgtagaactgaccctggtgctgtcgctgctgcagcagatgtgcgtttatctggtgatcgcctacctgctgtccaagacgccgctgttcatcccgctgacccagatcacgctgcaattgccccacaagctggtctgttatctggtgttttcgatgttttgcatcatgggcacctatttcggcctgcacatccaggactccatcgccaatacccgcgccatcggcgcggtgctgggcggcatgctgggcggcccctgggtggggctggcggtgggcttcaccggcggcctgcaccgctattcgctgggcgggctcaccgccggcgcctgcatggtgtcgacgatgatggagggcctgctgggcggcctggtgcatctctacctggtgcgccgcggcctgcgcgcgcggctgttcgacccgctggtggtggcggcggtggcctgcgtcgccgagatcggccagatgctgatcctgctggcgctggtgcgcccgtccgaggcggccgaacgcctggtggccagcatcgcgctgccgatgatggcggccaacacgctgggggcggcgatgttcatgcgcattctgctggaccgccgggtgctggcggaaaaatactccaccgccttctccggcaaggcgctgcagatcgctgcccgcgccgaaggggtgctgcgccagggcttcgacccggaaaacagcatgaccgtggcgcgcatcctgtacgaggagctgggcgtcggcgcggtggccatcaccgaccgcgagcggctgctggccttcatcggcataggcgcggatcatcacctgcccggcacggccatcacctcgccgcacacccaccgcgcgatcgagcgcaacgaggtggtgtacgccgacggcaacgaaacgccctaccgctgctcgatcagcccccagtgccggctggcgtcctcgctggtgatcccgctgcgcggcgaggacgaacgggtgatcggcaccatcaagctgtacgagccgcgcaacaagctgttctcccgcatcaacctgacgctgggcgaaggcatcgcccgcctgctgtccgcccagatcctgcagggccagtacgataaacaaaagcagctgctggcgcagaccgagatcaaactgctgcacgcccaagtgaacccgcacttcctgttcaacgctctgaacacgctgtcggcggtgatacggcgcaacccggaacatgcccgccggctggtgcagtacctgtccaccttcttccgcaagaacctgaaacgctccggcgaagcggcgacgctggaggacgagatcgaacacgtcagcgcctacctgcgcatcgaggaagcgcgcttcgccgggaggctggacgtggagatctcgctggacgaggcggcccgccgggcgcggctgccggcgttctcgctgcagcccatcgtcgagaatgccatcaagcacggcacctcccaactactggaagccggccgcatccgcatcgccgcgcgctgcgccgacggcaggctttgcgtgacggtggaagacaacgccggcctgtacgcgccggccggccccggcgacggcttaggcatgtcgctggtggaccggcgcatccgcgcccggcacggaccggcttacggcgtgtcggtggagtgcgagccggaggcctatacccgcgtcacgctcagcgtgccctgccccgagcctggagaaatcccatgctga

SEQ ID NO: 125019 - protein, 590 aa, Chromobacterium violaceum ATCC 12472
MSQNKAAGTARSLNCSRANNPCHRMIVELTLVLSLLQQMCVYLVIAYLLSKTPLFIPLTQITLQLPHKLVCYLVFSMFCIMGTYFGLHIQDSIANTRAIGAVLGGMLGGPWVGLAVGFTGGLHRYSLGGLTAGACMVSTMMEGLLGGLVHLYLVRRGLRARLFDPLVVAAVACVAEIGQMLILLALVRPSEAAERLVASIALPMMAANTLGAAMFMRILLDRRVLAEKYSTAFSGKALQIAARAEGVLRQGFDPENSMTVARILYEELGVGAVAITDRERLLAFIGIGADHHLPGTAITSPHTHRAIERNEVVYADGNETPYRCSISPQCRLASSLVIPLRGEDERVIGTIKLYEPRNKLFSRINLTLGEGIARLLSAQILQGQYDKQKQLLAQTEIKLLHAQVNPHFLFNALNTLSAVIRRNPEHARRLVQYLSTFFRKNLKRSGEAATLEDEIEHVSAYLRIEEARFAGRLDVEISLDEAARRARLPAFSLQPIVENAIKHGTSQLLEAGRIRIAARCADGRLCVTVEDNAGLYAPAGPGDGLGMSLVDRRIRARHGPAYGVSVECEPEAYTRVTLSVPCPEPGEIPC

SEQ ID NO: 125020 - DNA, 1716 bp, Desulfovibrio vulgaris subsp. vulgaris str. Hildenborough
  CDS (1)..(1716): transl_table=11
atgttcataacgctctccgagcgtttcggcctgcttctggcgggtggtttcgccatcatgaccctcgccccgctggacaaactcgggccggggcgcacacgttcgtggcgggccacggcgttgctggtggtgctgttctcgctgttcaccatccttggcacctacaacggcaacatcgtgttccagtcgttcgccaacctgcgcgccatgggggcggtgacggcggggcttttcggcggtccgatggtgggcgcgctgaccgggctcatcgccggagggcatcgctacttcatcgacgtgggcgggttcagtgccgtgccgtgcgggctcgcaacctttctggagggacttgccgcagggctcttcgcgtggcgttttccctcccgcagcctcgactggggcactgccatgaccttcgccgccgtgggtgaggctgtgcacatgtgccttgttctcgggctggcacgcccctatgctcaagcggtcgacctcgtggaggtcatcgggctgcccatgatattgctcaatggcgtgggggcggccatcttcgtgcaggcgttgcgcatgcagatgcacttccgggacctgcgcgactcgtcgcaggcgcggcagatactctccatcgccaaccgcacgctcccgcacctgcgcgcgggcttgagcgccgcctccgcacgggccacagccgagatcatcctcgacgagacacgggtggctgccgtggctctcaccagcaacgacatggtgatggcgcacgtgggtgcggcctccgaccaccacagggccgggcattccgtgtgcacgcaggcgacacgccgggtggccacggatggcattccgctcttcgtgacggggcatgacgaaataggctgccagcttgaggcatgcccgctgtgcagtgccatcatcgtgcccctgcgcaagggcgataccatcctcggctgtctcaaactctacggaaccaaggacagaccgctcgaccagacgctgttcgaactggccaagggacttgccgacctgttcgccacgcagatcgaactcgaagacatcggtatcaagaaccagttgctcgcccgggcggagatccgccggttacaggcgcagatcaacccgcactttctcttcaattcgctgaacacggtggcctcgttctgccggacggcaccgggacaggctcgcgagctcattctcgaccttgcccgctacatgcgacgcaacctcgataccagccgtgaagccatccatcttgccgaagaggtggagcagattcgcgcctacctcgtcatcgagaaggcccgtttcggagagcgcatccgcgccgtcatcgacatcgaccccgagacggaacactgcctcgttccgcccctgctcattcagccgctggtggagaacagtgtgcgtcacggcatcctcggcaacgaggaggggggcgttgtgcgccttgccacgagcatggaagacggccacgtggtcgtggttgtcgaggatgacggcgcaggtatgcccgagtccacgcggcagggtatcctcaacggtacgcctgtcacggcccatggcgaaggcatcggtgcgagcaactgcaaccagcgtctcgtgcagttgtacgggcccgcctacgccctctccatcgacagcgcccccggcatgggaacgcgcatcaccttccgcgttcccgcctcgaccgacgccgaggtgttcgcctcggcagctgcctga

SEQ ID NO: 125021 - protein, 571 aa, Desulfovibrio vulgaris subsp. vulgaris str. Hildenborough
MFITLSERFGLLLAGGFAIMTLAPLDKLGPGRTRSWRATALLVVLFSLFTILGTYNGNIVFQSFANLRAMGAVTAGLFGGPMVGALTGLIAGGHRYFIDVGGFSAVPCGLATFLEGLAAGLFAWRFPSRSLDWGTAMTFAAVGEAVHMCLVLGLARPYAQAVDLVEVIGLPMILLNGVGAAIFVQALRMQMHFRDLRDSSQARQILSIANRTLPHLRAGLSAASARATAEIILDETRVAAVALTSNDMVMAHVGAASDHHRAGHSVCTQATRRVATDGIPLFVTGHDEIGCQLEACPLCSAIIVPLRKGDTILGCLKLYGTKDRPLDQTLFELAKGLADLFATQIELEDIGIKNQLLARAEIRRLQAQINPHFLFNSLNTVASFCRTAPGQARELILDLARYMRRNLDTSREAIHLAEEVEQIRAYLVIEKARFGERIRAVIDIDPETEHCLVPPLLIQPLVENSVRHGILGNEEGGVVRLATSMEDGHVVVVVEDDGAGMPESTRQGILNGTPVTAHGEGIGASNCNQRLVQLYGPAYALSIDSAPGMGTRITFRVPASTDAEVFASAAA

SEQ ID NO: 125022 - DNA, 1770 bp, Bacillus thuringiensis serovar konkukian str. 97-27
  CDS (1)..(1770): transl_table=11
atgctaaatttagtacttatgatgattgaacgcgtcggacttattgttattctaggatttttactttcgcatattaaaacattcaggcgccttcttcataagcaagatggttatgtagataagcttaagcttatttgtattttttcggtgtttacaattgtaagcaattacaccgggattgaaatagcagggaatacgattatgaatgaaaattggctacagggtgtttcatcatcgagtaccattgcaaatacacgtattatgggtgttggaattagtggattgcttggtggtcctattgttggagttggagtaggatcgattgctggtattcaccgttatatgcttggcgggacgacagcgctaagttgcgcaatctcttcaattttagcaggcgttataactgggtatattggatacatttttaaaaagtataatcgtacaattacgcctaaattttcagcagttttaagtgtgtttatcgtttctttagaaatgattatgattctattaattgtagaggatggcattagcattgtgaaaacaattgcgataccaatgatccttgtaaatagctttggaagttttattttactttctatgatacaagctattttgcgccaggaagagaacgcaaaggcacttcagactcataaggtattacgtattgcagataaaacgttaccgtattttcgccaaggcttaacagaagaatcttgtaagcatgtggcacaaattattcaccgctttacaggaacagatgcggtatccttaacagatacagagaaaatattagctcatgttggattagcgtcagatcaccatattccttcacatagtttaataaccggtttgtcgaaagaagtgttacatacagggaaaataatgaaagcgaaatcacgtgaggtcattaattgtcaacatgaaggctgtcctttgcaagcggcgattgttattccgctaacttcacatggaaatacgatagggacattaaaactatatttcaaaaatcctaaccagttaagtcgtgtggaagaggaattagcagaagggttagcaaaaatattctctacacaacttgaattaggtgaagctgagttgcaaagtaaattattgcaagatgcggagataaaggcattacaagcacaaattaacccacactttttatttaatgcgattaatacagtatcagctttatgccgaacagatgtagaaaaagcaaggaagttattattgcagcttagcgtgtatttccgttgtaatttgcaaggggcacgtcagttattgattccactagaacaagaattaaaccatgtacaggcatacttatcactagaacaagcaaggttcccaaataagtatgaagtaaagatgtatattgaggatgagctcaagacaactttagtaccaccgtttgttcttcaactattggttgaaaatgcgttgcgacacgcctttccaaagaagcaacccgtatgtgaagtggaagtgcatgtttttgaaaaagagggtatggttcattttgaggtaaaggataatgggcaaggtattgaggaagaacgtttagaacaattaggaaagatggtagtttcgtcaaagaaagggactggaacagctttatataatattaatgaacgtcttattgggttatttgggaaggaaacgatgcttcatatcgaaagtgaagtaaatgaggggacagagattacttttgttattccaaaaaaagtaggggaggaagagcagattgttaaaagtactagtagttga

SEQ ID NO: 125023 - protein, 589 aa, Bacillus thuringiensis serovar konkukian str. 97-27
MLNLVLMMIERVGLIVILGFLLSHIKTFRRLLHKQDGYVDKLKLICIFSVFTIVSNYTGIEIAGNTIMNENWLQGVSSSSTIANTRIMGVGISGLLGGPIVGVGVGSIAGIHRYMLGGTTALSCAISSILAGVITGYIGYIFKKYNRTITPKFSAVLSVFIVSLEMIMILLIVEDGISIVKTIAIPMILVNSFGSFILLSMIQAILRQEENAKALQTHKVLRIADKTLPYFRQGLTEESCKHVAQIIHRFTGTDAVSLTDTEKILAHVGLASDHHIPSHSLITGLSKEVLHTGKIMKAKSREVINCQHEGCPLQAAIVIPLTSHGNTIGTLKLYFKNPNQLSRVEEELAEGLAKIFSTQLELGEAELQSKLLQDAEIKALQAQINPHFLFNAINTVSALCRTDVEKARKLLLQLSVYFRCNLQGARQLLIPLEQELNHVQAYLSLEQARFPNKYEVKMYIEDELKTTLVPPFVLQLLVENALRHAFPKKQPVCEVEVHVFEKEGMVHFEVKDNGQGIEEERLEQLGKMVVSSKKGTGTALYNINERLIGLFGKETMLHIESEVNEGTEITFVIPKKVGEEEQIVKSTSS

SEQ ID NO: 125024 - DNA, 1719 bp, Erwinia carotovora subsp. atroseptica SCRI1043
  CDS (1)..(1719): transl_table=11
atggttagccaggttgatctaattctttccctgttacagcagatgtgtgtttatctggtcatcgcttatctgctcagtaaaacaccgctgtttatcccgctgatgcaggtcaccattcgcctgccgcacaagctggtctgctatctggttttttccgtgttttgcattatgggaacctacttcggcctgcatatagacgattcgattgccaatacccgcgcgacaggcgcggtgctcgggggcatgctgggcggcccttctgtgggctttctcgtcgggttgactggcggactacaccgctattcgatgggcggtatgactgcgctggcctgtatgttgtcgaccattgccgaaggcctgctcggcgggttgctgcatcgctatctggcacgtcgtaaccgtatcgatctgctctttaaaccactcgtcgtcggcctgaccgcactggttgcggagatactacaaatggcgattattctgctggtcgcccgaccgtttgataacgccgctgagttggtgagggatattgcgctaccgatgatgatcaccaataccatcggttccgctatgttcatgcgcatcctgctcgacaggcgcgccatttttgaaaaatacacttctgcattctccgccaaggcgctgcaaatcgcggcacgcgccgaaggggcgctgcgtcaggggttcaatccgcaaaacagtatgcgcgttgcccgtattttgtatgaagaactgggtgtcggtgccgtggcgattaccgatcgcgacaaactgctggccttcatcgggttaggcgacgatcaccacaacgtcggtgcgcccatcacgtcatcacacacgcgccgggcgatagacaacaatcaggtggtgtacgccgacggcaacgaggtgtcttatacctgttcggtttcatcgcactgcaagctcggctccacgctggtgatcccactgcggggcgaagatcagcgtgttgtcggcacgatcaagctttatgaacccaagaataagctattttccagcattaaccgtacgctaggagaagggatcgcccacctgctttccgcacagattctgacaggccgttttgaacaacagaaacagctgctggcgcagtcggaaatcaagctgctgcacgcgcaggtcaacccgcattttctgttcaatgcactgaatacgctgtccgccgtgatacgacgcaaccccgaccacgcccgccagttggtgctgtctctgtcgacgtttttccgtaaaaatctcaagcgcagtaacgatgaagtgtcgctcaatgatgagctggagcacgttaacgcctatctggaaatcgaaaaggcgcgctttgccgatcacctgacggtagaaatctcgctaccggagtcgctgcgcgaagcgcgactaccggcgttttctctgcaaccgattgtcgaaaatgcgattaagcacggtacttcgcagatgattgaacacggacacatccacattagcggacgtctgcacgccaacacgctggaactgtcagtggaagataatgctggcacctatcagccccgcagcggtggcgatggtctaggcatgaatctggtcgaccgccgtattaaagcgcgctacggcaaccgctatggcatcacggtagtcagcgaaacagataaattcactcgggtcgaagtacgcgtcccgctgatttcagcgcgcaaggcattggaaaaactggatagcgtggcgtga

SEQ ID NO: 125025 - protein, 572 aa, Erwinia carotovora subsp. atroseptica SCRI1043
MVSQVDLILSLLQQMCVYLVIAYLLSKTPLFIPLMQVTIRLPHKLVCYLVFSVFCIMGTYFGLHIDDSIANTRATGAVLGGMLGGPSVGFLVGLTGGLHRYSMGGMTALACMLSTIAEGLLGGLLHRYLARRNRIDLLFKPLVVGLTALVAEILQMAIILLVARPFDNAAELVRDIALPMMITNTIGSAMFMRILLDRRAIFEKYTSAFSAKALQIAARAEGALRQGFNPQNSMRVARILYEELGVGAVAITDRDKLLAFIGLGDDHHNVGAPITSSHTRRAIDNNQVVYADGNEVSYTCSVSSHCKLGSTLVIPLRGEDQRVVGTIKLYEPKNKLFSSINRTLGEGIAHLLSAQILTGRFEQQKQLLAQSEIKLLHAQVNPHFLFNALNTLSAVIRRNPDHARQLVLSLSTFFRKNLKRSNDEVSLNDELEHVNAYLEIEKARFADHLTVEISLPESLREARLPAFSLQPIVENAIKHGTSQMIEHGHIHISGRLHANTLELSVEDNAGTYQPRSGGDGLGMNLVDRRIKARYGNRYGITVVSETDKFTRVEVRVPLISARKALEKLDSVA

SEQ ID NO: 125026 - DNA, 1698 bp, Yersinia pseudotuberculosis IP 32953
  CDS (1)..(1698): transl_table=11
atgggcattagccaaacagaactgatcttttcccttttacaacagatgtgtgtgtatttggttattgcctatctgctgagtaaaacaccgctttttatccccttgatgcaagtcactatcaggttgccccataaactggtgtgctacctcaccttctccatgttttgcattatgggtacctattttggtctgaacattgatgactctatcgcgaatactcgcgctatcggtgcagtcttggggggaatgttaggggggccatcggttggttttttggtagggctaaccggaggcctgcatcgttattcaatgggggggatgactgcaaccgcctgtatgttatcaaccattgctgaagggctattgggtggccttctccacctttatctgacacgtaaaaaccgcctcgatttactgtttcagccgctggtggtcgcgggtattacactggtagccgaagtgctacaaatgatgattattctggccgtcgcccgccccttcaatgaagctgtcgaattggttgaaaatattgccttgccgatgatgatcaccaataccattggtgccgccatgtttatgcgtatcttattagaccgccgggccattttcgaaaaatacaccacggcattttccgcgaaggcgctacaaattgctgcacgggcggagggtctactgcgccatggctttgaccagcaaaacagtatgcgagtggcgcgtatcttgtatgaagagttgggcgtgggcgcggtagccattactgatcgcgaaaaattgctggcctttatcggtagcggtgccgaccaccatcaggtgggcagtgctatcacctccgaccatactcaccgcgcgattgaactcaatcaggtggtgtatgccgacggcaatgccgtgccttatacctgctcaatttcacccacctgtaagttgggttcaacactggttatccctttgcgaggtgaagagcaccgggtgatcggcagtatcaaattgtatgagccaaaaagtaaattattctccagcattaaccgcaccttaggagagggtattgcgcacttattatcagcacagattttggcgggagaattcgaacaacaaaaacaattactggcgcaatctgaaatcaaactgctccatgcacaggtcaacccacatttcttgtttaatgcgctcaataccctatcagtggtgatccgccgtaatccagatcatgcccgcaatttggtgctttctttatcaacctttttccgtaaaaacctaaaacgcagccacgatgtggtcacgttaagtgatgagattgaacatgtgaatgcgtatcttgaaatagaaaaggcacgctttgctgatcgtctgactgtcacggtctcactgccgaatgaactgatggaggcacgcttacccgcgttctccctgcaacccgtggtagaaaatgcaatcaagcatggtatctcacagatgttcagtaacgggcgggtcacgttgcgcggcaaattggatgacaacacgttggtattggaagtcgaagataacgccggtttatatcagccgcagccggatggcgatggtctgggaatgagtttggttgatcggcgaattaaagcgcgctctggcaatgaatatggcatcaccgtcgtcagtgaagcggaagtctttacccgcattattattaagctaccgtttattaccgtgagtgagtattaa

SEQ ID NO: 125027 - protein, 565 aa, Yersinia pseudotuberculosis IP 32953
MGISQTELIFSLLQQMCVYLVIAYLLSKTPLFIPLMQVTIRLPHKLVCYLTFSMFCIMGTYFGLNIDDSIANTRAIGAVLGGMLGGPSVGFLVGLTGGLHRYSMGGMTATACMLSTIAEGLLGGLLHLYLTRKNRLDLLFQPLVVAGITLVAEVLQMMIILAVARPFNEAVELVENIALPMMITNTIGAAMFMRILLDRRAIFEKYTTAFSAKALQIAARAEGLLRHGFDQQNSMRVARILYEELGVGAVAITDREKLLAFIGSGADHHQVGSAITSDHTHRAIELNQVVYADGNAVPYTCSISPTCKLGSTLVIPLRGEEHRVIGSIKLYEPKSKLFSSINRTLGEGIAHLLSAQILAGEFEQQKQLLAQSEIKLLHAQVNPHFLFNALNTLSVVIRRNPDHARNLVLSLSTFFRKNLKRSHDVVTLSDEIEHVNAYLEIEKARFADRLTVTVSLPNELMEARLPAFSLQPVVENAIKHGISQMFSNGRVTLRGKLDDNTLVLEVEDNAGLYQPQPDGDGLGMSLVDRRIKARSGNEYGITVVSEAEVFTRIIIKLPFITVSEY

SEQ ID NO: 125028 - DNA, 1785 bp, Bacillus licheniformis ATCC 14580
  CDS (1)..(1785): transl_table=11
atggtccaactcatgattatgatgctggagagagtggggatcatcgtcattctgggctttatgttggcccatatgaaggtgttccgtcagcacctacagcatccggaagggtataagggcaagggagttctcatctttattttttccttgttcagcatcatcagcaactatacaggcattgaaatccgggagcgcgagattttgaacaatgactggattttcgcaatcgacccgtcaagctcgattgccaatacgagaattctcggcgtcgaaatcggcggcttgatcggagggccgtttgtcggagcgggtgtcggactgctctcaggcattcaccgtttttcactgggagggacgacggctttgagctgcgcggtttcttcactgctggcaggtgtcattgcgggttatatcggcagctttttcaggaatcggcaccagatggtgacaccgcgggtagccgctcttgcgggcatttgtatggagggcctgcagatgcttatgattctcgtgcttgcaaaaccgcaggctgaggcacttgcgcttgttcagatgatcggcattccaatgatgattgtcaacgggacgggcagctttatttttctatcgatcattcagtctattatccgcaaagaggaacaggcgcgggccgttcagacccataaggtattttcgatagcggatcagacgcttccttttttccgccggggactgaatgaggattcctgcaaaagcgccgctctcattatacaccgcatgacagggacggatgccgtatcgattacggatagagagaacattctcgctcatgtcggagatggagcagatcatcatattccttcgaaaaatctgatcaccggtttatcgaaaaaagtcattcaaaccggaaaggtcatgaaagtgaagtcgcgcgatgaaatcgagtgtgcgcaccgttcctgtccgctgcaggcggcgatcgtactgccgctcttctccaaccgcgaaacaatcggcacgctgaagctgtacttcaagcacccgtccggtcttaaccgtgtgacggaagagctggccgaagggcttgccatgcttttttccactcagctagaactcggtgaggctgagctgcaaagcaagcttttgaaagatgccgaaatcaaggcgcttcaagcgcaggtcaatccgcactttttatttaatgccatccatacgatttctgctctgtgcaggacagatccggaaaaaacgcgaaaacttctcttgcagctgagcgtttattttcgttccaatctgcagggagccaggcagctgatgattccgctttcaaaagagctgaaccatctggaagcctatttatcattggagcaggcccgatttccgggcaagtatcatattgattttcatatcgaggacggccttgaaaatatggaaatccctccttttatcttgcagctgctcgttgaaaatgcgcttcgccatgcatttccgagaaaacaaaaggtatgcacggtaaaagtatccgctgtgagagagcgggacggcgttttgatgaaggtgtcagacaacggcaggggaattaatccggagatgcttggacagctggggcaggcgcccgccccttcaaaggaaggaaatgggacggcgctttacaatgtgaaccagcggctcaccggtttgttcgggcaccaggctgctctgcagattgccagcgaacttgataaaggaacagagatatccttcaagattccttttcaaaccgaaagagaggggaacagagatgctcaaggtattaatcgtggatga

SEQ ID NO: 125029 - protein, 594 aa, Bacillus licheniformis ATCC 14580
MVQLMIMMLERVGIIVILGFMLAHMKVFRQHLQHPEGYKGKGVLIFIFSLFSIISNYTGIEIREREILNNDWIFAIDPSSSIANTRILGVEIGGLIGGPFVGAGVGLLSGIHRFSLGGTTALSCAVSSLLAGVIAGYIGSFFRNRHQMVTPRVAALAGICMEGLQMLMILVLAKPQAEALALVQMIGIPMMIVNGTGSFIFLSIIQSIIRKEEQARAVQTHKVFSIADQTLPFFRRGLNEDSCKSAALIIHRMTGTDAVSITDRENILAHVGDGADHHIPSKNLITGLSKKVIQTGKVMKVKSRDEIECAHRSCPLQAAIVLPLFSNRETIGTLKLYFKHPSGLNRVTEELAEGLAMLFSTQLELGEAELQSKLLKDAEIKALQAQVNPHFLFNAIHTISALCRTDPEKTRKLLLQLSVYFRSNLQGARQLMIPLSKELNHLEAYLSLEQARFPGKYHIDFHIEDGLENMEIPPFILQLLVENALRHAFPRKQKVCTVKVSAVRERDGVLMKVSDNGRGINPEMLGQLGQAPAPSKEGNGTALYNVNQRLTGLFGHQAALQIASELDKGTEISFKIPFQTEREGNRDAQGINRG

SEQ ID NO: 125030 - DNA, 1734 bp, Dechloromonas aromatica RCB
  CDS (1)..(1734): transl_table=11
atgttcttcgaatcaattacgctcagtctgaccctgctgcagcagacttgcgtttatctggtgattgcgtatctgctcagccggacccgcatcttcatcccgctgatgcacgtcaccattcgcctgccacaccgggcgacctgctacgtggtgttctcgctgttctgcatcatgggcacctacctcggcctgaagatcgacgattcgattgccaacacgcgtgccatcggcgccgtgctcggcggtatcctgggcggcccgtcggttggcctggcggtcggtttcaccggcgggctgcatcgctattcgctgggcggtatttcggcccaggcctgcatgatctcgaccatcatcgaaggcctgatcggcggcatgttccaccgtcacatgatgcagcagggcaaggttggtgccatttttcagccgctaccggtggcgctggtcaccttcgtggcagaaatcgcccagatgctgacgctgttgttgctggtcaaacctttctcggtggctttccacctggtcgaacagatcgccgtcccgatgtgcctcgccaacgccctgggggccggactgttcatgcgcattctgctcgatcgccggcagttgtacgaacggcaatcgacggtgttctcgaccaaggccctggccatcgccgcccgggtcgagggggtcttgcgcgatggcttcaacatcgataccagtgcccaggtggcgcaggtgctgtatgaggaaaccggtgtcggcgccgtggccattaccgataccgaacacctgctggccttcatcggcatcggcgccgaccaccatatcccgggaacgccgatcagttctgtgctgacccgccaggcaatcgagcgtaacgaggtggtttacgccgacggcaatgaaatcgcctatcgctgctcgatcaacccgaaatgcccgctcgccgcctcgctgatcatcccgctggtcggcgaagatgggcgggtgatcggtaccatcaagctctacgaaccgcgcagccgtctgttctcgaccatcaaccggacgctgggcgaaggcatcgcccggttgctctccaatcagatcctggccggccgctacatgcgccagcgcgaaatgctggcgcaatcggaaatcaagctgttgcatgcccaggtcaatccgcactttctgttcaatgcgctgaacacgctatcggccgtcatccggcgcgatccggaaaaggcctgtcatctggtgctcaatctgtcgaccttcttccgcaagaacctcaagcggccgagcgaggaggccgcccttagcgaagaagtcgcccacgtcgcggcgtatctggaaatcgaacaggcccgcttcctcgacaagctggaggtcgagttcgacattccggaccatctcaagcatgtccgcatgccggcattttcattgcaaccggtggtcgaaaatgcgatcaaacacggcacctcgcaactgctgggcgttggccgggtgcgtatttcggcacgggaagagggcgatgatctgctgctctgcgtcgaagacaatgccggcctctatgtgccatcgaccgacagcggcggactcggcgtcaatctggttcgtcgtcgtatcgtcaatcgctatggctcgcgttacggtatggaaatcgaatgtgaacccgaagtttgcacgcgagtgaccctccgcttgccgatcccgcccagcgactgtcggcccatccaaggagcaagccttgaacgtattgatcattga

SEQ ID NO: 125031 - protein, 577 aa, Dechloromonas aromatica RCB
MFFESITLSLTLLQQTCVYLVIAYLLSRTRIFIPLMHVTIRLPHRATCYVVFSLFCIMGTYLGLKIDDSIANTRAIGAVLGGILGGPSVGLAVGFTGGLHRYSLGGISAQACMISTIIEGLIGGMFHRHMMQQGKVGAIFQPLPVALVTFVAEIAQMLTLLLLVKPFSVAFHLVEQIAVPMCLANALGAGLFMRILLDRRQLYERQSTVFSTKALAIAARVEGVLRDGFNIDTSAQVAQVLYEETGVGAVAITDTEHLLAFIGIGADHHIPGTPISSVLTRQAIERNEVVYADGNEIAYRCSINPKCPLAASLIIPLVGEDGRVIGTIKLYEPRSRLFSTINRTLGEGIARLLSNQILAGRYMRQREMLAQSEIKLLHAQVNPHFLFNALNTLSAVIRRDPEKACHLVLNLSTFFRKNLKRPSEEAALSEEVAHVAAYLEIEQARFLDKLEVEFDIPDHLKHVRMPAFSLQPVVENAIKHGTSQLLGVGRVRISAREEGDDLLLCVEDNAGLYVPSTDSGGLGVNLVRRRIVNRYGSRYGMEIECEPEVCTRVTLRLPIPPSDCRPIQGASLERIDH

SEQ ID NO: 125032 - DNA, 1740 bp, Streptococcus agalactiae A909
  CDS (1)..(1740): transl_table=11
atgacactctttttaattatgatggagcgagcggggttaatcatattattagcctatgcctttgtgcatatcccctttataaaacaaactttgaagcaacccgaattaaaaaaacaccagtatattctgcttatcttatttagcttatttgctattatttctaattttacaggggtagaaattcagtcagatttatctatcattccacaaactcttaatcatatagcagatcaatcatcggttgccaacacacgtgttttaaccattggtgtatcaggtctaatcggtggcccaatagtcggtattatagttggtctcttatctgtattcgttaggtacttgcaaggaggattagcccctcatatttatgtcatttcttccttactaattggtttatgctctgggttatcaggcaattatcttcgtagaaattataataaaattcgtgttttagatgcaatggttgttggtttcggtatggaaattctacaaatgatctgtatcctcatttttagtgttgactttaatcaggcgcttcgattagtatcttttatcagcatgccaatgattttaagtaatactttaggtttaggtatatttatatccattatttcatctactcaaaaattagaagaacatgctaaagcatttcaaacccatcaagtacttgaattagcaaatttaacccttccttaccttagaaagggactgacaacagaatcttgtcaaccagtagctgaaattattcataaacatatggatgtgagtgctgttagcctgactagtcaatcagccattttagcctatgtaggagatggagctgaccatcatcttcctaatactcaaatattaacaaagcttgctaaaagagcaatagatactggtaaagttagtgtcgcaactgataaaagtgaaatcgaatgcgaccataagaattgcccacttagttcagcaattgttattccattacacatccacgatgttatagtgggtactttgaaattatatttttcagatgcacaacatatgacttacgttgaccgtcaattagctgaaggattaggcaatatcttttccactcagttagctttgggacaagctgaggaagcaacaaggttactacaggatgcggaaatgaagtctctccaagcgcaggttaatccgcattttctttttaatgcactcaatactatttatggtttaattcgcatggatagcgaaaaagcaagaaagctcgtccaagattttagcaaggttattcgtgctaatcttcaacgggcaaagcaaaatttaattcctctccatgatgaattggaacaggttaacgcctatttagcccttgaagaagcaagatttcctaacatggtggcctttaatttagacaaccaaacaaattcagatgacaacttaatgattcctccctttacattgcaggtcttgattgaaaactcttataaacacgcttttaagcatatcaataaaaataaccagctaaaggttactattgcaagaaataatgataggcttcatatcattgtccaggacaatggtattgggattccaaaagaaaaattaataacgcttggaaaaaaaactcaaatttcaaaaaaaggttctggtacagctattgagaatctcgttcgtcgcttgaatattatttatgatggacaagcaagtttaaaatttgaatcaaatgatttaggaacttgtgctattgttaacatccccattaaaaattag

SEQ ID NO: 125033 - protein, 579 aa, Streptococcus agalactiae A909
MTLFLIMMERAGLIILLAYAFVHIPFIKQTLKQPELKKHQYILLILFSLFAIISNFTGVEIQSDLSIIPQTLNHIADQSSVANTRVLTIGVSGLIGGPIVGIIVGLLSVFVRYLQGGLAPHIYVISSLLIGLCSGLSGNYLRRNYNKIRVLDAMVVGFGMEILQMICILIFSVDFNQALRLVSFISMPMILSNTLGLGIFISIISSTQKLEEHAKAFQTHQVLELANLTLPYLRKGLTTESCQPVAEIIHKHMDVSAVSLTSQSAILAYVGDGADHHLPNTQILTKLAKRAIDTGKVSVATDKSEIECDHKNCPLSSAIVIPLHIHDVIVGTLKLYFSDAQHMTYVDRQLAEGLGNIFSTQLALGQAEEATRLLQDAEMKSLQAQVNPHFLFNALNTIYGLIRMDSEKARKLVQDFSKVIRANLQRAKQNLIPLHDELEQVNAYLALEEARFPNMVAFNLDNQTNSDDNLMIPPFTLQVLIENSYKHAFKHINKNNQLKVTIARNNDRLHIIVQDNGIGIPKEKLITLGKKTQISKKGSGTAIENLVRRLNIIYDGQASLKFESNDLGTCAIVNIPIKN

SEQ ID NO: 125034 - DNA, 1659 bp, Carboxydothermus hydrogenoformans Z-2901
  CDS (1)..(1659): transl_table=11
atgaatgaattgtttataaatttaattgaaaggttaagcgtcatcattactttagccttttttgtttccaaaaccagactttttcgcaatattctccaacaggaattaaccattcgccaaaagttgggtctaattttggggtttggactttttggaatcatcgggacttactgggggataccgattaaaggggctattgctaactccagagtagtagggcctgctattgccggtataattggagggcctgccgcaggtttgctggcaggtttaattgccggagtgcaccgggcctggctgggtggttttacggcagtggcttgtggcatatctacaaccgttgagggattaattgccggggtcttggcccggcgttttccggaaaaaaggtttaatgtagtttttggtattttaaccggtatgtttatcgaaacgttacaaatgattattattttacttttagcccggccctttgaagatgcccttagtttagtaaaagtaattggactgccaatgattttggtaaacggtataggtataggggtttttcttttaatattagaaagcacggtgaaagaaaaagagcatataggagcggtttatgcggaaaaggctttaaatattgctaacgaaaccttaccaattttaagggaaggtttaaatagggaaacggcttttaaggtttccagaattattttaaataaaaccgatgctgatgctgttgcccttaccgataaaaacataatattagctcatgtcggcagtggcgaagatcaccatttaagcggcacaccaataaaaacagctgctaccgctaaagctttaaataacggggaactaaccgtagttttaaataaggaggctataggctgcagcaattccaattgtaaattggcgtcggcagtgattgctcctttatttattagaaacgaagtggtgggggcattaaagctttattacaataaacctgacaaaattggtgaatttaccattacttttattgaaggattatcccgtttaatttccacccagctggaattatcaatgctggaacatcaggcaaagcttttggccagggctgaattaaaagccctgcaagctcaaatcaatcctcactttttgtttaattctctaaataccatagtagctctttgccgaaaaaatcccgatcaggcccgggagttgataataaagcttagcgaatatttccggcggaatttaagggaatgggagcctttaatacccttggcggaagaattaaaaaatgtggaattgtatctcacctttgaaaaagcacgattttctgataagttacaggtaaatttaaatatagatgataaagtaaaagaagttatggttcctccctttgctgtggaaacgttggtagagaatgctgtcaagcacggcattttgcccaaaaagggtgggttagttcaaataaatgccaaacttcaggataacaaagcggtaattgagatagtggataatggtgttggtcttagggaggacgtaaaagttggagttggactttccaatctaaaagaaagattaaggaatcttttccgggaagaagggcaattttatttatattccagggaagatgggggcacgatatccaggttaataattcctcttttaagcaaggaggctttaagatga

SEQ ID NO: 125035 - protein, 552 aa, Carboxydothermus hydrogenoformans Z-2901
MNELFINLIERLSVIITLAFFVSKTRLFRNILQQELTIRQKLGLILGFGLFGIIGTYWGIPIKGAIANSRVVGPAIAGIIGGPAAGLLAGLIAGVHRAWLGGFTAVACGISTTVEGLIAGVLARRFPEKRFNVVFGILTGMFIETLQMIIILLLARPFEDALSLVKVIGLPMILVNGIGIGVFLLILESTVKEKEHIGAVYAEKALNIANETLPILREGLNRETAFKVSRIILNKTDADAVALTDKNIILAHVGSGEDHHLSGTPIKTAATAKALNNGELTVVLNKEAIGCSNSNCKLASAVIAPLFIRNEVVGALKLYYNKPDKIGEFTITFIEGLSRLISTQLELSMLEHQAKLLARAELKALQAQINPHFLFNSLNTIVALCRKNPDQARELIIKLSEYFRRNLREWEPLIPLAEELKNVELYLTFEKARFSDKLQVNLNIDDKVKEVMVPPFAVETLVENAVKHGILPKKGGLVQINAKLQDNKAVIEIVDNGVGLREDVKVGVGLSNLKERLRNLFREEGQFYLYSREDGGTISRLIIPLLSKEALR

SEQ ID NO: 125036 - DNA, 1731 bp, Geobacter metallireducens GS-15
  CDS (1)..(1731): transl_table=11
atgctgcaccttctcgtgaatcttctggagcgcctcgggctgttcgccatcgcgttcatcctggtcatgcgcttcgccatcgtcaagcggttcctgatcggcaaggcgagccgctacgaaaagctcaccctgtcggttctcttcggcttcatcggcattgctgggacctacatgggggtgccgatccagaacgccatcgccaattcgcgggtggtgggggtggccctcggggggatcctcggcggccccctggtcggtttcggggccgggctcatcgccggtgggcaccgttttctcatcgatgtggggggcttcacggcgacggcctgcggggtggcgaccatcgcggagggggttgccggcggcctcatctaccaccgcctcaagagggggcagttcgatcccgccgtggcctttatcacgggggtcgcggtggaaaccctccagatggtgatcctccttgtcatggcgaagcccttcaccgcggcggtgagcctggtgagtgtcatcggcttccccatgatcctggtgaactccatcggcttggccctgttcgtggaactggtgtcatcggtgttccgggagaaggagcgcttcgccgcggtccaggcccagacggccctcaatatcgccctgcgcacgctccccttcctccggggggggctcaccgaggggtctgccgcggcaacggcccggatcatccgggagatgactgatctcgatgcggtggccatcaccgacgaggccgccatcctggcccacaccggggccgaggaggatcaccaccgccccggcttgccgcttctgaccgcttccaccaggtctgccctcgcctcgggggagatcaccacccccctgacccgtgacgacatcggctgtacccacgaagggtgccggctcggctcggcgatcatcgttcccctcaagaagcgggagcgcaccgtgggggccctgaagctctaccggctcaaggaagggggaattacccccctcgacatggagctggccaacggtcttgcccacctcttttccaaccagctggagatctcggagctggaggcccagcgaaaactcgtccgggaggcggaaatccgggcgttgcaggcgcagatcaacccccactttctcttcaacaccatcaacaccatcatcagctacacccggaccagtcccgagaccgcttccgacctcctggtgaagctcgccgatttcttccgcaggaacatcaaccccgggggggacagcgttcccctggcgaccgagcttgaacactgccgcgcctacattgccatcgaaaaggcgcgcttcgaggatcggctcagggtggtgttcgatgtcgacgaggaggccctgggctgcaaacttcccaccctgaccctccagcccctcgtggagaatgccctgaagcacggcatcctcccccgcgaggaggggggagagatccgggtcggtgcccaccgggaagggggcgtggtcaggatcgtggtgggggataatggggtggggatgcccccggagcaggttgcccgcctcttttccggggaatcgagtcagctcccgacggagggggcggggattgccctgaacaatgtcaatgcccggctctcggcgctgtacgggccggagcatgccctgcgggtggaaagcaccccgggagcggggaccaccgtgtcattcacggtgccccaaggggggaggggggagtatgctcatgagagtcttcatcgttga

SEQ ID NO: 125037 - protein, 576 aa, Geobacter metallireducens GS-15
MLHLLVNLLERLGLFAIAFILVMRFAIVKRFLIGKASRYEKLTLSVLFGFIGIAGTYMGVPIQNAIANSRVVGVALGGILGGPLVGFGAGLIAGGHRFLIDVGGFTATACGVATIAEGVAGGLIYHRLKRGQFDPAVAFITGVAVETLQMVILLVMAKPFTAAVSLVSVIGFPMILVNSIGLALFVELVSSVFREKERFAAVQAQTALNIALRTLPFLRGGLTEGSAAATARIIREMTDLDAVAITDEAAILAHTGAEEDHHRPGLPLLTASTRSALASGEITTPLTRDDIGCTHEGCRLGSAIIVPLKKRERTVGALKLYRLKEGGITPLDMELANGLAHLFSNQLEISELEAQRKLVREAEIRALQAQINPHFLFNTINTIISYTRTSPETASDLLVKLADFFRRNINPGGDSVPLATELEHCRAYIAIEKARFEDRLRVVFDVDEEALGCKLPTLTLQPLVENALKHGILPREEGGEIRVGAHREGGVVRIVVGDNGVGMPPEQVARLFSGESSQLPTEGAGIALNNVNARLSALYGPEHALRVESTPGAGTTVSFTVPQGGRGEYAHESLHR

SEQ ID NO: 125038 - DNA, 1704 bp, Desulfovibrio desulfuricans G20
  CDS (1)..(1704): transl_table=11
atgacaacgggcattctgctcataacgcttatcgagcgtttcggcctcatggttgccggagcgtttatgctgctgtccatcagtcccgtgcagaaactgcgccgcgacaccaattcacccctgcaaaaaagtttctgtattctttttttcgggttatttggcattctggggacttacagcggtaacgccatctttgagtcagtggcaaacctgcgggccatggctgtcataacggcaggcttgttcggcggaccggccgtgggactgggtgccggactcatggcgggactgcaccgcaacatcatcgaccccggcggcttcagcgcgttgccgtgcggtcttgccaccgtgctcgaagggctttttgccgggctggtggcatggcgggtcaaggaaagcatggactggcggctggctgccatgctgggtctggtaggcgaaaccgttcacatgattctggtgctggctctgtcgcgcccgtttccgcaggcggtggaactggtcaaagtcatcggcatgcccatgattgtggtcaactcgctgggcgccgcactgtttgtacaaatcatcaatctggtatccaaagggcgtgaacgccgcgaatcaagccatgcggaacagattctttccattgccaaccagacggtgagccatctgcgcagcggtcttaacagagaaacggctgccgccacggcgcgcataatctacgacaatatccccctggccgctgtgagcattacagacacggaaaccgtgctggcacacataggagcaggcgacacacatcatctggtggacaaacccatccagaccgaagccacacgacgtgtactgcattccggtcagccgacatttctcagcggcaaacggcagattgcctgcggacatccgggctgtccgctcaactccgccattatcatccccctgcgcaaaggcgatacagtcaccggcacgctcaaattttacggcagccagagcgagccgctggacagtatccgctttgaaatcgccaaagggctgggcggactgttttccacccagctggaactggaagacattcatctgaaagcgcgcatgctggcccatgcagaaatccgcagactgcaggcacagataaacccgcactttcttttcaactcgctcaataccatcgcttctttctgccggacaaaccctgacaaagcgcgcgagctgctgcttgacctttcaaggtatatgcgtcgcagcctcgacagcagcagggggtttgtccccttgtacgaagagcttgagcaggtggcctcgtaccttgccattgaacaggcacggttcggcgacagggtaagagtggatgtgaccatagaaccggactgcaccgactggcctatcccgccgctgataatccagcccattgtggaaaacggtgtacggcacggcattgcacggcgtgaagaaggcggcgtaatcaccctgcaggtgggcagagacggcgacgaactggccgtacgcgttgccgacaacggtgtgggtatggacgaacagcaggtacaaagactgcttgcccgccatcagaccgactcccattcctccggcatcggcgtaaccaattgcagacagcggctggagcagattttcggcccccgctatacgctgaacatccacagccgccccggagaaggcaccgaggtggccttcagagtccctaaaataccgatggtgcaataa

SEQ ID NO: 125039 - protein, 567 aa, Desulfovibrio desulfuricans G20
MTTGILLITLIERFGLMVAGAFMLLSISPVQKLRRDTNSPLQKSFCILFFGLFGILGTYSGNAIFESVANLRAMAVITAGLFGGPAVGLGAGLMAGLHRNIIDPGGFSALPCGLATVLEGLFAGLVAWRVKESMDWRLAAMLGLVGETVHMILVLALSRPFPQAVELVKVIGMPMIVVNSLGAALFVQIINLVSKGRERRESSHAEQILSIANQTVSHLRSGLNRETAAATARIIYDNIPLAAVSITDTETVLAHIGAGDTHHLVDKPIQTEATRRVLHSGQPTFLSGKRQIACGHPGCPLNSAIIIPLRKGDTVTGTLKFYGSQSEPLDSIRFEIAKGLGGLFSTQLELEDIHLKARMLAHAEIRRLQAQINPHFLFNSLNTIASFCRTNPDKARELLLDLSRYMRRSLDSSRGFVPLYEELEQVASYLAIEQARFGDRVRVDVTIEPDCTDWPIPPLIIQPIVENGVRHGIARREEGGVITLQVGRDGDELAVRVADNGVGMDEQQVQRLLARHQTDSHSSGIGVTNCRQRLEQIFGPRYTLNIHSRPGEGTEVAFRVPKIPMVQ

SEQ ID NO: 125040 - DNA, 1731 bp, Rhodospirillum rubrum ATCC 11170
  CDS (1)..(1731): transl_table=11
atgaccatcggaccgctcgccctcgtcatctcgctgtcccagcagatgtgcgtttatctggtcgtggcctatctgctcagcaagacgccgctgttcatccccttggtccatgtgaccatccgcctgccgcataaggcggcctgctacgccattttctcgttgttttgcatcatgggcacctatttcggcctgcgcatcgatgattcgatcgccaatacccgggcgatcggcgcggtgctcggcggaatgctgggcgggccctcggtcgggctggcggtcgggctgaccggcggcctgcaccgttattcgatgggcggcttcacggccttggcctgcgccatttcgacaacggccgaagggctgatcggcggcctcgtccaccgctatctggtcagtcgcggccagaccggcaagctgttccagccgctggtggtcgggctggtgacgctgttcgccgaggtctgccagatgctgatcatcattctggtcgcccggccggcggtcaacgccgtgcatctggtggaaaccatcgccctgccgatgctggtggccaattcggtgggggcggcgatgttcatgaccatcctgcttgaccgccggacgatgtttgaaacccaatcgagcgtgttctcggccaaggcgctgaagatcgccgcccgcgccgaaggagcgctgcgtagcggcttcaaccgcgaaaactccatgcgcgtcgcccgcatcatctatgaggagaccggcgtcggcgccgtggcgatcaccgatcgcgacaagatcctggccttcatcggcatcggcgacgaccaccataagcccggcatggcggttacctcgctgcagaccctggaatcaatccgcgagaaccgggtgatgtatgccgatggcaatgaggtggcctatcaatgctcgatcagcccgacctgccccttgggcgccgccctggtcatcccgctggttgacgagggcgagcaggtgatcggcaccatcaagctttacgagcccaaaacccggctgttttcgacgatcaatcgcaccttgggcgagggcgtggcccggttgctgtcgacgcagatcctggccgggcgctatgagcagcagcgccagttgcttgcccaatccgaaatcaagctgctccacgcccaggtcaatccgcatttcctgttcaacgccctcaacacgctttcggcggtgatccgccttgatcccgaccatgcccgccatctggtgcaaagcctgtcgaccttctttcgcaagaacctcaagcggaccagcgaacaggtgacgctcaacgacgaggtcgagcaggtcagcgcctatctggaaatcgaactggcgcgctttggcgatcggctgtcggtggatttcaatgtgcccgccgatttgggaaccgccaccttgcccaccttttcgcttcagccgctggtcgaaaacgccatcaagcatggcaccgcccaattgctgggcgatggacggatcggcgtttcggccgagcgccagggcggcgatctggtggtgcgggtggaagacaacgccgggctttatgaacggcggcccggcggcgacggcctggggatgaatttggtcgaccggcggatccgggcgcgctatggccagggctatggtctgagcgttgagtgcgagcgcgatgtggtcacccgcgtcatcttgcgtgtgccgtttgacccaagccccgccggggtcgctagccccgctttcgaaaaggtcggcccgtga

SEQ ID NO: 125041 - protein, 576 aa, Rhodospirillum rubrum ATCC 11170
MTIGPLALVISLSQQMCVYLVVAYLLSKTPLFIPLVHVTIRLPHKAACYAIFSLFCIMGTYFGLRIDDSIANTRAIGAVLGGMLGGPSVGLAVGLTGGLHRYSMGGFTALACAISTTAEGLIGGLVHRYLVSRGQTGKLFQPLVVGLVTLFAEVCQMLIIILVARPAVNAVHLVETIALPMLVANSVGAAMFMTILLDRRTMFETQSSVFSAKALKIAARAEGALRSGFNRENSMRVARIIYEETGVGAVAITDRDKILAFIGIGDDHHKPGMAVTSLQTLESIRENRVMYADGNEVAYQCSISPTCPLGAALVIPLVDEGEQVIGTIKLYEPKTRLFSTINRTLGEGVARLLSTQILAGRYEQQRQLLAQSEIKLLHAQVNPHFLFNALNTLSAVIRLDPDHARHLVQSLSTFFRKNLKRTSEQVTLNDEVEQVSAYLEIELARFGDRLSVDFNVPADLGTATLPTFSLQPLVENAIKHGTAQLLGDGRIGVSAERQGGDLVVRVEDNAGLYERRPGGDGLGMNLVDRRIRARYGQGYGLSVECERDVVTRVILRVPFDPSPAGVASPAFEKVGP

SEQ ID NO: 125042 - DNA, 1731 bp, Moorella thermoacetica ATCC 39073
  CDS (1)..(1731): transl_table=11
atggactggtcaatgggcctgcatcttgcggaaagattgagtatggttgccacagcggcttttatcctatctcgtaccccggccctgggacgcatcttatcccggcagcttaccaatcgggacaggctattgctggtccttgtccttggcgggatggggatagttggaacctatgccggtatccccattcacgatgccctggccaactcccgggtggtgggagtgatggtagctggcctgctgggcggtcccttcgtaggggcgggagccggcctgatcgccggcatccatcgctatttaatggggggctttaccgccttcgcctgcggcctggcggcagtagcggaggggaccctcgggggactggtacagcagtgttaccgtcgttcaccggtgccctggcctatggccttcgccgcgggcctggtaggggaaaccatgcagatggtcatcatcctcctgacagcccgcccctttactgaggcctgggctctggttcagattatcggccccccgatgattattgtcaattctattggcgtggccattttcatgtttattgttaaaactgccgccgaacagcaggaccacatcgccgcctgtcaggcccagcgggctctggatattgccaaccagacattacctttcctgcgccatggcttgaaccgggagtcggccgaagaggcggcaaggattatctttaattccattaaagtggccgccgtagctattaccgacaggcaggaaattctggcccatgtgggaatgggcagtgaccaccatcacccgggtatgcctatcatgaccagcgccaccctccaggccatagccaccggagagttgcagctggcccggagccggggtgaaatcggctgccgggagaaggactgtcgtttggcttcggcggtggtggtgcctctcaagaggcgggaagcaaccattggcacgttaaagctttatcacgagcgggagaatagcattaccacggtggacctggaactggcccgggggctggcccacctgttttctacccagctggaactggcagaggtgaaataccaggctcagctacgttcccaggcagaactaaaggtcctgcaggctcagatacacccccacttcctctttaatgccttgaataccattagttccctgatccgtaccagacccgaaaaagcaagggaattgctggcgaaactggccagtttcttccgctatagtttaagaagggacgataaccccattcccctggccgaagagctggcccacgtagattcttacctggctatagaggaagcgcgttttggtaataagctggaggttatccgccaggtggaccccgccaccctggctttccctgtccctgccttcaccctgcaaccggtagtggaaaacgccatcaaacatggattacaacccagaactcaagggggcagggtgatattgaacgccagcgatcggggagcggatgtagaggtcagggtaacggacgacggggtgggtattgccccggaagaaatgaataaaatttttctccctggctacggtcgcggccacggcctgggcctgtctattgttaacgagcgtttaaaggccctttacgggccggaatacgccgtccgggtgaagagtgtccccggccagggtaccgaggtggtcctgcgttttcctaaaaaagttgagcaccgggaggtgaaggaggaagatgacctttaccgccgttgtggttga

SEQ ID NO: 125043 - protein, 576 aa, Moorella thermoacetica ATCC 39073
MDWSMGLHLAERLSMVATAAFILSRTPALGRILSRQLTNRDRLLLVLVLGGMGIVGTYAGIPIHDALANSRVVGVMVAGLLGGPFVGAGAGLIAGIHRYLMGGFTAFACGLAAVAEGTLGGLVQQCYRRSPVPWPMAFAAGLVGETMQMVIILLTARPFTEAWALVQIIGPPMIIVNSIGVAIFMFIVKTAAEQQDHIAACQAQRALDIANQTLPFLRHGLNRESAEEAARIIFNSIKVAAVAITDRQEILAHVGMGSDHHHPGMPIMTSATLQAIATGELQLARSRGEIGCREKDCRLASAVVVPLKRREATIGTLKLYHERENSITTVDLELARGLAHLFSTQLELAEVKYQAQLRSQAELKVLQAQIHPHFLFNALNTISSLIRTRPEKARELLAKLASFFRYSLRRDDNPIPLAEELAHVDSYLAIEEARFGNKLEVIRQVDPATLAFPVPAFTLQPVVENAIKHGLQPRTQGGRVILNASDRGADVEVRVTDDGVGIAPEEMNKIFLPGYGRGHGLGLSIVNERLKALYGPEYAVRVKSVPGQGTEVVLRFPKKVEHREVKEEDDLYRRCG

SEQ ID NO: 125044 - DNA, 1740 bp, Staphylococcus aureus subsp. aureus NCTC 8325
  CDS (1)..(1740): transl_table=11
atgttattacttgagcgtgtaggtttaattattattttggcctatgtgttgatgaatattccatattttaaaaacttaatgaatcgtcgacgtacatggaaagcacgttggcaattatgtattattttcagtttgtttgccttaatgtctaatttaactggtatcgtcatcgatcatcaacatagtttgtcaggaagtgtgtacttccgtttagatgatgatgtatctttagctaacacacgtgtattaacgataggtgtcgcaggattagttggtggcccttttgtaggtctatttgttggcgttatttcaggtattttcagagtgtatatgggtggggcggatgcacaagtttatcttatctcatctatatttattggtataattgctggttattttggcttacaagctcaaagacgcaagcgttacccgagtattgcgaaaagtgccatgattggaattgttatggaaatgattcaaatgttgagcattttaacattttcccacgacaaagcatatgcggttgacctcatatcattaattgcactaccaatgattattgttaatagcgttggtacggcgatttttatgtctattatcatttcaacattaaagcaagaggagcaaatgaaggctgttcaaacacatgatgtactgcaattgatgaaccagacattgccgtattttaaagaaggattgaatagagaatcggcacagcaaattgcgatgattattaaaaatttaatgaaagtatctgccgtagcaattacaagcaaaaatgaaatcttatcgcatgtaggtgcaggtagtgatcatcacataccaacaaatgaaatattaacaagtctgtctaaagatgtattgaaatcaggaaagttgaaagaagttcatactaaagaagagattggttgtagtcatccgaattgcccgcttagagcagctatcgtgataccacttgagatgcatggttctatcgtcggtacattgaagatgtattttacaaaccctaatgatttaacttttgtggaacgtcaacttgcagaaggattggcaaatatttttagtagccaaattgaacttggtgaagccgaaacgcaaagtaagttattgaaagatgctgagattaagtcattacaggcacaagtgagtccacattttttcttcaattcaattaacacgatctcagctttagttagaataaatagcgaaaaggcacgagagttactattagaattgagttattttttcagagcgaatttacaaggctctaagcaacatacgattactttagataaagagttaagtcaagtgcgtgcatacttatcactcgaacaagcacgttatccaggaagatttaatatcaatattaatgttgaagacaaatatcgcgatgtgcttgtaccaccatttttaattcaaattttagttgaaaatgccatcaaacatgcgtttacgaatcgaaagcaaggtaacgatattgacgtgtcagtgattaaagaaactgcaacacatgtacgtattattgtacaagataatggtcagggtatttctaaagataaaatgcatttgttgggagaaacatctgtagaatcagagtctggaactggtagtgctttagaaaatttaaacttacgcctaaaaggattatttggaaaatccgcagcattacaatttgaatcgacatcgagcggtaccactttttggtgtgtacttccttatgaaagacaagaggaggaataa

SEQ ID NO: 125045 - protein, 579 aa, Staphylococcus aureus subsp. aureus NCTC 8325
MLLLERVGLIIILAYVLMNIPYFKNLMNRRRTWKARWQLCIIFSLFALMSNLTGIVIDHQHSLSGSVYFRLDDDVSLANTRVLTIGVAGLVGGPFVGLFVGVISGIFRVYMGGADAQVYLISSIFIGIIAGYFGLQAQRRKRYPSIAKSAMIGIVMEMIQMLSILTFSHDKAYAVDLISLIALPMIIVNSVGTAIFMSIIISTLKQEEQMKAVQTHDVLQLMNQTLPYFKEGLNRESAQQIAMIIKNLMKVSAVAITSKNEILSHVGAGSDHHIPTNEILTSLSKDVLKSGKLKEVHTKEEIGCSHPNCPLRAAIVIPLEMHGSIVGTLKMYFTNPNDLTFVERQLAEGLANIFSSQIELGEAETQSKLLKDAEIKSLQAQVSPHFFFNSINTISALVRINSEKARELLLELSYFFRANLQGSKQHTITLDKELSQVRAYLSLEQARYPGRFNININVEDKYRDVLVPPFLIQILVENAIKHAFTNRKQGNDIDVSVIKETATHVRIIVQDNGQGISKDKMHLLGETSVESESGTGSALENLNLRLKGLFGKSAALQFESTSSGTTFWCVLPYERQEEE

SEQ ID NO: 125046 - DNA, 1674 bp, Shewanella sp. MR-4
  CDS (1)..(1674): transl_table=11
gtgctcgaaaatcaaatgatgttactggcggtatttgaacgggcagccttgatgctgatgaccctgttctttttaacccgcactcgaccgttccagcgtttattccaaaagcgtaatcacacccccgcagagctggtctctgtggcggcgatattttgcttatttgcggtgttcagtacttatactggcattgaggttgaaggtgcgctggttaacgtgcggattatcgcgattatttccggcgggattctatttggcccttgggttggtattcctgcaggcgtgctgtcggggctacatagatatctgattgatatggatggcgatacttctatcccgtgtctaatcgccagcattattgccggtctaatggcgacctggatttactataaatgtcccaaatctaagttgtggatttatggcattgcggcgggcatgttgtgcgaaacactgaccatgttgttgatttggctgctgacagagccacacgaggtaggcgttgagatagtgagtcacattgcctatcccatgatcgcaggcactgtgtgtattggacttatcatcaagctagtgcaagacctcgacgatgaaaaagaactgattgccgctaagcaggccaagctcgcgctggatattgccaacaaaaccttacctttcttccgcaaaattgatcgccaagccttagagcaagtgtgcgccgtgatccgtaatgaaatccatgccgatgccgtggcgattaccgatactcgcgatgtattagcctatatgggcgttggtaaagattactacgaggttgatggtcatcaggccattagtgaaatgacgcaaagggcgatagagctagatcaaaacattattaacaacgacttacgccaatatcatttatctgattttcattcggtcatcataattccgctgcgcgaaaacggcacggtaagcggtacgctgaagatttattatcgcaataactaccggattaccagctcgctgcgggagatggcggtgggcttgtcgcagttgatttcgacccagattgaggtgtcgcgcatcgagcaactgcaagagatgacccgtaaggcggagttcactgcactgcagagcaagattaacccacactttttgtttaatgccctcaatgcgatttcttctttgatccgcattcgaccacagcaggcgcgggagttgattgccaatctggccgattatctgcgttataacttagacaaaggcgatgagctgattgatatccaagaagaagttaaacaagtacgcgattatgtggcgatagagcaggcgcgctatggcgacaagcttgaagtggtattcgatgtcgacgatgtgcatttttgtgtgccttgtctcctgttacagccgctggtggaaaacgccattttgcacggcattcagccgcgtagtgcgccgggcagagtgaccatagaggtgaaaaaactcgatgctggcattcgggtggccgtgcgtgatacgggttatggcattagccaagaggtaattgatggtgtcgccgccggtcgtatcgagagcagcagtattggactgacgaatgtgcaccagagggtgaagttattgtacggtgaagggctacagcttaaacggctaaatccggggaccgaagttagcttttatttaccagaaaatgaggcgcaagtatgttaa

SEQ ID NO: 125047 - protein, 557 aa, Shewanella sp. MR-4
MLENQMMLLAVFERAALMLMTLFFLTRTRPFQRLFQKRNHTPAELVSVAAIFCLFAVFSTYTGIEVEGALVNVRIIAIISGGILFGPWVGIPAGVLSGLHRYLIDMDGDTSIPCLIASIIAGLMATWIYYKCPKSKLWIYGIAAGMLCETLTMLLIWLLTEPHEVGVEIVSHIAYPMIAGTVCIGLIIKLVQDLDDEKELIAAKQAKLALDIANKTLPFFRKIDRQALEQVCAVIRNEIHADAVAITDTRDVLAYMGVGKDYYEVDGHQAISEMTQRAIELDQNIINNDLRQYHLSDFHSVIIIPLRENGTVSGTLKIYYRNNYRITSSLREMAVGLSQLISTQIEVSRIEQLQEMTRKAEFTALQSKINPHFLFNALNAISSLIRIRPQQARELIANLADYLRYNLDKGDELIDIQEEVKQVRDYVAIEQARYGDKLEVVFDVDDVHFCVPCLLLQPLVENAILHGIQPRSAPGRVTIEVKKLDAGIRVAVRDTGYGISQEVIDGVAAGRIESSSIGLTNVHQRVKLLYGEGLQLKRLNPGTEVSFYLPENEAQVC

SEQ ID NO: 125048 - DNA, 1683 bp, Shewanella sp. MR-4
  CDS (1)..(1683): transl_table=11
atgtccttgatcttgctcctgacccaacagatgtcactctatttggtaatagtgtatctggtcagtaaaacgccgctttttaaactgttcgccgaaacagcaccacgcctgccccacaaggtgttcatttatctcatcttttcaagcttttgcatcatggcgacctattttggtgagcaaacctcgggtgccattgccaatactcgcgccatgggcgccgtgttaggtggcttactcggtggccctgtcaccggattattggttggactcacgggaggtttacaccgctacagcatgggcggctttaccgatgtagcttgcgccatctccactacccttgaggggttctcagcgggaatgatcagcttttatctgcgccgcgcgggtaagagcgagcttatctacaatccactcttagtctgtctcgtaactttctacgcagaaatgatgcagatgagcatcattttgctgattgctcgccccttcgatgatgcctgggagttagtacggcagattgcgccgccgatgctcttagttaactccataggtgcagcgctatttatgagcatgatccgtgatcaaaaaaccatgttcgataagctctcctccaccttctccaccaaggcgctaaaaattgccgagcgcagcgttggcttactctctaagggttttaacgaagaaagcagcggtaaggtcgcacaaattgtgattgaagaaaccaatgtcggcgcagtagccattaccgatcgcgaaaaactcttagcctttattggcataggcgcagaccatcatattcccggcacgccaatttcctcaaaaattacccttgaagccatcaaccagaacaaagtgatgtttgccgatggggtagagatgccctactcctgctcgatttcgagccagtgtaagctcggttcgagccttgtgatcccacttcgcagcgacaccgaagtcataggcaccatcaagttatacgagcctaaaaataaactgttcttgaacattaaccgcaccttaggggaaggtattgcacggctattatcgaaccaaattctgtatggccgctttgaacagcagcaaaatctactgacccaagccgaactcaaattgctgcaagctcaagtgaatccccattttttattcaacgcactcaataccatcagtgcgattattaagcgcgatcccgatatgtcgaagcaactgttgcaacagttgtcgcagtttttgcggatcaatttaaaacgtaccacaggtttagtgactctcggggatgagcttgatcacatcgcctcctatctcaccattgagaaagccagatttattgataaattacaggtaaacattgctatccctgagtcactctatcactgcaaagtacccgcatttaccctgcaacctatcattgagaacgccgtaaaacacggtacctcccatatgattgaccaagggcaaatcaaggtgacaggccggatggatgaacaggtattggtcttagacgtcactgataatgcggggctttaccaacccattattggctctgaagggctaggcatgaacttagtccataaacggatccaaaacctgtttggcgagcaatatggcattcaggtggaatgccagccggatgagtacaccaaagttaccatccgcttacccatagaacatacggaaactagcacgtga

SEQ ID NO: 125049 - protein, 560 aa, Shewanella sp. MR-4
MSLILLLTQQMSLYLVIVYLVSKTPLFKLFAETAPRLPHKVFIYLIFSSFCIMATYFGEQTSGAIANTRAMGAVLGGLLGGPVTGLLVGLTGGLHRYSMGGFTDVACAISTTLEGFSAGMISFYLRRAGKSELIYNPLLVCLVTFYAEMMQMSIILLIARPFDDAWELVRQIAPPMLLVNSIGAALFMSMIRDQKTMFDKLSSTFSTKALKIAERSVGLLSKGFNEESSGKVAQIVIEETNVGAVAITDREKLLAFIGIGADHHIPGTPISSKITLEAINQNKVMFADGVEMPYSCSISSQCKLGSSLVIPLRSDTEVIGTIKLYEPKNKLFLNINRTLGEGIARLLSNQILYGRFEQQQNLLTQAELKLLQAQVNPHFLFNALNTISAIIKRDPDMSKQLLQQLSQFLRINLKRTTGLVTLGDELDHIASYLTIEKARFIDKLQVNIAIPESLYHCKVPAFTLQPIIENAVKHGTSHMIDQGQIKVTGRMDEQVLVLDVTDNAGLYQPIIGSEGLGMNLVHKRIQNLFGEQYGIQVECQPDEYTKVTIRLPIEHTETST

SEQ ID NO: 125050 - DNA, 1740 bp, Pediococcus pentosaceus ATCC 25745
  CDS (1)..(1740): transl_table=11
atgttaaatttaaccgtacttttgtttgaaagagctggattaattattattttggctttttttctagtaaatattcctcaatttaggaaattactttttcgaaaagattggtcaacaactttccaattatttgcgattttttctatttttacgattgtagcaaatttaattggtgttgaacttcgacctgataatagcattcaattcaaatcccttctgcagaatgttacccctggagattctgtagctaatattcgaattttaacggttacagtttcaggaattattggcgggccgctggttgggggtggagtaggcttagtcgctggacttcaccgaatgttgcaagagtcgctaacaaccgacgcccttttttatattcccagttcgatgataattggaattttagccggtttttttgctaagaaaaaacaacatcgctttgcaacaatgaaagtgtttgatggttttttagtaggacttttaatggaagcaatccaaatgctgtttattttactatttagtccgacaggttggactttggtaaaatatattgcaataccaatgatgctagtaggtgctttagggacttcggttttcttatcaattatcacgctttactttcggcaggaagttgatactcaagctacccaaactaaatcaatttttcagttagctttaaaaactttgccagtttttcgtcaagggttaaatcaagaagccgctaaaaaggctgctagtttaatattggaatatacaaattttgatgcggttggtattacagatgaatctaagattctggcttttgcggggatgggaagtgatcaccatatcacaggtgcttctatcttgacggaattatctgaagaggcggttaaattgggtgaagttcaaattggaaataatgctcatgagattaattgccctgtaaaaagttgtccattacactcggccgtcgtagtacctttaatcattaaaggtaaagcagtaggtagtttgaaactctactatgtagaagaatggcgattaagtccagtggaaattcaattaggaacagggctgggagaaatattagcaatgcagataatgttaggagaaatcgagcatcaatcagaattagtgcgggatgccgaaataaaatctctccaatcgcaagtcaatccgcactttttctttaatgcgataaatacaattgtggcagttatgcggtacgacagtgaccaagcacgtgaattactgatccaactcagtacttattttagggcaaatttaacggggattagagaaacaaccattccgttgtatcaagaattcaaacatgttaaagcctatttaatgcttgaacaaacacgttttccaaatcgatttgaaattttgtttcaccagaaggtttcggaaaatgtaatgatacctccatttagcatccaaattattgttgaaaatgcccttaagcatgcctttaatagtcgaaaaaagggcaatatagtttcaattaatgttgaacagattaaacaaagacttaaaattgaaattactgacaatgggcaagggattgataaaagtattattgataaattaggaaaacagacggtaagttctgtaagtgggagtggaacggcattacaaaatcttaatgtgcgcttgatgggtctttatggtaaagatgccgaactaaaaataagcagtgatcaaaatggaacccaggtggtaatccaaattccatataaggaacaggtgtaa

SEQ ID NO: 125051 - protein, 579 aa, Pediococcus pentosaceus ATCC 25745
MLNLTVLLFERAGLIIILAFFLVNIPQFRKLLFRKDWSTTFQLFAIFSIFTIVANLIGVELRPDNSIQFKSLLQNVTPGDSVANIRILTVTVSGIIGGPLVGGGVGLVAGLHRMLQESLTTDALFYIPSSMIIGILAGFFAKKKQHRFATMKVFDGFLVGLLMEAIQMLFILLFSPTGWTLVKYIAIPMMLVGALGTSVFLSIITLYFRQEVDTQATQTKSIFQLALKTLPVFRQGLNQEAAKKAASLILEYTNFDAVGITDESKILAFAGMGSDHHITGASILTELSEEAVKLGEVQIGNNAHEINCPVKSCPLHSAVVVPLIIKGKAVGSLKLYYVEEWRLSPVEIQLGTGLGEILAMQIMLGEIEHQSELVRDAEIKSLQSQVNPHFFFNAINTIVAVMRYDSDQARELLIQLSTYFRANLTGIRETTIPLYQEFKHVKAYLMLEQTRFPNRFEILFHQKVSENVMIPPFSIQIIVENALKHAFNSRKKGNIVSINVEQIKQRLKIEITDNGQGIDKSIIDKLGKQTVSSVSGSGTALQNLNVRLMGLYGKDAELKISSDQNGTQVVIQIPYKEQV

SEQ ID NO: 125052 - DNA, 1683 bp, Shewanella sp. ANA-3
  CDS (1)..(1683): transl_table=11
atgtccttgatcttgctcctgactcaacagatgtcactctacttagtgatagtgtatttggtcagtaaaacgccactctttaaactgttcgccgaaaccgcgccacgcctaccgcacaaggtatttatttatcttatcttttcaagcttttgtatcatggcgacttattttggcgagcaaacctcgggcgccattgccaatactcgcgcgatgggcgccgtattaggtggcttactcggcggtcctgtcacgggatttttagtcggtatcacgggaggtttgcaccgctacagtatgggtggttttaccgatttagcctgcgccatttccactaccctcgaaggcctgtcagcgggcatgatcagtttttacctgcgccgcgcgggcaagagcgagcttatctacaatccactgttagtttgcctagtgaccttttacgccgaaatgatgcagatgagcattattctactgatcgcccgcccatttgatgatgcctgggaattagttcgacagattgcaccgccgatgctcttagttaattccatcggtgcggcgctgtttatgagcatgatccgtgaccaaaaaaccatgttcgataagctatcctccagcttctcgaccaaggcgctcaagattgccgagcgcagcgtgggcttactctccaagggctttaatgaagagagtagcggtaaggttgcgcaaattgtgatccaagaaaccaatgtcggcgcagtggccattaccgaccgcgaaaaactcttggcttttattggcataggcgctgaccatcatattcccggcacaccgatttcctcaaaaataacccttgaggccattaaccagaacaaagtgatgttcgccgatggggtagaaatgccctattcctgctcgatttcgagccagtgtaaactcggttcgagcctagtgatcccacttcgcagcgacactgaagtcattggcaccatcaagttatacgagcctaaaaataaactgttcctgaacattaaccgcaccttaggggaagggatcgcgcggctattgtcgaaccagatcctctatggccgctttgaacagcagcaaaatctgctgacccaagccgagctcaaattactgcaagctcaagttaatccgcattttttattcaacgcactcaataccatcagtgcgattattaagcgcgatcccgatatgtcgaagcaactgctacagcagttatctcagtttttgcggatcaatttaaagcgtaccacgggtttagtgacactcggggatgagctcgatcacatcgcctcctatctcaccattgagaaagccagatttattgataaattacaggtcaatatcgctattcctgagtcactctatcactgcaaagtgcctgcatttaccctgcaaccgatcattgaaaatgccgtcaaacacggcacctcccatatgattgagcaagggcaaatcaaggtgacaggccgaatggatgaacagatattggtcttagaagtcactgataatgctgggctttaccagccgattattggttctgaagggctaggcatgaacttagtccataaacggatccaaaacctgtttggtgagcagtacggcattcaggtggaatgcgagccggatgagtacaccaaagtcactatccgcttacccatagaacagacggaaaccagcacgtga

SEQ ID NO: 125053 - protein, 560 aa, Shewanella sp. ANA-3
MSLILLLTQQMSLYLVIVYLVSKTPLFKLFAETAPRLPHKVFIYLIFSSFCIMATYFGEQTSGAIANTRAMGAVLGGLLGGPVTGFLVGITGGLHRYSMGGFTDLACAISTTLEGLSAGMISFYLRRAGKSELIYNPLLVCLVTFYAEMMQMSIILLIARPFDDAWELVRQIAPPMLLVNSIGAALFMSMIRDQKTMFDKLSSSFSTKALKIAERSVGLLSKGFNEESSGKVAQIVIQETNVGAVAITDREKLLAFIGIGADHHIPGTPISSKITLEAINQNKVMFADGVEMPYSCSISSQCKLGSSLVIPLRSDTEVIGTIKLYEPKNKLFLNINRTLGEGIARLLSNQILYGRFEQQQNLLTQAELKLLQAQVNPHFLFNALNTISAIIKRDPDMSKQLLQQLSQFLRINLKRTTGLVTLGDELDHIASYLTIEKARFIDKLQVNIAIPESLYHCKVPAFTLQPIIENAVKHGTSHMIEQGQIKVTGRMDEQILVLEVTDNAGLYQPIIGSEGLGMNLVHKRIQNLFGEQYGIQVECEPDEYTKVTIRLPIEQTETST

SEQ ID NO: 125054 - DNA, 1770 bp, Bacillus cereus G9241
  CDS (1)..(1770): transl_table=11
atgctaaatttagtacttatgatgattgaacgtgtcggacttattgttattttagggtttttactttcgcatattaaaacgttcaggcgtcttcttcataagcaagacggatatgtagataagcttaagcttatctgtattttttcggtgtttacaattgtaagcaattacacaggaattgaaatagcaggaaatacgattatgaatgaaaattggctacagggtgtttcttcatcgagcacaatcgcgaatacacgtattatgggtgttggaattagtggattgctcggcggacctatcgtcggaattggagtaggatcaattgctggtattcaccgctatatgcttggcgggacgacggcgctaagttgtgcaatctcttcaattttagcgggcgttataactggttatatcggatacatttttaaaaaatataaccgtacaattacacctaagttttcagcggttttaagtgtttttatcgtttctttagaaatgattatgatcctattaattgtagaggatggaatgagcattgtgaaaacaattgcgataccaatgatccttgtaaatagttttggaagttttattttactttctatgatacaagctattttgcgtcaggaagagaacgcaaaggcacttcagactcataaggtattacgtattgcagataaaacgttaccgtattttcgccaaggtttaacagaagaatcgtgtaagcatgtggcacaaattattcaccgctttacaggaacagatgcggtatccttaacagatacagagaaaatactagctcatgttggattagcatcagatcaccatattccttcacatagtttaataactggtttgtcgaaagaagtgttacacacaggaaaaataatgaaagcaaaatcacgtgaggttattaattgtcaacatgaaggctgccctttgcaagcggcgattgttattccactaacttcacatggaaatacaatagggacattaaaactgtatttcaaaaatcctaaccagttaagtcgtgtggaagaggaattagcagaaggattagcaaaaatattctctacacaacttgaattaggtgaagctgagttacaaagtaaattattgcaagatgcggaaataaaggcattacaagcacaaattaacccgcactttttatttaatgcgattaatacagtatcagctttatgccgaacagatgtagaaaaagcaaggaagttattattacagcttagtgtgtatttccggtgtaatttacaaggggcacgtcagttattgattccactagaacaagaattaaaccatgtacaggcatacttatcgctagaacaagcaaggtttccaaataagtatgaagtaaaggtgtatattgaggatgagctaaagacaactttagtaccaccatttgttctccaactattggttgaaaatgcgttgcgacacgctttcccgaagaagcaaccagtatgcgaagtggaagtgcatgtttttgaaaaagagggtatggttcattttgaagtaaaagataatgggcaaggaattgaggaagaacgtttagaacaattaggaaagatggtagtttcgtcaaagaaagggactggaacagctttatataatattaatgaacgtcttattggattatttgggaaagaaacgatgcttcatattgaaagtgaattaaatgaggggacagaggttacttttgttattccaaaaaaagtaggggaggaagagcagattgttaaaagtactagtagttga

SEQ ID NO: 125055 - protein, 589 aa, Bacillus cereus G9241
MLNLVLMMIERVGLIVILGFLLSHIKTFRRLLHKQDGYVDKLKLICIFSVFTIVSNYTGIEIAGNTIMNENWLQGVSSSSTIANTRIMGVGISGLLGGPIVGIGVGSIAGIHRYMLGGTTALSCAISSILAGVITGYIGYIFKKYNRTITPKFSAVLSVFIVSLEMIMILLIVEDGMSIVKTIAIPMILVNSFGSFILLSMIQAILRQEENAKALQTHKVLRIADKTLPYFRQGLTEESCKHVAQIIHRFTGTDAVSLTDTEKILAHVGLASDHHIPSHSLITGLSKEVLHTGKIMKAKSREVINCQHEGCPLQAAIVIPLTSHGNTIGTLKLYFKNPNQLSRVEEELAEGLAKIFSTQLELGEAELQSKLLQDAEIKALQAQINPHFLFNAINTVSALCRTDVEKARKLLLQLSVYFRCNLQGARQLLIPLEQELNHVQAYLSLEQARFPNKYEVKVYIEDELKTTLVPPFVLQLLVENALRHAFPKKQPVCEVEVHVFEKEGMVHFEVKDNGQGIEEERLEQLGKMVVSSKKGTGTALYNINERLIGLFGKETMLHIESELNEGTEVTFVIPKKVGEEEQIVKSTSS

SEQ ID NO: 125056 - DNA, 1767 bp, Exiguobacterium sibiricum 255-15
  CDS (1)..(1767): transl_table=11
atgtttgaactcataccctttttactggaacggctcggcatcatgatcattttagcgttcatcctcgcccagtggggaccgacgcggcgtttactgaaacagccggaagccggctggcagtttgggttgctgattctaattttcgccacctatgggattttgagtaattacacgggagtcaaggtcgatttagccaagttcttaccgcacacttggctcgaacaggttgacggtacatcagcaatcgccaacacacggacgatgattgtcgtcatcagcggattgctcgccggtccgatcggtggaacgatcaccggtctcctcgttgggattcaccgctatacacttggcgggtttaccgctttcgcctgcgccctctcgaccgtcgtcgcaggcggtgtcagtggattactccgtccctactggcgcgaccgtctcggcagtcgggcattactgccgatttgcctgacgggttttttaatggttttcgaaatgtcattgattcttctgttttccgacccgttcccggccgccctcgaactcatccagttcatctttcttccgatgaccgtcgtcaacgtcctcggcgtctggctgttcttatcgatcatccgtctcgccgcgcgggaagaggaacacgttcgggcccgtgaagcggaacggtccctgcatatcgcggatttgaccttacctcatttgacacgcggcttaactatccaaaccgcggaagccgtggcagatattttattacaacagacacgcgccgatgcggtctccttgacggatcaatcagtcattttggcacatataggtgtcggcagtgaccatcaccaatccggcgggcactggacgacccgtccgacggagcatgttttgacagacggacaactgaggcttgtcaccgatcgggatgagatcggttgtccaaaagcagattgcccgttacaggcgggcatcattgctccgttaacaatcggcgaaacgacaatcgggacactcaaagtgtattatcctcatcctgaattgctcgacgccgtcgaagtcgaattgatcgaaggactggccaagctcttctcgacccaactcgccctcgggaaagccgagcggcaagccggtctgttaaaggatgctgaaatccgggccctcgaagcacagatccatccgcattttttatttaatgccatcaatacgatttacgcgttatgtcggacagatgtcgaacaggcacggaccttattgctcgaactgtcgacgtttttccgcagcaacctgcagggtgcccgctcgacgaaaattccgctccaaaaagaactggaacatatcgaagcctatatctcactggaagcggcccgttttccgagccgcccgtttgttgatattgatttagaggacgggacggaacaattacttgttccgcctttcgtactccaaccgttgatcgaaaatgccttccagcatgcgtttagtcctggtcaaaccggatatgtcggcgtcacggcctggttaaccgcggatcaactcgttttggaagtcgtcgataacggacgcgggatcgacgcggaacgcctgacacgcctcggtcgggaagtcgttgaatccaacggtaccggcactgcccttttcaatacagccgaacggattaaaagtctgtatgctgaaaacggttcgttccggctgaccagtcaaccgggagaaggtacgaccatcaccatccatctgcccattgaaacaggaaaggaggtttcccatgcgcacgatcctaattga

SEQ ID NO: 125057 - protein, 588 aa, Exiguobacterium sibiricum 255-15
MFELIPFLLERLGIMIILAFILAQWGPTRRLLKQPEAGWQFGLLILIFATYGILSNYTGVKVDLAKFLPHTWLEQVDGTSAIANTRTMIVVISGLLAGPIGGTITGLLVGIHRYTLGGFTAFACALSTVVAGGVSGLLRPYWRDRLGSRALLPICLTGFLMVFEMSLILLFSDPFPAALELIQFIFLPMTVVNVLGVWLFLSIIRLAAREEEHVRAREAERSLHIADLTLPHLTRGLTIQTAEAVADILLQQTRADAVSLTDQSVILAHIGVGSDHHQSGGHWTTRPTEHVLTDGQLRLVTDRDEIGCPKADCPLQAGIIAPLTIGETTIGTLKVYYPHPELLDAVEVELIEGLAKLFSTQLALGKAERQAGLLKDAEIRALEAQIHPHFLFNAINTIYALCRTDVEQARTLLLELSTFFRSNLQGARSTKIPLQKELEHIEAYISLEAARFPSRPFVDIDLEDGTEQLLVPPFVLQPLIENAFQHAFSPGQTGYVGVTAWLTADQLVLEVVDNGRGIDAERLTRLGREVVESNGTGTALFNTAERIKSLYAENGSFRLTSQPGEGTTITIHLPIETGKEVSHAHDPN

SEQ ID NO: 125058 - DNA, 1671 bp, Photobacterium sp. SKA34
  CDS (1)..(1671): transl_table=11
atggaattgattgtctctttgctacagcaaatgtgtgtttacttagtactggcttatatgctgagtaaaacccccattattttacctttgttgagcatttcttctcgtttaagccataagctgatttgttacgtgctgttttctggtttttgtattctcggtacctacttcggcttacatatcgacgatgcaattgcgaacacccgtgctattggtgccgttatgggggggctttttggcggtcctgtggtgggttttgctgttggtctaacgggcggtattcatcgttatactcttggtggctttaccgaccttgcctgtaccatttcgaccactgctgaaggcttaattggaggtttactccatgtttacctgcttaaacgtaacaaaggcgcattgttatttaacccttgcatggtgtttggtgtcacctttgttgctgaagtcgtgcagatgatcatcttaatcactgtcgccaaaccttttgaccaaacctatgagctcgtttctaccattgcagttccaatgatcatagccaattccgtaggtgcggcactgtttatgagtattctgcaagatcgtaaaacaatctttgaaaaatactctgcggccttttctcgccgtgctttaaccattgcagatcgctcggtcggtattcttagtactggctttaacagtgacaatgccaataagatcgcccgtattatttatgaagaaaccaaggtcggtgccgttgcgatcacagaccaagaaaaactcttagcttttgtggggatcggggatgatcaccataagccagatacccctatctcttcacaaagcactttagattcgattgaacaaaatgacatcatctaccttgatggccgtgaatccccttatcaatgctctctcgcccatgactgtaaacttggttcggcactgatcattccactacgcgcaggcaatcaagttgtcggcactattaagttgtatgagccaaaacgtaaactgttttcaaccgctaacatgtcaatggcagaaggtattgcgcagctactatcaagccaaattctttacggtgactacttgcagcaacaaaccttattatcacaagccgaaattaaactgctacatgcgcaagtaaatcctcacttcttgtttaatgcacttaataccatcagtgctatcacaaggcgcgatccagataaagcccgagagcttattcaaaacttatcgcaatttttccgtagtaacttaaagcaaaacattaataccgtgacgttacgagaagagttggaacacgtaaacgcctatctcactatagaaaaagcccgttttactgatcgccttgacgttgaaatcaatattcaacatgaattacttgataccaaactgcccagttttacacttcaacctctggtagagaacgctatcaaacatggtatttctactctgttaaaaggtggaatagtgaagatttatagccaacctcacccattgggctacgaaatcacggttgaagataatgcaggaagttatcagccaccagcagatagccatgtcggattgggaatggagatagtcgataaacgcctatccaatcaatttggtcgtgattcagcgctaaaaatcacatgcacacagcaccaatttacccaaataagttttattatcccaaaggcacaataa

SEQ ID NO: 125059 - protein, 556 aa, Photobacterium sp. SKA34
MELIVSLLQQMCVYLVLAYMLSKTPIILPLLSISSRLSHKLICYVLFSGFCILGTYFGLHIDDAIANTRAIGAVMGGLFGGPVVGFAVGLTGGIHRYTLGGFTDLACTISTTAEGLIGGLLHVYLLKRNKGALLFNPCMVFGVTFVAEVVQMIILITVAKPFDQTYELVSTIAVPMIIANSVGAALFMSILQDRKTIFEKYSAAFSRRALTIADRSVGILSTGFNSDNANKIARIIYEETKVGAVAITDQEKLLAFVGIGDDHHKPDTPISSQSTLDSIEQNDIIYLDGRESPYQCSLAHDCKLGSALIIPLRAGNQVVGTIKLYEPKRKLFSTANMSMAEGIAQLLSSQILYGDYLQQQTLLSQAEIKLLHAQVNPHFLFNALNTISAITRRDPDKARELIQNLSQFFRSNLKQNINTVTLREELEHVNAYLTIEKARFTDRLDVEINIQHELLDTKLPSFTLQPLVENAIKHGISTLLKGGIVKIYSQPHPLGYEITVEDNAGSYQPPADSHVGLGMEIVDKRLSNQFGRDSALKITCTQHQFTQISFIIPKAQ

SEQ ID NO: 125060 - DNA, 1671 bp, Vibrio sp. Ex25
  CDS (1)..(1671): transl_table=11
atggaactggtcgtttcccttttacaacagatgtgtgtttacttagttttggcttacatgctaagtaaaacgccaatcatcttacctttgctgagtatttcttcgcgcttaagccaccgcctaatttgttacgtacttttctctggcttttgtattctcggcacctatttcggtctgcatatcaacgacgctattgccaatactcgagcgatcggcgcggtcatgggcgggctgtttggtggacctgttgtaggtttcgccgtcggatttactggtggcatccatcgatactctcttggtggctttactgacctagcctgcgcaatttcaaccaccgccgagggcgtaattggtggcttgctccacgtttaccttatcaaacgaaataaaggcgcattgctgtttaatccaagcgttgtattcagcgtcacgtttgttgcagaagtggtgcaaatgattttgctgctcgccgtcgcgaaaccttttgatcaagcctatgaactggtgtccgccattgcagcacctatgatcatcgcaaactcatttggtgcggcgttgttcatgagtatcctgcaagacagaaaagcgatctttgaaaagttttctgcgacgttttcgcgtcgagcactcaccattgctgatcgctcagtgggaattctaagcaacggcttcaacaccgaaaacgcagagaaaatagcacgtattatttacgaagaaacaaaagtgggcgctgtcgcgattaccgaccaagaaaaaatcttagcgtttgtgggcattggcgatgatcaccataaaccgaacacgccgatttcatcgcaaagcacattagactccatggagaaaaacgacatcatttatcttgatggcgcagaacgtccataccaatgttccatcgcaaaagactgcaaacttggctccgcgctgatcatcccactacgtgcgggaaaagaggtcattggtaccataaagctgtatgaaccgaagcgtaaattgttctccacggccaacatgtcaatggcggaagggatagctcagcttctctctagccaaatcctgtatggcgattaccaacaacaacaagccttactcgctcaagcagaaatcaaactgcttcacgctcaggtgaatccacactttttgtttaatgcactcaatactattagtgcgattactcgtcgtgatcctgacaaagcgcgcgagctaatccaaaatttatcgcacttcttccgcagcaatttaaagcagaacattaataccgtgacgctaaaggaagagcttgcacatgtgaactcgtacttgagcatcgaaaaagctcgttttacggaccgcttagaggttgaaatcgatattcaacctgaattgctggacatcaaattgccaagctttacactccagcctttggttgagaatgccattaaacacggcatttcaaacatgcttgaaggtggtaaagttcatatatacagcgaagcacacccacaaggtcatttgattaccgtcgaagacaatgcaggcagttttgaaccgccaaaagaaaaccactccgggctaggtttagaaattgtcgacaaacgtctcactaatcaatttgggcgtgatgcatcgctaaaaattacgtgcgagccacatcaatttactaaaatgagctttatcattcccccaaaatcataa

SEQ ID NO: 125061 - protein, 556 aa, Vibrio sp. Ex25
MELVVSLLQQMCVYLVLAYMLSKTPIILPLLSISSRLSHRLICYVLFSGFCILGTYFGLHINDAIANTRAIGAVMGGLFGGPVVGFAVGFTGGIHRYSLGGFTDLACAISTTAEGVIGGLLHVYLIKRNKGALLFNPSVVFSVTFVAEVVQMILLLAVAKPFDQAYELVSAIAAPMIIANSFGAALFMSILQDRKAIFEKFSATFSRRALTIADRSVGILSNGFNTENAEKIARIIYEETKVGAVAITDQEKILAFVGIGDDHHKPNTPISSQSTLDSMEKNDIIYLDGAERPYQCSIAKDCKLGSALIIPLRAGKEVIGTIKLYEPKRKLFSTANMSMAEGIAQLLSSQILYGDYQQQQALLAQAEIKLLHAQVNPHFLFNALNTISAITRRDPDKARELIQNLSHFFRSNLKQNINTVTLKEELAHVNSYLSIEKARFTDRLEVEIDIQPELLDIKLPSFTLQPLVENAIKHGISNMLEGGKVHIYSEAHPQGHLITVEDNAGSFEPPKENHSGLGLEIVDKRLTNQFGRDASLKITCEPHQFTKMSFIIPPKS

SEQ ID NO: 125062 - DNA, 1695 bp, Erwinia amylovora
  CDS (1)..(1695): transl_table=11
atgtacgaattgaactcaattttactgctgttacagcagatgtgtgtgtttctggttatcgcctggctgatgagcaaaacaggcctgtttatcccattgatgcaggtgacggtgcggctgccgcataagctgatgtgctatatcactttctcaattttttgcgttatgggcacctgttttggcctgcatattgaggatcccgtcgcaaacacgcgggcgatgggtgcggtaatgggggggctgctcggtgggccgctggttggtgggctggttggcctgaccggcgggctgcatcgttactcgcttggcggtatgaccgcgttcagctgtacgatctcaaccatcgtcgaaggactgctggctgggcttgtacatgccatactgattaaacgcgggcgcagcgataaggtcttcagtccgctgacggccggcgcgatcacctttattgccgaactgctgcaaatggtgatgattatgctcatttcccgcccgttcaatgatgccgtgcacctggtgcaaaacacggctgcgccaatgttgatcgctaacacctttggcgcggcgatgtttatgcgtattctgctggataaacgcgcaatgttcgagaaacataccacggcgttttccgccaccgctctgaaattagcgggctgtaccgaaggcattttgcgccaggggtttaactcgcagaacagcatgaaggtggcacaggtgctttaccaggagctggatatcggcgcggtggcgatcaccgattgcgacaaactgctggcatttaccggcatcggcgatgaccatcatttgccgggaaagccgatctcttcatccctgacacggaaagcaatcgatactggagaagtggtttacgccgacgggaacgcagtcccctgtcgctgttcactactggctggctgcaagctgggttccactttagttatcccactgcgtggagaaaatcaacgcgtgataggcaccattaaactgtatgagccgcgcaatcggctgttcagctcgattaaccgtacgttgggggaggggattgcacagctgctgtcagcacagatccttaccgggcagtatgagcggcagaaagcactgctggcgcagtcagagatcaagctgctgcatgcacaggtcaacccgcactttttgtttaatgcgcttaatactctgttggcggtgatccgtcaggatagcgataaggcaggtcagctggtgcaatacctgtccacctttttacgtaataatctcaagcgtccgtcggaaatcgtcacgctggctaatgagattgaacatgtgaatgcctatctgcaaatcgaacaggcgcgctttcagtcacgcctgcgggttcagctgcgggtgccgtcggagctgggccactatcagatgcccgcttttatcctgcaacctattatagaaaatgccattaagcacggcacctcacagctgatcggctgcggtgaaatcacgctgcaggccagccgtgaaggtcagtatctgctgctggacatcgaggataatgccggcctttatctgccggaacagcatggcggtgggctgggtataagcctggtcgataaacgactgcgcgtgcgttttggcgatgattatggcattcacgttgcctgtgaacccaatcattttacccgcattactctgcgtctgccgctggagccagtatgttcagcgtattga

SEQ ID NO: 125063 - protein, 564 aa, Erwinia amylovora
MYELNSILLLLQQMCVFLVIAWLMSKTGLFIPLMQVTVRLPHKLMCYITFSIFCVMGTCFGLHIEDPVANTRAMGAVMGGLLGGPLVGGLVGLTGGLHRYSLGGMTAFSCTISTIVEGLLAGLVHAILIKRGRSDKVFSPLTAGAITFIAELLQMVMIMLISRPFNDAVHLVQNTAAPMLIANTFGAAMFMRILLDKRAMFEKHTTAFSATALKLAGCTEGILRQGFNSQNSMKVAQVLYQELDIGAVAITDCDKLLAFTGIGDDHHLPGKPISSSLTRKAIDTGEVVYADGNAVPCRCSLLAGCKLGSTLVIPLRGENQRVIGTIKLYEPRNRLFSSINRTLGEGIAQLLSAQILTGQYERQKALLAQSEIKLLHAQVNPHFLFNALNTLLAVIRQDSDKAGQLVQYLSTFLRNNLKRPSEIVTLANEIEHVNAYLQIEQARFQSRLRVQLRVPSELGHYQMPAFILQPIIENAIKHGTSQLIGCGEITLQASREGQYLLLDIEDNAGLYLPEQHGGGLGISLVDKRLRVRFGDDYGIHVACEPNHFTRITLRLPLEPVCSAY

SEQ ID NO: 125064 - DNA, 1770 bp, Bacillus anthracis
  CDS (1)..(1770): transl_table=11
atgctaaatttagtacttatgatgattgaacgcgtcggacttattgttattctaggatttttactttcgcatattaaaacattcaggcgccttcttcataagcaagatggttatgtagataagcttaagcttatttgtattttttcggtgtttacaattgtaagcaattacaccgggattgaaatagcagggaatacgattatgaatgaaaattggctacagggtgtttcatcatcgagtaccattgcaaatacacgtattatgggtgttggaattagtggattgcttggcggtcctatcgtcggaattggagtaggatcgattgctggtattcaccgttatatgcttggcgggacgacagcgctaagttgcgcgatctcttcaattttagcaggcgttataactgggtatattggatacatttttaaaaagtataatcgtacaattacgcctaaattttcagcagttttaagtgtgtttatcgtttctttagaaatgattatgattctattaattgtagaggatggcattagcattgtgaaaacaattgcgataccaatgatccttgtaaatagctttggaagttttattttactttctatgatacaagctattttgcgccaggaagagaacgcaaaggcacttcagactcataaggtattacgtattgcagataaaacgttaccgtattttcgccaaggcttaacagaagaatcttgtaagcatgtggcacaaattattcaccgctttacaggaacagatgcggtatccttaacagatacagagaaaatattagctcatgttggattagcgtcagatcaccatattccttcacatagtttaataaccggtttgtcgaaagaagtgttacatacagggaaaataatgaaagcgaaatcacgtgaggtcattaattgtcaacatgaaggctgtcctttgcaagcggcgattgttattccgctaacttcacatggaaatacgatagggacattaaaactatatttcaaaaatcctaaccagttaagtcgtgtggaagaggaattagcagaagggttagcaaaaatattctctacacaacttgaattaggtgaagctgagttgcaaagtaaactattgcaagatgcggagataaaggcattacaagcacaaattaacccacactttttatttaatgcaattaatacagtatcagctttatgccgaacagatgtagaaaaggcaagaaagttattattacagcttagcgtgtatttccgttgtaatttgcaaggggcacgtcagttattgattccactagaacaagaattaaaccatgtacaggcatacttatcactagaacaagcaaggttcccaaataagtatgaagtaaagatgtatattgaggatgagctcaagacaactttagtaccaccgtttgttcttcaactattggttgaaaatgcattgcgacacgcttttccaaagaagcaacccgtatgtgaagtggaagtgcatgtttttgaaaaagagggtatggttcattttgaagtaaaggataatggacaagggattgaggaagaacgtttagaacaattaggaaagatggtagtttcgtcaaaaaaagggactggaacagctttatataatattaatgaacgtcttattgggttatttgggaaggaaacgatgcttcatatcgaaagtgaagtaaatgaggggacagagattacttttgttattccaaaaaaagtaggggaggaagagcagattgttaaaagtattagtagttga

SEQ ID NO: 125065 - protein, 589 aa, Bacillus anthracis
MLNLVLMMIERVGLIVILGFLLSHIKTFRRLLHKQDGYVDKLKLICIFSVFTIVSNYTGIEIAGNTIMNENWLQGVSSSSTIANTRIMGVGISGLLGGPIVGIGVGSIAGIHRYMLGGTTALSCAISSILAGVITGYIGYIFKKYNRTITPKFSAVLSVFIVSLEMIMILLIVEDGISIVKTIAIPMILVNSFGSFILLSMIQAILRQEENAKALQTHKVLRIADKTLPYFRQGLTEESCKHVAQIIHRFTGTDAVSLTDTEKILAHVGLASDHHIPSHSLITGLSKEVLHTGKIMKAKSREVINCQHEGCPLQAAIVIPLTSHGNTIGTLKLYFKNPNQLSRVEEELAEGLAKIFSTQLELGEAELQSKLLQDAEIKALQAQINPHFLFNAINTVSALCRTDVEKARKLLLQLSVYFRCNLQGARQLLIPLEQELNHVQAYLSLEQARFPNKYEVKMYIEDELKTTLVPPFVLQLLVENALRHAFPKKQPVCEVEVHVFEKEGMVHFEVKDNGQGIEEERLEQLGKMVVSSKKGTGTALYNINERLIGLFGKETMLHIESEVNEGTEITFVIPKKVGEEEQIVKSISS

SEQ ID NO: 125066 - DNA, 1782 bp, Bacillus subtilis
  CDS (1)..(1782): transl_table=11
atgattcatttaatgattatgatgctggagagagtggggattattgttatattagggttcattctcgcccatacgaaacttttcagacaagctcttcagaatcaggacggctataaaggaaaagcgattttaatttctattttttctcttttcagcatcatcagcaattatacaggcatcgaaattcaaagaaatatgattgtaaacaatgactgggtgtttacgatagatccatcgggctctatcgcgaatacccgtattttgggcgtggaaatcgggggccttctcggaggtccttttgtaggggctgggatcggcatacttgcgggcctgcatcgtttttcactcggtggcagcacggccttaagctgtgccgtctcatctattttagcgggtgttcttgcaggcttgatcggcaggtattttacgaagcgatatcgaatgccgacaccgcgcatcgccgctcttgtgggaatcggcatggagtcactgcaaatgatcattattttgctgatggcaaagccgttcagtgacgcttgggagcttgtcagcatgatcggaattccgatgatactcatcaatggaacaggcagttttatttttctgtctattattcaagcgatcattcgcaaggaagaacaggcaagggctctcgaaacgcatcgagtgcttacgattgctgatcagacacttccatttttccgccaaggattaaatgaaaactcctgtaaaagtgtagcggctattatccataagctgacaggaacagatgcggtgtctctcactgacaaagaaaagatccttgcgcatgtcggtgcgggaatggatcaccacatcccatcgaaaagcttgatcaccggcctgtccaaaaaggtgattaaaacagggcatattatgaaggcgatttcgcaggaagagattgaatgcacgcatgctgaatgccctttgcacgctgcaattgtcctaccgctgacatcgaacggcaatacaatcggcaccttaaaaatgtactttaaaagcccggcaggcctgagtcaggtagaggaggaacttgccgaggggctggccatgctgttttcgacacagcttgagcttggggaagcagagctgcaaagcaaacttctcaaggatgctgaaattaaagcgcttcaagcacaggtgaatccgcattttttatttaatgcgatcaacacgatttctgcgttatgccgtacagatgttgaaaaaacccgtaagctcctattgcagctcagtgtttattttcgttcaaaccttcaaggagcgagacagctgctgattccgctctcaaaggagctgaaccatcttaacgcctatttgtcattagaacaggcgcgttttcccgggaaatataaaattgagcttaatatcgacagcagactggagcagattgaaatccctccgtttgttttgcaggtgcttgtcgagaacgcgcttcggcacgcgtttccgaaaaaacaagacatatgcaaggttacagtctgtgtcttatctgatgatgcatccgtctatatgaaggtggcggataacggacgcggaattccgccggacgtcttgccggaactggggaagaaaccgtttccgtctaaggagggaaccggtacagcgctttataacctaaatcagcggctgatcggtttattcggacagcaggctgcactgcatatcagcagtgaggttcataaagggacagaggtttcctttcaagtgccaatgcaacagatgaaagagggagaagaacatgctcagggtgttaatagttga

SEQ ID NO: 125067 - protein, 593 aa, Bacillus subtilis
MIHLMIMMLERVGIIVILGFILAHTKLFRQALQNQDGYKGKAILISIFSLFSIISNYTGIEIQRNMIVNNDWVFTIDPSGSIANTRILGVEIGGLLGGPFVGAGIGILAGLHRFSLGGSTALSCAVSSILAGVLAGLIGRYFTKRYRMPTPRIAALVGIGMESLQMIIILLMAKPFSDAWELVSMIGIPMILINGTGSFIFLSIIQAIIRKEEQARALETHRVLTIADQTLPFFRQGLNENSCKSVAAIIHKLTGTDAVSLTDKEKILAHVGAGMDHHIPSKSLITGLSKKVIKTGHIMKAISQEEIECTHAECPLHAAIVLPLTSNGNTIGTLKMYFKSPAGLSQVEEELAEGLAMLFSTQLELGEAELQSKLLKDAEIKALQAQVNPHFLFNAINTISALCRTDVEKTRKLLLQLSVYFRSNLQGARQLLIPLSKELNHLNAYLSLEQARFPGKYKIELNIDSRLEQIEIPPFVLQVLVENALRHAFPKKQDICKVTVCVLSDDASVYMKVADNGRGIPPDVLPELGKKPFPSKEGTGTALYNLNQRLIGLFGQQAALHISSEVHKGTEVSFQVPMQQMKEGEEHAQGVNS

SEQ ID NO: 125068 - DNA, 1770 bp, Enterococcus faecalis
  CDS (1)..(1770): transl_table=11
gtggtcgaattatttattttaatgatggaacgggtgggcttaattattttactggcctttcttttagtgaatgtgccttattttaagcgtgttttattaagtcgtgaaaaaatgtcttcaaaagttcagttgattttgatttttggtttatttgctattatttctaattttacaggtatcgaaatcgctaagaatcagattgttcccaataatttactaacctatttaagcagcaatgcttccattgcgaatacgcgtacgttagtaattggcgtttctggattagtgggtggtccgattgtcggcagtgcggttggtttaattgctggctttcatcgggttattcaaggcggggggcatagtttcttttatgtgcctgcttctttaattgttggcttaattgccggttttttagggagccgcatggcaaagcaaactgtttttccgtctgccggcttttctgccattgtcggagcgtgcatggaaatgattcagatgatttttattttctttttcagcggtgatctatcggatggggccacgttggttcgttttattgcgctgccgatgattttgttaaatagcgtaggaacgttcatttttatgtcgattctaacgacgacattgaaacaagaagagcaggccaaagcggttcagacgcacgatgttttggaattagcagcggaaacactgccatattttcgagaaggcctcaataaaaattccagcaaaaaagttgcggagattattaagcattatacaaaagtcagtgcgattagcatgacaaacagtcatcaaattttagctcatgttggcgcaggaagcgatcatcatattccagagctagaagtcattacggagctttctcgggaagtgttacggacgggccgaatgaccatcgcgcatgccaaagaagaagttggttgttcggaccctaattgtccgttgcaagcggcgattgtgattccattattttcccatcagcaaattgttggcaccttaaaaatgtactttacagatccagcgcagttaacgcatgtcgaggagcagttagcagaaggtcttgggacaatcttttcttcacaaattgaattaggtgaagcggaagtacaatcaaaattacttaaagaagctgaaattaaatccttgcaagcgcaagtgaacccgcatttcttctttaatgccatcaatactatttccgcattaatgcggaaagacagtgaaaaagcgcggaaactattgctccaattaagcaaatactttcgaggcaacttgcagggagccgtgcaaactacgatcccagtttcacaagaactagaacaagtaaaagcctatttgtcattagaacaagcacggtttccgaatcgttatcaagtaacatttgacgtggaagaagcggttgcttcagaaaaagtaccgccgtatgcgattcaggtgttagtggaaaataccatcaagcatgcatttggcagccggaaggagaacaatcaagtccgggtagtggtcaaagcaaaacaacacaaattacatgtggatgtgtatgacaatgggcaagggattcctgaagaacgccgcttgctattaggaaagacgacagtgacttcggaaaaaggcaccggcacggcactggaaaacttgtcccgcagaatggcgaacctttatggatcagaaggttgttttttaattgaaaatttagagacaggcgggagccatgttcatttagaaatcccgatggaacaggaggaattagatgcacgtattaatcgttga

SEQ ID NO: 125069 - protein, 589 aa, Enterococcus faecalis
MVELFILMMERVGLIILLAFLLVNVPYFKRVLLSREKMSSKVQLILIFGLFAIISNFTGIEIAKNQIVPNNLLTYLSSNASIANTRTLVIGVSGLVGGPIVGSAVGLIAGFHRVIQGGGHSFFYVPASLIVGLIAGFLGSRMAKQTVFPSAGFSAIVGACMEMIQMIFIFFFSGDLSDGATLVRFIALPMILLNSVGTFIFMSILTTTLKQEEQAKAVQTHDVLELAAETLPYFREGLNKNSSKKVAEIIKHYTKVSAISMTNSHQILAHVGAGSDHHIPELEVITELSREVLRTGRMTIAHAKEEVGCSDPNCPLQAAIVIPLFSHQQIVGTLKMYFTDPAQLTHVEEQLAEGLGTIFSSQIELGEAEVQSKLLKEAEIKSLQAQVNPHFFFNAINTISALMRKDSEKARKLLLQLSKYFRGNLQGAVQTTIPVSQELEQVKAYLSLEQARFPNRYQVTFDVEEAVASEKVPPYAIQVLVENTIKHAFGSRKENNQVRVVVKAKQHKLHVDVYDNGQGIPEERRLLLGKTTVTSEKGTGTALENLSRRMANLYGSEGCFLIENLETGGSHVHLEIPMEQEELDARINR

SEQ ID NO: 125070 - DNA, 1755 bp, Staphylococcus aureus
  CDS (1)..(1755): transl_table=11
gtgctatcgctaacaatgttattacttgagcgtgtaggtttaattattattttggcctatgtgttgatgaatattccatattttaaaaacttaatgaatcgtcgacgtacatggaaagcacgttggcaattatgtattattttcagtttgtttgccttaatgtctaatttaactggtatcgtcatcgatcatcaacatagtttgtcaggaagtgtgtacttccgtttagatgatgatgtatctttagctaacacacgtgtattaacgataggtgtcgcaggattagttggtggcccttttgtaggtctatttgttggcgttatttcaggtattttcagagtgtatatgggtggggcggatgcacaagtttatcttatatcatctatatttatcggtataattgctggttattttggcttacaagctcaaagacgcaagcgttacccgagtattgcaaaaagtgccatgattggaattgttatggaaatgattcaaatgttgagcattttaacattttcccacgacaaagcatatgcggttgacctcatatcattaattgcactaccaatgattattgttaatagcgttggtacggcgatttttatgtctattatcatttcaacattaaagcaagaggagcaaatgaaggctgttcaaacacatgatgtactgcaattgatgaaccagacattgccgtattttaaagaaggattgaatagagaatcggcacagcaaattgcgatgattattaaaaatttaatgaaagtatctgccgtagcaattacaagcaaaaatgaaattttatcgcatgtaggtgcaggtagtgatcatcacataccaacaaatgaaatattaacaagtctgtctaaagatgtattgaaatcagggaagttgaaagaagttcatactaaagaagagattggttgtagtcatccgaattgcccgcttagagcagctatcgtgataccacttgagatgcatggttctatcgtcggtacattgaagatgtattttacaaaccctaatgatttaacttttgtggaacgtcaacttgcagaaggattggcaaatatttttagtagccaaattgaacttggtgaagccgaaacgcaaagtaagttattgaaagatgctgagattaagtcattacaggcacaagtgagtccacattttttcttcaattcaattaacacgatttcagctttagttagaataaatagcgaaaaggcacgagagttactattagaattgagttattttttcagagcgaatttacaaggctcaaagcaacatacgattactttagataaagagttaagtcaagtgcgtgcatacttatcactcgaacaagcacgttatccaggaagatttaatatcaatattaatgttgaagacaaatatcgcaatgtgcttgtaccaccatttttaattcaaattttagttgaaaatgctatcaaacatgcgtttacgaatcgaaagcaaggtaacgatattgacgtgtcagtgattaaagaaactgcaacacatgtacgtattattgtacaagataatggtcagggtatttctaaagataaaatgcatttgttgggagaaacatctgtagaatcagaatctggaactggtagtgctttagaaaatttaaacttacgcctaaaaggattatttggaaaatccgcagcattacaatttgaatcgacatcgagcggtaccactttttggtgtgtacttccttatgaaagacaagaggaggaataa

SEQ ID NO: 125071 - protein, 584 aa, Staphylococcus aureus
MLSLTMLLLERVGLIIILAYVLMNIPYFKNLMNRRRTWKARWQLCIIFSLFALMSNLTGIVIDHQHSLSGSVYFRLDDDVSLANTRVLTIGVAGLVGGPFVGLFVGVISGIFRVYMGGADAQVYLISSIFIGIIAGYFGLQAQRRKRYPSIAKSAMIGIVMEMIQMLSILTFSHDKAYAVDLISLIALPMIIVNSVGTAIFMSIIISTLKQEEQMKAVQTHDVLQLMNQTLPYFKEGLNRESAQQIAMIIKNLMKVSAVAITSKNEILSHVGAGSDHHIPTNEILTSLSKDVLKSGKLKEVHTKEEIGCSHPNCPLRAAIVIPLEMHGSIVGTLKMYFTNPNDLTFVERQLAEGLANIFSSQIELGEAETQSKLLKDAEIKSLQAQVSPHFFFNSINTISALVRINSEKARELLLELSYFFRANLQGSKQHTITLDKELSQVRAYLSLEQARYPGRFNININVEDKYRNVLVPPFLIQILVENAIKHAFTNRKQGNDIDVSVIKETATHVRIIVQDNGQGISKDKMHLLGETSVESESGTGSALENLNLRLKGLFGKSAALQFESTSSGTTFWCVLPYERQEEE

SEQ ID NO: 125072 - DNA, 1746 bp, Streptococcus agalactiae serotype III
  CDS (1)..(1746): transl_table=11
atgttgatggtgttgttattccaaaggctaggaattattatgattttagcctttttattggtaaataatagttatttcagacagttaattgaagagcggtctaaacgtgaaacggtagtacttgtcatcattttcggcttgtttgttattatatctaatataacaggaattgaaataaaaggggatcgaagtttggtcgagcgcccttttctaacaacgatttcccattctgactcacttgctaatacaaggactttagttattacaacggcaagtttggttggtggacctctggttggatcaattgttggttttattggaggagttcatcgcttttttcaaggaagcttttcaggttctttctatattgtcagttcagttctagtcggcattgttagcggaaagattggtgataagcttaaggaaaaccatctctacccttcaacaagccaagttattttaattagtattattgccgaaagtatccagatgctatttgttggtatttttacaggatgggaacttgtcaaaatgattgtcattccaatgatgattttaaatagtttaggttccacacttttccttgcgattttgaaaacttatttgtcaaatgaaagtcagttacgcgcagttcaaacgagagatgttcttgaattgactcgacagactctgccctacctcagacaaggtttgacaccgcaatctgctaggagtgtttgcgaaattataaagaggcatactaactttgatgctgtaggattaacagatcggtcaaacgtattagctcatattggtgttggccatgatcaccatattgcaggacaaccagtcaaaacagacctatctaaaagtgttatttttgatggcgaaccaagaattgcgcaagataaagcggcgatttcttgtccagatcacaactgtcagttaaattctgctattgtagttcctctaaaaataaatgataaaactgtgggtgccttaaaaatgtactttgcaggagataagacaatgtctgaggtggaggaaaacctagtccttggtttagcgcaaatattttcaggacaactggcaatggggataacagaggaacaaaataagttagccagtatggcagagataaaggctttacaagcacaaatcaaccctcatttcttctttaatgccattaacacaattagtgcattaatccgtattgattctgataaagcacgttatgcactgatgcagttaagtactttttttagaacaagtttgcaaggtggtcaggatcgtgaggtaacgcttgagcaagaaaaatcacatgtggatgcttatatgaatgttgaaaaattacgtttccctgataaatatcagttatcttatgatattagtgcaccagaaaaaatgaagttaccgccttttggtttacaggtactggtagagaatgcagttagacatgctttcaaagaacgtaagacggacaaccatatattggttcaaataaagccagatggtcattattattgtgtttctgttagtgacaatggacaaggaatctcagatactatcattgataaattaggtcaagaaacagttgcagagagtaagggtacaggtactgctctagttaatctaaataacaggctgaatttattatatggtagtgtaagttgccttcatttttcgagcgacaagaatggtacaaaagtttggtatcgaatacctaatagaataagggaggatgaacatgaaaattttaattcttga

SEQ ID NO: 125073 - protein, 581 aa, Streptococcus agalactiae serotype III
MLMVLLFQRLGIIMILAFLLVNNSYFRQLIEERSKRETVVLVIIFGLFVIISNITGIEIKGDRSLVERPFLTTISHSDSLANTRTLVITTASLVGGPLVGSIVGFIGGVHRFFQGSFSGSFYIVSSVLVGIVSGKIGDKLKENHLYPSTSQVILISIIAESIQMLFVGIFTGWELVKMIVIPMMILNSLGSTLFLAILKTYLSNESQLRAVQTRDVLELTRQTLPYLRQGLTPQSARSVCEIIKRHTNFDAVGLTDRSNVLAHIGVGHDHHIAGQPVKTDLSKSVIFDGEPRIAQDKAAISCPDHNCQLNSAIVVPLKINDKTVGALKMYFAGDKTMSEVEENLVLGLAQIFSGQLAMGITEEQNKLASMAEIKALQAQINPHFFFNAINTISALIRIDSDKARYALMQLSTFFRTSLQGGQDREVTLEQEKSHVDAYMNVEKLRFPDKYQLSYDISAPEKMKLPPFGLQVLVENAVRHAFKERKTDNHILVQIKPDGHYYCVSVSDNGQGISDTIIDKLGQETVAESKGTGTALVNLNNRLNLLYGSVSCLHFSSDKNGTKVWYRIPNRIREDEHENFNS

SEQ ID NO: 125074 - DNA, 25 bp, Artificial sequence
  primer
atgtacgattttaatctggtgttgc

SEQ ID NO: 125075 - DNA, 24 bp, Artificial sequence
  primer
ttatgcctcgtccctccatggtag

SEQ ID NO: 125076 - protein, 594 aa, Artificial sequence
  consensus sequence
  Variant (2)..(4): Xaa in position 2 to 4 is any amino acid
  Variant (6)..(43): Xaa in position 6 to 43 is any amino acid
  Variant (44)..(45): Xaa in position 44 to 45 is any or no amino acid
  Variant (47)..(48): Xaa in position 47 to 48 is any amino acid
  Variant (50)..(50): Xaa in position 50 is any amino acid
  Variant (52)..(56): Xaa in position 52 to 56 is any amino acid
  Variant (58)..(59): Xaa in position 58 to 59 is any amino acid
  Variant (61)..(64): Xaa in position 61 to 64 is any amino acid
  Variant (65)..(81): Xaa in position 65 to 81 is any or no amino acid
  Variant (86)..(92): Xaa in position 86 to 92 is any amino acid
  Variant (94)..(95): Xaa in position 94 to 95 is any amino acid
  Variant (99)..(99): Xaa in position 99 is any amino acid
  Variant (102)..(104): Xaa in position 102 to 104 is any amino acid
  Variant (106)..(108): Xaa in position 106 to 108 is any amino acid
  Variant (110)..(110): Xaa in position 110 is any amino acid
  Variant (113)..(116): Xaa in position 113 to 116 is any amino acid
  Variant (117)..(118): Xaa in position 117 to 118 is any or no amino acid
  Variant (120)..(120): Xaa in position 120 is any amino acid
  Variant (122)..(124): Xaa in position 122 to 124 is any amino acid
  Variant (125)..(126): Xaa in position 125 to 126 is any or no amino acid
  Variant (128)..(129): Xaa in position 128 to 129 is any amino acid
  Variant (131)..(134): Xaa in position 131 to 134 is any amino acid
  Variant (136)..(138): Xaa in position 136 to 138 is any amino acid
  Variant (140)..(161): Xaa in position 140 to 161 is any amino acid
  Variant (162)..(167): Xaa in position 162 to 167 is any or no amino acid
  Variant (169)..(169): Xaa in position 169 is any amino acid
  Variant (170)..(170): Xaa in position 170 is any or no amino acid
  Variant (173)..(175): Xaa in position 173 to 175 is any amino acid
  Variant (177)..(182): Xaa in position 177 to 182 is any amino acid
  Variant (183)..(187): Xaa in position 183 to 187 is any or no amino acid
  Variant (190)..(191): Xaa in position 190 to 191 is any amino acid
  Variant (193)..(194): Xaa in position 193 to 194 is any amino acid
  Variant (197)..(199): Xaa in position 197 to 199 is any amino acid
  Variant (201)..(202): Xaa in position 201 to 202 is any amino acid
  Variant (204)..(206): Xaa in position 204 to 206 is any amino acid
  Variant (208)..(218): Xaa in position 208 to 218 is any amino acid
  Variant (220)..(229): Xaa in position 220 to 229 is any amino acid
  Variant (231)..(232): Xaa in position 231 to 232 is any amino acid
  Variant (234)..(242): Xaa in position 234 to 242 is any amino acid
  Variant (244)..(252): Xaa in position 244 to 252 is any amino acid
  Variant (254)..(263): Xaa in position 254 to 263 is any amino acid
  Variant (266)..(267): Xaa in position 266 to 267 is any amino acid
  Variant (270)..(273): Xaa in position 270 to 273 is any amino acid
  Variant (276)..(277): Xaa in position 276 to 277 is any amino acid
  Variant (279)..(279): Xaa in position 279 is any amino acid
  Variant (281)..(281): Xaa in position 281 is any amino acid
  Variant (285)..(310): Xaa in position 285 to 310 is any amino acid
  Variant (311)..(321): Xaa in position 311 to 321 is any or no amino acid
  Variant (323)..(323): Xaa in position 323 is any amino acid
  Variant (325)..(330): Xaa in position 325 to 330 is any amino acid
  Variant (333)..(339): Xaa in position 333 to 339 is any amino acid
  Variant (340)..(340): Xaa in position 340 is any or no amino acid
  Variant (343)..(343): Xaa in position 343 is any amino acid
  Variant (347)..(362): Xaa in position 347 to 362 is any amino acid
  Variant (363)..(366): Xaa in position 363 to 366 is any or no amino acid
  Variant (368)..(368): Xaa in position 368 is any amino acid
  Variant (370)..(372): Xaa in position 370 to 372 is any amino acid
  Variant (374)..(374): Xaa in position 374 is any amino acid
  Variant (376)..(378): Xaa in position 376 to 378 is any amino acid
  Variant (380)..(383): Xaa in position 380 to 383 is any amino acid
  Variant (385)..(386): Xaa in position 385 to 386 is any amino acid
  Variant (389)..(391): Xaa in position 389 to 391 is any amino acid
  Variant (393)..(393): Xaa in position 393 is any amino acid
  Variant (395)..(395): Xaa in position 395 is any amino acid
  Variant (397)..(397): Xaa in position 397 is any amino acid
  Variant (400)..(400): Xaa in position 400 is any amino acid
  Variant (409)..(409): Xaa in position 409 is any amino acid
  Variant (412)..(416): Xaa in position 412 to 416 is any amino acid
  Variant (418)..(422): Xaa in position 418 to 422 is any amino acid
  Variant (424)..(425): Xaa in position 424 to 425 is any amino acid
  Variant (427)..(429): Xaa in position 427 to 429 is any amino acid
  Variant (432)..(433): Xaa in position 432 to 433 is any amino acid
  Variant (436)..(436): Xaa in position 436 is any amino acid
  Variant (439)..(446): Xaa in position 439 to 446 is any amino acid
  Variant (447)..(447): Xaa in position 447 is any or no amino acid
  Variant (449)..(450): Xaa in position 449 to 450 is any amino acid
  Variant (452)..(457): Xaa in position 452 to 457 is any amino acid
  Variant (460)..(461): Xaa in position 460 to 461 is any amino acid
  Variant (463)..(463): Xaa in position 463 is any amino acid
  Variant (467)..(483): Xaa in position 467 to 483 is any amino acid
  Variant (484)..(486): Xaa in position 484 to 486 is any or no amino acid
  Variant (488)..(488): Xaa in position 488 is any amino acid
  Variant (490)..(490): Xaa in position 490 is any amino acid
  Variant (493)..(494): Xaa in position 493 to 494 is any amino acid
  Variant (499)..(500): Xaa in position 499 to 500 is any amino acid
  Variant (502)..(527): Xaa in position 502 to 527 is any amino acid
  Variant (528)..(529): Xaa in position 528 to 529 is any or no amino acid
  Variant (532)..(541): Xaa in position 532 to 541 is any amino acid
  Variant (542)..(556): Xaa in position 542 to 556 is any or no amino acid
  Variant (558)..(565): Xaa in position 558 to 565 is any amino acid
  Variant (567)..(571): Xaa in position 567 to 571 is any amino acid
  Variant (573)..(583): Xaa in position 573 to 583 is any amino acid
  Variant (584)..(586): Xaa in position 584 to 586 is any or no amino acid
  Variant (588)..(593): Xaa in position 588 to 593 is any amino acid
LXXXLXXXXXXXXXXXXXXXXXXXXXXXXXXXXXXXXXXXXXXXXFXXFXIXXXXXGXXIXXXXXXXXXXXXXXXXXXXXXANTRXXXXXXXGXXGGPXVGXXXGXXXGXHRXXXXXXGXTXXXXXCXXSXXXXGXXXGXXXXXXXXXXXXXXXXXXXXXXXXXXXXEXXQMXXXLXXXXXXXXXXXLVXXIXXPMXXXNXXGXXXFXXXXXXXXXXXEXXXXXXXXXXLXXAXXXXXXXXXGXXXXXXXXXAXXXXXXXXXXAVXXTDXXXXLAXXGXGXDHHXXXXXXXXXXXXXXXXXXXXXXXXXXXXXXXXXXXXXCXLXXXXXXPLXXXXXXXXGTXKLYXXXXXXXXXXXXXXXXXXXXGXAXXXSXQXXXGXXXXQXXLLXXXEXKXLXAQXNPHFLFNAXNTXXXXXRXXXXXAXXLXXXLSXXFRXNLXXXXXXXXXLXXEXXXXXXYLXXEXARFXXXXXXXXXXXXXXXXXXXXPXFXLQXXVENAXXHXXXXXXXXXXXXXXXXXXXXXXXXXXXXDNXXXXXXXXXXXXXXXXXXXXXXXXXGXXXXXXXXRXXXXXGXXXXXXXXXXXXXXTXXXXXXP

SEQ ID NO: 125077 - protein, 41 aa, Artificial sequence
  protein pattern
  Variant (2)..(3): Xaa in position 2 to 3 is any amino acid
  Variant (4)..(4): Xaa in position 4 is any or no amino acid
  Variant (6)..(8): Xaa in position 6 to 8 is any amino acid
  Variant (9)..(9): Xaa in position 9 is any or no amino acid
  Variant (11)..(11): Xaa in position 11 is Ile or Leu
  Variant (13)..(13): Xaa in position 13 is any amino acid
  Variant (15)..(15): Xaa in position 15 is any amino acid
  Variant (16)..(16): Xaa in position 16 is Ala or Ser
  Variant (18)..(18): Xaa in position 18 is Ile or Val
  Variant (19)..(19): Xaa in position 19 is any amino acid
  Variant (23)..(23): Xaa in position 23 is Phe or Leu
  Variant (26)..(26): Xaa in position 26 is Ala or Ser
  Variant (27)..(27): Xaa in position 27 is Ile or Leu
  Variant (28)..(28): Xaa in position 28 is any amino acid
  Variant (30)..(30): Xaa in position 30 is Ile, Leu or Val
  Variant (31)..(31): Xaa in position 31 is any amino acid
  Variant (32)..(32): Xaa in position 32 is Ala, Ser or Val
  Variant (33)..(33): Xaa in position 33 is Ile, Leu or Val
  Variant (34)..(34): Xaa in position 34 is any amino acid
  Variant (35)..(35): Xaa in position 35 is Lys or Arg
  Variant (36)..(36): Xaa in position 36 is any amino acid
  Variant (37)..(37): Xaa in position 37 is Asp, Glu, Asn or Arg
  Variant (38)..(38): Xaa in position 38 is any amino acid
  Variant (39)..(39): Xaa in position 39 is Asp or Glu
  Variant (40)..(40): Xaa in position 40 is any amino acid
  Variant (41)..(41): Xaa in position 41 is Ala, Ser or Thr
QXXXLXXXXEXKXLXXQXXPHFXFNXXXTXXXXXXXXXXXX

SEQ ID NO: 125078 - protein, 37 aa, Artificial sequence
  protein pattern
  Variant (3)..(3): Xaa in position 3 is Ser or Thr
  Variant (5)..(6): Xaa in position 5 to 6 is any amino acid
  Variant (7)..(7): Xaa in position 7 is Gly, Thr or Val
  Variant (8)..(8): Xaa in position 8 is Ala, Ile, Pro or Val
  Variant (9)..(10): Xaa in position 9 to 10 is any amino acid
  Variant (11)..(11): Xaa in position 11 is Ala, Gly or Ser
  Variant (12)..(12): Xaa in position 12 is Gly or Ser
  Variant (13)..(13): Xaa in position 13 is any amino acid
  Variant (14)..(14): Xaa in position 14 is Phe, Ile, Leu or Val
  Variant (18)..(18): Xaa in position 18 is any or no amino acid
  Variant (20)..(20): Xaa in position 20 is any or no amino acid
  Variant (22)..(23): Xaa in position 22 to 23 is any amino acid
  Variant (24)..(24): Xaa in position 24 is Ala, Ile or Val
  Variant (26)..(27): Xaa in position 26 to 27 is any amino acid
  Variant (28)..(28): Xaa in position 28 is any or no amino acid
  Variant (30)..(31): Xaa in position 30 to 31 is any amino acid
  Variant (32)..(32): Xaa in position 32 is His or Arg
  Variant (33)..(36): Xaa in position 33 to 36 is any amino acid
ANXRXXXXXXXXXXGGPXVXGXXXGXXXGXXXXXXXG

SEQ ID NO: 125079 - protein, 33 aa, Artificial sequence
  protein pattern
  Variant (2)..(2): Xaa in position 2 is any amino acid
  Variant (3)..(4): Xaa in position 3 to 4 is Ile, Leu or Val
  Variant (5)..(10): Xaa in position 5 to 10 is any amino acid
  Variant (11)..(11): Xaa in position 11 is Ala, Asp, Gly or Ser
  Variant (13)..(13): Xaa in position 13 is Ile or Val
  Variant (14)..(14): Xaa in position 14 is Ala, Gly or Ser
  Variant (15)..(15): Xaa in position 15 is Ile, Leu or Met
  Variant (17)..(20): Xaa in position 17 to 20 is any amino acid
  Variant (21)..(21): Xaa in position 21 is any or no amino acid
  Variant (23)..(23): Xaa in position 23 is any or no amino acid
  Variant (25)..(25): Xaa in position 25 is Phe, His or Tyr
  Variant (26)..(26): Xaa in position 26 is any amino acid
  Variant (28)..(29): Xaa in position 28 to 29 is any amino acid
  Variant (30)..(30): Xaa in position 30 is any or no amino acid
  Variant (32)..(32): Xaa in position 32 is any amino acid
AXXXXXXXXXXAXXXTXXXXXLXAXXGXXXDXH

SEQ ID NO: 125080 - protein, 23 aa, Artificial sequence
  protein pattern
  Variant (2)..(3): Xaa in position 2 to 3 is any amino acid
  Variant (5)..(5): Xaa in position 5 is Ile, Leu or Val
  Variant (6)..(7): Xaa in position 6 to 7 is any amino acid
  Variant (8)..(8): Xaa in position 8 is Ile, Leu or Val
  Variant (9)..(10): Xaa in position 9 to 10 is any amino acid
  Variant (13)..(13): Xaa in position 13 is any amino acid
  Variant (14)..(14): Xaa in position 14 is Phe, Ile or Leu
  Variant (16)..(16): Xaa in position 16 is any amino acid
  Variant (19)..(22): Xaa in position 19 to 22 is any or no amino acid
LXXEXXXXXXYLXXEXARXXXXF

SEQ ID NO: 125081 - protein, 27 aa, Artificial sequence
  protein pattern
  Variant (2)..(2): Xaa in position 2 is Ala, Pro, Ser or Thr
  Variant (4)..(4): Xaa in position 4 is any or no amino acid
  Variant (6)..(6): Xaa in position 6 is any or no amino acid
  Variant (8)..(8): Xaa in position 8 is Ile, Leu, Pro or Val
  Variant (9)..(9): Xaa in position 9 is Ile, Leu or Val
  Variant (10)..(10): Xaa in position 10 is Ile or Val
  Variant (13)..(13): Xaa in position 13 is Ala or Ser
  Variant (14)..(15): Xaa in position 14 to 15 is any amino acid
  Variant (17)..(17): Xaa in position 17 is Ala or Gly
  Variant (18)..(26): Xaa in position 18 to 26 is any amino acid
  Variant (27)..(27): Xaa in position 27 is Gly, Ile, Leu or Val
PXFXLXQXXXENXXXHXXXXXXXXXXX

SEQ ID NO: 125082 - protein, 21 aa, Artificial sequence
  protein pattern
  Variant (2)..(2): Xaa in position 2 is Ile or Val
  Variant (3)..(4): Xaa in position 3 to 4 is any amino acid
  Variant (6)..(6): Xaa in position 6 is Ala, Gly, Ser or Val
  Variant (7)..(7): Xaa in position 7 is any amino acid
  Variant (10)..(12): Xaa in position 10 to 12 is any amino acid
  Variant (14)..(14): Xaa in position 14 is Ala, Gly, Ser or Thr
  Variant (15)..(15): Xaa in position 15 is any amino acid
  Variant (17)..(18): Xaa in position 17 to 18 is any amino acid
  Variant (19)..(19): Xaa in position 19 is Ile, Leu, Met or Val
  Variant (21)..(21): Xaa in position 21 is Ile, Leu, Met or Val
LXXXIXXPMXXXNXXGXXXFX

SEQ ID NO: 125083 - protein, 16 aa, Artificial sequence
  protein pattern
  Variant (2)..(4): Xaa in position 2 to 4 is any or no amino acid
  Variant (6)..(6): Xaa in position 6 is Ile, Leu or Val
  Variant (7)..(7): Xaa in position 7 is Ala, Gly or Ser
  Variant (8)..(8): Xaa in position 8 is any amino acid
  Variant (9)..(9): Xaa in position 9 is Ile or Leu
  Variant (10)..(10): Xaa in position 10 is Phe, Ile or Leu
  Variant (12)..(12): Xaa in position 12 is Ala, Asn, Ser or Thr
  Variant (14)..(14): Xaa in position 14 is any amino acid
  Variant (15)..(15): Xaa in position 15 is any or no amino acid
EXXXGXXXXXSXQXXL

SEQ ID NO: 125084 - protein, 14 aa, Artificial sequence
  protein pattern
  Variant (2)..(2): Xaa in position 2 is Ile, Leu or Val
  Variant (3)..(4): Xaa in position 3 to 4 is any amino acid
  Variant (7)..(7): Xaa in position 7 is any amino acid
  Variant (8)..(8): Xaa in position 8 is any or no amino acid
  Variant (10)..(10): Xaa in position 10 is any or no amino acid
  Variant (12)..(12): Xaa in position 12 is any amino acid
LXXXLSXXFXRXNL

SEQ ID NO: 125085 - DNA, 291 bp, Escherichia coli
  CDS (1)..(291): transl_table=11
atgtattgccacgcgaaactaaaaaatatatcgcaacacacggtaatctccgcgcaccttttcttacctgattattcccccatgaatcgtgattccttttatccagccatcgcctgttttccgctgttactgatgctggccgggtgtgcgcctatgcatgaaacccgccaggcgttaagccagcaaacgcccgctgcacaagttgacaccgcattacccacggcgctgaaaatggttggccagacagccaatggtggctggagtatcacgataatcaactcacttccttaa

SEQ ID NO: 125086 - protein, 96 aa, Escherichia coli
MYCHAKLKNISQHTVISAHLFLPDYSPMNRDSFYPAIACFPLLLMLAGCAPMHETRQALSQQTPAAQVDTALPTALKMVGQTANGGWSITIINSLP

SEQ ID NO: 125087 - DNA, 1437 bp, Salmonella typhimurium LT2
  CDS (1)..(1437): transl_table=11
atgaatcgtaattctttccttgccgcgacagcgagcttaccgctttttattttgctggcgggttgcgcccccatgcacgatacccgccagtcgctgacccagcagacgccctcttctcatgttgattccagcctgccggcggcattgaaaaacggttggccggatagccagtggtggaaggcgtatcacgatgcgcagcttgacgcgctgatcgataatgccatacagcattcgccggatatgcaggtggctgaacagcgtattcaactggcggaagcgcaggcgaaagcggttgaggcgcaggacggcccgcagctcgacttttctgccgacattgagcgccagcgaatgtccgcggaagggctgatggggccattcgcgattaccgaccctgcggcgggaacgaccgggccgtggtataccaacggtacattcggcctgacggcgggctgggatctggatttatgggggaaaaaccgcgctgaagttactgcgcggatcggggcggtcaaagcgcgcgaagcggagcaggagcagacccgacaattgctggcaagcggcgtggcgcgactctactgggagtggcaaacacaggcagcgctgaaaaatgtgctgatgcaaatcgagcatgagcagcaaaacgtggtggcggtaaaccgggagctgtatcaacacggtattacttcttctgttgaaggggtcgagaccgatatcgacgccagcaaaacccagcagcagttgaatgacgttaacggtaaaatgaaggttattgaagcgcggctcagcgcgttaaccaatacgcaatcggcggcgctcaagctgcgtcaggtgagtctccccgccgttgaaagccagttaccgtcgcaactgggctattcgttgctggcgcgccgggcggatctacaggccgcgcactggtacattgaatcctcgttgagcagcattgacgccgcgaaggccgcgttttatcccgatatcaatctgatggcttttttacagcaggatgcgttacatctgagcgatctgttccgccattccgcacagcaatatggcattaccggcgggctgacgctgccgattttcgacagcggcaggctgaatgccaacctcgatatcgccaaagcgcaaagcaacctttctatcgccaactacaacaaagcggtggtagatgcggttaatgatgtggcgcgcgccgccagtcaggtagagacgctggcgcagaaaaatcagcatcagcagcagattgagcatgacgcgcagcgtgtggtcggtctggcgcaagcgcgctttaatgccggtattattgcgggttcccgcgtgagcgaggccaaaatcccggcactgcgcgagcagtgtaacggcttgctgttgcagggccagtggctggatgcctctattcagcttaccagcgcgctgggcggcggttatcattcctga

SEQ ID NO: 125088 - protein, 478 aa, Salmonella typhimurium LT2
MNRNSFLAATASLPLFILLAGCAPMHDTRQSLTQQTPSSHVDSSLPAALKNGWPDSQWWKAYHDAQLDALIDNAIQHSPDMQVAEQRIQLAEAQAKAVEAQDGPQLDFSADIERQRMSAEGLMGPFAITDPAAGTTGPWYTNGTFGLTAGWDLDLWGKNRAEVTARIGAVKAREAEQEQTRQLLASGVARLYWEWQTQAALKNVLMQIEHEQQNVVAVNRELYQHGITSSVEGVETDIDASKTQQQLNDVNGKMKVIEARLSALTNTQSAALKLRQVSLPAVESQLPSQLGYSLLARRADLQAAHWYIESSLSSIDAAKAAFYPDINLMAFLQQDALHLSDLFRHSAQQYGITGGLTLPIFDSGRLNANLDIAKAQSNLSIANYNKAVVDAVNDVARAASQVETLAQKNQHQQQIEHDAQRVVGLAQARFNAGIIAGSRVSEAKIPALREQCNGLLLQGQWLDASIQLTSALGGGYHS

SEQ ID NO: 125089 - DNA, 357 bp, Shigella flexneri 2a str. 301
  CDS (1)..(357): transl_table=11
ttgctactgatgtattgccacgcgaaactaaaaaatatatcgcaacacacggtaatctccgcgcaccgtttcttacctgattattcccccatgaatcgtgattccttttatccagccatcgcctgttttccgctgttactgatgctggccgggtgtgcgcctatgcatgaaacccgccaggcgttaagccagcaaacgcccgctgcacaagttgacaccgcattacccacggcgctgaaaaatggttggccagacagccaatggtggctggagtatcacgataatcagctcacttcattaattaacaatgcactacagaacgcaccggatatgcaggtggctgaacagcgcatttag

SEQ ID NO: 125090 - protein, 118 aa, Shigella flexneri 2a str. 301
MLLMYCHAKLKNISQHTVISAHRFLPDYSPMNRDSFYPAIACFPLLLMLAGCAPMHETRQALSQQTPAAQVDTALPTALKNGWPDSQWWLEYHDNQLTSLINNALQNAPDMQVAEQRI

SEQ ID NO: 125091 - DNA, 1527 bp, Escherichia coli CFT073
  CDS (1)..(1527): transl_table=11
ttgccactgatgtattgccacgcgaaactaaaaaatatatcgcaacacacggtaatctccgcgcaccttttcttacctgattattcccccatgaatcgtgattctttttatccagccatcgcctgttttccgctgttactgatgctggccgggtgtgcgcctatgcatgaaacccgccaggcgttaagccagcaaacacccgcggcacaagttgacaccgcattacccacggcgctgaaaaatggttggccagacagccaatggtggctggagtatcacgataatcaactcacttccttaattaataacgcactacagagcgcaccggatatgcaggtggctgaacagcgcattcagctggctgaagcccaggcgaaggcagttgccactcaggatggtccgcagctcgacttttctgcggatatggagcggcaaaaaatgtcggcagaagggttaatggggccgtttgctttgaacgatccggccgcaggtacgaccggtccgtggtacaccaacggtacttttggcttaacggcgggctggcatctcgatatctggggaaagaatcgggcggagattactgctcgcctgggtacggttaaagcacgggcggcggaacgcgagcaaacccgccaattgctggctggcagcgtagcccgcctgtactgggagtggcaaacccaggcggcgttaaacacggtcttgcagcaaatcgaaaaagagcagaacaccattatcgcgaccgatcgccagctatatcagaacgggattacttcttcagttgaaggtgtggaaaccgatattaatgccagcaaaacccggcagcagctcaacgatgtcgcgggtaaaatgaaaattattgaggcacggttaaatgcactcacaaatcaccagacaaagtcactgaagcttaaaacggtcgcgttgccgaaagtggcaagccagcttcctgatgaactggggtactccttactggcgcggcgggcagatttgcaggcggcgcactggtacgttgagtcatcgttaagcactattgatgcggcaaaagcggcattttatcctgacatcaacctgatggccttcctgcaacaggatgcgttgcacttaagcgatctgttccgtcattccgcgcagcaaatgggcgttacggcaggcctgacgctacccattttcgatagtggtcgtcttaacgccaacctcgatatcgcaaaagccgaaagcaacttgtctatcgccagctacaacaaagcggtggttgaagcggtgaatgacgtggcgcgggcagccagtcaggttcagacactggcggagaaaaaccagcatcaggcgcaaattgagcgcgatgccttgcgtgtagtaggtcttgcgcaggcccgctttaacgcgggcctcattgctggttcccgggtcagcgaagccagaatcccggcgctgcgtgagcgggccaatggcctgttattgcaagggcagtggctggatgcctccattcaactcactggtgcgctgggcggggggtacaaacgctga

SEQ ID NO: 125092 - protein, 508 aa, Escherichia coli CFT073
MPLMYCHAKLKNISQHTVISAHLFLPDYSPMNRDSFYPAIACFPLLLMLAGCAPMHETRQALSQQTPAAQVDTALPTALKNGWPDSQWWLEYHDNQLTSLINNALQSAPDMQVAEQRIQLAEAQAKAVATQDGPQLDFSADMERQKMSAEGLMGPFALNDPAAGTTGPWYTNGTFGLTAGWHLDIWGKNRAEITARLGTVKARAAEREQTRQLLAGSVARLYWEWQTQAALNTVLQQIEKEQNTIIATDRQLYQNGITSSVEGVETDINASKTRQQLNDVAGKMKIIEARLNALTNHQTKSLKLKTVALPKVASQLPDELGYSLLARRADLQAAHWYVESSLSTIDAAKAAFYPDINLMAFLQQDALHLSDLFRHSAQQMGVTAGLTLPIFDSGRLNANLDIAKAESNLSIASYNKAVVEAVNDVARAASQVQTLAEKNQHQAQIERDALRVVGLAQARFNAGLIAGSRVSEARIPALRERANGLLLQGQWLDASIQLTGALGGGYKR

SEQ ID NO: 125093 - DNA, 1518 bp, Escherichia coli B
  CDS (1)..(1518): transl_table=11
atgtattgccacgcgaaactaaaaaatatatcgcaacacacggtaatctccgcgcaccttttcttacctgattattcccccatgaatcgtgattccttttatccagccatcgcctgttttccgctgttactgatgctggccgggtgtgcgcctatgcatgaaacccgccaggcgttaagccagcaaacgcccgctgcacaagttgacaccgcattacccacggcgctgaaaaatggttggccagacagccaatggtggctggagtatcacgataatcaactcacttccttaattaacaatgcactacagaacgcaccggatatgcaggtggctgaacagcgcattcagctagctgaagcccaggcgaaggcagttgccactcaggatggtccgcagatcgacttttcggcggatatggagcggcaaaaaatgtcggcagaaggcttaatggggccgtttgctctgaacgatccggccgcaggtacgaccggcccgtggtacaccaacggtacttttggcttaacggcgggctggcatctcgatatctggggaaagaatcgggcggaggttactgcccgcctgggtacggttaaagcacgggcggcggaacgcgagcaaacccgccaattgctggctggcagcgtagcccgcctgtactgggagtggcaaacccaggcggcgttaaacacggtcttgcagcaaatagaaaaagagcagaacaccattatcgcgaccgatcgccagctatatcagaacgggattacttcttcagttgaaggtgtggaaaccgatattaatgccagcaaaacccggcagcagctcaacgatgtcgcggggaaaatgaaaattattgaggcacggttaagcgcacttacaaataaccagacaaagtcattgaagcttaaaccggtcgcgttgccgaaagtggcaagccagcttcctgatgaactggggtactccttactggcccggcgggcagatttgcaggcggcgcactggtacgttgagtcatcgctaagcaccattgatgcggcaaaagcggcattttatcctgacatcaacctgatggccttcctgcaacaggatgcgttgcacttaagcgatctgttccgtcattccgcgcagcaaatgggcgttacggcaggcctgacgctacccattttcgatagtggtcgtcttaacgccaatctcgatatcgcaaaagccgaaagcaacttgtctatcgccagctacaacaaagcggtggttgaagcggtgaatgacgtggcgcgggcagccagtcaggttcagacactggcggagaaaaaccagcatcaggcgcaaattgagcgcgatgccttgcgtgtggtaggtcttgcgcaggcgcgctttaacgcgggcatcattgctggttcccgcgtcagcgaagccagaatccccgcgctgcgtgagcgggccaatggcctgttattgcaagggcagtggctggatgcctccattcaactcactggtgcgttgggcgggggttacaaacgctga

SEQ ID NO: 125094 - protein, 505 aa, Escherichia coli B
MYCHAKLKNISQHTVISAHLFLPDYSPMNRDSFYPAIACFPLLLMLAGCAPMHETRQALSQQTPAAQVDTALPTALKNGWPDSQWWLEYHDNQLTSLINNALQNAPDMQVAEQRIQLAEAQAKAVATQDGPQIDFSADMERQKMSAEGLMGPFALNDPAAGTTGPWYTNGTFGLTAGWHLDIWGKNRAEVTARLGTVKARAAEREQTRQLLAGSVARLYWEWQTQAALNTVLQQIEKEQNTIIATDRQLYQNGITSSVEGVETDINASKTRQQLNDVAGKMKIIEARLSALTNNQTKSLKLKPVALPKVASQLPDELGYSLLARRADLQAAHWYVESSLSTIDAAKAAFYPDINLMAFLQQDALHLSDLFRHSAQQMGVTAGLTLPIFDSGRLNANLDIAKAESNLSIASYNKAVVEAVNDVARAASQVQTLAEKNQHQAQIERDALRVVGLAQARFNAGIIAGSRVSEARIPALRERANGLLLQGQWLDASIQLTGALGGGYKR

SEQ ID NO: 125095 - DNA, 1527 bp, Escherichia coli O6; identical to SEQ ID NO: 125091
  CDS (91)..(1527): transl_table=11

SEQ ID NO: 125096 - protein, 478 aa, Escherichia coli O6
MNRDSFYPAIACFPLLLMLAGCAPMHETRQALSQQTPAAQVDTALPTALKNGWPDSQWWLEYHDNQLTSLINNALQSAPDMQVAEQRIQLAEAQAKAVATQDGPQLDFSADMERQKMSAEGLMGPFALNDPAAGTTGPWYTNGTFGLTAGWHLDIWGKNRAEITARLGTVKARAAEREQTRQLLAGSVARLYWEWQTQAALNTVLQQIEKEQNTIIATDRQLYQNGITSSVEGVETDINASKTRQQLNDVAGKMKIIEARLNALTNHQTKSLKLKTVALPKVASQLPDELGYSLLARRADLQAAHWYVESSLSTIDAAKAAFYPDINLMAFLQQDALHLSDLFRHSAQQMGVTAGLTLPIFDSGRLNANLDIAKAESNLSIASYNKAVVEAVNDVARAASQVQTLAEKNQHQAQIERDALRVVGLAQARFNAGLIAGSRVSEARIPALRERANGLLLQGQWLDASIQLTGALGGGYKR

SEQ ID NO: 125097 - DNA, 25 bp, Artificial sequence
  primer
atgtattgccacgcgaaactaaaaa

SEQ ID NO: 125098 - DNA, 25 bp, Artificial sequence
  primer
ttaaggaagtgagttgattatcgtg

SEQ ID NO: 125099 - protein, 280 aa, Artificial sequence
  consensus sequence
  Variant (60)..(61): Xaa in position 60 to 61 is any amino acid
  Variant (65)..(65): Xaa in position 65 is any amino acid
  Variant (68)..(69): Xaa in position 68 to 69 is any amino acid
  Variant (72)..(72): Xaa in position 72 is any amino acid
  Variant (75)..(75): Xaa in position 75 is any amino acid
  Variant (77)..(78): Xaa in position 77 to 78 is any amino acid
  Variant (89)..(90): Xaa in position 89 to 90 is any amino acid
  Variant (91)..(133): Xaa in position 91 to 133 is any or no amino acid
  Variant (135)..(135): Xaa in position 135 is any amino acid
  Variant (137)..(137): Xaa in position 137 is any amino acid
  Variant (138)..(141): Xaa in position 138 to 141 is any or no amino acid
  Variant (144)..(149): Xaa in position 144 to 149 is any amino acid
  Variant (152)..(158): Xaa in position 152 to 158 is any amino acid
  Variant (159)..(278): Xaa in position 159 to 278 is any or no amino acid
MNRDSFYPAIACFPLLLMLAGCAPMHETRQALSQQTPAAQVDTALPTALKNGWPDSQWWXXYHDXQLXXLIXNAXQXXPDMQVAEQRIXXXXXXXXXXXXXXXXXXXXXXXXXXXXXXXXXXXXXXXXXXXXXGXTXXXXXNGXXXXXXGWXXXXXXXXXXXXXXXXXXXXXXXXXXXXXXXXXXXXXXXXXXXXXXXXXXXXXXXXXXXXXXXXXXXXXXXXXXXXXXXXXXXXXXXXXXXXXXXXXXXXXXXXXXXXXXXXXXXXXXXXXXXXXXXLP

SEQ ID NO: 125100 - protein, 57 aa, Artificial sequence
  protein pattern
  Variant (51)..(56): Xaa in position 51 to 56 is any or no amino acid
MNRDSFYPAIACFPLLLMLAGCAPMHETRQALSQQTPAAQVDTALPTALKXXXXXXN

SEQ ID NO: 125101 - protein, 12 aa, Artificial sequence
  protein pattern
  Variant (2)..(3): Xaa in position 2 to 3 is any amino acid
  Variant (4)..(4): Xaa in position 4 is Gly or Val
  Variant (5)..(5): Xaa in position 5 is Ile or Val
  Variant (6)..(6): Xaa in position 6 is Ser or Thr
  Variant (7)..(7): Xaa in position 7 is Ala or Gly
  Variant (8)..(8): Xaa in position 8 is any amino acid
  Variant (10)..(10): Xaa in position 10 is any amino acid
QXXXXXXXLXLP

SEQ ID NO: 125102 - protein, 21 aa, Artificial sequence
  protein pattern
  Variant (2)..(2): Xaa in position 2 is Gly or Ile
  Variant (3)..(3): Xaa in position 3 is Ser or Thr
  Variant (4)..(6): Xaa in position 4 to 6 is any amino acid
  Variant (7)..(7): Xaa in position 7 is Thr or Val
  Variant (8)..(8): Xaa in position 8 is Ala or Ile
  Variant (9)..(9): Xaa in position 9 is Gly or Ser
  Variant (10)..(10): Xaa in position 10 is any amino acid
  Variant (11)..(11): Xaa in position 11 is Asp or His
  Variant (13)..(15): Xaa in position 13 to 15 is any or no amino acid
  Variant (17)..(18): Xaa in position 17 to 18 is any amino acid
  Variant (19)..(19): Xaa in position 19 is Gly or Pro
  Variant (20)..(20): Xaa in position 20 is any amino acid
NXXXXXXXXXXLXXXDXXXXN

SEQ ID NO: 125103 - protein, 47 aa, Artificial sequence
  protein pattern
  Variant (2)..(2): Xaa in position 2 is any amino acid
  Variant (4)..(4): Xaa in position 4 is Asp or Lys
  Variant (5)..(5): Xaa in position 5 is any amino acid
  Variant (6)..(6): Xaa in position 6 is Ala or Ile
  Variant (7)..(7): Xaa in position 7 is any amino acid
  Variant (8)..(8): Xaa in position 8 is Ala or Gln
  Variant (9)..(9): Xaa in position 9 is Glu or His
  Variant (10)..(10): Xaa in position 10 is Ser or Thr
  Variant (11)..(11): Xaa in position 11 is Asn or Val
  Variant (12)..(12): Xaa in position 12 is Ile or Leu
  Variant (14)..(14): Xaa in position 14 is any or no amino acid
  Variant (16)..(19): Xaa in position 16 to 19 is any amino acid
  Variant (20)..(20): Xaa in position 20 is Ala or Pro
  Variant (21)..(21): Xaa in position 21 is Asp or Val
  Variant (22)..(22): Xaa in position 22 is any amino acid
  Variant (23)..(23): Xaa in position 23 is Glu or Ser
  Variant (24)..(24): Xaa in position 24 is Ala or Pro
  Variant (25)..(25): Xaa in position 25 is Met or Val
  Variant (27)..(27): Xaa in position 27 is any or no amino acid
  Variant (29)..(31): Xaa in position 29 to 31 is any amino acid
  Variant (32)..(32): Xaa in position 32 is any or no amino acid
  Variant (34)..(34): Xaa in position 34 is Ala or Ile
  Variant (35)..(35): Xaa in position 35 is Ala or Ser
  Variant (36)..(36): Xaa in position 36 is any amino acid
  Variant (37)..(37): Xaa in position 37 is Phe or Val
  Variant (38)..(38): Xaa in position 38 is Pro or Gln
  Variant (39)..(39): Xaa in position 39 is any amino acid
  Variant (41)..(41): Xaa in position 41 is Ala or Leu
  Variant (42)..(43): Xaa in position 42 to 43 is any amino acid
  Variant (44)..(44): Xaa in position 44 is Ala or Asn
  Variant (45)..(45): Xaa in position 45 is Gly or Gln
  Variant (46)..(46): Xaa in position 46 is any amino acid
  Variant (47)..(47): Xaa in position 47 is Ala or Gln
AXLXXXXXXXXXSXAXXXXXXXXXXNXDXXXXAXXXXXXLXXXXXXX

SEQ ID NO: 125104 - protein, 26 aa, Artificial sequence
  protein pattern
  Variant (2)..(3): Xaa in position 2 to 3 is any amino acid
  Variant (4)..(6): Xaa in position 4 to 6 is any or no amino acid
  Variant (8)..(8): Xaa in position 8 is Ala or Asn
  Variant (9)..(9): Xaa in position 9 is any amino acid
  Variant (10)..(10): Xaa in position 10 is Ala, Glu or Ser
  Variant (11)..(11): Xaa in position 11 is Ala or Gln
  Variant (12)..(12): Xaa in position 12 is Glu or His
  Variant (13)..(15): Xaa in position 13 to 15 is any amino acid
  Variant (16)..(16): Xaa in position 16 is Ser or Thr
  Variant (17)..(18): Xaa in position 17 to 18 is any amino acid
  Variant (20)..(20): Xaa in position 20 is any or no amino acid
  Variant (22)..(22): Xaa in position 22 is Ala or Pro
  Variant (23)..(23): Xaa in position 23 is Asp, Gly or Ser
  Variant (24)..(24): Xaa in position 24 is any amino acid
  Variant (25)..(25): Xaa in position 25 is Ser or Val
  Variant (26)..(26): Xaa in position 26 is Ala or Pro
AXXXXXKXXXXXXXXXXXLXLXXXXX

SEQ ID NO: 125105 - DNA, 2673 bp, Escherichia coli
  CDS (1)..(2673): transl_table=11
atgcgtcagaaagagacaacggccacgacccgcttttcactcctaccggggagcattacccgcttctttttactgttgatcattgtgttactggtgacgatgggtgtaatggtacaaagcgccgttaacgcctggctgaaagataaaagttaccagattgtcgacattacccatgctatccaaaagcgcgtcgataactggcgttacgtgacctggcagatctacgacaacattgccgcgacgacctccccctcctccggcgaaggtttacaagagacgcgcctgaaacaggatgtctactatctggagaaaccacgccgcaaaacggaagcgttaatctttggctctcacgacaactcaacgcttgagatgactcagcggatgtccacttatctggatacattgtggggcgcagaaaatgtaccgtggtcgatgtattacctgaatggtcaggataacagtctggtgctgatctcaaccctaccccttaaagatctcacctccggatttaaagaatcgaccgtcagcgacattgttgattcacgtcgtgcagagatgttgcaacaggccaacgccctcgatgaacgcgaaagcttttctaacatgcgccgcctggcctggcagaacggtcattactttacattgcgtactacctttaaccagccaggacatctggcaacggtcgtggcttttgatctgccgattaatgatttgatcccaccgggtatgccgctggacagtttccgccttgagccagacgcgacggcaacgggaaacaatgataatgagaaagaagggacggatagcgtcagtatccactttaacagtacgaagattgaaatctcctcggcactcaactctaccgatatgcgcctggtctggcaggttccttatggcaccttattgctggatacgttgcaaaacattctgctgccactgctgctgaacatcggtttgctggcgctggcgttatttggctataccacattccgccatttctccagccgcagtacagaaaacgtccccagcacggcggtcaataacgaattgcgcattttacgggcaatcaatgaagagatagtctcactgctgccgctcggcctgctggttcacgatcaggaatcgaaccgcactgtcataagtaacaaaattgccgatcatttgctgccgcatttgaatctgcaaaacatcaccaccatggcggaacagcatcaggggattattcaggcgacgatcaataacgagctgtatgagatccgcatgttccgcagccaggtcgcgccgcgcacacaaattttcattattcgcgatcaggatcgcgaagtgctggtaaacaagaaactcaagcaggcgcagcgtctgtatgagaaaaaccagcaggggcggatgatctttatgaaaaacattggcgatgcgctgaaagaacccgcacagtccctggcggagagcgcggctaaactcaacgccccggaaagcaaacaactggcgaatcaggcagatgtgctggtgcggctggttgatgaaatacagttagcgaacatgcttgcggatgatagctggaaaagtgagacggtgctgttctccgtgcaggatttaattgatgaagttgtgccttcagtgttgcctgccatcaagcgtaaaggtctgcaactgctgattaacaatcatctgaaagcacacgatatgcgccgcggcgatcgcgatgccttacgacgtattttgctgctactgatgcaatatgccgtgacctcaacgcaattgggaaaaatcacccttgaggttgatcaggatgagtcctccgaagaccgcctgacgttccgcattctggacacgggagaaggcgtaagtattcatgaaatggataatttgcacttcccgtttatcaaccagacccaaaacgatcgctatggcaaggcggacccgctggcattctggctgagcgatcaactggcacgtaaactgggcggtcatttaaacatcaaaacgcgggatgggcttggtacacgctactctgtgcatatcaaaatgctcgcagctgacccggaagttgaagaggaagaagagcgtttactggatgatgtctgcgtaatggtggatgttacttcggcagaaattcggaatattgtcactcgccagttagaaaattggggtgcaacctgtatcacacccgatgaaagattaattagtcaagattatgatatctttttaacggataatccgtctaatcttactgcctctggcttgcttttaagcgatgatgagtctggcgtacgggaaattgggcctggtcaattgtgcgtcaacttcaatatgagcaacgctatgcaggaagcggtcttacaattaattgaagtgcaactggcgcaggaagaggtgacagaatcgcctctgggcggagatgaaaatgcgcaactccatgccagcggctattatgcgctctttgtagacacagtaccggatgatgttaagaggctgtatactgaagcagcaaccagtgactttgctgcgttagcccaaacggctcatcgtcttaaaggcgtatttgccatgctaaatctggtacccggcaagcagttatgtgaaacgctggaacatctgattcgtgagaaggatgttccaggaatagaaaaatacatcagcgacattgacagttatgtcaagagcttgctgtaa

SEQ ID NO: 125106 - protein, 890 aa, Escherichia coli
MRQKETTATTRFSLLPGSITRFFLLLIIVLLVTMGVMVQSAVNAWLKDKSYQIVDITHAIQKRVDNWRYVTWQIYDNIAATTSPSSGEGLQETRLKQDVYYLEKPRRKTEALIFGSHDNSTLEMTQRMSTYLDTLWGAENVPWSMYYLNGQDNSLVLISTLPLKDLTSGFKESTVSDIVDSRRAEMLQQANALDERESFSNMRRLAWQNGHYFTLRTTFNQPGHLATVVAFDLPINDLIPPGMPLDSFRLEPDATATGNNDNEKEGTDSVSIHFNSTKIEISSALNSTDMRLVWQVPYGTLLLDTLQNILLPLLLNIGLLALALFGYTTFRHFSSRSTENVPSTAVNNELRILRAINEEIVSLLPLGLLVHDQESNRTVISNKIADHLLPHLNLQNITTMAEQHQGIIQATINNELYEIRMFRSQVAPRTQIFIIRDQDREVLVNKKLKQAQRLYEKNQQGRMIFMKNIGDALKEPAQSLAESAAKLNAPESKQLANQADVLVRLVDEIQLANMLADDSWKSETVLFSVQDLIDEVVPSVLPAIKRKGLQLLINNHLKAHDMRRGDRDALRRILLLLMQYAVTSTQLGKITLEVDQDESSEDRLTFRILDTGEGVSIHEMDNLHFPFINQTQNDRYGKADPLAFWLSDQLARKLGGHLNIKTRDGLGTRYSVHIKMLAADPEVEEEEERLLDDVCVMVDVTSAEIRNIVTRQLENWGATCITPDERLISQDYDIFLTDNPSNLTASGLLLSDDESGVREIGPGQLCVNFNMSNAMQEAVLQLIEVQLAQEEVTESPLGGDENAQLHASGYYALFVDTVPDDVKRLYTEAATSDFAALAQTAHRLKGVFAMLNLVPGKQLCETLEHLIREKDVPGIEKYISDIDSYVKSLL

SEQ ID NO: 125107 - DNA, 2670 bp, Salmonella enterica subsp. enterica serovar Typhi str. CT18
  CDS (1)..(2670): transl_table=11
atgagtcagtctgacacaacggtctctacccgattctcccttctaccgggaagcattacccgtttcttcttattgctgatcattgtgctgctggtaacgatgggcgttatggtacagagcgccgtcaacgcctggttgaaagacaaaagctatcaaattgtcgatatcactcacgctattcataaacgcgtggacacctggcggtatgttacctggcaaatttatgacaacatcgccgcgaccactacgccatcgacaggtgaaggacttcaggaaacgcgtctgaaacaggatgtgtattatcttgaaaagccgcgacgtaaaactgaagcgctgattttcggttcccatgacagcgccacgctggaaatgacgcagcgtatgtcaacttatctggatacgctgtggggcgcggaaaacgtgccgtggtcaatgtattacctcaacggacaggataacagcctgattcttatctctaccctaccgttgaaagatctctcttccggctttaaagagtccactattggcaatatcgtcgattcccgccgggcagagatgttgcagcaggcgaatgcgctggatgagcgcgaaagtttctcctcattgcgaaaactggcctggcaaaacggtcactattttacgctgcgcacgaccttcaatcagccaggacatctggcaaccgtggtggcgtttgatctgcccattaatgatttaatcccgccgggaatgccgctggacagttttcggatagagcctgacgcaacccagacgacggggcgaagcagtgaaaaggaagcgccagatagcgtcacgattagctttaacggttcaaaaattgagatctcctcagcgcttaactctaccggaatgcgcctgatctggcaggtaccgttcggtacgcttttgcttgatacgttgcaaaatattttgctgcctttactgctgaacatcgggctgctggcgttggcgttatttggctacgccacgttccgtcatcagccgggacggtcgacggaatcgacatccggcaacgcggcgaataatgagcttcgcgtcttacgcgccattaatgaagagatcgtttctctgctgccgctgggtctgctggtctacgatcaggaaggcaaccgcaccgtgatcagcaataaaatcgccgatcatctgttgccgcatcttaacctgcaaaatattaccagcatggcggagcagcatcagggcgtgattcaggcgacaattaataacgaactgtatgagatccgtctgtttcgcagccagatcgccccccgcacgcagatctttattattcgcgatcaggaccgggaagtgctggtgaataagaagcttaaacaggcgcagcgtttgtatgagaagaatcagcagggccgcgccgcctttatgcaaaatatcagcaacacgcttaaagagcccgtacgccaactggcggttaacgccgcggcagtcaccacgccggaaagcctgaaactggcggatcaggcggatgtattagtacgtatgatcgatgaaatccaactggcgaatatgctggaaaatgacgcatggaaaagcgaagccacgctgttctccctgcaggatcttattgacgaagtcgtgccggaagtgctgcccgccattaagcgtaaagggctgcaactgctgattaataaccatcttagcggcaacgatgaacgctggggcgatcgcgacgccctgcgccggattttgctgctgttgattcagtatgccgtcacgacgaccgctatgggtaaaattacgcttgaagtcgagcaggatgaatctatcgcggagcgtctgactttccgtattctggatacgggcgaaggcgtaacgttaaacgagattgataatctgcatttcccgtatatgaatgaaacgcagggcgaccgttacggcaaagcgaatccgctcaccttctggctgtgcaatcaactggcgcgcaaactgggcggtcatctcaacattaaagcgcgagaaacgctgggcacgcgctataccgttcatgtcaaaatgcttcctcacgatcagcatactcaggtcgaagagcgcctgctggacgacgtgagcgtgatggtcgatgtgacgtccaacgaggttcgcgcgattgtgctgcgtcagttagaaaactggggcgccacctgcatcacgccggatgaaaggcagataagtcaagaatatgatctctttttaacggataatccgtctaatcttactgcctcgggcttgcttttaagcgatgatgagtcaggcgtgcggaaaattggcccgggtcagttgcgcgtcaactttaatatgagcaatgctatgcaggaagctgtactacaacttatcgaagagcagctggcgcaggaagagattcccgcctccccgctcggcggagatgaaaatgccgagcttcatgccagcggctattatgcgctatttgtagacacagtaccggatgatgttaagaggttgtatactgaggcggcaaccagcgatttcgctgcgctggcccaaacggcccaccgcctgaaaggggtgtttgccatgcttaatctggtacccggcaagcagttatgtgtaacgctggaacatctgattcgtgagaaagatgctccaggtatagaaaaatatatcagcgtcattgacgcctacgtcaaaagcttgctgtag

SEQ ID NO: 125108 - protein, 889 aa, Salmonella enterica subsp. enterica serovar Typhi str. CT18
MSQSDTTVSTRFSLLPGSITRFFLLLIIVLLVTMGVMVQSAVNAWLKDKSYQIVDITHAIHKRVDTWRYVTWQIYDNIAATTTPSTGEGLQETRLKQDVYYLEKPRRKTEALIFGSHDSATLEMTQRMSTYLDTLWGAENVPWSMYYLNGQDNSLILISTLPLKDLSSGFKESTIGNIVDSRRAEMLQQANALDERESFSSLRKLAWQNGHYFTLRTTFNQPGHLATVVAFDLPINDLIPPGMPLDSFRIEPDATQTTGRSSEKEAPDSVTISFNGSKIEISSALNSTGMRLIWQVPFGTLLLDTLQNILLPLLLNIGLLALALFGYATFRHQPGRSTESTSGNAANNELRVLRAINEEIVSLLPLGLLVYDQEGNRTVISNKIADHLLPHLNLQNITSMAEQHQGVIQATINNELYEIRLFRSQIAPRTQIFIIRDQDREVLVNKKLKQAQRLYEKNQQGRAAFMQNISNTLKEPVRQLAVNAAAVTTPESLKLADQADVLVRMIDEIQLANMLENDAWKSEATLFSLQDLIDEVVPEVLPAIKRKGLQLLINNHLSGNDERWGDRDALRRILLLLIQYAVTTTAMGKITLEVEQDESIAERLTFRILDTGEGVTLNEIDNLHFPYMNETQGDRYGKANPLTFWLCNQLARKLGGHLNIKARETLGTRYTVHVKMLPHDQHTQVEERLLDDVSVMVDVTSNEVRAIVLRQLENWGATCITPDERQISQEYDLFLTDNPSNLTASGLLLSDDESGVRKIGPGQLRVNFNMSNAMQEAVLQLIEEQLAQEEIPASPLGGDENAELHASGYYALFVDTVPDDVKRLYTEAATSDFAALAQTAHRLKGVFAMLNLVPGKQLCVTLEHLIREKDAPGIEKYISVIDAYVKSLL

SEQ ID NO: 125109 - DNA, 2670 bp, Salmonella typhimurium LT2
  CDS (1)..(2670): transl_table=11
atgagtcagtctgacacaacggtctctacccgattctcccttctaccgggaagcattacccgtttcttcttattgctgatcattgtgctgctggtaacgatgggcgttatggtacagagcgccgtcaacgcctggttgaaagacaaaagctatcaaattgtcgatatcacccacgctattcataaacgcgtggatacctggcggtatgttacctggcaaatttatgacaacatcgccgcgaccactacgccatcgacaggtgaaggacttcaggaaacgcgtctgaagcaggatgtgtattatcttgaaaagccgcgacgtaaaactgaagcgctgattttcggttcccatgacagcgccacgctggaaatgacgcagcgtatgtcaacttatctggatacgctgtggggcgcggaaaacgtgccgtggtccatgtattacctcaacggacaggataacagcctgattcttatctctaccctaccgttgaaagatctctcttccggctttaaagagtccactattggcaatatcgtcgattcccgccgggcagagatgttgcagcaggcgaatgcgctggatgagcgcgaaagtttctcctcattgcgaaaactggcctggcaaaacggtcactattttacgctgcgcacgaccttcaatcagccaggacatctggcaaccgtggtggcgtttgatctgcccattaatgatttaatcccgccgggaatgccgctggacagttttcggatagagcctgacgcaacccaagcgacggggcgaagcagtgaaaaggaagcgcctgatagcgtcacgattagctttaacggttcaaaaattgagatctcctcagcgcttaactctaccggaatgcgcctgatctggcaggtaccgttcggtacgcttttgcttgatacgttgcaaaatattttgctgcctttactgctgaacatcgggctgctggcgttggcgttatttggctacgccacgttccgtcatcagccgggacggtcgacggaatcgacatccggcaacgcggcgaataatgagcttcgcgtcttacgcgccattaatgaagagatagtttctctgctgccgctgggtctgctggtctacgatcaggaaggcaaccgcaccgtgatcagcaataaaatcgccgatcatctgttgccgcatcttaacctgcaaaatattaccagcatggcggaacagcatcagggcgtgattcaggcgacaattaataacgaactgtatgagatccgtctgtttcgcagccagatcgctccccgcacgcagatctttattattcgcgatcaggaccgggaagtgctggtgaataagaagcttaaacaggcgcagcgtttgtatgagaagaatcagcagggccgcgccgcctttatgcaaaatatcagcaacacgcttaaagagcccgtacgccaactggcggttaacgccgcagcagtcaccacgccggaaagcctgaaactggcggatcaggcggatgtattggtacgtatgatcgatgaaatccaactggcgaatatgctggaaaatgacgcatggaagagcgaagccacgctgttctccctgcaggatcttattgacgaagtcgtgccggaagtgctgcccgccattaagcgtaaagggctgcaactgctgattaataaccatcttagcggcaacgatgaacgctggggcgatcgtgacgccctgcgccggattttgctgctgttgattcagtatgccgtcacaacgaccgctatgggtaaaattacgcttgaagtcgagcaggatgaatctatcgcggagcgtctgactttccgtattctggatacgggcgaaggtgtaacgttaaacgagattgataatctgcatttcccgtatatgaatgaaacgcagggcgatcgttacggcaaagcgaatccgctcaccttctggctgtgcaatcaactggcgcgcaaactgggcggtcatctcaacattaaagcgcgagaaacgctgggcacgcgctataccgttcatgtcaaaatgcttcctcacgatcagcatactcaggtcgaagagcgcctgctggacgacgtgagcgtgatggtcgatgtgacgtccaacgaggttcgcgcgattgtgctgcgtcagttagaaaactggggcgccacctgcatcacgccggatgaaaggcagataagtcaagaatatgatctctttttaacggataatccgtctaatcttactgcctcgggcttgcttttaagcgatgatgagtcaggcgtgcggaaaattggcccgggtcagttgcgcgtcaactttaatatgagcaatgctatgcaggaagctgtactacaacttatcgaagagcagctggcgcaggaagagattcccgcctccccgctcggcggagatgaaaatgccgagcttcatgccagcggctattatgcgctatttgtagacacagtaccggatgatgttaagaggttgtatactgaggcggcaaccagcgatttcgctgcgctggcccaaacggcccaccgcctgaaaggggtgtttgccatgcttaatctggtacccggcaagcagttatgtgaaacgctggaacatctgattcgtgagaaagatgctccaggtatagaaaaatatatcagcgacattgacgcctacgtcaaaagcttgctgtag

SEQ ID NO: 125110 - protein, 889 aa, Salmonella typhimurium LT2
MSQSDTTVSTRFSLLPGSITRFFLLLIIVLLVTMGVMVQSAVNAWLKDKSYQIVDITHAIHKRVDTWRYVTWQIYDNIAATTTPSTGEGLQETRLKQDVYYLEKPRRKTEALIFGSHDSATLEMTQRMSTYLDTLWGAENVPWSMYYLNGQDNSLILISTLPLKDLSSGFKESTIGNIVDSRRAEMLQQANALDERESFSSLRKLAWQNGHYFTLRTTFNQPGHLATVVAFDLPINDLIPPGMPLDSFRIEPDATQATGRSSEKEAPDSVTISFNGSKIEISSALNSTGMRLIWQVPFGTLLLDTLQNILLPLLLNIGLLALALFGYATFRHQPGRSTESTSGNAANNELRVLRAINEEIVSLLPLGLLVYDQEGNRTVISNKIADHLLPHLNLQNITSMAEQHQGVIQATINNELYEIRLFRSQIAPRTQIFIIRDQDREVLVNKKLKQAQRLYEKNQQGRAAFMQNISNTLKEPVRQLAVNAAAVTTPESLKLADQADVLVRMIDEIQLANMLENDAWKSEATLFSLQDLIDEVVPEVLPAIKRKGLQLLINNHLSGNDERWGDRDALRRILLLLIQYAVTTTAMGKITLEVEQDESIAERLTFRILDTGEGVTLNEIDNLHFPYMNETQGDRYGKANPLTFWLCNQLARKLGGHLNIKARETLGTRYTVHVKMLPHDQHTQVEERLLDDVSVMVDVTSNEVRAIVLRQLENWGATCITPDERQISQEYDLFLTDNPSNLTASGLLLSDDESGVRKIGPGQLRVNFNMSNAMQEAVLQLIEEQLAQEEIPASPLGGDENAELHASGYYALFVDTVPDDVKRLYTEAATSDFAALAQTAHRLKGVFAMLNLVPGKQLCETLEHLIREKDAPGIEKYISDIDAYVKSLL

SEQ ID NO: 125111 - DNA, 2670 bp, Salmonella enterica subsp. enterica serovar Typhi Ty2
  CDS (1)..(2670): transl_table=11
atgagtcagtctgacacaacggtctctacccgattctcccttctaccgggaagcattacccgtttcttcttattgctgatcattgtgctgctggtaacgatgggcgttatggtacagagcgccgtcaacgcctggttgaaagacaaaagctatcaaattgtcgatatcactcacgctattcataaacgcgtggacacctggcggtatgttacctggcaaatttatgacaacatcgccgcgaccactacgccatcgacaggtgaaggacttcaggaaacgcgtctgaaacaggatgtgtattatcttgaaaagccgcgacgtaaaactgaagcgctgattttcggttcccatgacagcgccacgctggaaatgacgcagcgtatgtcaacttatctggatacgctgtggggcgcggaaaacgtgccgtggtcaatgtattacctcaacggacaggataacagcctgattcttatctctaccctaccgttgaaagatctctcttccggctttaaagagtccactattggcaatatcgtcgattcccgccgggcagagatgttgcagcaggcgaatgcgctggatgagcgcgaaagtttctcctcattgcgaaaactggcctggcaaaacggtcactattttacgctgcgcacgaccttcaatcagccaggacatctggcaaccgtggtggcgtttgatctgcccattaatgatttaatcccgccgggaatgccgctggacagttttcggatagagcctgacgcaacccagacgacggggcgaagcagtgaaaaggaagcgccagatagcgtcacgattagctttaacggttcaaaaattgagatctcctcagcgcttaactctaccggaatgcgcctgatctggcaggtaccgttcggtacgcttttgcttgatacgttgcaaaatattttgctgcctttactgctgaacatcgggctgctggcgttggcgttatttggctacgccacgttccgtcatcagccgggacggtcgacggaatcgacatccggcaacgcggcgaataatgagcttcgcgtcttacgcgccattaatgaagagatcgtttctctgctgccgctgggtctgctggtctacgatcaggaaggcaaccgcaccgtgatcagcaataaaatcgccgatcatctgttgccgcatcttaacctgcaaaatattaccagcatggcggagcagcatcagggcgtgattcaggcgacaattaataacgaactgtatgagatccgtctgtttcgcagccagatcgccccccgcacgcagatctttattattcgcgatcaggaccgggaagtgctggtgaataagaagcttaaacaggcgcagcgtttgtatgagaagaatcagcagggccgcgccgcctttatgcaaaatatcagcaacacgcttaaagagcccgtacgccaactggcggttaacgccgcggcagtcaccacgccggaaagcctgaaactggcggatcaggcggatgtattagtacgtatgatcgatgaaatccaactggcgaatatgctggaaaatgacgcatggaaaagcgaagccacgctgttctccctgcaggatcttattgacgaagtcgtgccggaagtgctgcccgccattaagcgtaaagggctgcaactgctgattaataaccatcttagcggcaacgatgaacgctggggcgatcgcgacgccctgcgccggattttgctgctgttgattcagtatgccgtcacgacgaccgctatgggtaaaattacgcttgaagtcgagcaggatgaatctatcgcggagcgtctgactttccgtattctggatacgggcgaaggcgtaacgttaaacgagattgataatctgcatttcccgtatatgaatgaaacgcagggcgaccgttacggcaaagcgaatccgctcaccttctggctgtgcaatcaactggcgcgcaaactgggcggtcatctcaacattaaagcgcgagaaacgctgggcacgcgctataccgttcatgtcaaaatgcttcctcacgatcagcatactcaggtcgaagagcgcctgctggacgacgtgagcgtgatggtcgatgtgacgtccaacgaggttcgcgcgattgtgctgcgtcagttagaaaactggggcgccacctgcatcacgccggatgaaaggcagataagtcaagaatatgatctctttttaacggataatccgtctaatcttactgcctcgggcttgcttttaagcgatgatgagtcaggcgtgcggaaaattggcccgggtcagttgcgcgtcaactttaatatgagcaatgctatgcaggaagctgtactacaacttatcgaagagcagctggcgcaggaagagattcccgcctccccgctcggcggagatgaaaatgccgagcttcatgccagcggctattatgcgctatttgtagacacagtaccggatgatgttaagaggttgtatactgaggcggcaaccagcgatttcgctgcgctggcccaaacggcccaccgcctgaaaggggtgtttgccatgcttaatctggtacccggcaagcagttatgtgtaacgctggaacatctgattcgtgagaaagatgctccaggtatagaaaaatatatcagcgacattgacgcctacgtcaaaagcttgctgtag

SEQ ID NO: 125112 - protein, 889 aa, Salmonella enterica subsp. enterica serovar Typhi Ty2
MSQSDTTVSTRFSLLPGSITRFFLLLIIVLLVTMGVMVQSAVNAWLKDKSYQIVDITHAIHKRVDTWRYVTWQIYDNIAATTTPSTGEGLQETRLKQDVYYLEKPRRKTEALIFGSHDSATLEMTQRMSTYLDTLWGAENVPWSMYYLNGQDNSLILISTLPLKDLSSGFKESTIGNIVDSRRAEMLQQANALDERESFSSLRKLAWQNGHYFTLRTTFNQPGHLATVVAFDLPINDLIPPGMPLDSFRIEPDATQTTGRSSEKEAPDSVTISFNGSKIEISSALNSTGMRLIWQVPFGTLLLDTLQNILLPLLLNIGLLALALFGYATFRHQPGRSTESTSGNAANNELRVLRAINEEIVSLLPLGLLVYDQEGNRTVISNKIADHLLPHLNLQNITSMAEQHQGVIQATINNELYEIRLFRSQIAPRTQIFIIRDQDREVLVNKKLKQAQRLYEKNQQGRAAFMQNISNTLKEPVRQLAVNAAAVTTPESLKLADQADVLVRMIDEIQLANMLENDAWKSEATLFSLQDLIDEVVPEVLPAIKRKGLQLLINNHLSGNDERWGDRDALRRILLLLIQYAVTTTAMGKITLEVEQDESIAERLTFRILDTGEGVTLNEIDNLHFPYMNETQGDRYGKANPLTFWLCNQLARKLGGHLNIKARETLGTRYTVHVKMLPHDQHTQVEERLLDDVSVMVDVTSNEVRAIVLRQLENWGATCITPDERQISQEYDLFLTDNPSNLTASGLLLSDDESGVRKIGPGQLRVNFNMSNAMQEAVLQLIEEQLAQEEIPASPLGGDENAELHASGYYALFVDTVPDDVKRLYTEAATSDFAALAQTAHRLKGVFAMLNLVPGKQLCVTLEHLIREKDAPGIEKYISDIDAYVKSLL

SEQ ID NO: 125113 - DNA, 2673 bp, Shigella flexneri 2a str. 2457T
  CDS (1)..(2673): transl_table=11
atgcgtcagaaagagacaacggccacgacccgcttttcactcctaccggggagcattacccgcttctttttactgttgatcattgtgttactggtgacgatgggggtaatggtacaaagtgccgttaacgcttggctgaaagataaaagttaccagattgtcgacattacccacgcaatccaaaagcgcgtcgatacctggcgttacgtgaccaggcagatctacgacaacattgccgcgacgacctccccctcctccggcgaaggtttacaagagacgcgcctgaaacaggatgtctactatctggagaaaccacgccgcaaaacggaagcgttaatctttggctctcacgacaactcaacgcttgagatgactcagcggatgtccacttatctggatacattgtggggtgcagaaaatgtaccgtggtcgatgtattacctgaatggtcaggataacagtctggtgctgatctcaaccctaccccttaaagatctcacctccggatttaaagaatcgaccgtcagtgacattgttgattcacgtcgtgcagaaatgttacaacaggccaacgccctcgatgaacgcgaaagtttttctaacatgcgccgcctagcctggcagaacggtcattactttaccttgcgtaccacgttcaaccagccgggacatctggcaacggtcgtggcttttgatctgccgattaatgatttgatcccaccgggtatgccgctggacagtttccgccttgagccagacgcgacggcaacgggaaacaatgataatgagaaagaagggacggatagcgtcagtatccactttaacagtacgaagattgaaatctcctcggcactcaactctaccgatatgcgcctggtctggcaggttccttatggcaccttattgctggatacgttgcaaaacattctgctgccactgctgctgaacatcggtttgctggcgctggcgttatttggctataccacattccgccatttctccagccgcagtacagaaagcgtccccagcacggcggtcaataacgaattgcgcattttacgggcaatcaatgaagagatagtctcactgttgccgctcggcctgctggttcacgatcaggaatcgaaccgcactgtcataagtaacaaaattgccgatcatttgctgccgcatctgaatctgcaaaacatcaccaccatggcggaacagcatcaggggattattcaggcgacgatcaataacgagctgtatgagatccgcatgttccgcagccaggtcgcgccgcgcacacaaattttcattattcgcgatcaggatcgcgaagtgctggtaaacaagaaactcaagcaggcgcagcgtctgtatgagaaaaaccagcaggggcggatgacctttatgaaaaacattggcgatgcgctgaaagaacccgcacagtccctggcggagagtgcggctaaactcaacgccccggaaagcaaacaactggcgaatcaggcagatgtgctggtgcggctggtcgaagaaatacagttagcgaacatgcttgcggatgatagctggaaaagtgagacggtgctgttctccgtgcaggatttaattgatgaagttgtgccttcagtgttgcctgccatcaagcgtaaaggtctgcaactgctgattaacaatcatctgaaagcacacgatatgcgccgcggcgatcgcgataccttacgacgtattttgctgctactgatgcaatatgccgtgacctcaacgcaattgggaaaaatcacccttgaggttgatcaggatgagtcctctgaagaccgcctgacattccgcattctggacacgggagaaggcgtaagtattcatgaaatggataatttgcacttcccgtttatcaaccagacccaaaacgatcgttatggaaaggcggacccgctggcattctggctgagcgatcaactggcacgtaaactgggcggtcatttaaacatcaaaacgcgggatgggcttggtacacgctactctgtgcatatcaaaatgctcgccgctgacccggaagttgaagaggaagaagagcgtttactggatgatgtctgcgtaatggtggatgttacttcggcagaaattcggaatattgtcactcgcctgttagaaaattggggtgcaacctgtatcacacccgatgaaagattaattagtcaagattatgatatctttttaacggataatccgtctaatcttactgcctctggcttgcttttaagcgatgatgagtctggcgtacgagaaattgggcctggtcaattgtgcgtcaacttcaatatgagcaacgctatgcaggaagcggtcttacaattaattgaagtgcaactggcacaggaagaggtgacagaatcgcctctgggcggagatgaaaatgcgcaactccatgccagcggctattatgcgctctttgtagacacagtaccggatgatgttaagaggctgtatactgaagcagcaaccagtgactttgctgcgttagcccaaacggctcatcgtcttaaaggcgtatttgccatgctaaatctggtacccggcaagcagttatgtgaaacgctggaacatctgattcgtgagaaggatgttccaggaatagaaaaatacatcagcgacattgacagttatgtcaagagcttgctgtag

SEQ ID NO: 125114 - protein, 890 aa, Shigella flexneri 2a str. 2457T
MRQKETTATTRFSLLPGSITRFFLLLIIVLLVTMGVMVQSAVNAWLKDKSYQIVDITHAIQKRVDTWRYVTRQIYDNIAATTSPSSGEGLQETRLKQDVYYLEKPRRKTEALIFGSHDNSTLEMTQRMSTYLDTLWGAENVPWSMYYLNGQDNSLVLISTLPLKDLTSGFKESTVSDIVDSRRAEMLQQANALDERESFSNMRRLAWQNGHYFTLRTTFNQPGHLATVVAFDLPINDLIPPGMPLDSFRLEPDATATGNNDNEKEGTDSVSIHFNSTKIEISSALNSTDMRLVWQVPYGTLLLDTLQNILLPLLLNIGLLALALFGYTTFRHFSSRSTESVPSTAVNNELRILRAINEEIVSLLPLGLLVHDQESNRTVISNKIADHLLPHLNLQNITTMAEQHQGIIQATINNELYEIRMFRSQVAPRTQIFIIRDQDREVLVNKKLKQAQRLYEKNQQGRMTFMKNIGDALKEPAQSLAESAAKLNAPESKQLANQADVLVRLVEEIQLANMLADDSWKSETVLFSVQDLIDEVVPSVLPAIKRKGLQLLINNHLKAHDMRRGDRDTLRRILLLLMQYAVTSTQLGKITLEVDQDESSEDRLTFRILDTGEGVSIHEMDNLHFPFINQTQNDRYGKADPLAFWLSDQLARKLGGHLNIKTRDGLGTRYSVHIKMLAADPEVEEEEERLLDDVCVMVDVTSAEIRNIVTRLLENWGATCITPDERLISQDYDIFLTDNPSNLTASGLLLSDDESGVREIGPGQLCVNFNMSNAMQEAVLQLIEVQLAQEEVTESPLGGDENAQLHASGYYALFVDTVPDDVKRLYTEAATSDFAALAQTAHRLKGVFAMLNLVPGKQLCETLEHLIREKDVPGIEKYISDIDSYVKSLL

SEQ ID NO: 125115 - DNA, 2691 bp, Photorhabdus luminescens subsp. laumondii TTO1
  CDS (1)..(2691): transl_table=11
atgtataacaaacaattttctattaattcatcaaccataaaccgttactacggtctgttcattattctgctttttgtttccctgtttttatacagctataactacttcaatgcctggctaatggggaaaaaatatgcgctaaatagcgttgcaaccaaagtagtattacagatagaagattatcgttaccacgctaattctatctttaaacaagccaatagcgcatcttttaaaccaccagaactcatcacaccaatgaagctacggcctgatgtttactggcttgagaatcgttatcaaactatcgacacgattatttttggtcaccacagcactgcaagtgtagagttggcacaacgcctttccaattatatggagattttgtggggcacccgcaatgaatacaactccatgtactatctgaatggtaaagataacaatctgtttctgataaccactcactctattcttaaaccagaattgagatttaaagaaagttatctaacactgactgccgaatcaaaacgttcagaaatgctgatgcaatccaccgcgttagatgaacgggaaaatatttcttcaatccataagttaaatggcgaaaatatctatttttatacttatcgggcgacgttcaattcaccgggtcaattggcaacagttatcgcttttgatttgcctatttgtcaccttcttcctatggatatggcagcggccaacttcagtctattgtcggatgacgagcaaccccctaatgaaatcaataaagtcaatatttcacaaaatggtttctggctcgaattttctcaatcacttaaaggtacgcaatacaaactgttgtatcggatatcactcaaagatttgctaatcgatttgttatacagaaacatctggttgttactggctgattcagtctttattatcctgtccttaggtgggcttatttacattcgtagaaaatatatcgcgccaaatgccctgatgagccacgaactacaagtcaaggatgcgttaagtcacgatattatctccaatatccccattggcttattgatttatgatttctcagtcaatcagataattatgtgcaataacatcgccgaccatctgttgccgaatgtcgatttaaataaaattaagatgatggccaagcaacatcatggtgtcatccaaacctcaattgaggattcagtctatgaaattaacatgtacaaccttcgcctgttgccagaaacttatctgtttttactgcaagataaagatcaggaagcattaattagccggcgtctacaacttgcccatttggaacacgataagagtgtacaagctcggcgttttatgttgaccaacattcgttctgaattaaaacaaccaataaaagaattagatcatctcgcttaccaactgaaacaaattcttatagaagaaaatagtgttcgtatcgtcgataatttattgactaaatctgaatatatctccgactggattgagaatatttcattactcaatgaattagaatcaggtgaatggcaagcaaaaaatgaatcgttttcattatcagtcattttagaggatattattaaaaaagtgtttcctaaaatgaataacaaaggattgaattattattatcattgtaatattaatcctgaatcactatttattggcgatagtactgccatcagtaagatcgtcctgatgttagtcaattatgcaatcacgcttacatcttatggcaaaatatctctcatcgttaactattctcaggaatacaaagaacacattcaaatcgacattatagatacaggcgccggacttaattcaacagatttaacaaacttgaattatccatttttaagcaaagccacaggcgataaatatcaatccaattcagggctgaccttttatctgtgtaaccaattatgtagaaaattaaatggtcattttactataaacagcaaacccaacctgggtacgcactatgctatcagtctgcccttaataatcggccaagaccaatgcccgccgctactggaagacattactgccttgttggatatcagcaatacgaagatccgtaagattgtacaaaatcatctgcatcattatggcgcggtttacttcgataaaaagccagaaaatatgaatcgagaatacgatatcatgttgacggataaaccctacgattcggcaaaatcggctatattactggttgataatctggccggctttgagcagataaaacctgactatattcgatgtaactacaatctgggtgaagcggttatcaatgccatttcgttattaattgagagaagtttcagttttaacgaattcacggcaaatttagaaatgtcagcatttaacgatgaaagcagcgattacgattttgacaatgttataaatagttatcaaaaacagctaactgatagcgattaccgacaattatttgtcgagacagtaccgatagatattaataagctgtatactgatatagaacaatatgatctgatatcgctttcgcaaacagcacatcgcctgaaaggcgtctttgctatgttagacctagaactcctcaaactttcttgcgaaacactggaacaacacataacagacagtaacgaaatagagattaagaatagcattagccgtcttgaatccttcaccaaaaggctattgcagcagggtaactaa

SEQ ID NO: 125116 - protein, 896 aa, Photorhabdus luminescens subsp. laumondii TTO1
MYNKQFSINSSTINRYYGLFIILLFVSLFLYSYNYFNAWLMGKKYALNSVATKVVLQIEDYRYHANSIFKQANSASFKPPELITPMKLRPDVYWLENRYQTIDTIIFGHHSTASVELAQRLSNYMEILWGTRNEYNSMYYLNGKDNNLFLITTHSILKPELRFKESYLTLTAESKRSEMLMQSTALDERENISSIHKLNGENIYFYTYRATFNSPGQLATVIAFDLPICHLLPMDMAAANFSLLSDDEQPPNEINKVNISQNGFWLEFSQSLKGTQYKLLYRISLKDLLIDLLYRNIWLLLADSVFIILSLGGLIYIRRKYIAPNALMSHELQVKDALSHDIISNIPIGLLIYDFSVNQIIMCNNIADHLLPNVDLNKIKMMAKQHHGVIQTSIEDSVYEINMYNLRLLPETYLFLLQDKDQEALISRRLQLAHLEHDKSVQARRFMLTNIRSELKQPIKELDHLAYQLKQILIEENSVRIVDNLLTKSEYISDWIENISLLNELESGEWQAKNESFSLSVILEDIIKKVFPKMNNKGLNYYYHCNINPESLFIGDSTAISKIVLMLVNYAITLTSYGKISLIVNYSQEYKEHIQIDIIDTGAGLNSTDLTNLNYPFLSKATGDKYQSNSGLTFYLCNQLCRKLNGHFTINSKPNLGTHYAISLPLIIGQDQCPPLLEDITALLDISNTKIRKIVQNHLHHYGAVYFDKKPENMNREYDIMLTDKPYDSAKSAILLVDNLAGFEQIKPDYIRCNYNLGEAVINAISLLIERSFSFNEFTANLEMSAFNDESSDYDFDNVINSYQKQLTDSDYRQLFVETVPIDINKLYTDIEQYDLISLSQTAHRLKGVFAMLDLELLKLSCETLEQHITDSNEIEIKNSISRLESFTKRLLQQGN

SEQ ID NO: 125117 - DNA, 2685 bp, Erwinia carotovora subsp. atroseptica SCRI1043
  CDS (1)..(2685): transl_table=11
ttgatgccagccataatcctgcgttatttttctctccttacggtgttatcgatcctgattaccggaacgttcggctatagctacatcaacgatttgctggcggacaaaaaacattcactgacgaccattgcccaaggtgttcagaaacgcattgatacctaccgtttcttcacgtaccaaatttacggcagtctgaacagcgaaccgtccgctagcgacgccagcattaccgcaattaatttaatgcccaatgttttctacgtagaaaaaaatggtcagaagacggatgctctgatttttggacaacacgataaaggaacgctgacgtcggttcgccgcatatcgcgttacctcgatattctctggggagcagagaataacgtctattccatgtattacctgaatggcatcgacaacagcctgacgatgatttctacgcagacgttgaaagatatctcctcgcagttccgcggcaattatattacggtcatcgccgaagcccgtcggacggaaatgctgcaacaggcgaatgtgttagacgagcgcgaaagtttttctccgctgcgtaaattacgcttctataacgactactattttacgctgcgcacgacattcaatcagccaggtcacctagcgacaattctggcgttcgatctgccaattaacgatttaattccagacacgatcccgcgtgagttccttatgctgaagccggatacaccagcagccagcaatatggatagcaatggcgaaggcacggccgacgtgcagcttcatggctctaatctggaaatctccgctacgctcgtgaatgcaccgataaaaatcgtttttcaggtgcccgtaaaaacactgattgttgactcattgcgtaataacatctggcttctgttgttgaatctggttctgctgagtgcatccatcgctggtttttatcttttccgtcggaagtatgcccatcctggagaggacttatctcatcagttagagaagaagctggatatttaccgcgaaacaacgggaaaaatcccgatgggcgtgctggtttatgatttcagcagcaacaaggtggtcatacaaaatgagcgtgcagagcatctgcttccgcacctgagcctgcaaaaaatcaccaatatggcggatgagcatcaaggcgtcattcaggtcaccattaataatgagatgtatgagatccgccaaatccgtagccaatattcaccagactattgcctcttcctgctgcgtgaacaggataaagagattctggtgcaacggaaattgcagctcgcccagcgtgagtacgaaaagaatattcatgccagaaaacgcttattccaaaatctgctcagcgaattcaaacagccactgatttcactacaacagcatattcatgcgatacgccacagcgatacagcaaccgtacaaacacaaacgctggatcaactaacagcggatacccgctgcgctatcgaactgctggaaaatatcgcgttgcatgaaaaactggaagcgcaggaatggaccgtgatcaaggacagcttttcaccgctggcgcttatcgataatgttcttcttgagctgctgccacgattgaatcaaaaagggctgaccctattccatcattacaatttggatagtaatcaaacttacatcggcgatgcagggctgttgaaaaaaacgctggcactgctgctaaattattcggtaaccaatacggattacggcaaaattacggtgtcggttgatagaaaaaataatgagtcggacatactgattattcaggtcagcgatacaggaacgaatgtttcaggtaaagagcaggaaaatattcgacatcctttcctgcatcctgcgtcttccgatcgtttcggacaaaattcaggattgaccttatttttgtgcaatcaactctgtaataaactgggcggtgcgttaaccatcaacagtaaatccgggttaggcacacactatattctgacgctcaaactggaaccggaaacgcttcccgttgaggaagaaaagctgttggatggtattaccgttctgctggatgtgacatccgatgaagtacagcatattgtcggccatatgctgacaggctggggcgctaattatcaggtcagcgatgaacgccagattaatcaggaagcggatatctttattactgatgacccggagaaaaaagcagactatacactactgttgagtcatgacgatgacacagtaacacctttgggcccgcgccgtttgcgggtgaactataatatcagccacctcctgctggaggcattgcttaagctgattgaactgcaactggaaacaccacccgatgcaatgcaagagggagaaccgaacgatgtcgaattttacgccgctcaattggcgtcaagtgactattattcgctgttcgtggagacagtaccggatgatttaaagaggctgtatactgaagcggaagcaggcgattttccgtcgctttcgcagacggcacaccggctgaaaggcgtgtttgccatgctgaatctgcatcctggcaaacagctgtgtgaacagcttgaacagcatattaccgcgcacgatagtgtacaaatcgaggctaaccttcatgaaattgagcggtttgtcagtgcattactatccccaatagaacctaaagggcagcaaggtagccaacaagatgagtaa

SEQ ID NO: 125118 - protein, 894 aa, Erwinia carotovora subsp. atroseptica SCRI1043
MMPAIILRYFSLLTVLSILITGTFGYSYINDLLADKKHSLTTIAQGVQKRIDTYRFFTYQIYGSLNSEPSASDASITAINLMPNVFYVEKNGQKTDALIFGQHDKGTLTSVRRISRYLDILWGAENNVYSMYYLNGIDNSLTMISTQTLKDISSQFRGNYITVIAEARRTEMLQQANVLDERESFSPLRKLRFYNDYYFTLRTTFNQPGHLATILAFDLPINDLIPDTIPREFLMLKPDTPAASNMDSNGEGTADVQLHGSNLEISATLVNAPIKIVFQVPVKTLIVDSLRNNIWLLLLNLVLLSASIAGFYLFRRKYAHPGEDLSHQLEKKLDIYRETTGKIPMGVLVYDFSSNKVVIQNERAEHLLPHLSLQKITNMADEHQGVIQVTINNEMYEIRQIRSQYSPDYCLFLLREQDKEILVQRKLQLAQREYEKNIHARKRLFQNLLSEFKQPLISLQQHIHAIRHSDTATVQTQTLDQLTADTRCAIELLENIALHEKLEAQEWTVIKDSFSPLALIDNVLLELLPRLNQKGLTLFHHYNLDSNQTYIGDAGLLKKTLALLLNYSVTNTDYGKITVSVDRKNNESDILIIQVSDTGTNVSGKEQENIRHPFLHPASSDRFGQNSGLTLFLCNQLCNKLGGALTINSKSGLGTHYILTLKLEPETLPVEEEKLLDGITVLLDVTSDEVQHIVGHMLTGWGANYQVSDERQINQEADIFITDDPEKKADYTLLLSHDDDTVTPLGPRRLRVNYNISHLLLEALLKLIELQLETPPDAMQEGEPNDVEFYAAQLASSDYYSLFVETVPDDLKRLYTEAEAGDFPSLSQTAHRLKGVFAMLNLHPGKQLCEQLEQHITAHDSVQIEANLHEIERFVSALLSPIEPKGQQGSQQDE

SEQ ID NO: 125119 - DNA, 2694 bp, Yersinia pseudotuberculosis IP 32953
  CDS (1)..(2694): transl_table=11
atgcaaaacaattcgtctacccactcagcggctaacattacacgttacttctggctatttatcgtacttctgctcatgactgttgggctatatgcctataactataccaatgcttatctgactgaaaagaagcatgctttaacgaatatcgctaacggtttgcaacaacgcattgatgactatcgatatcatacttaccaaatatatgatttagtcaataatccgatcaaagcaagtgagccccctcctgtggtgcaggaaacccgcctgcgccctgacgtttactatattgaaaagcctcgcagaaagactgacgctatcatttttggtaaccacgagcctgcaacgctgaccatggcattacagatatctgactatcttgataacctgtgggggccgcaaaatgacacttactcgatgtactatcttaacgggcaggacaatagcttactcctgattacgactcaggcactaaaagaggtcacatcacgctttaaagagagctaccttactgcctttgctgaatcgcgacgggcggaaatgctacagcaggtcaatacgttggatgagcgggagagcttctcgcccttacgcaaattgcgcttccaaaatgcctactatttcacgctaagaaccacctttaaccgtcctggccatttagccaccgtgatcgcctttgatttaccgatcaatgatttaattccaccgaacatggcacgttcgaacttcctgcttcaaccagataaagtgccactcaatgagggggctacccccgaagatattgcggcaaccagcgtgtcactgaacggctcatgggttgagttctccgcaccactggcaaatgtcacactgaaaattatttatcgtgtaccggttagtcatttgattatcgacttattaataaacaacttttggttaatcctagccaatattgtgttattagcgctaaccattctggccgcctattttgtccgccaccaatatggtcgtccaagtgctgatgtgaccggacaattagaagctcagagattgttgagtcaggagatcattaccaacctaccgcaaggcttattaatttatgacttcagcaacagcactgtcattgccagcaacaagatagcggaaaatctactgcctcacctgaatctacaaaaaattgccactatggcagagcagcaccacggtgtgattcaagggacggttaataacgaagtttatgaaatccacatgttccgtagccagatctcaccagagacgtatctttttctacttaatgatcaggataaagaagtcttggtgaataagaaattgcagcaagcaaggcgtgagtacgataaaaatctacaagcgcggaaactgatgttgcacaacctggggattgaacttggccaaccggtccaccacctgagtcaacttgttcgtacattacaggacactaccgatttgcaacaacagcatgacattaagaccaagctggttgagcaatcagcaactatccttgaactgattgataacattacgttactgactaagctggaaacacaagattggcaaacagaacaacaggtcttctctttatcaaccttaatcgataacctgctactggatctgctcccctcgattaatcggaaaggcttaaatctgtttaatcattttcatgtcagccttgaccaaatttatctaggtgatgaaaaggtattacgtaaaatactttcgttgttgctgaattattctatcgttaccacagcttacggaaaaattaccctcaatgtagatcatgaaccaggacatccggaacaattggttattcaaataatggatactggcgcgggtatttctgatgaagagataggtaatcttaattatcctttccttagccaagcattggccgacagatacaatcatggttcggggctgacattttttttatgtaaccaattatgtaaaaaattaaacggccaattagagattcgcagtaaagtagatataggtacacgctatactatccggttaacaatagccgttaaaaatgaacaacaagacacgcaagaaaaattactggatggtgtcacagtactattagatataacctcagaagaagtacgctcgatcattacaatattgttaaattcatttggtgctaactgcattctcaccgatgaacgcctaccagggcgggattatgatgttacaataacggataatccgcaacattatgataattacacattattgctcgcggcggatgaaacggggtttcaccagttacaaaacaattatatacgggcaaattacaatttaagcagcgcggttattgattcaatattattattaatcgagcggcgaattttatctgaacaatcgcaacaaaaggttgagtacattacagaagatgatataaacctctatgagaggcaactaaaaaccagtgactattattccttatttgtcgagacagtaccggtagatctgaagaaactgtatactgaacttcagcaaagtgatttaacatcactttcgcaaaccgtacatcgattaaaaggcgtatttgccatgctgaacctggttctcggcaagcagctatgtgaaacattagaacagcatatcgcagatggcgatcggttgaagatcgaaaatagcatcagtcagattgattttttcatcaccagactgttgcaggaaggtaacccataa

SEQ ID NO: 125120 - protein, 897 aa, Yersinia pseudotuberculosis IP 32953
MQNNSSTHSAANITRYFWLFIVLLLMTVGLYAYNYTNAYLTEKKHALTNIANGLQQRIDDYRYHTYQIYDLVNNPIKASEPPPVVQETRLRPDVYYIEKPRRKTDAIIFGNHEPATLTMALQISDYLDNLWGPQNDTYSMYYLNGQDNSLLLITTQALKEVTSRFKESYLTAFAESRRAEMLQQVNTLDERESFSPLRKLRFQNAYYFTLRTTFNRPGHLATVIAFDLPINDLIPPNMARSNFLLQPDKVPLNEGATPEDIAATSVSLNGSWVEFSAPLANVTLKIIYRVPVSHLIIDLLINNFWLILANIVLLALTILAAYFVRHQYGRPSADVTGQLEAQRLLSQEIITNLPQGLLIYDFSNSTVIASNKIAENLLPHLNLQKIATMAEQHHGVIQGTVNNEVYEIHMFRSQISPETYLFLLNDQDKEVLVNKKLQQARREYDKNLQARKLMLHNLGIELGQPVHHLSQLVRTLQDTTDLQQQHDIKTKLVEQSATILELIDNITLLTKLETQDWQTEQQVFSLSTLIDNLLLDLLPSINRKGLNLFNHFHVSLDQIYLGDEKVLRKILSLLLNYSIVTTAYGKITLNVDHEPGHPEQLVIQIMDTGAGISDEEIGNLNYPFLSQALADRYNHGSGLTFFLCNQLCKKLNGQLEIRSKVDIGTRYTIRLTIAVKNEQQDTQEKLLDGVTVLLDITSEEVRSIITILLNSFGANCILTDERLPGRDYDVTITDNPQHYDNYTLLLAADETGFHQLQNNYIRANYNLSSAVIDSILLLIERRILSEQSQQKVEYITEDDINLYERQLKTSDYYSLFVETVPVDLKKLYTELQQSDLTSLSQTVHRLKGVFAMLNLVLGKQLCETLEQHIADGDRLKIENSISQIDFFITRLLQEGNP

SEQ ID NO: 125121 - DNA, 2694 bp, Proteus mirabilis
  CDS (1)..(2694): transl_table=11
atgcgcacactgacccaattaaagccaaatacattaactcgcttatatgctctgtttcttctgtttatggccatatccctttttctatatgcttatagctattttgatacttggctagaaagtaaaaaaaatgccattaacaacacgactaataagtttgcatctcaagttgaagattaccgctatcacgctaaccaactattccagttatcaaacaaaattaatgatccaaccctctttctgcctttaaaaatcaatccggtcaaactacgctctgatgtttattggcttgaaggacgcgatcagaccgttgatgctattgtttttggtaaatcgaatgaacaaacctttcagttagccggttattttgcaaacgcgttagaaattatttggggggtacgtaataactatagctctctctattatcttaatggtaaaggcaatgatcttatccttattactacccactcaatactaaaaccagaattgcgttataaagaaagctatttaacactaacggctgaaaacaaacgttctgagctattaatgcaatcaacggcattagatgaaaaagagagcctttctcccattaggaaaatgccgacagaaaacatttattactatacctatcgcaccatgtttaatgtgccagggcaactgaccagtgttattgcctttgatttacccataaataattttctacctgctgagctatcacctcaatatttaagattattacccacaggacagcagagtgtttatgataaaaacaatattgaggtatcaacggatgggacttcactcatcttctcacagcccatcgcaggaataccctactctttatcttatgagtatccactaaaatcgattttcaatgagattgtgtataaaaatatctggttgcttatcagcctactcatttttatctcgatttcagtgtttggccatatctatattcgtaataaatatgtattcccttatatttcgatgacgcgtaatcttcgcatcaaagaagagatgactaacgatatcatttctaatcttcctattggtctattagtgtataatttttcatcaaaccacaaaattattagtaatagccacgcagagaaactattacctcatatcgatttatctaagatccgccagatggcgattgaacataatggtttaatccaaacggccattgataacgaaatttatgagatccgcaccagtagcaacagcaatatcgataatactgctctattcatttttctgaataaagacaacgaagcattaatcaataagaaattgcagctagcacaacaagaatatgaaaaaaatacgattgcacgccgcaagatcttatccaatatgtcgttagaactcatacgaccaattaaagatattaatgagatggtatatcaatttaaagatctacttcctaacgatactcaccaacaattactgagtctgctattagaaaaaacgaattatatttctgagtggatagaaaacattacgctaattaataagttagaaaatcaagaatggaaaatacatcaagatgaatttgaactttcaacgctagttgaatctattctaataaccgcatcaccatttatgataagaaagggattaacactttatttccataataatattaaacctagtttacttttatttaatgatggcccagcattaattaagattattttatcattgattaattatgccattagtacaactaattatggaaaaataaccgtcaatctaaatttagaaaaaaataatgataaagaagaaatagtaattgatattattgatagtggcagtgggttaacagcacaagatctggctaatattaaatatccatttttaggtcaagctatgggtgataaatattattccaactcgggtattattttttatttatgtcatttgttgtgtaacaaaatacaaggcactttgaccattacaagccaaggaagtattggctctcatttccgtatcgtacttccataccagcatatagatacagaagagcgctcttttgacatattattagagggtataactgcaaaactcgccataaaaaaccctgaaatagaaaaaataatctgccaacagcttgataaatatggcgctacatactttgataaaaataaagagaatctttactcagaatacgatatcatacttagagacactccggataataatcctgaatcagcaacagtattattagttagctctattaccggatttgaaaaaatagcaagaaatttaataaagtgtaactataacttcggtgatccattaattgaggctattacttatttgattgaagaaaatgaacaactttctctcgaaacaactcaaacgagtattcgtaatgagaataataaccttgatcatcacgaagtaattcttaataattataggaagaagttgaatgatagtgattataaggaactatttatcaatactgttcccattgatgttgaaaaactacacttagaagcaactaataaagactttcattctctagctcagacagctcatcgtctgaaaggggtttttgctatgttagatttagaatatctcagagagaactgcgaatatttagaagatgacataaaaaatcataatgaattagagataaaagaacgtatcaatcaactggataaatggatccgacagttgctgtag

SEQ ID NO: 125122 - protein, 897 aa, Proteus mirabilis
MRTLTQLKPNTLTRLYALFLLFMAISLFLYAYSYFDTWLESKKNAINNTTNKFASQVEDYRYHANQLFQLSNKINDPTLFLPLKINPVKLRSDVYWLEGRDQTVDAIVFGKSNEQTFQLAGYFANALEIIWGVRNNYSSLYYLNGKGNDLILITTHSILKPELRYKESYLTLTAENKRSELLMQSTALDEKESLSPIRKMPTENIYYYTYRTMFNVPGQLTSVIAFDLPINNFLPAELSPQYLRLLPTGQQSVYDKNNIEVSTDGTSLIFSQPIAGIPYSLSYEYPLKSIFNEIVYKNIWLLISLLIFISISVFGHIYIRNKYVFPYISMTRNLRIKEEMTNDIISNLPIGLLVYNFSSNHKIISNSHAEKLLPHIDLSKIRQMAIEHNGLIQTAIDNEIYEIRTSSNSNIDNTALFIFLNKDNEALINKKLQLAQQEYEKNTIARRKILSNMSLELIRPIKDINEMVYQFKDLLPNDTHQQLLSLLLEKTNYISEWIENITLINKLENQEWKIHQDEFELSTLVESILITASPFMIRKGLTLYFHNNIKPSLLLFNDGPALIKIILSLINYAISTTNYGKITVNLNLEKNNDKEEIVIDIIDSGSGLTAQDLANIKYPFLGQAMGDKYYSNSGIIFYLCHLLCNKIQGTLTITSQGSIGSHFRIVLPYQHIDTEERSFDILLEGITAKLAIKNPEIEKIICQQLDKYGATYFDKNKENLYSEYDIILRDTPDNNPESATVLLVSSITGFEKIARNLIKCNYNFGDPLIEAITYLIEENEQLSLETTQTSIRNENNNLDHHEVILNNYRKKLNDSDYKELFINTVPIDVEKLHLEATNKDFHSLAQTAHRLKGVFAMLDLEYLRENCEYLEDDIKNHNELEIKERINQLDKWIRQLL

SEQ ID NO: 125123 - DNA, 3046 bp, Salmonella typhimurium
  CDS (304)..(2973): transl_table=11
taccctttttcagacacacccggctgatttatgctacctgcctaaaactatcacggttattcactacactcccctgctcgaccgttcgtaagacattagcaaataatttcttgatatttagtgctaaacatttataagtagtctttatatttgtaccgttctgcgaaggttgtacgcttttcccgtcccgccgacggagcgcgtgttaagttgcccggcatgacgtaagagtctggaaattcattcattaccctttatactgcccttcaccttcagcgttgcttttacaggtcgtaaacataaatgagtcagtctgacacaacggtctctacccgattctcccttctaccgggaagcattacccgtttcttcttattgctgatcattgtgctgctggtaacgatgggcgttatggtacagagcgccgtcaacgcctggttgaaagacaaaagctatcaaattgtcgatatcacccacgctattcataaacgcgtggatacctggcggtatgttacctggcaaatttatgacaacatcgccgcgaccactacgccatcgacaggtgaaggacttcaggaaacgcgtctgaagcaggatgtgtattatcttgaaaagccgcgacgtaaaactgaagcgctgattttcggttcccatgacagcgccacgctggaaatgacgcagcgtatgtcaacttatctggatacgctgtggggcgcggaaaacgtgccgtggtccatgtattacctcaacggacaggataacagcctgattcttatctctaccctaccgttgaaagatctctcttccggctttaaagagtccactattggcaatatcgtcgattcccgccgggcagagatgttgcagcaggcgaatgcgctggatgagcgcgaaagtttctcctcattgcgaaaactggcctggcaaaacggtcactattttacgctgcgcacgaccttcaatcagccaggacatctggcaaccgtggtggcgtttgatctgcccattaatgatttaatcccgccgggaatgccgctggacagttttcggatagagcctgacgcaacccaagcgacggggcgaagcagtgaaaaggaagcgcctgatagcgtcacgattagctttaacggttcaaaaattgagatctcctcagcgcttaactctaccggaatgcgcctgatctggcaggtaccgttcggtacgcttttgcttgatacgttgcaaaatattttgctgcctttactgctgaacatcgggctgctggcgttggcgttatttggctacgccacgttccgtcatcagccgggacggtcgacggaatcgacatccggcaacgcggcgaataatgagcttcgcgtcttacgcgccattaatgaagagatagtttctctgctgccgctgggtctgctggtctacgatcaggaaggcaaccgcaccgtgatcagcaataaaatcgccgatcatctgttgccgcatcttaacctgcaaaatattaccagcatggcggaacagcatcagggcgtgattcaggcgacaattaataacgaactgtatgagatccgtctgtttcgcagccagatcgctccccgcacgcagatctttattattcgcgatcaggaccgggaagtgctggtgaataagaagcttaaacaggcgcagcgtttgtatgagaagaatcagcagggccgcgccgcctttatgcaaaatatcagcaacacgcttaaagagcccgtacgccaactggcggttaacgccgcagcagtcaccacgccggaaagcctgaaactggcggatcaggcggatgtattggtacgtatgatcgatgaaatccaactggcgaatatgctggaaaatgacgcatggaagagcgaagccacgctgttctccctgcaggatcttattgacgaagtcgtgccggaagtgctgcccgccattaagcgtaaagggctgcaactgctgattaataaccatcttagcggcaacgatgaacgctggggcgatcgtgacgccctgcgccggattttgctgctgttgattcagtatgccgtcacaacgaccgctatgggtaaaattacgcttgaagtcgagcaggatgaatctatcgcggagcgtctgactttccgtattctggatacgggcgaaggtgtaacgttaaacgagattgataatctgcatttcccgtatatgaatgaaacgcagggcgatcgttacggcaaagcgaatccgctcaccttctggctgtgcaatcaactggcgcgcaaactgggcggtcatctcaacattaaagcgcgagaaacgctgggcacgcgctataccgttcatgtcaaaatgcttcctcacgatcagcatactcaggtcgaagagcgcctgctggacgacgtgagcgtgatggtcgatgtgacgtccaacgaggttcgcgcgattgtgctgcgtcagttagaaaactggggcgccacctgcatcacgccggatgaaaggcagataagtcaagaatatgatctctttttaacggataatccgtctaatcttactgcctcgggcttgcttttaagcgatgatgagtcaggcgtgcggaaaattggcccgggtcagttgcgcgtcaactttaatatgagcaatgctatgcaggaagctgtactacaacttatcgaagagcagctggcgcaggaagagattcccgcctccccgctcggcggagatgaaaatgccgagcttcatgccagcggctattatgcgctatttgtagacacagtaccggatgatgttaagaggttgtatactgaggcggcaaccagcgatttcgctgcgctggcccaaacggcccaccgcctgaaaggggtgtttgccatgcttaatctggtacccggcaagcagttatgtgaaacgctggaacatctgattcgtgataaagatgctccaggtatagaaaaatatatcagcgacattgacgcctacgtcaaaagcttgctgtagcaaggtagcccaatacatgaacaatatgaacgtaattattgccgatgaccacccgattgtagtgttcggtatt

SEQ ID NO: 125124 - protein, 889 aa, Salmonella typhimurium
MSQSDTTVSTRFSLLPGSITRFFLLLIIVLLVTMGVMVQSAVNAWLKDKSYQIVDITHAIHKRVDTWRYVTWQIYDNIAATTTPSTGEGLQETRLKQDVYYLEKPRRKTEALIFGSHDSATLEMTQRMSTYLDTLWGAENVPWSMYYLNGQDNSLILISTLPLKDLSSGFKESTIGNIVDSRRAEMLQQANALDERESFSSLRKLAWQNGHYFTLRTTFNQPGHLATVVAFDLPINDLIPPGMPLDSFRIEPDATQATGRSSEKEAPDSVTISFNGSKIEISSALNSTGMRLIWQVPFGTLLLDTLQNILLPLLLNIGLLALALFGYATFRHQPGRSTESTSGNAANNELRVLRAINEEIVSLLPLGLLVYDQEGNRTVISNKIADHLLPHLNLQNITSMAEQHQGVIQATINNELYEIRLFRSQIAPRTQIFIIRDQDREVLVNKKLKQAQRLYEKNQQGRAAFMQNISNTLKEPVRQLAVNAAAVTTPESLKLADQADVLVRMIDEIQLANMLENDAWKSEATLFSLQDLIDEVVPEVLPAIKRKGLQLLINNHLSGNDERWGDRDALRRILLLLIQYAVTTTAMGKITLEVEQDESIAERLTFRILDTGEGVTLNEIDNLHFPYMNETQGDRYGKANPLTFWLCNQLARKLGGHLNIKARETLGTRYTVHVKMLPHDQHTQVEERLLDDVSVMVDVTSNEVRAIVLRQLENWGATCITPDERQISQEYDLFLTDNPSNLTASGLLLSDDESGVRKIGPGQLRVNFNMSNAMQEAVLQLIEEQLAQEEIPASPLGGDENAELHASGYYALFVDTVPDDVKRLYTEAATSDFAALAQTAHRLKGVFAMLNLVPGKQLCETLEHLIRDKDAPGIEKYISDIDAYVKSLL

SEQ ID NO: 125125 - DNA, 23 bp, Artificial sequence
  primer
atgcgtcagaaagagacaacggc

SEQ ID NO: 125126 - DNA, 25 bp, Artificial sequence
  primer
ttacagcaagctcttgacataactg

SEQ ID NO: 125127 - protein, 904 aa, Artificial sequence
  consensus sequence
  Variant (2)..(3): Xaa in position 2 to 3 is any amino acid
  Variant (7)..(7): Xaa in position 7 is any amino acid
  Variant (9)..(9): Xaa in position 9 is any amino acid
  Variant (11)..(11): Xaa in position 11 is any amino acid
  Variant (13)..(14): Xaa in position 13 to 14 is any amino acid
  Variant (16)..(19): Xaa in position 16 to 19 is any amino acid
  Variant (21)..(24): Xaa in position 21 to 24 is any amino acid
  Variant (26)..(27): Xaa in position 26 to 27 is any amino acid
  Variant (32)..(33): Xaa in position 32 to 33 is any amino acid
  Variant (35)..(40): Xaa in position 35 to 40 is any amino acid
  Variant (42)..(47): Xaa in position 42 to 47 is any amino acid
  Variant (49)..(49): Xaa in position 49 is any amino acid
  Variant (51)..(52): Xaa in position 51 to 52 is any amino acid
  Variant (55)..(55): Xaa in position 55 is any amino acid
  Variant (57)..(57): Xaa in position 57 is any amino acid
  Variant (61)..(78): Xaa in position 61 to 78 is any amino acid
  Variant (79)..(81): Xaa in position 79 to 81 is any or no amino acid
  Variant (83)..(84): Xaa in position 83 to 84 is any amino acid
  Variant (92)..(94): Xaa in position 92 to 94 is any amino acid
  Variant (97)..(97): Xaa in position 97 is any amino acid
  Variant (99)..(99): Xaa in position 99 is any amino acid
  Variant (103)..(103): Xaa in position 103 is any amino acid
  Variant (105)..(107): Xaa in position 105 to 107 is any amino acid
  Variant (110)..(113): Xaa in position 110 to 113 is any amino acid
  Variant (115)..(115): Xaa in position 115 is any amino acid
  Variant (117)..(117): Xaa in position 117 is any amino acid
  Variant (121)..(121): Xaa in position 121 is any amino acid
  Variant (125)..(126): Xaa in position 125 to 126 is any amino acid
  Variant (128)..(130): Xaa in position 128 to 130 is any amino acid
  Variant (138)..(138): Xaa in position 138 is any amino acid
  Variant (143)..(143): Xaa in position 143 is any amino acid
  Variant (146)..(146): Xaa in position 146 is any amino acid
  Variant (148)..(149): Xaa in position 148 to 149 is any amino acid
  Variant (152)..(154): Xaa in position 152 to 154 is any amino acid
  Variant (156)..(156): Xaa in position 156 is any amino acid
  Variant (161)..(167): Xaa in position 161 to 167 is any amino acid
  Variant (171)..(171): Xaa in position 171 is any amino acid
  Variant (177)..(177): Xaa in position 177 is any amino acid
  Variant (188)..(189): Xaa in position 188 to 189 is any amino acid
  Variant (193)..(195): Xaa in position 193 to 195 is any amino acid
  Variant (197)..(198): Xaa in position 197 to 198 is any amino acid
  Variant (208)..(208): Xaa in position 208 is any amino acid
  Variant (216)..(216): Xaa in position 216 is any amino acid
  Variant (228)..(229): Xaa in position 228 to 229 is any amino acid
  Variant (231)..(234): Xaa in position 231 to 234 is any amino acid
  Variant (236)..(238): Xaa in position 236 to 238 is any amino acid
  Variant (241)..(249): Xaa in position 241 to 249 is any amino acid
  Variant (250)..(251): Xaa in position 250 to 251 is any or no amino acid
  Variant (253)..(258): Xaa in position 253 to 258 is any amino acid
  Variant (259)..(261): Xaa in position 259 to 261 is any or no amino acid
  Variant (264)..(266): Xaa in position 264 to 266 is any amino acid
  Variant (268)..(268): Xaa in position 268 is any amino acid
  Variant (270)..(271): Xaa in position 270 to 271 is any amino acid
  Variant (273)..(278): Xaa in position 273 to 278 is any amino acid
  Variant (280)..(282): Xaa in position 280 to 282 is any amino acid
  Variant (285)..(287): Xaa in position 285 to 287 is any amino acid
  Variant (289)..(290): Xaa in position 289 to 290 is any amino acid
  Variant (292)..(292): Xaa in position 292 is any amino acid
  Variant (294)..(294): Xaa in position 294 is any amino acid
  Variant (296)..(299): Xaa in position 296 to 299 is any amino acid
  Variant (302)..(302): Xaa in position 302 is any amino acid
  Variant (304)..(305): Xaa in position 304 to 305 is any amino acid
  Variant (308)..(308): Xaa in position 308 is any amino acid
  Variant (310)..(312): Xaa in position 310 to 312 is any amino acid
  Variant (314)..(317): Xaa in position 314 to 317 is any amino acid
  Variant (319)..(331): Xaa in position 319 to 331 is any amino acid
  Variant (332)..(336): Xaa in position 332 to 336 is any or no amino acid
  Variant (338)..(345): Xaa in position 338 to 345 is any amino acid
  Variant (348)..(348): Xaa in position 348 is any amino acid
  Variant (350)..(350): Xaa in position 350 is any amino acid
  Variant (353)..(353): Xaa in position 353 is any amino acid
  Variant (360)..(362): Xaa in position 360 to 362 is any amino acid
  Variant (364)..(366): Xaa in position 364 to 366 is any amino acid
  Variant (370)..(370): Xaa in position 370 is any amino acid
  Variant (373)..(373): Xaa in position 373 is any amino acid
  Variant (380)..(380): Xaa in position 380 is any amino acid
  Variant (383)..(383): Xaa in position 383 is any amino acid
  Variant (385)..(386): Xaa in position 385 to 386 is any amino acid
  Variant (389)..(389): Xaa in position 389 is any amino acid
  Variant (392)..(392): Xaa in position 392 is any amino acid
  Variant (394)..(394): Xaa in position 394 is any amino acid
  Variant (397)..(397): Xaa in position 397 is any amino acid
  Variant (403)..(403): Xaa in position 403 is any amino acid
  Variant (408)..(409): Xaa in position 408 to 409 is any amino acid
  Variant (413)..(414): Xaa in position 413 to 414 is any amino acid
  Variant (416)..(416): Xaa in position 416 is any amino acid
  Variant (418)..(419): Xaa in position 418 to 419 is any amino acid
  Variant (421)..(423): Xaa in position 421 to 423 is any amino acid
  Variant (427)..(427): Xaa in position 427 is any amino acid
  Variant (429)..(429): Xaa in position 429 is any amino acid
  Variant (436)..(437): Xaa in position 436 to 437 is any amino acid
  Variant (441)..(441): Xaa in position 441 is any amino acid
  Variant (446)..(446): Xaa in position 446 is any amino acid
  Variant (448)..(448): Xaa in position 448 is any amino acid
  Variant (450)..(454): Xaa in position 450 to 454 is any amino acid
  Variant (456)..(459): Xaa in position 456 to 459 is any amino acid
  Variant (462)..(462): Xaa in position 462 is any amino acid
  Variant (464)..(466): Xaa in position 464 to 466 is any amino acid
  Variant (468)..(481): Xaa in position 468 to 481 is any amino acid
  Variant (482)..(489): Xaa in position 482 to 489 is any or no amino acid
  Variant (491)..(503): Xaa in position 491 to 503 is any amino acid
  Variant (505)..(505): Xaa in position 505 is any amino acid
  Variant (507)..(507): Xaa in position 507 is any amino acid
  Variant (509)..(509): Xaa in position 509 is any amino acid
  Variant (512)..(514): Xaa in position 512 to 514 is any amino acid
  Variant (516)..(521): Xaa in position 516 to 521 is any amino acid
  Variant (524)..(526): Xaa in position 524 to 526 is any amino acid
  Variant (530)..(535): Xaa in position 530 to 535 is any amino acid
  Variant (538)..(540): Xaa in position 538 to 540 is any amino acid
  Variant (545)..(545): Xaa in position 545 is any amino acid
  Variant (547)..(559): Xaa in position 547 to 559 is any amino acid
  Variant (562)..(564): Xaa in position 562 to 564 is any amino acid
  Variant (566)..(567): Xaa in position 566 to 567 is any amino acid
  Variant (573)..(574): Xaa in position 573 to 574 is any amino acid
  Variant (577)..(577): Xaa in position 577 is any amino acid
  Variant (579)..(579): Xaa in position 579 is any amino acid
  Variant (581)..(582): Xaa in position 581 to 582 is any amino acid
  Variant (588)..(588): Xaa in position 588 is any amino acid
  Variant (590)..(598): Xaa in position 590 to 598 is any amino acid
  Variant (599)..(599): Xaa in position 599 is any or no amino acid
  Variant (601)..(603): Xaa in position 601 to 603 is any amino acid
  Variant (605)..(605): Xaa in position 605 is any amino acid
  Variant (609)..(609): Xaa in position 609 is any amino acid
  Variant (611)..(614): Xaa in position 611 to 614 is any amino acid
  Variant (616)..(617): Xaa in position 616 to 617 is any amino acid
  Variant (620)..(621): Xaa in position 620 to 621 is any amino acid
  Variant (623)..(629): Xaa in position 623 to 629 is any amino acid
  Variant (633)..(637): Xaa in position 633 to 637 is any amino acid
  Variant (639)..(639): Xaa in position 639 is any amino acid
  Variant (641)..(641): Xaa in position 641 is any amino acid
  Variant (644)..(644): Xaa in position 644 is any amino acid
  Variant (647)..(648): Xaa in position 647 to 648 is any amino acid
  Variant (651)..(651): Xaa in position 651 is any amino acid
  Variant (653)..(653): Xaa in position 653 is any amino acid
  Variant (655)..(655): Xaa in position 655 is any amino acid
  Variant (657)..(661): Xaa in position 657 to 661 is any amino acid
  Variant (665)..(665): Xaa in position 665 is any amino acid
  Variant (667)..(679): Xaa in position 667 to 679 is any amino acid
  Variant (680)..(683): Xaa in position 680 to 683 is any or no amino acid
  Variant (685)..(685): Xaa in position 685 is any amino acid
  Variant (689)..(691): Xaa in position 689 to 691 is any amino acid
  Variant (693)..(694): Xaa in position 693 to 694 is any amino acid
  Variant (696)..(696): Xaa in position 696 is any amino acid
  Variant (699)..(699): Xaa in position 699 is any amino acid
  Variant (701)..(701): Xaa in position 701 is any amino acid
  Variant (703)..(703): Xaa in position 703 is any amino acid
  Variant (706)..(708): Xaa in position 706 to 708 is any amino acid
  Variant (710)..(712): Xaa in position 710 to 712 is any amino acid
  Variant (715)..(719): Xaa in position 715 to 719 is any amino acid
  Variant (723)..(727): Xaa in position 723 to 727 is any amino acid
  Variant (730)..(731): Xaa in position 730 to 731 is any amino acid
  Variant (735)..(735): Xaa in position 735 is any amino acid
  Variant (737)..(741): Xaa in position 737 to 741 is any amino acid
  Variant (743)..(743): Xaa in position 743 is any amino acid
  Variant (744)..(744): Xaa in position 744 is any or no amino acid
  Variant (748)..(749): Xaa in position 748 to 749 is any amino acid
  Variant (751)..(752): Xaa in position 751 to 752 is any amino acid
  Variant (754)..(756): Xaa in position 754 to 756 is any amino acid
  Variant (758)..(758): Xaa in position 758 is any amino acid
  Variant (760)..(764): Xaa in position 760 to 764 is any amino acid
  Variant (766)..(766): Xaa in position 766 is any amino acid
  Variant (768)..(768): Xaa in position 768 is any amino acid
  Variant (770)..(770): Xaa in position 770 is any amino acid
  Variant (772)..(773): Xaa in position 772 to 773 is any amino acid
  Variant (776)..(776): Xaa in position 776 is any amino acid
  Variant (778)..(778): Xaa in position 778 is any amino acid
  Variant (782)..(783): Xaa in position 782 to 783 is any amino acid
  Variant (784)..(786): Xaa in position 784 to 786 is any or no amino acid
  Variant (788)..(798): Xaa in position 788 to 798 is any amino acid
  Variant (800)..(801): Xaa in position 800 to 801 is any amino acid
  Variant (802)..(818): Xaa in position 802 to 818 is any or no amino acid
  Variant (820)..(821): Xaa in position 820 to 821 is any amino acid
  Variant (823)..(823): Xaa in position 823 is any amino acid
  Variant (826)..(826): Xaa in position 826 is any amino acid
  Variant (830)..(830): Xaa in position 830 is any amino acid
  Variant (834)..(834): Xaa in position 834 is any amino acid
  Variant (836)..(836): Xaa in position 836 is any amino acid
  Variant (838)..(838): Xaa in position 838 is any amino acid
  Variant (844)..(846): Xaa in position 844 to 846 is any amino acid
  Variant (849)..(850): Xaa in position 849 to 850 is any amino acid
  Variant (852)..(852): Xaa in position 852 is any amino acid
  Variant (868)..(869): Xaa in position 868 to 869 is any amino acid
  Variant (879)..(880): Xaa in position 879 to 880 is any amino acid
  Variant (882)..(884): Xaa in position 882 to 884 is any amino acid
  Variant (886)..(888): Xaa in position 886 to 888 is any amino acid
  Variant (891)..(892): Xaa in position 891 to 892 is any amino acid
  Variant (895)..(895): Xaa in position 895 is any amino acid
  Variant (898)..(902): Xaa in position 898 to 902 is any amino acid
PXXITRXFXLXIXXLXXXXGXXXXSXXNAWLXXKXXXXXXIXXXXXXRXDXXRYXTXQIYXXXXXXXXXXXXXXXXXXXXXLXXDVYYLEKXXXKTXAXIFGXHXXXTLXXXXRXSXYLDXLWGXXNXXXSMYYLNGXDNSLXLIXTXXLKXXXSXFKESXXXXXXXSRRXEMLQQXNALDERESFSXXRKLXXXNXXYFTLRTTFNXPGHLATVXAFDLPINDLIPXXMXXXXFXXXPDXXXXXXXXXXXEXXXXXXXXXNGXXXEXSXXLXXXXXXLXXXVPXXXLXXDXLXNXXXXLLXNXXLLXLXXXGXXXXRXXXXXXXXXXXXXXXXXXLXXXXXXXXEIXSXLPXGLLVYDXXXNXXXISNXIAXHLLPHLXLQXIXXMAXQHXGXIQXTINNEXYEIRXXRSQXXPXTXXFXXXDQDXEXLVNKKLXXAQRXYEKNXQXRXXXXXNXXXXLKXPXXXLXXXXXXXXXXXXXXXXXXXXXXLXXXXXXXXXXXXXIXLXNXLEXXXWXXXXXXFSXXXLIDXXXXXXLPXXXRKGLXLXXXXXXXXXXXXXGDXXXLXXILLLLXXYAXTXTXXGKITLXVXXXXXXXXXXLXXXIXDTGXGXXXXEXXNLXXPXXXXXXXDRYXXXXXLXFXLCXQLXXKLXGXLXIXXXXXLGTXYXXXXXXXXXXXXXXXXXEXLLDXXXVXXDXTSXEXRXIVXXXLXXXGAXXXXXDERXXXXXYDXXLTDXPXXXXXSXXLLLXXDXXGXXXIXPXXXXXNXNXSXAXXEAXLXLIEXXXXXEXXXXXXXXXXXNXXXXXXXXXXXXXXXXXXXLXXSXYYXLFVXTVPXDXKXLYTEAXXXDFXXLXQTAHRLKGVFAMLNLXXGKQLCETLEXXIXXXDXXXIEXXISXIDXXXXXLL

SEQ ID NO: 125128 - protein, 60 aa, Artificial sequence
  protein pattern
  Variant (3)..(3): Xaa in position 3 is Ala or Thr
  Variant (9)..(9): Xaa in position 9 is Ala or Val
  Variant (11)..(11): Xaa in position 11 is Ala, Thr or Val
  Variant (20)..(20): Xaa in position 20 is Asn, Pro or Ser
  Variant (21)..(21): Xaa in position 21 is Leu or Met
  Variant (23)..(23): Xaa in position 23 is Lys or Arg
  Variant (25)..(25): Xaa in position 25 is any amino acid
  Variant (26)..(26): Xaa in position 26 is Phe or Trp
  Variant (27)..(27): Xaa in position 27 is any amino acid
  Variant (29)..(29): Xaa in position 29 is Ala, Asp or Gly
  Variant (30)..(30): Xaa in position 30 is His or Tyr
  Variant (40)..(40): Xaa in position 40 is Gln or Arg
  Variant (47)..(47): Xaa in position 47 is Ile or Val
  Variant (48)..(48): Xaa in position 48 is Ile, Leu or Val
  Variant (60)..(60): Xaa in position 60 is Asp or Pro
RRXEMLQQXNXLDERESFSXXRXLXXXNXXYFTLRTTFNXPGHLATXXAFDLPINDLIPX

SEQ ID NO: 125129 - protein, 59 aa, Artificial sequence
  protein pattern
  Variant (3)..(3): Xaa in position 3 is Ala or Ser
  Variant (7)..(7): Xaa in position 7 is Asp or Glu
  Variant (11)..(11): Xaa in position 11 is any or no amino acid
  Variant (13)..(14): Xaa in position 13 to 14 is any amino acid
  Variant (16)..(16): Xaa in position 16 is any or no amino acid
  Variant (21)..(21): Xaa in position 21 is Ala or Leu
  Variant (22)..(22): Xaa in position 22 is Ala, Glu or Gln
  Variant (23)..(23): Xaa in position 23 is Ala, Gln or Thr
  Variant (24)..(24): Xaa in position 24 is Gly or Ser
  Variant (26)..(26): Xaa in position 26 is Phe or Leu
  Variant (27)..(27): Xaa in position 27 is Ala, Pro or Thr
  Variant (28)..(28): Xaa in position 28 is Ala or Ser
  Variant (30)..(30): Xaa in position 30 is Ala or Ser
  Variant (33)..(33): Xaa in position 33 is Ala or Val
  Variant (46)..(46): Xaa in position 46 is any amino acid
  Variant (47)..(47): Xaa in position 47 is Leu or Pro
  Variant (53)..(53): Xaa in position 53 is any amino acid
  Variant (54)..(54): Xaa in position 54 is Gln or Thr
  Variant (57)..(58): Xaa in position 57 to 58 is any amino acid
YYXLFVXTVPXDXXKXLYTEXXXXDXXXLXQTXHRLKGVFAMLNLXXGKQLCXXLEXXI

SEQ ID NO: 125130 - protein, 61 aa, Artificial sequence
  protein pattern
  Variant (2)..(2): Xaa in position 2 is any amino acid
  Variant (3)..(3): Xaa in position 3 is Pro or Gln
  Variant (4)..(4): Xaa in position 4 is Asp or Asn
  Variant (6)..(6): Xaa in position 6 is Phe or Tyr
  Variant (8)..(8): Xaa in position 8 is Ile, Leu or Val
  Variant (11)..(11): Xaa in position 11 is Asn or Pro
  Variant (12)..(12): Xaa in position 12 is any amino acid
  Variant (13)..(13): Xaa in position 13 is Gln or Arg
  Variant (16)..(16): Xaa in position 16 is Asp or Glu
  Variant (18)..(18): Xaa in position 18 is Ile or Leu
  Variant (22)..(22): Xaa in position 22 is Asn, Gln or Ser
  Variant (24)..(24): Xaa in position 24 is Asp or Glu
  Variant (25)..(25): Xaa in position 25 is any amino acid
  Variant (26)..(26): Xaa in position 26 is Ala, Gly or Ser
  Variant (29)..(30): Xaa in position 29 to 30 is any or no amino acid
  Variant (32)..(34): Xaa in position 32 to 34 is any amino acid
  Variant (35)..(36): Xaa in position 35 to 36 is any or no amino acid
  Variant (38)..(38): Xaa in position 38 is any amino acid
  Variant (42)..(42): Xaa in position 42 is any amino acid
  Variant (46)..(46): Xaa in position 46 is Ala or Pro
  Variant (47)..(47): Xaa in position 47 is Glu or Gln
  Variant (49)..(49): Xaa in position 49 is Asp, Asn or Val
  Variant (50)..(50): Xaa in position 50 is Pro, Thr or Val
  Variant (51)..(51): Xaa in position 51 is Trp or Tyr
  Variant (59)..(59): Xaa in position 59 is any amino acid
LXXXVXYXEKXXXKTXAXIFGXHXXXTLXXTXXXXXSXYLDXLWGXXNXXXSMYYLNGXDN

SEQ ID NO: 125131 - protein, 59 aa, Artificial sequence
  protein pattern
  Variant (2)..(4): Xaa in position 2 to 4 is any or no amino acid
  Variant (6)..(6): Xaa in position 6 is His or Tyr
  Variant (7)..(7): Xaa in position 7 is Asp or Asn
  Variant (8)..(8): Xaa in position 8 is any amino acid
  Variant (9)..(9): Xaa in position 9 is Glu or Ser
  Variant (10)..(10): Xaa in position 10 is Gly or Ser
  Variant (12)..(12): Xaa in position 12 is His, Lys or Arg
  Variant (13)..(13): Xaa in position 13 is any amino acid
  Variant (14)..(14): Xaa in position 14 is Ile or Val
  Variant (16)..(16): Xaa in position 16 is Gln or Ser
  Variant (18)..(19): Xaa in position 18 to 19 is any amino acid
  Variant (21)..(21): Xaa in position 21 is Asp or Glu
  Variant (22)..(22): Xaa in position 22 is His or Lys
  Variant (27)..(27): Xaa in position 27 is Ile or Leu
  Variant (28)..(28): Xaa in position 28 is Asp, Asn or Ser
  Variant (30)..(30): Xaa in position 30 is Gln or Ser
  Variant (31)..(31): Xaa in position 31 is any amino acid
  Variant (33)..(33): Xaa in position 33 is any amino acid
  Variant (34)..(34): Xaa in position 34 is Asn, Gln, Ser or Thr
  Variant (37)..(37): Xaa in position 37 is any amino acid
  Variant (38)..(38): Xaa in position 38 is Glu or Gln
  Variant (40)..(40): Xaa in position 40 is Asn or Gln
  Variant (42)..(42): Xaa in position 42 is Ile, Leu or Val
  Variant (45)..(45): Xaa in position 45 is Ala, Thr or Val
  Variant (46)..(46): Xaa in position 46 is Ala or Thr
  Variant (48)..(48): Xaa in position 48 is Asp or Asn
  Variant (51)..(51): Xaa in position 51 is Ile, Leu or Met
  Variant (56)..(57): Xaa in position 56 to 57 is any amino acid
  Variant (58)..(58): Xaa in position 58 is Arg or Ser
  Variant (59)..(59): Xaa in position 59 is Asn or Ser
LXXXVXXXXXNXXXIXNXXAXXLLPHXXLXXIXXMAXXHXGXIQXXIXNEXYEIRXXXX

SEQ ID NO: 125132 - protein, 62 aa, Artificial sequence
  protein pattern
  Variant (3)..(3): Xaa in position 3 is Ala or Glu
  Variant (5)..(5): Xaa in position 5 is Ile, Leu or Val
  Variant (6)..(6): Xaa in position 6 is Asn, Ser or Thr
  Variant (7)..(8): Xaa in position 7 to 8 is any amino acid
  Variant (9)..(9): Xaa in position 9 is Asp or Glu
  Variant (10)..(10): Xaa in position 10 is Ile, Leu or Met
  Variant (11)..(11): Xaa in position 11 is Asp, Gly or Thr
  Variant (14)..(14): Xaa in position 14 is any amino acid
  Variant (15)..(16): Xaa in position 15 to 16 is any or no amino acid
  Variant (18)..(23): Xaa in position 18 to 23 is any amino acid
  Variant (24)..(25): Xaa in position 24 to 25 is any or no amino acid
  Variant (27)..(27): Xaa in position 27 is Lys or Arg
  Variant (29)..(29): Xaa in position 29 is Gly, Asn or Gln
  Variant (30)..(30): Xaa in position 30 is any amino acid
  Variant (31)..(31): Xaa in position 31 is Ala, Gly or Asn
  Variant (32)..(32): Xaa in position 32 is Asp, Asn or Ser
  Variant (33)..(33): Xaa in position 33 is Gly or Pro
  Variant (35)..(35): Xaa in position 35 is Ala or Thr
  Variant (37)..(37): Xaa in position 37 is Phe, Trp or Tyr
  Variant (39)..(39): Xaa in position 39 is Cys or Ser
  Variant (40)..(40): Xaa in position 40 is Asp or Asn
  Variant (43)..(43): Xaa in position 43 is Ala or Cys
  Variant (44)..(44): Xaa in position 44 is Lys or Arg
  Variant (47)..(47): Xaa in position 47 is Gly or Asn
  Variant (49)..(49): Xaa in position 49 is any amino acid
  Variant (50)..(50): Xaa in position 50 is Phe or Leu
  Variant (51)..(51): Xaa in position 51 is Glu, Asn or Thr
  Variant (53)..(53): Xaa in position 53 is any amino acid
  Variant (54)..(54): Xaa in position 54 is Ala, Ser or Thr
  Variant (55)..(55): Xaa in position 55 is Lys or Arg
  Variant (56)..(56): Xaa in position 56 is any amino acid
  Variant (57)..(57): Xaa in position 57 is Asp, Gly, Asn or Thr
  Variant (58)..(58): Xaa in position 58 is Ile or Leu
  Variant (61)..(61): Xaa in position 61 is His or Arg
TGXGXXXXXXXNLXXXFXXXXXXXXDXYXXXXXLXFXLXXQLXXKLXGXXXIXXXXXXGTXY

SEQ ID NO: 125133 - protein, 58 aa, Artificial sequence
  protein pattern
  Variant (2)..(2): Xaa in position 2 is any amino acid
  Variant (3)..(3): Xaa in position 3 is any or no amino acid
  Variant (5)..(5): Xaa in position 5 is Phe or Tyr
  Variant (7)..(7): Xaa in position 7 is any amino acid
  Variant (9)..(9): Xaa in position 9 is Phe or Leu
  Variant (10)..(10): Xaa in position 10 is any amino acid
  Variant (11)..(11): Xaa in position 11 is Ile or Val
  Variant (12)..(12): Xaa in position 12 is Leu or Val
  Variant (13)..(13): Xaa in position 13 is any amino acid
  Variant (14)..(14): Xaa in position 14 is Ile or Leu
  Variant (15)..(15): Xaa in position 15 is Leu, Met or Val
  Variant (16)..(17): Xaa in position 16 to 17 is any amino acid
  Variant (19)..(20): Xaa in position 19 to 20 is any amino acid
  Variant (21)..(21): Xaa in position 21 is Ala, Gly or Val
  Variant (22)..(22): Xaa in position 22 is any amino acid
  Variant (23)..(23): Xaa in position 23 is Asn or Ser
  Variant (24)..(25): Xaa in position 24 to 25 is any amino acid
  Variant (27)..(27): Xaa in position 27 is Ala or Asp
  Variant (28)..(28): Xaa in position 28 is any amino acid
  Variant (30)..(30): Xaa in position 30 is any amino acid
  Variant (31)..(31): Xaa in position 31 is Asp or Glu
  Variant (33)..(33): Xaa in position 33 is any amino acid
  Variant (34)..(34): Xaa in position 34 is His or Tyr
  Variant (35)..(35): Xaa in position 35 is Ala, Gln or Ser
  Variant (36)..(36): Xaa in position 36 is Ile or Leu
  Variant (37)..(37): Xaa in position 37 is Thr or Val
  Variant (38)..(38): Xaa in position 38 is Asp, Asn or Thr
  Variant (40)..(40): Xaa in position 40 is Ala or Thr
  Variant (41)..(41): Xaa in position 41 is any amino acid
  Variant (42)..(42): Xaa in position 42 is Ala or Gly
  Variant (43)..(43): Xaa in position 43 is Ile, Leu or Val
  Variant (44)..(45): Xaa in position 44 to 45 is any amino acid
  Variant (47)..(47): Xaa in position 47 is Ile or Val
  Variant (49)..(49): Xaa in position 49 is Asp, Asn or Thr
  Variant (50)..(50): Xaa in position 50 is Trp or Tyr
  Variant (52)..(52): Xaa in position 52 is Phe or Tyr
  Variant (53)..(53): Xaa in position 53 is any amino acid
  Variant (55)..(55): Xaa in position 55 is any amino acid
IXXRXFXLXXXXXXXXXGXXXXXXXNXXLXXKXXXXXXIXXXXXXRXDXXRXXTXQIY

SEQ ID NO: 125134 - protein, 54 aa, Artificial sequence
  protein pattern
  Variant (2)..(4): Xaa in position 2 to 4 is any amino acid
  Variant (6)..(6): Xaa in position 6 is Leu or Met
  Variant (7)..(7): Xaa in position 7 is Leu or Val
  Variant (9)..(9): Xaa in position 9 is Ile or Val
  Variant (12)..(12): Xaa in position 12 is Ala, Asp, Glu or Asn
  Variant (14)..(14): Xaa in position 14 is Ile or Val
  Variant (15)..(15): Xaa in position 15 is Gln or Arg
  Variant (16)..(16): Xaa in position 16 is any amino acid
  Variant (18)..(18): Xaa in position 18 is Ile or Val
  Variant (19)..(21): Xaa in position 19 to 21 is any amino acid
  Variant (23)..(23): Xaa in position 23 is Glu, Asn or Thr
  Variant (24)..(24): Xaa in position 24 is Gly, Asn or Ser
  Variant (25)..(25): Xaa in position 25 is Phe or Trp
  Variant (28)..(28): Xaa in position 28 is Asn or Thr
  Variant (29)..(31): Xaa in position 29 to 31 is any amino acid
  Variant (32)..(32): Xaa in position 32 is Pro, Ser or Thr
  Variant (36)..(36): Xaa in position 36 is any amino acid
  Variant (37)..(37): Xaa in position 37 is Ile or Pro
  Variant (38)..(38): Xaa in position 38 is Gly, Asn or Ser
  Variant (39)..(39): Xaa in position 39 is Gln or Arg
  Variant (40)..(40): Xaa in position 40 is Asp or Glu
  Variant (41)..(41): Xaa in position 41 is any amino acid
  Variant (43)..(43): Xaa in position 43 is Ile, Leu or Val
  Variant (44)..(44): Xaa in position 44 is any amino acid
  Variant (45)..(45): Xaa in position 45 is Ile or Leu
  Variant (48)..(48): Xaa in position 48 is Asp or Asn
  Variant (50)..(50): Xaa in position 50 is Glu, Gln or Ser
  Variant (51)..(52): Xaa in position 51 to 52 is any amino acid
  Variant (53)..(53): Xaa in position 53 is Ala, Asp or Thr
  Variant (54)..(54): Xaa in position 54 is Ala, Asp or Asn
DXXXVXXDXTSXEXXXIXXXXLXXXGAXXXXXDERXXXXXXDXXXTDXPXXXXX

SEQ ID NO: 125135 - protein, 60 aa, Artificial sequence
  protein pattern
  Variant (2)..(3): Xaa in position 2 to 3 is any amino acid
  Variant (5)..(5): Xaa in position 5 is Asp, Glu or Arg
  Variant (6)..(7): Xaa in position 6 to 7 is any amino acid
  Variant (8)..(8): Xaa in position 8 is Ile or Leu
  Variant (10)..(11): Xaa in position 10 to 11 is Ile or Leu
  Variant (12)..(12): Xaa in position 12 is Asn or Arg
  Variant (13)..(13): Xaa in position 13 is Asp or Glu
  Variant (16)..(16): Xaa in position 16 is Lys or Arg
  Variant (18)..(18): Xaa in position 18 is Ile or Val
  Variant (21)..(21): Xaa in position 21 is Asn or Gln
  Variant (22)..(22): Xaa in position 22 is Lys or Arg
  Variant (25)..(26): Xaa in position 25 to 26 is any amino acid
  Variant (28)..(28): Xaa in position 28 is Gln or Arg
  Variant (30)..(30): Xaa in position 30 is any amino acid
  Variant (32)..(32): Xaa in position 32 is Asp or Glu
  Variant (35)..(36): Xaa in position 35 to 36 is any amino acid
  Variant (37)..(37): Xaa in position 37 is Ala or Gly
  Variant (39)..(40): Xaa in position 39 to 40 is any amino acid
  Variant (41)..(42): Xaa in position 41 to 42 is Phe, Leu or Met
  Variant (43)..(43): Xaa in position 43 is any amino acid
  Variant (45)..(45): Xaa in position 45 is Ile or Leu
  Variant (46)..(47): Xaa in position 46 to 47 is any amino acid
  Variant (48)..(48): Xaa in position 48 is Ala, Glu or Thr
  Variant (49)..(49): Xaa in position 49 is Phe or Leu
  Variant (50)..(50): Xaa in position 50 is any amino acid
  Variant (51)..(51): Xaa in position 51 is Glu or Gln
  Variant (53)..(53): Xaa in position 53 is Ala, Leu or Val
  Variant (54)..(55): Xaa in position 54 to 55 is any amino acid
  Variant (57)..(57): Xaa in position 57 is Ala, Gln or Ser
  Variant (58)..(59): Xaa in position 58 to 59 is any amino acid
  Variant (60)..(60): Xaa in position 60 is Ala, Ile or Val
QXXPXXXXFXXXXQDXEXLVXXKLXXAXRXYXKNXXXRXXXXXNXXXXXXXPXXXLXXXX

SEQ ID NO: 125136 - protein, 60 aa, Artificial sequence
  protein pattern
  Variant (4)..(4): Xaa in position 4 is Glu or Asn
  Variant (5)..(6): Xaa in position 5 to 6 is Leu or Val
  Variant (7)..(7): Xaa in position 7 is Leu or Pro
  Variant (8)..(8): Xaa in position 8 is Asp, Glu or Ser
  Variant (9)..(9): Xaa in position 9 is Leu or Val
  Variant (12)..(12): Xaa in position 12 is any amino acid
  Variant (13)..(13): Xaa in position 13 is Ile or Leu
  Variant (14)..(14): Xaa in position 14 is any amino acid
  Variant (15)..(15): Xaa in position 15 is Gln or Arg
  Variant (19)..(19): Xaa in position 19 is Asn, Gln or Thr
  Variant (21)..(21): Xaa in position 21 is Phe or Leu
  Variant (22)..(25): Xaa in position 22 to 25 is any amino acid
  Variant (26)..(26): Xaa in position 26 is Leu or Val
  Variant (27)..(29): Xaa in position 27 to 29 is any amino acid
  Variant (30)..(30): Xaa in position 30 is Asp or Gln
  Variant (31)..(33): Xaa in position 31 to 33 is any amino acid
  Variant (36)..(38): Xaa in position 36 to 38 is any amino acid
  Variant (40)..(41): Xaa in position 40 to 41 is Lys or Arg
  Variant (42)..(42): Xaa in position 42 is any amino acid
  Variant (44)..(44): Xaa in position 44 is any amino acid
  Variant (47)..(47): Xaa in position 47 is Ile, Leu or Met
  Variant (48)..(48): Xaa in position 48 is Asn or Gln
  Variant (50)..(50): Xaa in position 50 is Ala or Ser
  Variant (51)..(51): Xaa in position 51 is Ile or Val
  Variant (52)..(52): Xaa in position 52 is Thr or Val
  Variant (53)..(53): Xaa in position 53 is Asn, Ser or Thr
  Variant (55)..(55): Xaa in position 55 is Ala, Asp or Gln
  Variant (56)..(56): Xaa in position 56 is any amino acid
LIDXXXXXXLPXXXXKGLXLXXXXXXXXXXXXXGDXXXLXXXLXLLXXYXXXXTXXGKIT

SEQ ID NO: 125137 - protein, 40 aa, Artificial sequence
  protein pattern
  Variant (2)..(5): Xaa in position 2 to 5 is any amino acid
  Variant (7)..(7): Xaa in position 7 is Asp or Glu
  Variant (8)..(8): Xaa in position 8 is Asp, Ser or Thr
  Variant (9)..(9): Xaa in position 9 is Gly or Thr
  Variant (10)..(10): Xaa in position 10 is Phe or Val
  Variant (11)..(12): Xaa in position 11 to 12 is any amino acid
  Variant (13)..(13): Xaa in position 13 is Ile or Leu
  Variant (14)..(14): Xaa in position 14 is Gly or Gln
  Variant (15)..(15): Xaa in position 15 is Asn or Pro
  Variant (16)..(17): Xaa in position 16 to 17 is any amino acid
  Variant (18)..(18): Xaa in position 18 is Ile or Leu
  Variant (19)..(19): Xaa in position 19 is any amino acid
  Variant (20)..(20): Xaa in position 20 is Ala or Val
  Variant (22)..(22): Xaa in position 22 is Phe or Tyr
  Variant (24)..(24): Xaa in position 24 is Ile, Leu or Met
  Variant (26)..(26): Xaa in position 26 is any amino acid
  Variant (27)..(27): Xaa in position 27 is Ala or Leu
  Variant (28)..(28): Xaa in position 28 is Leu, Met or Val
  Variant (29)..(29): Xaa in position 29 is any amino acid
  Variant (30)..(30): Xaa in position 30 is Asp or Glu
  Variant (31)..(31): Xaa in position 31 is Ala or Ser
  Variant (32)..(32): Xaa in position 32 is Ile, Leu or Val
  Variant (34)..(34): Xaa in position 34 is any amino acid
  Variant (38)..(38): Xaa in position 38 is any amino acid
  Variant (39)..(39): Xaa in position 39 is Gln or Arg
  Variant (40)..(40): Xaa in position 40 is Ile or Leu
LXXXXDXXXXXXXXXXXXXXNXNXSXXXXXXXLXLIEXXX

SEQ ID NO: 125138 - protein, 37 aa, Artificial sequence
  protein pattern
  Variant (2)..(12): Xaa in position 2 to 12 is any amino acid
  Variant (13)..(13): Xaa in position 13 is any or no amino acid
  Variant (15)..(15): Xaa in position 15 is any or no amino acid
  Variant (17)..(17): Xaa in position 17 is Gln, Ser or Thr
  Variant (19)..(19): Xaa in position 19 is Ala, Ile or Leu
  Variant (21)..(21): Xaa in position 21 is any amino acid
  Variant (23)..(23): Xaa in position 23 is Ala or Glu
  Variant (24)..(24): Xaa in position 24 is Asp, Asn or Ser
  Variant (25)..(25): Xaa in position 25 is Asp, Gly or Gln
  Variant (26)..(26): Xaa in position 26 is Ala, Glu or Ser
  Variant (28)..(29): Xaa in position 28 to 29 is any amino acid
  Variant (30)..(30): Xaa in position 30 is Glu, His or Lys
  Variant (31)..(31): Xaa in position 31 is Ala, Asn, Gln or Thr
  Variant (32)..(33): Xaa in position 32 to 33 is any amino acid
  Variant (35)..(35): Xaa in position 35 is Glu or Ser
  Variant (36)..(36): Xaa in position 36 is Leu or Val
  Variant (37)..(37): Xaa in position 37 is Gln or Ser
LXXXXXXXXXXXXEXIXLXNXLXXXXWXXXXXXFXXX

SEQ ID NO: 125139 - protein, 34 aa, Artificial sequence
  protein pattern
  Variant (2)..(4): Xaa in position 2 to 4 is any or no amino acid
  Variant (6)..(9): Xaa in position 6 to 9 is any amino acid
  Variant (10)..(10): Xaa in position 10 is any or no amino acid
  Variant (12)..(12): Xaa in position 12 is Phe or Leu
  Variant (13)..(13): Xaa in position 13 is any amino acid
  Variant (14)..(14): Xaa in position 14 is Ile or Val
  Variant (15)..(15): Xaa in position 15 is Gly or Leu
  Variant (17)..(17): Xaa in position 17 is Phe or Leu
  Variant (18)..(19): Xaa in position 18 to 19 is any amino acid
  Variant (20)..(20): Xaa in position 20 is Ala, Leu or Val
  Variant (21)..(21): Xaa in position 21 is any amino acid
  Variant (22)..(22): Xaa in position 22 is Phe or Leu
  Variant (23)..(25): Xaa in position 23 to 25 is any amino acid
  Variant (26)..(26): Xaa in position 26 is Asn or Thr
  Variant (27)..(27): Xaa in position 27 is Phe or Tyr
  Variant (28)..(33): Xaa in position 28 to 33 is any amino acid
  Variant (34)..(34): Xaa in position 34 is Glu, Gly or Ser
NXXXIXXXXXLXXXXLXXXXXXXXXXXXXXXXXX

SEQ ID NO: 125140 - protein, 22 aa, Artificial sequence
  protein pattern
  Variant (3)..(4): Xaa in position 3 to 4 is any or no amino acid
  Variant (6)..(6): Xaa in position 6 is any amino acid
  Variant (7)..(8): Xaa in position 7 to 8 is any or no amino acid
  Variant (10)..(10): Xaa in position 10 is any amino acid
  Variant (11)..(11): Xaa in position 11 is Ala, Pro or Thr
  Variant (14)..(14): Xaa in position 14 is Asp or Glu
  Variant (15)..(15): Xaa in position 15 is Ile, Leu or Val
  Variant (16)..(16): Xaa in position 16 is Ser or Thr
  Variant (18)..(18): Xaa in position 18 is any amino acid
  Variant (20)..(20): Xaa in position 20 is Lys or Arg
  Variant (21)..(21): Xaa in position 21 is Glu or Gly
  Variant (22)..(22): Xaa in position 22 is Asn or Ser
SLXXIXXXTXXLKXXXSXFXXX

SEQ ID NO: 125141 - protein, 20 aa, Artificial sequence
  protein pattern
  Variant (2)..(2): Xaa in position 2 is any amino acid
  Variant (3)..(3): Xaa in position 3 is Leu, Pro or Val
  Variant (4)..(4): Xaa in position 4 is any amino acid
  Variant (7)..(8): Xaa in position 7 to 8 is any amino acid
  Variant (9)..(9): Xaa in position 9 is Ile or Leu
  Variant (10)..(11): Xaa in position 10 to 11 is any amino acid
  Variant (13)..(13): Xaa in position 13 is Asp or Glu
  Variant (14)..(14): Xaa in position 14 is any amino acid
  Variant (15)..(15): Xaa in position 15 is Phe or Tyr
  Variant (16)..(16): Xaa in position 16 is Ile or Val
  Variant (17)..(18): Xaa in position 17 to 18 is any amino acid
DXXXIEXXXXXIXXXXXXLL

SEQ ID NO: 125142 - DNA, 1359 bp, Escherichia coli
  CDS (1)..(1359): transl_table=11
atgatgttgtcaaaatttaagcgtaataaacatcaacaacaccttgcccaactacccaagatttctcaatcagttgatgatgtcgatttcttttacgctcccgccgacttccgggagacgctgctggaaaaaatagccagcgcgaagcagcgcatttgcattgtcgccctgtatctcgaacaggatgacggtggcaaaggcattctgaacgcgttgtatgaggctaaaaggcagcgtccggaactggatgtgcgggtgctggtcgactggcatcgtgcacaacgtggacgcattggcgctgcggcatctaacactaacgctgactggtactgccgcatggcgcaggaaaatccgggcgtagatgttccggtttatggcgttccaatcaatactcgtgaagcccttggtgttctgcactttaaaggctttatcatcgacgatagcgtactttatagcggtgccagcctgaacgatgtttacctgcatcagcacgataaatatcgctacgaccgttatcatctgatccgtaaccgtaagatgtcagacattatgtttgaatgggttacacagaatattatgaatggccgcggcgttaatcgtctggatgatgttaatcggccaaaaagcccggaaatcaagaacgatattcgtctgttccgccaggagctgcgtgatgccgcttatcatttccagggcgatgccgacaacgatcagctttctgtaacgccgctagtggggctggggaaatcgagtctgttgaacaagaccattttccatcttatgccttgtgccgagcagaaactaaccatctgtacgccatacttcaacctgccagcaatccttgtgcgcaatattatccagttgctgcgcgaagggaaaaaggtcgaaattattgttggtgataaaaccgcgaatgacttctacattccggaagatgaacctttcaagataattggcgcattgccttatctctatgagatcaatctgcgtcgtttcctgagccgtttgcagtattacgtcaatactgaccagctagtggttcggttatggaaagatgacgacaacacctatcacctgaaagggatgtgggttgatgataagtggatgttgatcaccggtaataacctgaacccgcgcgcctggcgtctggatctggaaaacgccattttgatccacgatccgcaacttgagctggcgccacagcgagagaaagaactggagctgatccgcgagcataccaccatcgttaagcactatcgcgatctgcaaagtattgccgattatccggtgaaggttcgtaaactcatccgccgtttgcgccgtatccgcatcgaccgattaattagccgcatcctgtaa

SEQ ID NO: 125143 - protein, 452 aa, Escherichia coli
MMLSKFKRNKHQQHLAQLPKISQSVDDVDFFYAPADFRETLLEKIASAKQRICIVALYLEQDDGGKGILNALYEAKRQRPELDVRVLVDWHRAQRGRIGAAASNTNADWYCRMAQENPGVDVPVYGVPINTREALGVLHFKGFIIDDSVLYSGASLNDVYLHQHDKYRYDRYHLIRNRKMSDIMFEWVTQNIMNGRGVNRLDDVNRPKSPEIKNDIRLFRQELRDAAYHFQGDADNDQLSVTPLVGLGKSSLLNKTIFHLMPCAEQKLTICTPYFNLPAILVRNIIQLLREGKKVEIIVGDKTANDFYIPEDEPFKIIGALPYLYEINLRRFLSRLQYYVNTDQLVVRLWKDDDNTYHLKGMWVDDKWMLITGNNLNPRAWRLDLENAILIHDPQLELAPQREKELELIREHTTIVKHYRDLQSIADYPVKVRKLIRRLRRIRIDRLISRIL

SEQ ID NO: 125144 - DNA, 1341 bp, Vibrio cholerae O1 biovar eltor str. N16961
  CDS (1)..(1341): transl_table=11
atgattgctcgaagaaacccaatcgaacaactaccagcgattgcgcaagatcctgacaaatttggcgtactgctctcggctgcagaatttcgaactcatttggttgaatcgattcgtcaggcacgcaaacgtatctacctcgttgcactttatttagaaaatgacgatgctggccgtgaaattcttactgaactctatgccgccaagcagcgtaacccaggactcgaaatacatatttgtgttgactggcaccgtgctcagcgtggcttgatcggtgcagcagaatccgaaggcaatgcagccatgtatcgtgactttgctcagcaacatgagcactgtattcctgtttatggcataccggttagagggcgggaagtctttggcgttctgcatctaaaaggcttcattattgatgatcaagtcatctacagcggtgcgagcctcaataatgtctatctccagtttcatggccgctatcgttttgatcgctaccataccttagaaaatgctgaacttgccgacagcatggtgcattttatccaacaagaaatgctggctcacccggctgtcaataacctcgcttgtggtagcaaacccaccacaaaagagattaagtctgatatccgccaattccgagcttcacttgctcaagccaattaccaatttgctaaacagaaagtgaatgaaggtcaagtcgctgtcacacccttggttggactcggtcgacgcagaaatcggttgaaccaaagcattatccaattgttagcctctgctaaagatgaagtgtttatctgcacgccatactttaatttcccgccgagtatcgctaaagaggtgaaaaaagcactgcgacgtggcgtgaaagtccatattgtgattggcgataaaaccgcgaatgacttctacattgcaccagaagagccattcaagactatcggtggcttaccttacttgtatgaacttaatctgcgccgctttgcgaaagccaatgaagctcatattgcaagccgcaagctctcaatccacctctggaagcatgaaaatcacagctttcatctcaagggaatttgggtggataaacgttatatgctcatcacaggtaataacctcaatccacgcgcttggaagctcgacctcgaaaatgcaattttaattcgtgatgattaccatcaccttactaccaaatttgaagctgaaattgacaatattctgcagcatactcagttaatctgtacttataagcaaattgaaaaacccgagcactacccagaaaaggtacaacgcttagtacgccgaatcatgcgtctaaaagccgatcgtgtcctcaaacaaatcttataa

SEQ ID NO: 125145 - protein, 446 aa, Vibrio cholerae O1 biovar eltor str. N16961
MIARRNPIEQLPAIAQDPDKFGVLLSAAEFRTHLVESIRQARKRIYLVALYLENDDAGREILTELYAAKQRNPGLEIHICVDWHRAQRGLIGAAESEGNAAMYRDFAQQHEHCIPVYGIPVRGREVFGVLHLKGFIIDDQVIYSGASLNNVYLQFHGRYRFDRYHTLENAELADSMVHFIQQEMLAHPAVNNLACGSKPTTKEIKSDIRQFRASLAQANYQFAKQKVNEGQVAVTPLVGLGRRRNRLNQSIIQLLASAKDEVFICTPYFNFPPSIAKEVKKALRRGVKVHIVIGDKTANDFYIAPEEPFKTIGGLPYLYELNLRRFAKANEAHIASRKLSIHLWKHENHSFHLKGIWVDKRYMLITGNNLNPRAWKLDLENAILIRDDYHHLTTKFEAEIDNILQHTQLICTYKQIEKPEHYPEKVQRLVRRIMRLKADRVLKQIL

SEQ ID NO: 125146 - DNA, 1377 bp, Pasteurella multocida subsp. multocida str. Pm70
  CDS (1)..(1377): transl_table=11
atgctgataaacaaaaccaaacgagcaaaacaaaatatcaatcgtttattctgtttacccttacaagctgaacacgttgaatttatttatagcgctgccgcattcaaacagcaaacccttcagctcattaaacaagcaaaatcacgcatttatgtgaccgcactttattggcaacatgacgaagcgggtcaagaaattttagatgaaatctaccgtgccaaacaaaacaacccgtcattagaaatcaagattttaattgactggcaccgtgcacaacgcaatttactgggtgcggaaaaaagtatgactaatgctgactggtattgtgaacaacgtgcgaaatatcaagcagagcaagattcacctctcttttttggggtgccagtgaacactcgagaagtctttggtgtgttacatattaaaggctttgtgtttgatgatacggtcttatacagcggtgcaagcattaacaatgtttacttaaatcaatttaataaataccgttacgatcgctaccataaaatcacgcatcctgaattagccaacagcatggtgaactttatcaacgactatttgttggatccgttagctgttcacccattagatcagaacactcgtccaacaaccaaagaaatacgccccgcgattaaagaatttcgtaaaacactcgcttttgatgcccgttatacgttaaaaggcgcgcgtttcttggaggaaacacctgaacaactcagtatttctgcgctttttggcttgagtaaatacagtaaccaattaaaccaagtgatcgaggatctcttccaaattgtggaagaggaattagtgatttgtaccccttattttaattttccgcgtacgctacaacaaaaaatccgccgcttgctgaataaagggaaaaaagtggaaattattgtcggtgacaaaactgcaaatgacttctatatcccgccttcagaaccctttaaaatggcgggtgccttgccttatctatacgaaagcaatttacgccgttttagcaaaaagtttgaatatgagattaaccaaggtttgttagtgattcggacttggaaagatggggataattcataccacttgaaaggggtttgggtcgataacaattatgtgctcctcactggcaataatctaaatcctcgagcatggcgcttggatgcggagaatggtttatttatctacgatccaaaacaagagctacgcgcacaatttgaacaagaactggattacattcgccaacatacgcaagtgttgcgccattattctgaacttgacgaaatgaaacagtatccggcccccgtacaaaagttattgaaaaaatttgcccgtgtaaaagcggataagctcgtgaagatgatcttataa

SEQ ID NO: 125147 - protein, 458 aa, Pasteurella multocida subsp. multocida str. Pm70
MLINKTKRAKQNINRLFCLPLQAEHVEFIYSAAAFKQQTLQLIKQAKSRIYVTALYWQHDEAGQEILDEIYRAKQNNPSLEIKILIDWHRAQRNLLGAEKSMTNADWYCEQRAKYQAEQDSPLFFGVPVNTREVFGVLHIKGFVFDDTVLYSGASINNVYLNQFNKYRYDRYHKITHPELANSMVNFINDYLLDPLAVHPLDQNTRPTTKEIRPAIKEFRKTLAFDARYTLKGARFLEETPEQLSISALFGLSKYSNQLNQVIEDLFQIVEEELVICTPYFNFPRTLQQKIRRLLNKGKKVEIIVGDKTANDFYIPPSEPFKMAGALPYLYESNLRRFSKKFEYEINQGLLVIRTWKDGDNSYHLKGVWVDNNYVLLTGNNLNPRAWRLDAENGLFIYDPKQELRAQFEQELDYIRQHTQVLRHYSELDEMKQYPAPVQKLLKKFARVKADKLVKMIL

SEQ ID NO: 125148 - DNA, 1359 bp, Yersinia pestis CO92
  CDS (1)..(1359): transl_table=11
gtgatgttgtcaaaattcaaacgtagcaaacatcaacaacaccttgcacaactgcccaaactcccccagtcagttgatgatgtccaaacgctttattgccccaaggttttccgctctactctgttggaactcatcgctcaggcaaccaaacgtatttttctggtggcactttatctggagcaggatgacgcaggccgtgatgtaatgaatgccctctatcaggccaagcagtcgcatcctgaactggagatctatgtactggtagattggcaccgggctcagcgtggccgtattggtgcggcagccgtcaatactaatgccgattggtattgcgatatggcggctaaacatccaaatatttctgttcctgtttacggtgtcccggtcaatacgcgtgaagcattgggtgtactgcacctaaaaggctttatcattgacgacaccgttatttatagcggtgccagcatcaatgatgtctatctctatcagaatgataaatatcgttatgatcgctaccagctaatcactaatccgtcactcgctaccattatggttgattacgtgaaacaacggatactgagtgccggagcagttcaacgccttgaccgtaatgaccgacctaccacccccgagatcaagaatgagacccgccagtttcgctcatcactgcgtgatgccagttaccaattctcggcacaagcgcataacgatgagttagcggtcactcctctggttgggttaggtaagaagagtttactaaacaaaacgattcatcacttaatggcctccgctgatgaacgcctgaccatttgcaccccctactttaacctgcccgcgctgttagtccgtaatattatttatctgctgcgggaaggtaagcaggttgagattatcgttggtgataaaaccgcaaatgacttttatatccctgaagatcaaccctttaaaattatcggtgcactgccgtatttatacgaaatcaacctgcgtcgtttcctgagccgcttacaaccgtatgttgataacgggcagctcattgctcgcttatggaaagatggcgacaacacctatcatttgaaagggatgtgggtagataacaattggcagttgatcacgggcaataacctaaacccgcgcgcatggcgcttggatttggagaatgccattttgatccacgatcctaagcatgaaatgcatgaacagcgggccaaagaactggagtgtatccgcactcataccaaagtggtttcacactaccttgaactggagaatatccaacaatatccggttaaagttcgcaaacttatccgccgtttgcgcaggatccgcattgatcggttaattagccgtattctataa

SEQ ID NO: 125149 - protein, 452 aa, Yersinia pestis CO92
MMLSKFKRSKHQQHLAQLPKLPQSVDDVQTLYCPKVFRSTLLELIAQATKRIFLVALYLEQDDAGRDVMNALYQAKQSHPELEIYVLVDWHRAQRGRIGAAAVNTNADWYCDMAAKHPNISVPVYGVPVNTREALGVLHLKGFIIDDTVIYSGASINDVYLYQNDKYRYDRYQLITNPSLATIMVDYVKQRILSAGAVQRLDRNDRPTTPEIKNETRQFRSSLRDASYQFSAQAHNDELAVTPLVGLGKKSLLNKTIHHLMASADERLTICTPYFNLPALLVRNIIYLLREGKQVEIIVGDKTANDFYIPEDQPFKIIGALPYLYEINLRRFLSRLQPYVDNGQLIARLWKDGDNTYHLKGMWVDNNWQLITGNNLNPRAWRLDLENAILIHDPKHEMHEQRAKELECIRTHTKVVSHYLELENIQQYPVKVRKLIRRLRRIRIDRLISRIL

SEQ ID NO: 125150 - DNA, 1314 bp, Shewanella oneidensis MR-1
  CDS (1)..(1314): transl_table=11
ttgctagataagcttggtggaatagccgttcaacccgaggctttaacgtggttgcttacgccatgccgatttaaggcagagttactcactcgcatcgaaaatgccaagaccagcatctatatcgctgcactctatttagaagatgatgaagcagggcgagagattttacaggtattgatgacggcgaaggctaataatcctgcgttggatatcaaagtgttggttgattttcaccgtgcgagacgcggcttgatcggccataagggtgatagcggtaattatttgatgtaccgcaaagtcatggctgaggcgaagcatcccatagagattatgggggtgccagtcaagtcacgtgaatttatgggcgtattgcaccttaaaggctttgtgattgatgatgctgtgatttacagcggcgcaagtcttaataacatctatctacagcaaaacgataaataccgttttgaccgctaccatgtgattgagtcggcagagcttgcgcgcagcatgcgggcaatgatccagcgttatatcattgccgatccggctgtcacatcgctcactcaagatgcgcagcaggaagtgttaccgcctaaaacggatgtacgcagctttaaattacgcctgtctcaggcgcagtacgagtttaacgagactcgcagtggcaatcgtgtgacgccattacttgggctaggccgtaaacataacctattgaataaaacggttattgccatggttgaggagtcaaaagataggctgtttatttgcacgccttacttcaatcctccgtatattttggtccgtgccttagctaaacatctgcgcaaaggcaaacggattgatattgtcgtcggggataaaacggcgaatgacttttatattccgcctgagcaagatttctccaccatcggtgccttgccttatttgtatgaacaatcgctgcgtaagtttgcgaaacgtcagcagtgggcgattgataatggtcagctcaatattcacctgtggaagcatgggatcaacagttatcaccttaagggcatcagtaccgatggtcgtaaacatttgatcacaggctcgaatctaaacccaagagcatgggcattggatcttgagaatggcatactgatccacgatgaaacgggtagctggaaggcgcaatttgaggccgagcaagcccatatccttgagcatacacagaggttatatcactacagtcaagtagataccttgcaaagttatcccgatcccgtgaagaagattatgaatcggattagaaggttaaaagcagactttttgctaagacgtatcctgtaa

SEQ ID NO: 125151 - protein, 437 aa, Shewanella oneidensis MR-1
MLDKLGGIAVQPEALTWLLTPCRFKAELLTRIENAKTSIYIAALYLEDDEAGREILQVLMTAKANNPALDIKVLVDFHRARRGLIGHKGDSGNYLMYRKVMAEAKHPIEIMGVPVKSREFMGVLHLKGFVIDDAVIYSGASLNNIYLQQNDKYRFDRYHVIESAELARSMRAMIQRYIIADPAVTSLTQDAQQEVLPPKTDVRSFKLRLSQAQYEFNETRSGNRVTPLLGLGRKHNLLNKTVIAMVEESKDRLFICTPYFNPPYILVRALAKHLRKGKRIDIVVGDKTANDFYIPPEQDFSTIGALPYLYEQSLRKFAKRQQWAIDNGQLNIHLWKHGINSYHLKGISTDGRKHLITGSNLNPRAWALDLENGILIHDETGSWKAQFEAEQAHILEHTQRLYHYSQVDTLQSYPDPVKKIMNRIRRLKADFLLRRIL

SEQ ID NO: 125152 - DNA, 1329 bp, Pseudomonas putida KT2440
  CDS (1)..(1329): transl_table=11
gtgaaccccgaaaccatgctggcgggcttgccaggctacgccatggcccccgaagcgatccaggtgctgcccgatgccagggcttaccgcgcctgcctgttcgagcgcatccgtgcggcgactcggcgcatcgttatcgtcgcgttgtacctgcaggaggatgaggctggccaggaagtcctggatgccttgtaccaggccaaggccgagcggccaggcctggagatcaccatcgtggtcgactggttccgcgccaggcgcgggctgctgggggccgggcgtcagccgggcaatgccgcctggtatcaggcccagcgccagttgcgcgggctggacatcgcgattcatggcgtgccagtgcagacccgcgaactgttcggggtgctgcacctcaaaggcagcatcatcgacgattgcgtgatctacaccggcgccagtctgaacaacgtctacctgcatcgtttcgaccgctatcgcctggatcgctaccacctgttccagtcaccggcactggctgatgccatggtcggcctggttcagcgtttgctgcaccataccgccacaccgcgcctcgacctgccggcgccaccttctacccgcagtttgcgcggtgacattcggcgtttgcgcgcacggctgcggcgcatggcctacgaggtaccggccagcgtgacggggcagggcctgcaggtgatcccgctgctgggtgtgggccgtggcaatccactgaaccgggcgctgtgcgccttgctggcagtggcgcgcacgcagatcatcatcagtacgccgtatttcaacccgccgcaggtcgtgatgcgcgaacttgaccatgccctggcgcggggggttggggtggagctgattgtcggtgaccgcaccgccaacgacttctacattgcccctggcgaaccgttcagtgccagtggtgcattgccctatctgtacgaggacaacctgcgcgccttcgcccaccgccgccacgccgcgattgccagcggccagttgcaagtacgcatctggaacgatcccgggcataccttccatgccaagggcgtttggatcgaccagcgttattcgctgctgaccggcaacaacctcaacccgcgcgggttcaacctggacctggagaacggcctgctgatcgacgacccgcaggggcaatggctggcgccacgggaagcggagttgagcgaactacggctctttgcgccgagaatcggttcggcagaggcgctgggggagaaggccgaacatcccaagcaagtgcgcaagtttctgcgtcggttgcgctatagccggttggagccgttgatcaagcgggtgctctga

SEQ ID NO: 125153 - protein, 442 aa, Pseudomonas putida KT2440
MNPETMLAGLPGYAMAPEAIQVLPDARAYRACLFERIRAATRRIVIVALYLQEDEAGQEVLDALYQAKAERPGLEITIVVDWFRARRGLLGAGRQPGNAAWYQAQRQLRGLDIAIHGVPVQTRELFGVLHLKGSIIDDCVIYTGASLNNVYLHRFDRYRLDRYHLFQSPALADAMVGLVQRLLHHTATPRLDLPAPPSTRSLRGDIRRLRARLRRMAYEVPASVTGQGLQVIPLLGVGRGNPLNRALCALLAVARTQIIISTPYFNPPQVVMRELDHALARGVGVELIVGDRTANDFYIAPGEPFSASGALPYLYEDNLRAFAHRRHAAIASGQLQVRIWNDPGHTFHAKGVWIDQRYSLLTGNNLNPRGFNLDLENGLLIDDPQGQWLAPREAELSELRLFAPRIGSAEALGEKAEHPKQVRKFLRRLRYSRLEPLIKRVL

SEQ ID NO: 125154 - DNA, 1359 bp, Escherichia coli CFT073
  CDS (1)..(1359): transl_table=11
gtgatgttgtcaaaatttaagcgtaataaacatcaacaacaccttgcccaactacccaagatttctcaatcagttgatgatgtcgatttcttttacgctcccgccgacttccgggagacgctgctggaaaaaatagccagcgcgaagcagcgcatttgcattgtcgccctgtatctcgaacaggatgacggtggcaaaggcattctgaacgcgttgtatgaggctaaaaggcagcgtccggaactggatgtgcgggtgctggtcgactggcatcgtgcacaacgtggacgcattggcgctgcggcatctaacactaacgctgactggtactgccgcatggcgcaggaaaatccgggcgtagatgttccggtttatggcgttccaatcaatacccgtgaagcccttggtgttctgcactttaaaggctttatcatcgacgatagcgtactttatagcggtgccagcctgaacgatgtttacctgcatcagcacgataaatatcgctacgaccgttatcatctgatccgtaaccgtaagatgtcagacattatgtttgaatgggttacacagaatattatgaatggccgcggcgttaatcgtctggatgatgttaatcggccaaaaagcccggaaatcaagaacgatattcgtctgttccgccaggagctgcgtgatgccgcttatcatttccagggcgatgccgacaacgatcagctttccgtaacgccgctagtggggctggggaaatcgagtctgttgaacaagactattttccatcttatgccttgtgccgagcagaaactaaccatctgcacaccttacttcaacctaccagcaatccttgtgcgcaatattatccagttgctgcgcgaagggaaaaaggtcgaaattattgttggtgataaaaccgcgaatgacttctacattccggaagatgaacctttcaagataattggcgcattgccttatctctatgagatcaatctgcgtcgtttcctgagtcgtttacagtattacgtcaacactgaccagttagtagttcggttatggaaagatgacgacaacacctatcacctgaaagggatgtgggttgatgataagtggatgttgatcaccggtaataacctgaacccgcgcgcctggcgtctggatctggaaaacgccattttgatccacgatccgcaactggagcttgcgccacagcgagagaaagaactggatctgatccgcgagcataccaccatcgttaagcactaccgcgatctgcaaagtattgccgattatccggtgaaggttcgtaaactcatccgccgtttgcgccgtatccgcatcgaccgattaattagccgcatcctgtaa

SEQ ID NO: 125155 - protein, 452 aa, Escherichia coli CFT073
MMLSKFKRNKHQQHLAQLPKISQSVDDVDFFYAPADFRETLLEKIASAKQRICIVALYLEQDDGGKGILNALYEAKRQRPELDVRVLVDWHRAQRGRIGAAASNTNADWYCRMAQENPGVDVPVYGVPINTREALGVLHFKGFIIDDSVLYSGASLNDVYLHQHDKYRYDRYHLIRNRKMSDIMFEWVTQNIMNGRGVNRLDDVNRPKSPEIKNDIRLFRQELRDAAYHFQGDADNDQLSVTPLVGLGKSSLLNKTIFHLMPCAEQKLTICTPYFNLPAILVRNIIQLLREGKKVEIIVGDKTANDFYIPEDEPFKIIGALPYLYEINLRRFLSRLQYYVNTDQLVVRLWKDDDNTYHLKGMWVDDKWMLITGNNLNPRAWRLDLENAILIHDPQLELAPQREKELDLIREHTTIVKHYRDLQSIADYPVKVRKLIRRLRRIRIDRLISRIL

SEQ ID NO: 125156 - DNA, 1344 bp, Pseudomonas syringae pv. tomato str. DC3000
  CDS (1)..(1344): transl_table=11
atgcagtccactttccgacgctcgaccctggcagcgcttcgcggttttgccttgccgagtgatgcaatctccattgttccttctgccgccgactaccggcgctgcctgctggagaagatcgcttcggccacgcggcgcatctatatcatcgcgttgtacctgcaacaggatgaagccggccaggaaatcctcgacgcgctgtacgccgccaaggctgcacggcccgagctggacgtggtggtgctggtcgactggtttcgcgcccagcgcggcctgatcggtgccggtcggcaaccgggcaactcgacctggtatcaggcacagaaccttgaatacgacgaagaagtgccgatctacggcgtgccggtgcagacccgcgagctgttcggcgtgctgcacctcaagggcagcgtgatcgatgactgcgtgatctacagcggcgcgagcatcaacaacgtctacctgcacaagctcgacaaataccggctggaccgttatcacctgatcgaaagcgcgccgctggccgactctttcgagcacctggtgcagcgggaaatactgccatcagcggccgtgcaccgcctggacctgcaatcgccaccgagctctcgcagcctgcgcagcgaaatccgcgcctttcgcagtgatttgaagcgcgccacgtacgacacgtcggcaggcgacaaggaaaacggccagttgcgggtgattccgctgctgggtgtggggccgcgcaacagcctcaaccgcgcgatctgcgacctgatcgcctccagcaagatccagctgaccatctgcacaccgtatttcaacctgcccgtagcggttacccgcgaggtcaatcgggcgctcaagcgcggcgtaaaggtcgatatcatcattggcgacaagaccgccaacgatttcttcattgacccggacgagccgttcaaagtgatttcggccctgccctatctgtacgaaatcagcctgcgacgctttgcccacaagcaccagaaggccatcgcccagcagcgtctgaacgtgcacttgtggaagcacggcgacaacaccttccacctcaaggggatctgggtcgatcagcgttataccttgctgaccggcaacaacctgaaccctcgggcgttcaacctcgacctggaaaacggcttgctgatcgatgatccgcaaggccagtggaccgacccgcgtgaagcggaaatcgcccaattgatgcgcaacacacaacgcgtcaaccagtacgacgagctcgacacgctggccaattatcctgaaggagtgcgcaagttcctcaagcgggtcagccgggtcagggtcgagcgtttgctctaccgcattctctga

SEQ ID NO: 125157 - protein, 447 aa, Pseudomonas syringae pv. tomato str. DC3000
MQSTFRRSTLAALRGFALPSDAISIVPSAADYRRCLLEKIASATRRIYIIALYLQQDEAGQEILDALYAAKAARPELDVVVLVDWFRAQRGLIGAGRQPGNSTWYQAQNLEYDEEVPIYGVPVQTRELFGVLHLKGSVIDDCVIYSGASINNVYLHKLDKYRLDRYHLIESAPLADSFEHLVQREILPSAAVHRLDLQSPPSSRSLRSEIRAFRSDLKRATYDTSAGDKENGQLRVIPLLGVGPRNSLNRAICDLIASSKIQLTICTPYFNLPVAVTREVNRALKRGVKVDIIIGDKTANDFFIDPDEPFKVISALPYLYEISLRRFAHKHQKAIAQQRLNVHLWKHGDNTFHLKGIWVDQRYTLLTGNNLNPRAFNLDLENGLLIDDPQGQWTDPREAEIAQLMRNTQRVNQYDELDTLANYPEGVRKFLKRVSRVRVERLLYRIL

SEQ ID NO: 125158 - DNA, 1341 bp, Vibrio parahaemolyticus RIMD 2210633
  CDS (1)..(1341): transl_table=11
atgatagtaaataggaatccattcgagcagttgcctagtctcgcaatcaatcctgaagactttgatgttctgtactctgcagaaacatttcgaactcgtcttttagatgcgatcagcaaagcaacgtcacgaatctacctagtcgctctatatctggaagatgatgaagctgggcgtgaaatactcactgcactttacgaagcaaagcagcgtaatccaggattagacattaatatctgtgttgactggcaccgagcacaacgtggccttattggtgcagaaacatcagaaggcaactcagcgctttataaagcgtttgctgaccaataccaacatgccatccctgtttatggtatccccgttcgcggtcgagaagtatttggtgtacttcatttaaaaggcttcgtcgtcgacgataccgtgatttacagtggcgctagccttaataacgtttatttacagtaccatggtcgctatcgatttgatcgctaccatgttattaagcacaagtcccttgcagatacgatggtgaacttcgttcaaaatgaaatgattgctcaccctgcagtaaacgacttggccgatcgagataagccagaaaccaaagaaattaaatcggcaattcgccaacttcgctcttctcttgctcaagccaactatcaatttgcccatgaggcagcggcggaagataaagtaaagatcacaccacttgttggtcttggtaagcgtcgaaacttactaaaccagcaaatagtcaagctactagcagcagcacaaaacgaaattttcatttgtacgccatattttaacttccctaaatcaattcaccgggaagtaaaacgtgcgatgaaacgtggagtaaaagtaacgatcgtggtaggagataaaaccgcgaacgatttctatatctctccagaagaagatttcaaaaccattggtggtcttccttacctttacgaggtaaatctgcgccgctttgccaaagcaaatgaggcgaacattgcagctcgtaagctttcagtgcacttatggaagcatgaaaacaacagcttccacctaaaaggtatctgggttgataaacgatacatgctgcttacaggtaacaacttaaatccgcgtgcttggtctctcgatcttgaaaatggtttattgattcaagatgactacgcaaaccttactcataagtttgaagatgaagtagcccgaatccttgaacatacgcagctaatctgcacttacaaacagttggaaaaagtcgaagattacccgcttgctgtacaaaaactcgtgagaaaaatcactcgcttaaaagctgacggtgttttaaagcgtatcctttaa

SEQ ID NO: 125159 - protein, 446 aa, Vibrio parahaemolyticus RIMD 2210633
MIVNRNPFEQLPSLAINPEDFDVLYSAETFRTRLLDAISKATSRIYLVALYLEDDEAGREILTALYEAKQRNPGLDINICVDWHRAQRGLIGAETSEGNSALYKAFADQYQHAIPVYGIPVRGREVFGVLHLKGFVVDDTVIYSGASLNNVYLQYHGRYRFDRYHVIKHKSLADTMVNFVQNEMIAHPAVNDLADRDKPETKEIKSAIRQLRSSLAQANYQFAHEAAAEDKVKITPLVGLGKRRNLLNQQIVKLLAAAQNEIFICTPYFNFPKSIHREVKRAMKRGVKVTIVVGDKTANDFYISPEEDFKTIGGLPYLYEVNLRRFAKANEANIAARKLSVHLWKHENNSFHLKGIWVDKRYMLLTGNNLNPRAWSLDLENGLLIQDDYANLTHKFEDEVARILEHTQLICTYKQLEKVEDYPLAVQKLVRKITRLKADGVLKRIL

SEQ ID NO: 125160 - DNA, 1368 bp, Wigglesworthia glossinidia endosymbiont of Glossina brevipalpis
  CDS (1)..(1368): transl_table=11
atggtaattaaatttaattttgatcaagaaaaatgcagaaaatatttaattaaattgcctaaaataaatcaaaatcctgaacaaataataacaatatataatccaaaagatttttttgataggcttataaaaagtatatctaaagcaaaaaaatttatttatttagtagctttatatttagaaaaagaccaaagtggaaataaattattaaaagaaatatataaagcaaaaaataaaaatcctaatttagaagtaacaattatagtagatttaaatagatctaaaagaagatcatttggagaagataaaggattaacaaattctgattggtatttaaaaatagctaaaacttataaacatattaatgttccaatatatggaattccattgagcattaatgaggccctaggagttttgcatttaaaaggttttataatagatgatcatgtattttatagtggagctagcattaataatgcatatttaaataaatttattcaatacagatatgacagatatcatataatttataatagattattagcaaattcaatgttaaattttataaaaactaaattgttagcaaaacaatcagttagactgaatactatatattctataataaataaaaaaaattttttcataaatagaaattcaagagctataaggaagaatttaaaatctagtaaatatatttatataagtgaaaattgtaataataaattatctatcactccaatattagggcttggaaaaaaaagtttattaaactcagtaattcataatttagtatgttctacatattctaaaatgattttatgcactccatattttaatttgttttctttgttgattaaagatatatcaaatattttgaaaataaataaaagtgtagaaataatagtaggagataaaatttctaatgatttttatattccagataatattaaatttaatattactggaattattccttatttatatgaaataaatttaaggcgctttatgaaaaaaaatcaaaaatatatagataatggaaatttaacaataaaaatatggaaaaataacaataatagttttcatataaaaggaatatggatagataaaaaatggattcttttaactggaaataattttaattctagatcttggtatttagacttagagaatgcaattttaattcatgatccaaaacaagaaataaaaaaccaatttgacaaagaattgatcaaaataaacaagcatactacttgtattaagcattttaaagaagttgaaaatatttccaattatccgagcaaaattagaaaaattatacgtaatataaacatagtgcaaatagatcgtttgattaaaaaaattttataa

SEQ ID NO: 125161 - protein, 455 aa, Wigglesworthia glossinidia endosymbiont of Glossina brevipalpis
MVIKFNFDQEKCRKYLIKLPKINQNPEQIITIYNPKDFFDRLIKSISKAKKFIYLVALYLEKDQSGNKLLKEIYKAKNKNPNLEVTIIVDLNRSKRRSFGEDKGLTNSDWYLKIAKTYKHINVPIYGIPLSINEALGVLHLKGFIIDDHVFYSGASINNAYLNKFIQYRYDRYHIIYNRLLANSMLNFIKTKLLAKQSVRLNTIYSIINKKNFFINRNSRAIRKNLKSSKYIYISENCNNKLSITPILGLGKKSLLNSVIHNLVCSTYSKMILCTPYFNLFSLLIKDISNILKINKSVEIIVGDKISNDFYIPDNIKFNITGIIPYLYEINLRRFMKKNQKYIDNGNLTIKIWKNNNNSFHIKGIWIDKKWILLTGNNFNSRSWYLDLENAILIHDPKQEIKNQFDKELIKINKHTTCIKHFKEVENISNYPSKIRKIIRNINIVQIDRLIKKIL

SEQ ID NO: 125162 - DNA, 1365 bp, Haemophilus ducreyi 35000HP
  CDS (1)..(1365): transl_table=11
atgcttattataaataaacttaaccatgctcaaaaacagctagagaaactcaactttatccctcagcaagcagacaaagttgatttcctagcaagtagtagcgagtttaaagcacgcattttacagcttatcaacaccgcaaaatctcgcatttatttgaccgctttatactttgaacaagatgaagcaggtcaacaaattttagcggcattatatcaagcaaaattagctaaccctgcattagatatccaaattttagtagattggcaccgagcacaaagagggcgtattggtgaaaaaaccacgtcctcaaacgctgattggtacgcgaatatgaaacagcaatataatcttccgcccgaacaagagattgctgtttggggcgttccaattaatggcagagaaatctttggtgtactccatttaaaaggttttatctttgacgataccattctatatagcggtgctagcattaataacgtctatttacaacaattcgaccgctaccgttacgatcgctatcatacccttgaaaataaagtattagctgacagcttagtcacctttttacagcaacatattttgactgatcacgccgttaatcggttggataatatgcaacgacctgtaacggcgaatattcgtcccgccattaaagcgttccgtaaacaattaactaaacaacaatatcaatttgctgaacagccagaaagtaacggattaatgctttcgcctattgcagggcttggacgtaaaaatcaattaaacaaaaccattgaagcgttattctataaaacacaaaacaagctcacaatttgtacaccatatttcaattttccacgttcattaatcactcggataaaatggttgctcgaaaatggaaaacaagtggaaattattgcgggtgataaaaaagcgaatgatttttacacgccaccagacaaaaaatttactatggcggcggcattgccttacctatatgaaaaaaatctaagggcgtttgcaaagcgttttgacagttacatacagaataaactattgactatacgtttatggaaagatggtgaaaatacttaccatctaaaaggattatgggtagataaccgctatattttattgactggtaataatttaaaccctcgtgcgtggggcttagatgctgagaatggaattttacttgatgatccaaaagcagagttagctgaaaaagctgcccttgaattaacacaaatccgtacatttactcaagagcttagccattatagcgacttagaaacgattaaagattatccgcttgaagttcaaaaattattaaaaaaatttggtcgagtcaaattagataaaatcatcaaaatgttattgtaa

SEQ ID NO: 125163 - protein, 454 aa, Haemophilus ducreyi 35000HP
MLIINKLNHAQKQLEKLNFIPQQADKVDFLASSSEFKARILQLINTAKSRIYLTALYFEQDEAGQQILAALYQAKLANPALDIQILVDWHRAQRGRIGEKTTSSNADWYANMKQQYNLPPEQEIAVWGVPINGREIFGVLHLKGFIFDDTILYSGASINNVYLQQFDRYRYDRYHTLENKVLADSLVTFLQQHILTDHAVNRLDNMQRPVTANIRPAIKAFRKQLTKQQYQFAEQPESNGLMLSPIAGLGRKNQLNKTIEALFYKTQNKLTICTPYFNFPRSLITRIKWLLENGKQVEIIAGDKKANDFYTPPDKKFTMAAALPYLYEKNLRAFAKRFDSYIQNKLLTIRLWKDGENTYHLKGLWVDNRYILLTGNNLNPRAWGLDAENGILLDDPKAELAEKAALELTQIRTFTQELSHYSDLETIKDYPLEVQKLLKKFGRVKLDKIIKMLL

SEQ ID NO: 125164 - DNA, 1386 bp, Candidatus Blochmannia floridanus
  CDS (1)..(1386): transl_table=11
gtgctttacaatatcaaaaaaacatataataaccattttctctataataaacataatacatttctaacagaacttccaaaaattactcaaaaatcttcagattttaaaatcttaaacagcccaaaagaatttaactatgttttattaaatactatttcacaagctcataaacatatttgcctagtcacattatatttagagaatgatccaggaggaaaaaaaatacttgacacgatattagaagtaaaaaaaaatcgacctacaataaaaattaatattatcgtagattggtatcgagcccaacgaactagattcggagaatcaataaaatatactaatatacattggtataataatatcattcaaaacaaccctaatatcgaattatctatatttggattaccaattcattttagtgaaatattaggagttttacatttaaaaggattcattatcgatgatactatactatatagtggagctaacttaaataacgaatatctacatataaacgataaataccgatatgatagatattactttattaaaaatgcacaactatctgcaatcatgttaaattacatcgaaaaaaatttaattaactcaaaagtaatacataacttagattataaaaaatcttttctcaaaaaaaacaacaaaaataatattagattatttcgaaaatttctaaaaagaaccacatacacttatcaaaataatgcaaattttaatgaatgctcaattattccattagttggtttaggtaaaaatagtattcttaacaaaactatttatcatttaatatcatccgtaaaacaaaacatgatactatgcacaccttatttcaacataccttattcattaaatcgtgttttatattctttattacaacaaggaaaaactgtagaaatcattgttggagataaaacagctaacgatttttacacaccatatcaagaatataaatcatttaaattaatcaatgttttaccttatttatatgaaataaacttacgtttatttatacaaaaattacaaaactatattgataataaacaattaattgtacgtatatggaaaaaagatcaccatggctatcatattaaaggtatttggatagatgatgaatggaacttacttacaggaagcaatttaaatcctagatccttaaaattagatttagaaaatgcattattaattcatgatccatgtcatgaattaatacaccaaaaatatcaagaattaactcaaatcagggtatttacaaaaattatcactcattatacatccttacaaaatatatctgaatacccagttaaaattaaacgacttattttaagaataagaaaaattaaatttgataaattaataaaccaactcctataa

SEQ ID NO: 125165 - protein, 461 aa, Candidatus Blochmannia floridanus
MLYNIKKTYNNHFLYNKHNTFLTELPKITQKSSDFKILNSPKEFNYVLLNTISQAHKHICLVTLYLENDPGGKKILDTILEVKKNRPTIKINIIVDWYRAQRTRFGESIKYTNIHWYNNIIQNNPNIELSIFGLPIHFSEILGVLHLKGFIIDDTILYSGANLNNEYLHINDKYRYDRYYFIKNAQLSAIMLNYIEKNLINSKVIHNLDYKKSFLKKNNKNNIRLFRKFLKRTTYTYQNNANFNECSIIPLVGLGKNSILNKTIYHLISSVKQNMILCTPYFNIPYSLNRVLYSLLQQGKTVEIIVGDKTANDFYTPYQEYKSFKLINVLPYLYEINLRLFIQKLQNYIDNKQLIVRIWKKDHHGYHIKGIWIDDEWNLLTGSNLNPRSLKLDLENALLIHDPCHELIHQKYQELTQIRVFTKIITHYTSLQNISEYPVKIKRLILRIRKIKFDKLINQLL

SEQ ID NO: 125166 - DNA, 1341 bp, Chromobacterium violaceum ATCC 12472
  CDS (1)..(1341): transl_table=11
atggcaatcctgctcaaccgacccacgctgtcccgcctgccctggtttcccttgcggcccgaggacttcaccaccctgctgcagacggccgatttccgcctgcgcttgctggaggccatcgcggcggcgacgcggcgcgtctacatctgcgcgctgtacctggaaaacgaggaggccggccaggagatgctggatgcgctgtaccgggccaaacagcggaatccccaactggacgtgagggtgatggtggactggcaccgcgcgcagcgcggccgcatcggcgaggaccagtcgcattgcaatgccagctggtaccgcgaagaagccgcgcgccgcgagctggacattccgatctacggcgtgccggtgcaaacgcgcgagctgttcggcgtgctgcacctgaaaggcttcgtcatagacgataccgttttctacagcggcgccagcctgaacaacgtctatctgcacaagctggacaaataccgcttcgaccgctaccacctgatccgcagcccggagctggcggacgcgatggcgggcttcatggccgagcagttcttcaacgacccggccgtattccgcctggacaagccgacgccgtccacccgcagcatccgcaaggaaatccgccagctacgcgacaagctgtcccacagccagtaccgccccggatccgcgcatgcggctccggacgagctggcgatcagccccatcgtcggcatcggcaagggcaaccggctgaatcgcgcgatcctggacgtgatcgccggcgcccagcgccgcctgttcatatgcacgccttacttcaacttcccccgcgcggtggtgctggaaatcaaccgcgcgctgcgccgcggcgtggaaatcgacatcgtggtcggcgacaagaccgccaacgatttctacatcccgcccgagcagccgttccgcgtgatcggcgcgctgccctacctgtacgagatgaacctgcgccgcttcgccaagcgccagcgccagtacctgagccgggaacagctgcgtgtccgcctgtggaaagatggcgacaacacctatcatctgaagggcatctggagcgatgaccgcttcatcctgctgaccggcaacaatctgaatccgcgcgccttccggctggatctggaaaacgcgctgctgctgcgcgacccgcagggcgcgctgcgcgggcagagcgcggccgaacagcagagcatcctgcgccacaccacccagttgagccattatcgccagttggaggacgtgcgcgcctatccggaacagatcaagaaactgctcacccgcctgagccgggtgcggatagaccggatgctgaatctgatgctgtaa

SEQ ID NO: 125167 - protein, 446 aa, Chromobacterium violaceum ATCC 12472
MAILLNRPTLSRLPWFPLRPEDFTTLLQTADFRLRLLEAIAAATRRVYICALYLENEEAGQEMLDALYRAKQRNPQLDVRVMVDWHRAQRGRIGEDQSHCNASWYREEAARRELDIPIYGVPVQTRELFGVLHLKGFVIDDTVFYSGASLNNVYLHKLDKYRFDRYHLIRSPELADAMAGFMAEQFFNDPAVFRLDKPTPSTRSIRKEIRQLRDKLSHSQYRPGSAHAAPDELAISPIVGIGKGNRLNRAILDVIAGAQRRLFICTPYFNFPRAVVLEINRALRRGVEIDIVVGDKTANDFYIPPEQPFRVIGALPYLYEMNLRRFAKRQRQYLSREQLRVRLWKDGDNTYHLKGIWSDDRFILLTGNNLNPRAFRLDLENALLLRDPQGALRGQSAAEQQSILRHTTQLSHYRQLEDVRAYPEQIKKLLTRLSRVRIDRMLNLML

SEQ ID NO: 125168 - DNA, 1359 bp, Photorhabdus luminescens subsp. laumondii TTO1
  CDS (1)..(1359): transl_table=11
gtgatgttgtctaaattcaaacaagctaaacatcaacaacaccttgcacaactgcctaagctacctcagtcagttgctgatgttaaaacactttatcaacctgaagtgttccgcagcaccctgctggaaaaaattgctaacgctgaaaaacatatttatatcatctccctctatctggaaaatgatgacgcagggaaagatatccttaatgcactttatacagctaaacaacaacgcccagacttggacattaaagtgctcgttgactggcatcgagcacaacgtggacgaattggtgctgctgcaatagtaacgaatgccgattggtattgttctatggcagaagcttatcctgatgtgaaaattccagtactaggtgtacctgtaaatacccgcgaagcactgggtgttttacatttaaaaggttttatctttgacgatactgtagtttatagcggagcaagcattaatgatgtttatctccaccaacatgataaatatcgctatgatcgctaccacttgcttcacaatgcagaacttgcagaagcaatgaaacactttattgataatcacattatcgctacaggagccgtgcagaaactggattgtaaaaaccgtcctcgtattcctgaaattaaaaatttgatccgtcaattacgtttttctctgcggcacactacctataaaataaacaatcaggcaacgaatgatgaactatctgtcactccacttgccggtctgggaaagaaaaatctactaaataaaaccattagtcatctgatcgccagcacagaacaaaagctgattatttgcactccgtattttaatcttccagccatcattgtccggcggatcgttcatctacttcgtaaaggtaaacatgtggaaattattgttggtgataaaactgccaacgatttttatattccaccggaagaaccctttaaaattatcggtgcattaccctatttatatgaaattaatctgcgccgtttcatcagtagactacagcgttatgttgacaacaatcaactgactatcaggttatggaaagatggtgataatagctaccacctaaaaggtgtgtgggtggacaatcaatggcaattgattacaggaaataatcttaatcctcgtgcctggggactggatttagaaaatgccattcttattcacgatcctcataaagaaatgcaggagcaacgtacaaaagaactgcactgtatccgtactcatactacggttgtcagtgattatcaggaattggacagcatccagctttacccagtcaaagtacgtaaacttatccgccgtttacgtcgcatccgggtagacaaactgattagtcgtattctgtaa

SEQ ID NO: 125169 - protein, 452 aa, Photorhabdus luminescens subsp. laumondii TTO1
MMLSKFKQAKHQQHLAQLPKLPQSVADVKTLYQPEVFRSTLLEKIANAEKHIYIISLYLENDDAGKDILNALYTAKQQRPDLDIKVLVDWHRAQRGRIGAAAIVTNADWYCSMAEAYPDVKIPVLGVPVNTREALGVLHLKGFIFDDTVVYSGASINDVYLHQHDKYRYDRYHLLHNAELAEAMKHFIDNHIIATGAVQKLDCKNRPRIPEIKNLIRQLRFSLRHTTYKINNQATNDELSVTPLAGLGKKNLLNKTISHLIASTEQKLIICTPYFNLPAIIVRRIVHLLRKGKHVEIIVGDKTANDFYIPPEEPFKIIGALPYLYEINLRRFISRLQRYVDNNQLTIRLWKDGDNSYHLKGVWVDNQWQLITGNNLNPRAWGLDLENAILIHDPHKEMQEQRTKELHCIRTHTTVVSDYQELDSIQLYPVKVRKLIRRLRRIRVDKLISRIL

SEQ ID NO: 125170 - DNA, 1341 bp, Vibrio vulnificus YJ016
  CDS (1)..(1341): transl_table=11
atgatggctagcaggaatccttttgcacagctacccagcattgctgtggatgctgatgctctggaagttcttcatacagcgaaagacttcaggactcgcttgatagatgcgatcgcaaaagcgacctctcgtatctgcctagtggctttgtatctcgaagatgatgaggccgggcgagaaatactgacagcgctatacgaagctaagcaacgcaatccgggtttagatatcagcgtatgcgttgattggcaccgagcacaacgtggcttgatcggtgctgaaaaatctgaaggtaatgcagcgctttacaaagcgtttgcgaacaaatatcaacacaaaatccctgtttacggcattccagttcgcggtagggaagtctttggtgtactccatctaaaaggctttattgtcgacgatacggtgatttacagcggagcgagcctcaacaacgtctaccttcagtacagtgagcgttatcgctttgatcgataccacgtcattcataatgaatctcttgcagacaccatgttcaatttcgtccagaacgaaatgatagcgcaccctgccgtgaatgatttggcaaaagaagatcgccccgaaaccaaagaaattaagaccgcaattcgtcaatttcgatcagcgttagctcgcgctaagtatcgctttgaatctcaagaggctgccgaacatcaattttccatcacccccatggttggcttaggaaagaggcgtaatttcctcaatcaaaacatcgctaagttgattgatgcagctcaaagtgaaatattcatatgtacgccctacttcaactttcctaaagatatcgcgaagggcgtgaaacgtgcgttaaaacgtggcgtaaaggtgacgattgttgtaggcgataagacagctaacgacttttacatcgcaccagacaaagaattcaagacgattggtggtttaccctatttatatgagctgaacctacgcaagtttgctaaagcttatgaagctcaaatagcagcaagaaacctttctattcgactctggaaagatggcgataacagcttccatcttaaaggcatttgggttgataaacgctacatgctgctgacaggaaacaatctcaatcctagggcttgggcgttggatctcgaaaatggtttgttgatccgagatgactttgcgcaactaacagaacagtttgattctgaggtcgacaatattctccagcacactcagttaatttgtacatacaaacaacttgagaaagtcgaagaatatccggaagtggttcagaagttagtccgaaagatcactcgcattaaagccgatggcgtactaaagagaattctctag

SEQ ID NO: 125171 - protein, 446 aa, Vibrio vulnificus YJ016
MMASRNPFAQLPSIAVDADALEVLHTAKDFRTRLIDAIAKATSRICLVALYLEDDEAGREILTALYEAKQRNPGLDISVCVDWHRAQRGLIGAEKSEGNAALYKAFANKYQHKIPVYGIPVRGREVFGVLHLKGFIVDDTVIYSGASLNNVYLQYSERYRFDRYHVIHNESLADTMFNFVQNEMIAHPAVNDLAKEDRPETKEIKTAIRQFRSALARAKYRFESQEAAEHQFSITPMVGLGKRRNFLNQNIAKLIDAAQSEIFICTPYFNFPKDIAKGVKRALKRGVKVTIVVGDKTANDFYIAPDKEFKTIGGLPYLYELNLRKFAKAYEAQIAARNLSIRLWKDGDNSFHLKGIWVDKRYMLLTGNNLNPRAWALDLENGLLIRDDFAQLTEQFDSEVDNILQHTQLICTYKQLEKVEEYPEVVQKLVRKITRIKADGVLKRIL

SEQ ID NO: 125172 - DNA, 1359 bp, Erwinia carotovora subsp. atroseptica SCRI1043
  CDS (1)..(1359): transl_table=11
gtgatgctgtcaaattttaaacgcaataaataccaacagcaccttgcacaactgcccagaatttctcagaacgcagatgatgttcagacgttgcattcgccggagcttttccgcacgacgctgactaacgccattctacgtgctaaaaagcgcgtctatattgtggccttatatcttgagcgtgatgatggcggcatcggtattctatccgcaatttatgaagccaaacggcagtgccctgaactggatgtccgtgttttggtagactggcatcgtgctcagcgtggcaggatcggcacagcggcagaaaataccaatgccgattggtattgcgatatggcgaaaaagcatccagatacgcatttccctatctatggtatcccagtcaacacacgtgaagcgttgggtgtcctgcacctaaaagggttcattgtcgatgacaccgtcatctacagtggagccagcctgaatgatgtttatctgcatcagcatcagaaataccgttatgatcgctatcagctgattcataaccctgtattggctgatacgatggtgcaatatatccagacaatgctgtccgcaccagcagtgcagcgattggatcataccgatcgcccgaagagcctggaaatcaaaaatgatatcaagcaattccgtcaaaccttacgtaccgccagttatcaggcaccggaatgcagcgcaaatgcaaacgaattaaccgtcacgccgctcgttgggttaggaaaacaaagcccgctgaataagaccatacatcacctgatgtattgcgccgatgagcatttagtcatctgtactccctatttcaacatgcccgcgctgctggtcagaaatatcattcggctattgcgggacggcaaaaaagtagaaattattattggcgataagaccgctaacgatttttatattccagaagaccagcctttcaaaatcatcggcgcattaccgtatctctacgagatcaacctgcgccgtttcctcagtcgtctggagcgctacattgaaaaccaacagcttgttgtacggctatggaaagacggcgacaacagtttccatctgaaaggcatgtgggtggatggcaagtggcagttgctgacgggtaacaaccttaacccacgcgcatggcgtctagatctggaaaacgctatcctgattcacgatcctcagcaggttctattgcagcaacgtctggatgaattggatacgatcaggacgcacacccacgtcgtaaaaagctacacggaactggagagcatcgcgcaatatccagtgaaagtccgcaagttgatacgacgtctacgccgtattcgtatagaccggctaatcagtcgtattctctaa

SEQ ID NO: 125173 - protein, 452 aa, Erwinia carotovora subsp. atroseptica SCRI1043
MMLSNFKRNKYQQHLAQLPRISQNADDVQTLHSPELFRTTLTNAILRAKKRVYIVALYLERDDGGIGILSAIYEAKRQCPELDVRVLVDWHRAQRGRIGTAAENTNADWYCDMAKKHPDTHFPIYGIPVNTREALGVLHLKGFIVDDTVIYSGASLNDVYLHQHQKYRYDRYQLIHNPVLADTMVQYIQTMLSAPAVQRLDHTDRPKSLEIKNDIKQFRQTLRTASYQAPECSANANELTVTPLVGLGKQSPLNKTIHHLMYCADEHLVICTPYFNMPALLVRNIIRLLRDGKKVEIIIGDKTANDFYIPEDQPFKIIGALPYLYEINLRRFLSRLERYIENQQLVVRLWKDGDNSFHLKGMWVDGKWQLLTGNNLNPRAWRLDLENAILIHDPQQVLLQQRLDELDTIRTHTHVVKSYTELESIAQYPVKVRKLIRRLRRIRIDRLISRIL

SEQ ID NO: 125174 - DNA, 1359 bp, Yersinia pseudotuberculosis IP 32953
  CDS (1)..(1359): transl_table=11
gtgatgttgtcaaaattcaaacgtagcaaacatcaacaacaccttgcacaactgcccaaactcccccagtcagttgatgatgtccaaacgctttattgccccaaggttttccgctctactctgttggaactcatcgctcaggcaaccaaacgtatttttctggtggcactttatctggagcaggatgacgcaggccgtgatgtaatgaatgccctctatcaggccaagcagtcgcatcctgaactggagatctatgtactggtagattggcaccgggctcagcgtggccgtattggtgcggcagccgtcaatactaatgccgattggtattgcgatatggcggctaaacatccaaatatttctgttcctgtttacggtgtcccggtcaatacgcgtgaagcattgggtgtactgcacctaaaaggctttatcattgacgacaccgttatttatagcggtgccagcatcaatgatgtctatctctatcagaatgataaatatcgttatgatcgctaccagctaatcactaatccgtcactcgctaccattatggttgattacgtgaaacaacggatactgagtgccggagcagttcaacgccttgaccgtaatgaccgacctaccacccccgagatcaagaatgagacccgccagtttcgctcatcactgcgtgatgccagttaccaattctcggcacaagcgcataacgatgagttagcggtcactcctctggttgggttaggtaagaagagtttactaaacaaaacgattcatcacttaatggcctccgctgatgaacgcctgaccatttgcaccccctactttaacctgcccgcgctgttagtccgtaatattatttatctgctgcgggaaggtaagcaggttgagattatcgttggtgataaaaccgcaaatgacttttatatccctgaagatcaaccctttaaaattatcggtgcactgccgtatttatacgaaatcaacctgcgtcgtttcctgagccgcttacaaccgtatgttgataacgggcagctcattgttcgcttatggaaagatggcgacaacacctatcatttgaaagggatgtgggtagataacaattggcagttgatcacgggcaataacctaaacccgcgcgcatggcgcttggatttggagaatgccattttgatccacgatcctaagcatgaaatgcatgaacagcgggccaaagaactggagtgtatccgcactcataccaaagtggtttcacactaccttgagctggagaatatccaacaatatccggttaaagttcgcaaacttatccgccgtttgcgcaggatccgcattgatcggttaattagccgtattctataa

SEQ ID NO: 125175 - protein, 452 aa, Yersinia pseudotuberculosis IP 32953
MMLSKFKRSKHQQHLAQLPKLPQSVDDVQTLYCPKVFRSTLLELIAQATKRIFLVALYLEQDDAGRDVMNALYQAKQSHPELEIYVLVDWHRAQRGRIGAAAVNTNADWYCDMAAKHPNISVPVYGVPVNTREALGVLHLKGFIIDDTVIYSGASINDVYLYQNDKYRYDRYQLITNPSLATIMVDYVKQRILSAGAVQRLDRNDRPTTPEIKNETRQFRSSLRDASYQFSAQAHNDELAVTPLVGLGKKSLLNKTIHHLMASADERLTICTPYFNLPALLVRNIIYLLREGKQVEIIVGDKTANDFYIPEDQPFKIIGALPYLYEINLRRFLSRLQPYVDNGQLIVRLWKDGDNTYHLKGMWVDNNWQLITGNNLNPRAWRLDLENAILIHDPKHEMHEQRAKELECIRTHTKVVSHYLELENIQQYPVKVRKLIRRLRRIRIDRLISRIL

SEQ ID NO: 125176 - DNA, 1362 bp, Mannheimia succiniciproducens MBEL55E
  CDS (1)..(1362): transl_table=11
atgttagttaataagattaaacgagccaaacaacgcctggaacggctgccgtatttagcacagtccgtcgcggattttgaagtgatttataacccggctcaatttaaacaaaccattattcaacttattcgttcggctaaaaatcgtatttatatcaccgcactttattggcaatttgacgaagccgggcaagaaattttaaatgaactttatgccgccaaacaaaaaaatcccgcattagatgtgaaagttctggtggactggcaccgcgcccagcgcaatctactgggggcggcaaaaggcaccacaaatgccgactggtattgcgaacaacgggcaaaacatcaggcgcagtctatgttctttggggtgcctatcaacacccgggaagtattcggtgtgctgcacattaaaggttttgtatttgacgataccctgctttacagcggtgcaagcattaacaacgtatatttacatcacaaagacaaataccgctacgaccgctaccagaaaatcaccaacccggcattggcggatgttttagtggcgtttgtcaatcaatatttacttgaccctaatgccgtacacgcactggacgacgcggctcgccccgctaccaaagaaatcagaatgcacattaaagcgtttcgcaaaaaattagcgctggaggcgggttattggattaataatgcggttgctttcagtaacgatcaattgaccgtttcgcctttattcggtttaggtaccagtggcaatgtattgaataattgcattgaagatttattcatgctggttaaagaaaaactggtgatttgtacgccgtattttaatttcccccgaacgctaaaaggcaaaatcagtcatttattaaaacagggcaagaaagtggaaattatcgtgggcgataaagtagcgaacgatttttatattccgccgaccgaagaatttaaaatcgcaggggcgttgccttatttatatgaaaaaaacctgcgcgcgttctgcaaaaaatttgccgctcaaattaatgaaggtttattggtcgtccgcacctggaaagacggtgataatacctatcatttgaaaggagtatgggtggatgaggattatattctgcttaccggcaacaatttaaatccgcgggcatggcgtttggatgccgaaaacggtttattggtgcatgatccgaaacatgagctgagagtccaaatggaagaagaattgcgacaaatccgtcaacacaccaccgtcttacgccattactcggagttgcaaaaaatgaaccaatatccggaacccgttcaacgcttattaaaacgctttgaacgcgtcaaagtggataaactggtgaaaatgatcctgtaa

SEQ ID NO: 125177 - protein, 453 aa, Mannheimia succiniciproducens MBEL55E
MLVNKIKRAKQRLERLPYLAQSVADFEVIYNPAQFKQTIIQLIRSAKNRIYITALYWQFDEAGQEILNELYAAKQKNPALDVKVLVDWHRAQRNLLGAAKGTTNADWYCEQRAKHQAQSMFFGVPINTREVFGVLHIKGFVFDDTLLYSGASINNVYLHHKDKYRYDRYQKITNPALADVLVAFVNQYLLDPNAVHALDDAARPATKEIRMHIKAFRKKLALEAGYWINNAVAFSNDQLTVSPLFGLGTSGNVLNNCIEDLFMLVKEKLVICTPYFNFPRTLKGKISHLLKQGKKVEIIVGDKVANDFYIPPTEEFKIAGALPYLYEKNLRAFCKKFAAQINEGLLVVRTWKDGDNTYHLKGVWVDEDYILLTGNNLNPRAWRLDAENGLLVHDPKHELRVQMEEELRQIRQHTTVLRHYSELQKMNQYPEPVQRLLKRFERVKVDKLVKMIL

SEQ ID NO: 125178 - DNA, 1344 bp, Pseudomonas syringae pv. syringae B728a
  CDS (1)..(1344): transl_table=11
atgcagtccactttccgacgctcgaccctggcagcacttcgcggttttgccctgcagagcgatgcaatctccattgttccttctgccgccgactatcgacgctgcctgctggaaaagatcgcttcggccacccggcgcatctacatcatcgcgctgtacctgcaacaggatgaagccggccaggagattctcgacgcgctgtacgctgccaaatccgcgaggccggagctggatgtggtggtgctggtcgactggttccgcgcgcaacgcggcctgatcggtgccggacgccagcccggcaactcgacctggtaccaggcgcagaacctcgaatacgatcaagaagtgccgatctacggcgtgccggtgcagacccgcgaactgttcggggtgttgcacctcaagggcagtgtggtcgacgactgcgtgatctacagcggcgccagcatcaataacgtctacctgcacaagctcgataaataccgtctggaccgttatcacctgatcgaaaacgcagcactggccgacgctttccagaatctggtgcagcgggaaatactctcctcgccggccgtgcaccgcctcgatctgcaatcgccgcccagctcacgcagtttgcgcagcgagatccgcgcgtttcgtggcgacctgaaacgcgccgcctacgacacctcggcgggcgaaaaggaaaacggcgacatgcgcgtgattccgctgcttggcgtcggcccgcgcaacaatctcaaccgcgccatctgcgatctgatcgcgtcgagcaagattcagctgaccatctgcacgccatacttcaacctgccggtggccgtcactcgcgaaatcaatcgggcgctcaagcgcggcgtgcaggtcgacatcatcattggcgacaagaccgccaacgacttcttcatcgatccggatgagccgttcaaggtgatctcggccctgccctatctctatgagatcagcctgcggcgctttgcccacaagcatcagaaggcaatcgcccagcatcgcctcaatgtgcacctgtggaaacacggcgataacaccttccacctcaagggcatctgggtcgaccagcgctacaccctgctgaccggcaacaacctgaaccctcgcgccttcaatctggacctggaaaacgccttgctgatcgacgatccgaagggccagtggagcgagccacgggaagcggaaatcgcgcatttgatgcgcaacacggagcgcgtcaaccagtatgacgaactcgacacactggccaactaccccgaaggcgtgcgcaagttcctcaagcgtgtcagccgcgtgcgggtcgagcgactgctgtaccggattctctga

SEQ ID NO: 125179 - protein, 447 aa, Pseudomonas syringae pv. syringae B728a
MQSTFRRSTLAALRGFALQSDAISIVPSAADYRRCLLEKIASATRRIYIIALYLQQDEAGQEILDALYAAKSARPELDVVVLVDWFRAQRGLIGAGRQPGNSTWYQAQNLEYDQEVPIYGVPVQTRELFGVLHLKGSVVDDCVIYSGASINNVYLHKLDKYRLDRYHLIENAALADAFQNLVQREILSSPAVHRLDLQSPPSSRSLRSEIRAFRGDLKRAAYDTSAGEKENGDMRVIPLLGVGPRNNLNRAICDLIASSKIQLTICTPYFNLPVAVTREINRALKRGVQVDIIIGDKTANDFFIDPDEPFKVISALPYLYEISLRRFAHKHQKAIAQHRLNVHLWKHGDNTFHLKGIWVDQRYTLLTGNNLNPRAFNLDLENALLIDDPKGQWSEPREAEIAHLMRNTERVNQYDELDTLANYPEGVRKFLKRVSRVRVERLLYRIL

SEQ ID NO: 125180 - DNA, 1368 bp, Haemophilus influenzae 86-028NP
  CDS (1)..(1368): transl_table=11
atgttaatcaataaaaccaaacgagctgaacaaaatttaaataatttgccattccttgctttgcaagctgagcaaattgaatttttgggtagctcggctgaatttaaaactcaaattattgaattaatcagaaacgcaaaaaaacgtatttatgtcaccgcactttattggcaaaaagacgaagcgggacaggaaattctcgatgaaatttatcgcgtgaagcaagaaaatccacacttggatgtaaaaattctcatagattggcatcgtgcacaacgcaatttattaggggcggaaaaatctgccactaatgcagactggtattgcgagcaacgccaaacttatcagttacctgatgatccgaatatgttctttggcgtgccaattaatacgcgagaagtttttggtgtattgcatgtcaaaggctttgtatttgatgatacggtgctttatagcggtgcaagtattaataatgtctatcttcatcaatttgaaaaatatcgttacgaccgctatcaaaaaatcactcatgccgaattagctgattcaatggtaaatttcatcaatgattacttgttagatttcagtgcagtttatccacttgatgtgaccaaccgccctcgtactaaagagatccgcggtaatattcgagcttatcgtaaagaccttgctcaaaatggagaatattcattaaaaagtgcggtgaaattaccgaatgttttaagcgtatcgccactgtttggcttaggcgcatcgggcaacgaattaaatcaagtaattgaagatttattcttacaagtacaagaaaaattggtgatttgtacgccatattttaatttcccacgcacattgcaacataaaatagcaacattattggaaagcggtaaacaagtagaaattattgttggcgataaagtcgcaaacgatttttacattccaccagaacaaccattcaaaatggcgggggcattaccttatctttatgaaagtaatcttcgccgtttctgtgaaaaatttgagactcaaattgaaaatggtcagcttgtggtgcgtttatggcgtgatggcgataatacctaccacttaaaaggtgtgtgggtagatgaccgttatattttattgacgggcaataatcttaaccctcgagcatggcgtttggatgcagaaaatggcttattaatttacgatccacaacaacagcttttagcccaagtggaaaaagagcaaaaccaaattcgccaacatacaaaagtattaaaacattactctgaattagaagaattgaatcaatacccagaaccagtgcaaaaacttttgaaaaaatttgcacgaattaaagcagataaattggtgaaaatgattttgtaa

SEQ ID NO: 125181 - protein, 455 aa, Haemophilus influenzae 86-028NP
MLINKTKRAEQNLNNLPFLALQAEQIEFLGSSAEFKTQIIELIRNAKKRIYVTALYWQKDEAGQEILDEIYRVKQENPHLDVKILIDWHRAQRNLLGAEKSATNADWYCEQRQTYQLPDDPNMFFGVPINTREVFGVLHVKGFVFDDTVLYSGASINNVYLHQFEKYRYDRYQKITHAELADSMVNFINDYLLDFSAVYPLDVTNRPRTKEIRGNIRAYRKDLAQNGEYSLKSAVKLPNVLSVSPLFGLGASGNELNQVIEDLFLQVQEKLVICTPYFNFPRTLQHKIATLLESGKQVEIIVGDKVANDFYIPPEQPFKMAGALPYLYESNLRRFCEKFETQIENGQLVVRLWRDGDNTYHLKGVWVDDRYILLTGNNLNPRAWRLDAENGLLIYDPQQQLLAQVEKEQNQIRQHTKVLKHYSELEELNQYPEPVQKLLKKFARIKADKLVKMIL

SEQ ID NO: 125182 - DNA, 1344 bp, Pseudomonas fluorescens Pf-5
  CDS (1)..(1344): transl_table=11
atgccgtcgcttttcaaacgttccctgctgcccaagctgcgcagcttcccactggccgccgaggctttcaccacgctgaccggcgctgcgcagtttcgtcgcacgctgctggagcagattgcccaggcacgccggcgcatctacatcgtcgcgctgtacctgcaacaggatgaagccggccaggaaatcctcgatgccctgcacgccgccaaggccgcccgccccgagctggaagtggtggtcgtggttgactggttgcgggcccagcgcggcctgatcggtgccggcaagcagccgggcaactcggcctggtaccagcaaatgacccgcactcacgccagcgaggtgccgatctacggcgtgccggttcagacccgcgagctgttcggggtgctgcacctcaagggtttcatcatcgacgactgcgtgctctacagcggcgccagcctgaacaacgtgtacctgcacaagttcgacaagtaccgcttcgaccgttaccacctgctgcacaaccaggccctggccgactccatgcaccacctggtgcagcacggcctggtggagtcgcgggcagtgcaccgcctggacctgccgaacctgcccaccacccgcagcctgcgcaacgacatcggcgatctgcgcagccgcctcaagcacgccacctacgacaccactgccggtggcctggacaagagcgggctgtcggtcagcccgttgctcggggtgggcaagggcaacccgttgaaccgggtgatctgcgagctgattgccggcgcccagcgccagctgaccatctgcaccccgtatttcaacctgccactgccggtgacccgggagatcaaccgggccctggagcgcggagtgaagatcgacatcatcgtcggcgacaagaccgccaacgacttctatatcccgcccagcgagccgttcaaggtgatcgccgcgctgccttatctgtatgaaatcagcctgcggcgttttgccaagcggcatcagaaagtgatcgacaacggccagttgaacctgcacctgtggcgtgacggtgacaacacctaccacctcaagggcatgtgggtcgatgagcgctataccttgctcaccggcaacaacctcaacccgcgggccttccgcctggacctggaaaacgccctgttgctggacgaccccaagggcgagctgctgcaggcgcgcaacgccgaacaggccgagatctatcgccatacccgccgcatcgagcactttcagtacctggacagcctggtggactatcccgaggccgtgggcaagttcctgcgccgggtcagccgcgtgcgcatcgagcgcttgctctaccgcatgctttaa

SEQ ID NO: 125183 - protein, 447 aa, Pseudomonas fluorescens Pf-5
MPSLFKRSLLPKLRSFPLAAEAFTTLTGAAQFRRTLLEQIAQARRRIYIVALYLQQDEAGQEILDALHAAKAARPELEVVVVVDWLRAQRGLIGAGKQPGNSAWYQQMTRTHASEVPIYGVPVQTRELFGVLHLKGFIIDDCVLYSGASLNNVYLHKFDKYRFDRYHLLHNQALADSMHHLVQHGLVESRAVHRLDLPNLPTTRSLRNDIGDLRSRLKHATYDTTAGGLDKSGLSVSPLLGVGKGNPLNRVICELIAGAQRQLTICTPYFNLPLPVTREINRALERGVKIDIIVGDKTANDFYIPPSEPFKVIAALPYLYEISLRRFAKRHQKVIDNGQLNLHLWRDGDNTYHLKGMWVDERYTLLTGNNLNPRAFRLDLENALLLDDPKGELLQARNAEQAEIYRHTRRIEHFQYLDSLVDYPEAVGKFLRRVSRVRIERLLYRML

SEQ ID NO: 125184 - DNA, 1329 bp, Colwellia psychrerythraea 34H
  CDS (1)..(1329): transl_table=11
gtgcaagaaataattgtcgatagtggtgatattgaattccttaccacgcctaaagaatataagcagcagttgttgtcccttattgaatgcgcacgtcagcgtattttcattactgccttatatctacaagatgatgaggcaggtagagagatcctccatgccttataccaagctaaagctaatttcccaacaatagagattaatatctttgttgattttaaccgtggacaacgtggtttaattggtgaaaaggcaagcttaggtaaccgtgcactttatttgaaattagcacatgagtatcctcacaccgttaatatctatggtgttgctgttaagcgaaaagaagtctttggggttttacacctaaaaggcatggttttcgatgagaagcttttctatacaggcgcaagtatcaatgatatttatctacatcaaggtgagcgatatcgtttagatcgctactgtactatcaatagcgcagcattagccgatagtttttgccactacttatctgatacttttattgattcaggtctggcgccacttcttaatcaagaatggttacctgatgcggtagaacaaaagaaaaatctgatcgcattaaaacttcagctaaaaaaatctcactatattgttgctcaacaacaaggtcttagccaatcaaaaatagtgagtaataaagcccttattacaccgctagtaggttttggtcgccgtaaaaatcagcttaatcgagctactcgtcacttagtgcaaaaagctgatgataatatggtgcttttcacgccttattttaatctacctcattctcttgctaaagatgtgattagagccctaaaacgtggtgttaaaacaactgtggttgtaggcgataaaacagcgaatgacttttttattggcaatgatgaagatttcagtaccataggtatcatcccctatgtttatgagatgttacttaagcgttttgttaaacgttatcaaaattttattgaccaaggtttattgaatatccatttatggaaagataaagataatagctttcatctcaaaggtttacgcgttgatgaccgctatcatttgattacgggcagtaatttaaatccccgtgcttgggcactggatttagagaatggcttagttgttgatgatgtcaataaacagctattacaaaaaacggatgaagaactgctcggtattttagtcaatacgagtaaagtttcgcatttctctgatattgattcagtagaagactaccctgaaaaacctcaaaaattattgaaaaagatacgtgttgcccaaatagatagagtgttgaagcgatttttgtag

SEQ ID NO: 125185 - protein, 442 aa, Colwellia psychrerythraea 34H
MQEIIVDSGDIEFLTTPKEYKQQLLSLIECARQRIFITALYLQDDEAGREILHALYQAKANFPTIEINIFVDFNRGQRGLIGEKASLGNRALYLKLAHEYPHTVNIYGVAVKRKEVFGVLHLKGMVFDEKLFYTGASINDIYLHQGERYRLDRYCTINSAALADSFCHYLSDTFIDSGLAPLLNQEWLPDAVEQKKNLIALKLQLKKSHYIVAQQQGLSQSKIVSNKALITPLVGFGRRKNQLNRATRHLVQKADDNMVLFTPYFNLPHSLAKDVIRALKRGVKTTVVVGDKTANDFFIGNDEDFSTIGIIPYVYEMLLKRFVKRYQNFIDQGLLNIHLWKDKDNSFHLKGLRVDDRYHLITGSNLNPRAWALDLENGLVVDDVNKQLLQKTDEELLGILVNTSKVSHFSDIDSVEDYPEKPQKLLKKIRVAQIDRVLKRFL

SEQ ID NO: 125186 - DNA, 1434 bp, Pseudomonas fluorescens PfO-1
  CDS (1)..(1434): transl_table=11
gtgatgaagtcattacagacactcacaagacccgaaggagttgatggtgtaagctctcgggttcttcggattcgacccattgcgagccctatgccgttgcttttcaaacgctctctgctgcccaaactgcgcagctttccgctgaccgccgaggccgtgacgatcctgcccggtgccgccgatttccgccgttgcctgctggagaaaatcgcccaggcgacccagcgcatctacctcgtcgcgctttatctgcaaaacgacgaagccggccaggaaattctcgatgccttgcacgccgccaaactcaagcgtcccgagcttgaaatcgcggtggtcgtcgactggctgcgggcccagcgcggcttgatcggtgccggcaagcagccgggcaactcggcgtggtatcaggaaatgacccgcacccaccagagcgtggtgccggtctacggcgtgccggtgcagacccgcgagttgttcggcgtgctgcacctcaaaggcttcgtgatcgacgattgcgtggtctacagcggtgccagcctgaacaacgtctacctgcacaaattcgacaagtaccgtttcgaccgttatcacgtgctgcaaagccgcgaactggcggactcgatgcaccatctggtcaagcacggcctgatcgaatcgaaagcagtgcatcgcctcgacctgccgaacctgccgaccacccgcagcctgcgcaacgacatcggcgatctgcgcagccgtctcaaatacgcggcgtacgacaccagtgccggcagcacggcgcataccggcctgtcggtcagtccgttgctcggcgtgggcaagaacaacccgctgaaccgggtgattctggagctgatcgccagcgcccagaagcaactgaccatctgcacgccgtacttcaatctgccgctgggggtgatccgcgagatcaaccgggcgctggctcgcggcgtgaagatcgacatcgtggtcggcgacaagaccgccaacgacttctacatcccgccgaccgagccgttcaaggtgatcgccgcgctgccgtacctgtacgagatcagcctgcgccgtttcgccaagcgacatcagcgcaacatcgacagcggccagttgaacctgcacctgtggcgtgagggcgacaacagctatcacctcaagggcatgtggatcgaccagcgctatacgctgctgaccggcaacaacctcaatccgcgggcgttccgtctcgatctggaaaacgccttgctgatcgatgacccgaaaggcgagtggctggagccgcgccgcgtggagctggagaacatcttcgttcacaccacgcgaatcgcacgcttccaggatctggaagccttgccggactacccggcgggtgtggcgaaatttctcaagcgtgtgagccgggtgcgggtcgagcggttgctctatcgcattctttaa

SEQ ID NO: 125187 - protein, 477 aa, Pseudomonas fluorescens PfO-1
MMKSLQTLTRPEGVDGVSSRVLRIRPIASPMPLLFKRSLLPKLRSFPLTAEAVTILPGAADFRRCLLEKIAQATQRIYLVALYLQNDEAGQEILDALHAAKLKRPELEIAVVVDWLRAQRGLIGAGKQPGNSAWYQEMTRTHQSVVPVYGVPVQTRELFGVLHLKGFVIDDCVVYSGASLNNVYLHKFDKYRFDRYHVLQSRELADSMHHLVKHGLIESKAVHRLDLPNLPTTRSLRNDIGDLRSRLKYAAYDTSAGSTAHTGLSVSPLLGVGKNNPLNRVILELIASAQKQLTICTPYFNLPLGVIREINRALARGVKIDIVVGDKTANDFYIPPTEPFKVIAALPYLYEISLRRFAKRHQRNIDSGQLNLHLWREGDNSYHLKGMWIDQRYTLLTGNNLNPRAFRLDLENALLIDDPKGEWLEPRRVELENIFVHTTRIARFQDLEALPDYPAGVAKFLKRVSRVRVERLLYRIL

SEQ ID NO: 125188 - DNA, 1368 bp, Haemophilus somnus 129PT
  CDS (1)..(1368): transl_table=11
atgttgatcaataaaacaaaacgggcgaaacaaaatttggagcggttaccttgtattcctttgcaagcagagcaagttgagtttatttatcattcttcagattttaaacaacagattattcagtgtattcgtcaagcaaaatcaagaatttatttcaccgcactttactggcaaaacgacgaggcgggacagcaaatcctagatgagatttatcgtgctaaacaggcaaatcctgaattagaggtaaaaattttggttgattggcatcgtgcacaacgtaatttacttggtgctgagaaaagtgccacgaatgcggattggtattgtgatgaacgcagtaaatatcagttggctgacgatcctaatatattttttggtgtgccaatcaatactagagaagtattcggtgtattgcatattaaggggtttgtgtttgatgatacggttttatatagcggtgcgagcattaataatgtgtatctacaccaacaaacaaaatatcgttatgatcgttatcataaaattgaaaataagagattggctgatattttagtcagctttgttaagaattatttattcgatcctaatgtggtttatccgcttgattccggtgatcgtcctaaaaccaaagaaattcgtcagtatattcgtaattttcgtaaatatcttgccggtgagggacagtattatgtggaatcttcagtgaccttaaatgacagtttgacgatttgtccattatttgggttaggtgcaaatcataatttacttaatcaaaccattgaagatttatttcaagttgttgaggataagttaacaatttgtacgccttattttaattttcctcgtttattacagcaaaaagtacgccgtttgctggctaaaggaaagcaaatagaaattattgtaggtgataaaacggctagtgatttttatattcctccatcagagccttttaaaatggcgggagcattgccatatctttatgagaaaaatttgcgtcattttagtaaaaaatttaccaagcaaattgaacaagggcagttagttgtccggatttggaaagatggtgaaaacagctaccatctaaaaggcatttgggttgatgattgttatatgttgttgacaggaaataatttaaatcctcgtgcttggcgtttagatgcggaaaatggcttatttattcatgatccgaaacaacaattacaaacacaaattcaacaagagctgacctatattcgtcgaaatactactattctaaaacattatactgagttaagtgatctgactcagtatccgaagccggtacaaaaaatattgaaaaaatttgcccgcattaaagcagataagttagtgaagatgattttgtaa

SEQ ID NO: 125189 - protein, 455 aa, Haemophilus somnus 129PT
MLINKTKRAKQNLERLPCIPLQAEQVEFIYHSSDFKQQIIQCIRQAKSRIYFTALYWQNDEAGQQILDEIYRAKQANPELEVKILVDWHRAQRNLLGAEKSATNADWYCDERSKYQLADDPNIFFGVPINTREVFGVLHIKGFVFDDTVLYSGASINNVYLHQQTKYRYDRYHKIENKRLADILVSFVKNYLFDPNVVYPLDSGDRPKTKEIRQYIRNFRKYLAGEGQYYVESSVTLNDSLTICPLFGLGANHNLLNQTIEDLFQVVEDKLTICTPYFNFPRLLQQKVRRLLAKGKQIEIIVGDKTASDFYIPPSEPFKMAGALPYLYEKNLRHFSKKFTKQIEQGQLVVRIWKDGENSYHLKGIWVDDCYMLLTGNNLNPRAWRLDAENGLFIHDPKQQLQTQIQQELTYIRRNTTILKHYTELSDLTQYPKPVQKILKKFARIKADKLVKMIL

SEQ ID NO: 125190 - DNA, 1314 bp, Shewanella sp. ANA-3
  CDS (1)..(1314): transl_table=11
ttgctagataagcttggtggaatagccgttcaacccgaggctttaacgtggttgcttacgccatgccgatttaaggcagaattgctcagccgtatcgaaaatgccaaggacagcatttatatcgccgcactctatcttgaagacgatgaggcggggcgcgaaattttacaggccttgatgacggctaaggcgaataaccccgcgttagatgtcaagattttggtggattttcaccgcgccagacgcggcttgattggtcacaagggcgatagcggtaactatctgatgtaccgcaaggtcatggccgaggcagagcatcctatcgatattatgggcgtgccagtcaaatcccgcgagtttatgggcgtactgcaccttaagggctttgtgattgacgatgccgtgatttacagtggtgccagcctgaataacatttatctacagcaaaacgataaataccgtttcgaccgttaccatgtgattgagtcggccgagttagcacgcagtatgcgcactatgatccagcgctatattattgccgatcctgccgttgcatcacttactcaagatgcgcagcaagaagtcttgccacccaaaaccgatgtgcgcagcttcaaactgcgattatcacaggcacagtacgagtttaacgcgacccgcagtggcaaccgtgtcacccctttactgggattaggccgcaaacataacctgctgaataaagccgtgattgccatggtggaagagtcgaaagataggctgtttatctgcacgccttattttaatcctccctatattctggtgcgtgccttggctaagcacctgcgtaaaggcaaacgtatcgacatagtcgtaggggataaaacggcgaatgacttttacattccgcccgagcaggatttttctaccattggggccttgccgtatctgtatgagcaatcgctgcgtaaatttgctaagcgtcagcaatgggcaatcgataatggccagcttaatattcacctgtggaaacacggtatcaatagctatcacctcaaggggatcagcgccgatgggcgtaagcatttgatcacgggctcaaacttaaacccaagagcatgggcgctggatttagagaatgggttactcattcacgatgaaagcggtagctggaaggcgcaattcgaggccgaacaaagccatatcctcgaacacacgcaacggctgtatcactacagtcaagtggataccttacaaagctatcccgccccagtgaagaagattatgaatcgtattagaaggctaaaagcagatttcctgctcagacgcattctctaa

SEQ ID NO: 125191 - protein, 437 aa, Shewanella sp. ANA-3
MLDKLGGIAVQPEALTWLLTPCRFKAELLSRIENAKDSIYIAALYLEDDEAGREILQALMTAKANNPALDVKILVDFHRARRGLIGHKGDSGNYLMYRKVMAEAEHPIDIMGVPVKSREFMGVLHLKGFVIDDAVIYSGASLNNIYLQQNDKYRFDRYHVIESAELARSMRTMIQRYIIADPAVASLTQDAQQEVLPPKTDVRSFKLRLSQAQYEFNATRSGNRVTPLLGLGRKHNLLNKAVIAMVEESKDRLFICTPYFNPPYILVRALAKHLRKGKRIDIVVGDKTANDFYIPPEQDFSTIGALPYLYEQSLRKFAKRQQWAIDNGQLNIHLWKHGINSYHLKGISADGRKHLITGSNLNPRAWALDLENGLLIHDESGSWKAQFEAEQSHILEHTQRLYHYSQVDTLQSYPAPVKKIMNRIRRLKADFLLRRIL

SEQ ID NO: 125192 - DNA, 1368 bp, Haemophilus somnus 2336
  CDS (1)..(1368): transl_table=11
atgttgatcaataaaacaaaacgggcgaaacaaaatttggagcggttaccttgtattcctttgcaagcagagcaagttgagtttatttatcattcttcagattttaaacaacagattattcagtgtattcgtcaagcaaaatcaagaatttatttcaccgcactttactggcaaaacgacgaggcgggacagcaaatcctagatgagatttatcgtgctaaacaggcaaatcctgaattagaggtaaaaattttggttgattggcatcgtgcacaacgtaatttacttggtgctgagaaaagtgccacgaatgcggattggtattgtgatgaacgcagtaaatatcagttggctgacgatcctaatatattttttggtgtgccaatcaatactagagaagtattcggtgtattgcatattaaggggtttgtgtttgatgatacggttttatatagcggtgcgagcattaataatgtgtatctacaccaacaaacaaaatatcgttatgatcgttatcataaaattgaaaataagagattggctgatatcttagtcagctttgttaagaattatttattcgatcctaatgtggtttatccgcttgattccagtgatcgtcctaaaaccaaagaaattcgtcagtatattcgtaattttcgtaaatatcttgccggtgagggacagtattatgtggaatcttccgtgaccttaaatgacagtttgacgatttgtccattatttgggttaggtgcaaatcataatttacttaatcaaaccattgaagatttatttcaagttgttgaggataagttaacaatttgtacgccttattttaattttcctcgtttattacagcaaaaagtacgccgtttgctggctaaaggaaagcaagtagaaattattgtaggtgataaaactgctagtgatttttatattcctccatcagagccttttaaaatggcgggagcattgccatatctttatgagaaaaatttgcgtcattttagtaaaaaatttaccaagcaaattgaacaagggcagttagttgtccggatttggaaagatggtgaaaacagctaccatctaaaaggcatttgggttgatgattgttatatgttgttgacaggaaataatttaaatcctcgtgcttggcgtttagatgcggaaaatggcttatttatccatgatccgaaacaacagttacaagcacaaattcaacaagagttgacctatattcgtcgaaataccactgttctaaaacattatactgagttaagtgatctgactcagtatccgaagccggtacaaaaaatattgaaaaaatttgcccgcattaaagcagataagttagtgaagatgattttgtaa

SEQ ID NO: 125193 - protein, 455 aa, Haemophilus somnus 2336
MLINKTKRAKQNLERLPCIPLQAEQVEFIYHSSDFKQQIIQCIRQAKSRIYFTALYWQNDEAGQQILDEIYRAKQANPELEVKILVDWHRAQRNLLGAEKSATNADWYCDERSKYQLADDPNIFFGVPINTREVFGVLHIKGFVFDDTVLYSGASINNVYLHQQTKYRYDRYHKIENKRLADILVSFVKNYLFDPNVVYPLDSSDRPKTKEIRQYIRNFRKYLAGEGQYYVESSVTLNDSLTICPLFGLGANHNLLNQTIEDLFQVVEDKLTICTPYFNFPRLLQQKVRRLLAKGKQVEIIVGDKTASDFYIPPSEPFKMAGALPYLYEKNLRHFSKKFTKQIEQGQLVVRIWKDGENSYHLKGIWVDDCYMLLTGNNLNPRAWRLDAENGLFIHDPKQQLQAQIQQELTYIRRNTTVLKHYTELSDLTQYPKPVQKILKKFARIKADKLVKMIL

SEQ ID NO: 125194 - DNA, 1365 bp, Actinobacillus pleuropneumoniae serovar 1 str. 4074
  CDS (1)..(1365): transl_table=11
atgctcattctcaataaacctaatcacgccaaaaaacagctggaagcattacgttttatcccgcaaacggcggataaagtggaatttctatccgatagtcgtgagttcaaagagcgcattttaacgctaatcaaaaatgcaaaaaaacgcatttatttaaccgctttatattttgaacaagatgaagcggggcaagaagttttaaccgctttatatcaagcgaaacgagataatcctacgctcgatattaaagtcctcgtcgattggcacagagcgcaacgaggtcgtatcggagaagaaacgacaagttcaaatgccgattggtatgtaaaaatcaaacaacaatataatttaccgactgatcaagaaattcagttttggggcgtgccggttaatcgcaaagagttattcggcgtattgcatttaaaaggctttatcttcgatgatacgttactctatagcggcgcaagtattaataacgtctatctgcaacaattcgaacgttatcgttacgaccgttatcatgtgattgaaaataaagccttaaccgatgccatagtcgagtttgccgatacgcatattttgcagcatgatgcggtaaatcgtctggataatgccaaccgtccgaaaacgcacgaaattcgaccgcttatcaaagcgtttcgtaaatatttatccgcacaaagttatatatttaacggacagccgcaaagtgatcaattgagcttatcgccgttagtcggtttaggacgtaaaaatgcgttaaataaaaccattgaagccttgttttatcaggtggaagataaattaacgatatgtacgccgtattttaattttccgctttcgctctataagcgtttaaattggttattggatcacggtaaaaaagcggaaattattgtcggcgataaaaccgccaacgatttttatacgccgccggaagaaaaatttacgatggcatcggcattgccgtatttatatgagaaaaatttacgcgcctttgccaaacgttttgatcgttatattcagaacgggcaattaaccgtacgtctatggaaacacggcgataatagttaccatctgaaaggggtatggattgatagccgctacattctactaaccggcaacaatctaaatcctcgagcgtgggctttagatgcggaaaatgcggtattaatttatgacccgaaagccgaactaagcgcaaaggcagaaaccgaattaacgcagattcgtactcatacgacggttttaaaacactatagtgacttagagcaaattaacgattatcccgaagcggtacgaaaactgttaaaacgtttcggtcgagtgaagttggataaagtcgtcaaaatgttgttataa

SEQ ID NO: 125195 - protein, 454 aa, Actinobacillus pleuropneumoniae serovar 1 str. 4074
MLILNKPNHAKKQLEALRFIPQTADKVEFLSDSREFKERILTLIKNAKKRIYLTALYFEQDEAGQEVLTALYQAKRDNPTLDIKVLVDWHRAQRGRIGEETTSSNADWYVKIKQQYNLPTDQEIQFWGVPVNRKELFGVLHLKGFIFDDTLLYSGASINNVYLQQFERYRYDRYHVIENKALTDAIVEFADTHILQHDAVNRLDNANRPKTHEIRPLIKAFRKYLSAQSYIFNGQPQSDQLSLSPLVGLGRKNALNKTIEALFYQVEDKLTICTPYFNFPLSLYKRLNWLLDHGKKAEIIVGDKTANDFYTPPEEKFTMASALPYLYEKNLRAFAKRFDRYIQNGQLTVRLWKHGDNSYHLKGVWIDSRYILLTGNNLNPRAWALDAENAVLIYDPKAELSAKAETELTQIRTHTTVLKHYSDLEQINDYPEAVRKLLKRFGRVKLDKVVKMLL

SEQ ID NO: 125196 - DNA, 1368 bp, Haemophilus influenzae R2866
  CDS (1)..(1368): transl_table=11
atgttaatcaataaaaccaaacgagctgaacaaaatttaaataatttgccattccttgccttgcaagccgagcaaattgaatttttgggtagctcggctgaatttaaaactcaaattattgaattaatcagaaacgcaaaaaaacgtatttatgttaccgcactttattggcaaaaagacgaagcggggcaggaaattctcgatgaaatttatcgcgtgaagcaagaaaatccacacttggatgtaaaaattctcatagattggcatcgcgcacaacgcaatttattaggagcggaaaaatctgccactaatgcagactggtattgcgagcaacgccaaacttatcagttacctaatgatccgaatatgttctttggcgtgccaattaatacgcgcgaagtttttggtgtattgcacgttaaaggctttgtatttgatgatacggtgctttatagcggtgcaagcattaataatgtctatcttcatcaatttgaaaaatatcgttacgaccgctatcaaaaaatcactcatgccgaattagctgattcgatggtaaatttcatcaatgattacttgttagatttcagtgccgtttatccacttgatgtgaccaaccgccctcgcaccaaagagatccgaggcaatattcgcgcttatcgtaaagatcttgcacaaaatggagaatattcattaaaaagtgcggtgaaattaccgaattttttaagcgtatcgccactgtttggcttaggcgcatcgggcaacgaattaaatcaagtgattgaagatttattcttgcaagtgcaagaaaaattggtgatttgtacgccatattttaatttcccacgcacattgcaacataaaatagcaacattattggaaagcggtaaacgagtagaaattattgttggcgataaagtcgcaaacgatttttacattccaccagaacaaccattcaaaatggcgggggcgttaccttatctttatgaaagtaatcttcgccgtttctgtgaaaaatttgagactcaaattgaaagtggtcagcttgtggtgcgtttatggcgtgatggcgataatacctaccacttaaaaggtgtgtgggtagatgaccgctatattttactcacgggcaataatcttaaccctcgagcgtggcgtttggatgcagaaaatggcttattaatttacgatcctcaacaacagcttttcgcccaagtggaaaaagagcaaaaccaaattcgccaacatacaaaagtattaaaacattacactgaattagaagaattgaatcaatacccagaaccagtgcaaaaacttttgaaaaaatttgcacggattaaagcagataaattggtgaaaatgattttgtaa

SEQ ID NO: 125197 - protein, 455 aa, Haemophilus influenzae R2866
MLINKTKRAEQNLNNLPFLALQAEQIEFLGSSAEFKTQIIELIRNAKKRIYVTALYWQKDEAGQEILDEIYRVKQENPHLDVKILIDWHRAQRNLLGAEKSATNADWYCEQRQTYQLPNDPNMFFGVPINTREVFGVLHVKGFVFDDTVLYSGASINNVYLHQFEKYRYDRYQKITHAELADSMVNFINDYLLDFSAVYPLDVTNRPRTKEIRGNIRAYRKDLAQNGEYSLKSAVKLPNFLSVSPLFGLGASGNELNQVIEDLFLQVQEKLVICTPYFNFPRTLQHKIATLLESGKRVEIIVGDKVANDFYIPPEQPFKMAGALPYLYESNLRRFCEKFETQIESGQLVVRLWRDGDNTYHLKGVWVDDRYILLTGNNLNPRAWRLDAENGLLIYDPQQQLFAQVEKEQNQIRQHTKVLKHYTELEELNQYPEPVQKLLKKFARIKADKLVKMIL

SEQ ID NO: 125198 - DNA, 1332 bp, Pseudoalteromonas tunicata D2
  CDS (1)..(1332): transl_table=11
gtgcaaaacgttttatggcagcaaatgcccgcatttggtttaaattcaacagatattgaagtgctttttagtgcgaagcagtataagcagcgcttgctctctttaattgcgcaagcaactacccgcatttatttaacggcactgtacttgcaagatgatgaagcaggccgcgaaattttaactgcattacatgaagcttcattagctaatccgaaaatggaagtcaaagtttttgtcgattatcaccgtgcgcaacgaggattaataggtgcctcttcacaagagggcaatgctaaattttatttcgactttgccaaagagtttgattcgaatgtgcaaatatttggggtgcctgttaaagcaaaagagctttttggggtgctgcatgctaaaggatttgtatttgacgataccgtgttatacagcggtgctagtttaaataacgtgtatttacagcaagaacaacgttatcgccttgatcgctattttatattaaagcaacaaaagcttgctgatgcgatggttggatttttagagcaaaattttgtgcaaagtgatgctgtgccgcggctcgatcttcgtcctattccgcgtttagttgaaatgaaagcagcacataagcagttagtgaagcatttaaaaacatttcagtatgagaatgttaattcagcagttgatggcaaaattaaagcgcgattattttgtggactagctcgccgtggtaatcaacttaaccgaactattaagcagttgtttgaatcagctcaatcagaactgattttatatacaccgtactttaattttcctgcgcctttacttcgcaccttagcaaaaaaattaaagcagggcgttaaagtgacgatcgtggtcggtgataaaaccgccaacgatttttatcttccgccagaagaaccctttagtaaaattggcgccttaccttatttatatgaaaccattttgcatcgttttttagagcgtaaacatcagtatatagaatctaaacaacttaatgtttatctttggaaagatgataataattcatttcatttaaaaggcgtaagtgtcgataaacaactgcatttgctaacaggccataatttgaatccacgagcgtggggcttagatttagaaaatggtattttattagctgataaagaaggtctgttacagcctgatttagaaaaagaaaagcagcaaattttagcgcattgcactcagttgaccagttatgctgatgttgaaacaattgataactatccagatccggttaaaaagattttaggacaagctaaacgcgtcaaagttgattttattatcaaacgttttatttaa

SEQ ID NO: 125199 - protein, 443 aa, Pseudoalteromonas tunicata D2
MQNVLWQQMPAFGLNSTDIEVLFSAKQYKQRLLSLIAQATTRIYLTALYLQDDEAGREILTALHEASLANPKMEVKVFVDYHRAQRGLIGASSQEGNAKFYFDFAKEFDSNVQIFGVPVKAKELFGVLHAKGFVFDDTVLYSGASLNNVYLQQEQRYRLDRYFILKQQKLADAMVGFLEQNFVQSDAVPRLDLRPIPRLVEMKAAHKQLVKHLKTFQYENVNSAVDGKIKARLFCGLARRGNQLNRTIKQLFESAQSELILYTPYFNFPAPLLRTLAKKLKQGVKVTIVVGDKTANDFYLPPEEPFSKIGALPYLYETILHRFLERKHQYIESKQLNVYLWKDDNNSFHLKGVSVDKQLHLLTGHNLNPRAWGLDLENGILLADKEGLLQPDLEKEKQQILAHCTQLTSYADVETIDNYPDPVKKILGQAKRVKVDFIIKRFI

SEQ ID NO: 125200 - DNA, 1350 bp, Photobacterium sp. SKA34
  CDS (1)..(1350): transl_table=11
atggattcagctattgctaacaggcaaatcatcgaacaactgccatgtattgcgcacaagcccgagaatttagagactctttttgatgcaaattcgtttagagagcgtctatatcaagaaataaaatcagctaaagaacgcatttacttagttgctttatatcttcaagatgatgaagcaggaagaggtgtgcttactgctctgtatgaagcaaaacaactcaatccagaactcgatataaaagtattagttgattggcatagagctcaacgaggcttaattggcgccagtcagtccgatggcaatgccgcgctatatcgtgagtacgcagaaaaatatactcataagatagatgtgcttggcgtaccggttcgtaatcgagaagtgtttggtgtcctacacctgaaaggctttgttattgacgataatgttatttatagcggtgcaagcttaaatgatgtgtatctcgctcaacatgaccgttatcgttacgaccgctaccacgttattaaaaatgaaaagctagctaacagcatggcgcaactcattattgatatacttgtttcgagtaatgcagttaactgccttgcacaaccggaaagacccgatacaaagtcattgaaagtggcaattcgagatctacgctctgaactacaacaagctatctaccattttgagccagatgagattaaaaatgacgaggtaggattaacccccctgatcggtttagggaaacgtaaaaacaaactgaatcaggatatttgtacactgattgctagtgcacaatcagagatgactatttgtactccctactttaactttccaaggatggtgagtcgcgaagtaaaaaaagcgcttaaacgcggtgtaaaaatcactatcgttgttggtgataaaactgcaaatgacttttatattccaccatcagagccttttaagactattgctgggttaccttacttatatgaagtcaatttacgcaattttgccaaacataatgaagccgctattgcacatcgtcaattagcgatccatttatggaaacacgataacaatagttttcacttaaaggggctttgggtcgatcgccgttatatgttagtaacgggtaataacctaaatccacgagcttggaaacttgatcttgaaaatgcgattttaattcatgacaaaaatcaactactcgccgagcaacaacaacaagagttaaattgtattctcgaacatacccagctcattggtagttataagcaaattgaaaagattgataactaccctgctcaagttaaaaagctcatcacacgtattcgtcgtgttaaagctgatcatatcctaaatcagattctataa

SEQ ID NO: 125201 - protein, 449 aa, Photobacterium sp. SKA34
MDSAIANRQIIEQLPCIAHKPENLETLFDANSFRERLYQEIKSAKERIYLVALYLQDDEAGRGVLTALYEAKQLNPELDIKVLVDWHRAQRGLIGASQSDGNAALYREYAEKYTHKIDVLGVPVRNREVFGVLHLKGFVIDDNVIYSGASLNDVYLAQHDRYRYDRYHVIKNEKLANSMAQLIIDILVSSNAVNCLAQPERPDTKSLKVAIRDLRSELQQAIYHFEPDEIKNDEVGLTPLIGLGKRKNKLNQDICTLIASAQSEMTICTPYFNFPRMVSREVKKALKRGVKITIVVGDKTANDFYIPPSEPFKTIAGLPYLYEVNLRNFAKHNEAAIAHRQLAIHLWKHDNNSFHLKGLWVDRRYMLVTGNNLNPRAWKLDLENAILIHDKNQLLAEQQQQELNCILEHTQLIGSYKQIEKIDNYPAQVKKLITRIRRVKADHILNQIL

SEQ ID NO: 125202 - DNA, 1341 bp, Vibrio sp. Ex25
  CDS (1)..(1341): transl_table=11
atgatagtaagtaggaatccattcgaacagttgccaagtctcgctgtcaatccggaagactttgatgttctgtattcagcagaatcattcaggactcgtcttttggatgcaatcagcaaagcaacgtcgcgaatttacctagtcgctctatatctggaagatgatgaagctggacgtgaaattctcactgcgctttatgaagcgaaacagcgcaatcctgggttggacatcaatatctgtgtcgactggcatcgagcgcagcgtggcctgattggtgcggaaacatctgagggtaattctgcgctttacaaagcgtatgccaataagtaccaacacccgatccctgtctatggcatacctgtgcgtggcagagaggtttttggggtactgcatttaaaaggcttcattgtcgatgatactgtcatctacagtggagcaagcttaaataatgtttatctgcactatcacgaacgctatcgctttgatcgttaccatgtgattcgacatgagtctctagctaattcaatggtgcaattcattcaggaagagatgattgctcaccctgctgtcaatgatcttgctggaaaagataagccagaaaccaaagaaattaagtcggcgattcgtcaactgagagcttcacttgctcaagctaattataagtttgaagaccaaccaccaacagaggaaagtgtaaaaatcaccccactagttggtctaggcaaacgccgcaatctgctcaatcaacagattgtaaagttactagcggccgcccaaaacgaaatctttatctgtacgccttactttaacttccctaaagcgctgcatcgtgaagtgaagcgagccatgaaacgcggtgtgaaagtaactattgttgtgggcgacaagacagcaaacgacttttatattgcccctgaggaagactttaaaaccattggtggacttccatatctgtatgaagtaaacctacgccgctttgcgaaagcaaatgaagcgaatatcgctgcgcgtaaactgtcaattcacctctggaagcatgacaataatagcttccatctcaaaggcatttgggttgataaacgctatatgctactgacggggaataacttaaatcctcgggcttggtcacttgatctagaaaatggacttctcatccaagacaattatgcgaaactcactgataagttcgaagatgaggtttcgcgtatccttgagcatacccaccttatctgtacttataaacagttagaaaaagtggaagattatccgataggggtgcaacggttagtaagaaaaataacccgcctaaaagcagatggggttttaaaacgcatcctgtaa

SEQ ID NO: 125203 - protein, 446 aa, Vibrio sp. Ex25
MIVSRNPFEQLPSLAVNPEDFDVLYSAESFRTRLLDAISKATSRIYLVALYLEDDEAGREILTALYEAKQRNPGLDINICVDWHRAQRGLIGAETSEGNSALYKAYANKYQHPIPVYGIPVRGREVFGVLHLKGFIVDDTVIYSGASLNNVYLHYHERYRFDRYHVIRHESLANSMVQFIQEEMIAHPAVNDLAGKDKPETKEIKSAIRQLRASLAQANYKFEDQPPTEESVKITPLVGLGKRRNLLNQQIVKLLAAAQNEIFICTPYFNFPKALHREVKRAMKRGVKVTIVVGDKTANDFYIAPEEDFKTIGGLPYLYEVNLRRFAKANEANIAARKLSIHLWKHDNNSFHLKGIWVDKRYMLLTGNNLNPRAWSLDLENGLLIQDNYAKLTDKFEDEVSRILEHTHLICTYKQLEKVEDYPIGVQRLVRKITRLKADGVLKRIL

SEQ ID NO: 125204 - DNA, 1326 bp, Alteromonadales bacterium TW-7
  CDS (1)..(1326): transl_table=11
atgttattttggcaggaaaaacccgcatttgggttgacttcaaaagacgttaacgtcttaaccaatgcgcaagattaccgcacacaattacttaatttaatcgctaacgcaaaaaagcgcatttatattactgcgctttatttgcaagatgatgaagcaggccgcgaagttttagaggcattacacaatgcgtctttagccaaccctgcacttgaagtaaaagtactggtcgattttcatcgtgcccagcgtgggcttattggtgctgagaaatcagacgggaacgcaagtttatactgtgactatctagaaaaatttaaatcaaatgtacaagtatttggtgtaccggtaaaagcgaaagagctgtttggtgtattacacctaaaaggttttgtaatagacgatactttgctttacagcggtgctagcctaaataatgtgtatttgcagtacattgaccgctacaggcttgaccgttactttttaattacacaaaaaggcctgtgtgactctgtaatagactttattgaatcaaagctattgagttcagtggcagtgcctcgtatcgacacgcgtccgctcaagcgattaattgactttaagcttgaacaaaagcaattaatgcgtgatctaaaagcagcaagttataagtcggctgagcaagcaagcaataatgcgttaaatattcgcttgtttttagggcttgggcgtcgtcataacgaacttaatcgtatgatcaaagccctttttgatacaacagagcgtgagttagtactttatacaccgtacttcaattttcctgcgccgcttatgcgttcgttacgcaggcttttgaaacaaggcaaacatattacaattgttgtgggtgataaaaccgctaatgatttttatatgccacctagtgagccgtttagtaaaattggtgcgttgccttatttatacgaaactattttacataaatttgttaaaacacaaaaacgccatatagataacggtaacttaaatgtatacctttggaaacacgacaataactctttccatttaaaaggaatatgtgcagatagatcaaagcatttattgagtgggcataacctaaacccacgagcatggggcttagacatagaaaacgggatattaattgaagatcctgagcaaactattatgcaagcaattgataacgaaaagcatgaaattcttaagcactgtcgccgactaacagggccagacgatttagaaaccatggaagattaccctcagccagttaaaaagttacttggccaagcaaaacgggtaaaagtagactttattattaaacggtttatttag

SEQ ID NO: 125205 - protein, 441 aa, Alteromonadales bacterium TW-7
MLFWQEKPAFGLTSKDVNVLTNAQDYRTQLLNLIANAKKRIYITALYLQDDEAGREVLEALHNASLANPALEVKVLVDFHRAQRGLIGAEKSDGNASLYCDYLEKFKSNVQVFGVPVKAKELFGVLHLKGFVIDDTLLYSGASLNNVYLQYIDRYRLDRYFLITQKGLCDSVIDFIESKLLSSVAVPRIDTRPLKRLIDFKLEQKQLMRDLKAASYKSAEQASNNALNIRLFLGLGRRHNELNRMIKALFDTTERELVLYTPYFNFPAPLMRSLRRLLKQGKHITIVVGDKTANDFYMPPSEPFSKIGALPYLYETILHKFVKTQKRHIDNGNLNVYLWKHDNNSFHLKGICADRSKHLLSGHNLNPRAWGLDIENGILIEDPEQTIMQAIDNEKHEILKHCRRLTGPDDLETMEDYPQPVKKLLGQAKRVKVDFIIKRFI

SEQ ID NO: 125206 - DNA, 1314 bp, Pseudomonas putida GB-1
  CDS (1)..(1314): transl_table=11
atgctggcggcgttgccaggctacgccctggcgcccgagtcgatccaggtgctgcctgatgccaaggcctatcgcacctgcctgttcgaccgcatccgcacggcaacccggcgcatcgtcatcgtcgcgctgtacctgcaggaagacgaggccggccaggaagtgctggatgccttgtaccaggccaaggccgcgcgccctaacctggaaatcaccattgtggtcgactggttccgcgcccgtcgcgggttgcttggtggtgggcgtcaaccgggcaacgctgcctggtaccaggctcagcgccagctgcgcgggctggatatcgccattcatggtgtgcccgtgcagactcgcgagctgttcggggtgttgcacctgaagggcagcatcatcgacgattgcgtgatctacaccggcgccagcctgaacaacgtctacctgcaccgcttcgaccgttatcgcctggaccgctatcacctgttccagtcacctgagctggccgatgccatggtcggcctggtgcagcgtctgctgcaccccaccgccacaccgcgtctcgacctgccggcgccgccctctacccgcaacttgcgcggcgacattcggcgtttgcgcgcgcggctgcggcgcatggcctacgaggcgccggccagcgctgcggggcaggggctacgggtgatcccgctgctgggtgtgggccgtggcaacccgctgaaccgggcgctgtgcgcgttgctggctgcggcgcgcacgcagatcatcatcagcacgccgtatttcaacccgccacgggtggtgatgcgcgagcttgaccatgcgcttgagcggggcgtgcaagttgagctgatggtcggtcaccgcacggccaatgacttctacatcgcccccggtgagccgttcagtgccagtggcgccttgccttatctgtacgaagacaacctgcgtgccttcgccaggcgccgccatgccgcgattgccagcggccagttgcaagtgcggatctggaacgatccggggcatacctttcatgccaagggcgtgtgggtcgaccagcgctattcgctgctgaccggtaacaacctgaacccgcgcgggttcaacctggacctggaaaacggcctgctgatcgatgacccgcaagggcagtggctggtaccacgggaagcggagctgaacgcactgcgccggcatgcgccgaagattggctcggcagaggcgctgggggtgaaggccgaacaccccaaggaagtacgcaaacttctgcggcggttgcgttttagccggttggaaccgttgatcaagcgagtgctctga

SEQ ID NO: 125207 - protein, 437 aa, Pseudomonas putida GB-1
MLAALPGYALAPESIQVLPDAKAYRTCLFDRIRTATRRIVIVALYLQEDEAGQEVLDALYQAKAARPNLEITIVVDWFRARRGLLGGGRQPGNAAWYQAQRQLRGLDIAIHGVPVQTRELFGVLHLKGSIIDDCVIYTGASLNNVYLHRFDRYRLDRYHLFQSPELADAMVGLVQRLLHPTATPRLDLPAPPSTRNLRGDIRRLRARLRRMAYEAPASAAGQGLRVIPLLGVGRGNPLNRALCALLAAARTQIIISTPYFNPPRVVMRELDHALERGVQVELMVGHRTANDFYIAPGEPFSASGALPYLYEDNLRAFARRRHAAIASGQLQVRIWNDPGHTFHAKGVWVDQRYSLLTGNNLNPRGFNLDLENGLLIDDPQGQWLVPREAELNALRRHAPKIGSAEALGVKAEHPKEVRKLLRRLRFSRLEPLIKRVL

SEQ ID NO: 125208 - DNA, 1356 bp, Edwardsiella ictaluri
  CDS (1)..(1356): transl_table=11
atgttgtccaaatttaagcgagccaaacatcaacaacaccttgctcaactgcccaaactcccacaacaggtcggcgaggtagagacgctgttttcgccggcggcattccgtcaggcgctgctagaggccatcggccaggcaactcagcggatctatctggtggcgctgtacctggaaaatgacgatggtggtcgggatgtgttaaatgcgctctatcaggctaaacgacagcgtccgcagctggagattttcgttctggtcgattggcatcgggcacagcgcggccgcatcggcgcagaggccagtaacaccaatgccgactggtactgccggatgaccaacgaatacccagatgttatcgtgccgatctatggcgtgccggtcaacacgcgcgaggccctgggagtactgcacctaaaaggttttgtcattgacgatcgggtgatctacagcggcgccagcctgaacgatgtctacctgcaccgtcatgacaagtaccgctacgatcgttaccactttatccggaatccgcgcctggctgcagtcatgtgtcaatttgttcagtcaaccttgctgggcaaccccgcggtgcagcgcctggaccgctgcgatcgtcccaaaagccctgaaatccgtaatgaaacccgccagttccgccatgcactgcgcgatagcagctatcaggtgccagcagaggctgggaacgaagagctggcggtgacgccattagccggtctgggtaaacagaatatcctgaataagaccattcatcaccttatctgctgcaccgagcggacgctcacactgtgtactccctatttcaacctgccaaccccgctggtacgcgatatcatcttcctgctgcgccagggaaaacaggttgaaatcatcgtcggagacaagaaggccaatgacttctttattccggaagaggagccattcaagatcatcggtgcattaccctatctgtatgaaatcaacctgcgtcgctttatcagtcggctccagccctaccttgataacgggcagttgaccgtacgtctgtggcgcgatgatgataatacctatcatctgaaaggcatgtgggtagacgatcgttggcagctgatcaccggcaacaatctcaatccgcgcgcctggcgcctggatttggagaatgcgattttaatccacgatccgcagggcgaaatccagcatcagcgccagcacgaactggagtgtatccgccgtcatacccaagtcgtacgtagctatgaggatctggaaaccattcagcaatatccgctgaaagtgcgcaagctgatccgccgcctgcgtcgcattcgcgtcgatcgcctgatcagccgcattctgtaa

SEQ ID NO: 125209 - protein, 451 aa, Edwardsiella ictaluri
MLSKFKRAKHQQHLAQLPKLPQQVGEVETLFSPAAFRQALLEAIGQATQRIYLVALYLENDDGGRDVLNALYQAKRQRPQLEIFVLVDWHRAQRGRIGAEASNTNADWYCRMTNEYPDVIVPIYGVPVNTREALGVLHLKGFVIDDRVIYSGASLNDVYLHRHDKYRYDRYHFIRNPRLAAVMCQFVQSTLLGNPAVQRLDRCDRPKSPEIRNETRQFRHALRDSSYQVPAEAGNEELAVTPLAGLGKQNILNKTIHHLICCTERTLTLCTPYFNLPTPLVRDIIFLLRQGKQVEIIVGDKKANDFFIPEEEPFKIIGALPYLYEINLRRFISRLQPYLDNGQLTVRLWRDDDNTYHLKGMWVDDRWQLITGNNLNPRAWRLDLENAILIHDPQGEIQHQRQHELECIRRHTQVVRSYEDLETIQQYPLKVRKLIRRLRRIRVDRLISRIL

SEQ ID NO: 125210 - DNA, 1566 bp, Saccharomyces cerevisiae
  CDS (1)..(1566)
atgacgactcgtttgctccaactcactcgtcctcattacagattattatccctacctctccagaaacccttcaatataaaaaggcagatgtccgctgcgaacccttctccatttggcaattatttgaacacgatcactaagtccctacaacagaatttacaaacatgctttcatttccaagcaaaagaaatcgatataatcgaatctccatctcagttttacgatctcttgaagacaaaaatacttaattcacaaaatagaatattcattgcgtctctgtatttaggcaaaagcgagactgagttggtggactgcatatcccaggcattgaccaagaaccccaagttgaaagtttcttttctacttgatggccttcgaggaacaagagaattgccttccgcctgttccgccactttattatcgtctttagtagccaaatatgggtcagagagagtggattgccgattgtacaagacgcctgcttatcatggttggaaaaaagtcttggttcccaagagatttaatgaaggtttaggcttacaacatatgaaaatatatgggtttgataacgaggtcattctttcgggagccaacctttcgaacgactatttcaccaacagacaagatagatactatctctttaaatctcgaaacttctccaactattattttaaattacatcaactcataagttccttcagttatcagattataaagccaatggtggatggtagcatcaacatcatttggccagattcgaatcctactgttgaaccgacgaaaaataaaaggctgtttttaagggaagcatctcaattactagatggctttttaaagagttctaaacaaagcctcccgattactgccgtgggtcaattctccacattagtttacccaatttctcaattcactccactttttcccaaatataatgacaaatcgaccgaaaaaagaacaatattgtcattgctttccactataacaagcaatgccatttcttggacgttcactgcaggatacttcaatattttgccagacatcaaagcaaaactgctggcaacgccggttgctgaggcaaatgtaataacagcttccccctttgcaaacggcttttaccaatcaaagggcgtctcatcaaatttacctggtgcttacttgtacctgtcaaaaaaatttctacaagatgtatgtaggtacagacaagatcatgctattacattaagagaatggcaaagaggcgtagtaaataagccgaatggttggtcatatcacgcaaaaggtatttggctttccgctcgtgataaaaatgatgctaacaattggaaaccctttatcacggttataggatcttcaaactatacgagaagggcgtattcattagatttggaatcgaatgctctcattattacaagagatgaagagctaagaaaaaaaatgaaagcagagttagataatttattacaatatacaaaacctgtaactctagaagactttcaatcagacccagaaagacatgttggcactggtgtaaagatagctacctccattttgggtaaaaaactttag

SEQ ID NO: 125211 - protein, 521 aa, Saccharomyces cerevisiae
MTTRLLQLTRPHYRLLSLPLQKPFNIKRQMSAANPSPFGNYLNTITKSLQQNLQTCFHFQAKEIDIIESPSQFYDLLKTKILNSQNRIFIASLYLGKSETELVDCISQALTKNPKLKVSFLLDGLRGTRELPSACSATLLSSLVAKYGSERVDCRLYKTPAYHGWKKVLVPKRFNEGLGLQHMKIYGFDNEVILSGANLSNDYFTNRQDRYYLFKSRNFSNYYFKLHQLISSFSYQIIKPMVDGSINIIWPDSNPTVEPTKNKRLFLREASQLLDGFLKSSKQSLPITAVGQFSTLVYPISQFTPLFPKYNDKSTEKRTILSLLSTITSNAISWTFTAGYFNILPDIKAKLLATPVAEANVITASPFANGFYQSKGVSSNLPGAYLYLSKKFLQDVCRYRQDHAITLREWQRGVVNKPNGWSYHAKGIWLSARDKNDANNWKPFITVIGSSNYTRRAYSLDLESNALIITRDEELRKKMKAELDNLLQYTKPVTLEDFQSDPERHVGTGVKIATSILGKKL

SEQ ID NO: 125212 - DNA, 1356 bp, Escherichia coli
  CDS (1)..(1356): transl_table=11
atgttgtcaaaatttaagcgtaataaacatcaacaacaccttgcccaactacccaagatttctcaatcagttgatgatgtcgatttcttttacgctcccgccgacttccgggagacgctgctggaaaaaatagccagcgcgaagcagcgcatttgcattgtcgccctgtatctcgaacaggatgacggtggcaaaggcattctgaacgcgttgtatgaagctaaaaggcagcgtccggaactggatgtgcgggtgctggtcgactggcatcgtgcacaacgtggacgcattggcgctgcggcatctaacactaacgctgactggtactgccgcatggcgcaggaaaatccgggcgtagatgttccggtttatggcgttccaatcaatacccgtgaagcccttggtgttctgcactttaaaggctttatcatcgacgatagcgtactttatagcggtgccagcctgaacgatgtttacctgcatcagcacgataaatatcgctacgaccgttatcatctgatccgtaaccgtaagatgtcagacattatgtttgaatgggttacacagaatattatgaatggccgcggcgttaatcgtctggatgatgttaatcggccaaaaagcccggaaatcaagaacgatattcgtctgttccgccaggagctgcgtgatgccgcttatcatttccagggcgatgccgacaacgatcagctttccgtaacgccgctagtggggctggggaaatcgagtctgttgaacaagaccattttccatcttatgccttgtgccgagcagaaactaaccatctgtacgccatacttcaacctgccagcaatccttgtgcgcaatattatccagttgctgcgcgaagggaaaaaggtcgaaattattgttggtgataaaaccgcgaacgacttctacattccggaagatgaacctttcaagataattggcgcattgccttatctctatgagatcaatctgcgtcgtttcctgagccgtttgcagtattacgtcaatactgaccagctagtggttcggttatggaaagatgacgacaacacctatcacctaaaagggatgtgggttgatgataagtggatgttgatcaccggtaataacctgaacccgcgcgcctggcgtctggatctggaaaacgccattttgatccacgatccacaactggagcttgcgccgcagcgagagaaagaactggagctgatccgcgagcataccaccatcgttaagcactatcgcgatctgcaaagtattgccgattatccggtgaaggttcgtaaactcatccgccgtttgcgccgtatccgcatcgaccgattaattagccgcatcctgtaa

SEQ ID NO: 125213 - protein, 451 aa, Escherichia coli
MLSKFKRNKHQQHLAQLPKISQSVDDVDFFYAPADFRETLLEKIASAKQRICIVALYLEQDDGGKGILNALYEAKRQRPELDVRVLVDWHRAQRGRIGAAASNTNADWYCRMAQENPGVDVPVYGVPINTREALGVLHFKGFIIDDSVLYSGASLNDVYLHQHDKYRYDRYHLIRNRKMSDIMFEWVTQNIMNGRGVNRLDDVNRPKSPEIKNDIRLFRQELRDAAYHFQGDADNDQLSVTPLVGLGKSSLLNKTIFHLMPCAEQKLTICTPYFNLPAILVRNIIQLLREGKKVEIIVGDKTANDFYIPEDEPFKIIGALPYLYEINLRRFLSRLQYYVNTDQLVVRLWKDDDNTYHLKGMWVDDKWMLITGNNLNPRAWRLDLENAILIHDPQLELAPQREKELELIREHTTIVKHYRDLQSIADYPVKVRKLIRRLRRIRIDRLISRIL

SEQ ID NO: 125214 - DNA, 28 bp, Artificial sequence
  primer
atgatgttgtcaaaatttaagcgtaata

SEQ ID NO: 125215 - DNA, 24 bp, Artificial sequence
  primer
ttacaggatgcggctaattaatcg

SEQ ID NO: 125216 - protein, 484 aa, Artificial sequence
  consensus sequence
  Variant (2)..(19): Xaa in position 2 to 19 is any amino acid
  Variant (21)..(27): Xaa in position 21 to 27 is any amino acid
  Variant (29)..(30): Xaa in position 29 to 30 is any amino acid
  Variant (32)..(33): Xaa in position 32 to 33 is any amino acid
  Variant (36)..(38): Xaa in position 36 to 38 is any amino acid
  Variant (42)..(44): Xaa in position 42 to 44 is any amino acid
  Variant (46)..(46): Xaa in position 46 is any amino acid
  Variant (47)..(47): Xaa in position 47 is any or no amino acid
  Variant (49)..(51): Xaa in position 49 to 51 is any amino acid
  Variant (53)..(57): Xaa in position 53 to 57 is any amino acid
  Variant (60)..(62): Xaa in position 60 to 62 is any amino acid
  Variant (64)..(64): Xaa in position 64 is any amino acid
  Variant (66)..(70): Xaa in position 66 to 70 is any amino acid
  Variant (74)..(74): Xaa in position 74 is any amino acid
  Variant (79)..(81): Xaa in position 79 to 81 is any amino acid
  Variant (83)..(88): Xaa in position 83 to 88 is any amino acid
  Variant (90)..(92): Xaa in position 90 to 92 is any amino acid
  Variant (94)..(107): Xaa in position 94 to 107 is any amino acid
  Variant (108)..(117): Xaa in position 108 to 117 is any or no amino acid
  Variant (121)..(123): Xaa in position 121 to 123 is any amino acid
  Variant (126)..(127): Xaa in position 126 to 127 is any amino acid
  Variant (132)..(132): Xaa in position 132 is any amino acid
  Variant (136)..(137): Xaa in position 136 to 137 is any amino acid
  Variant (140)..(140): Xaa in position 140 is any amino acid
  Variant (142)..(142): Xaa in position 142 is any amino acid
  Variant (148)..(148): Xaa in position 148 is any amino acid
  Variant (150)..(150): Xaa in position 150 is any amino acid
  Variant (154)..(158): Xaa in position 154 to 158 is any amino acid
  Variant (159)..(165): Xaa in position 159 to 165 is any or no amino acid
  Variant (168)..(168): Xaa in position 168 is any amino acid
  Variant (172)..(178): Xaa in position 172 to 178 is any amino acid
  Variant (181)..(195): Xaa in position 181 to 195 is any amino acid
  Variant (196)..(196): Xaa in position 196 is any or no amino acid
  Variant (198)..(198): Xaa in position 198 is any amino acid
  Variant (199)..(199): Xaa in position 199 is any or no amino acid
  Variant (201)..(204): Xaa in position 201 to 204 is any amino acid
  Variant (205)..(209): Xaa in position 205 to 209 is any or no amino acid
  Variant (211)..(219): Xaa in position 211 to 219 is any amino acid
  Variant (220)..(222): Xaa in position 220 to 222 is any or no amino acid
  Variant (224)..(225): Xaa in position 224 to 225 is any amino acid
  Variant (227)..(230): Xaa in position 227 to 230 is any amino acid
  Variant (231)..(231): Xaa in position 231 is any or no amino acid
  Variant (233)..(244): Xaa in position 233 to 244 is any amino acid
  Variant (245)..(253): Xaa in position 245 to 253 is any or no amino acid
  Variant (256)..(256): Xaa in position 256 is any amino acid
  Variant (258)..(258): Xaa in position 258 is any amino acid
  Variant (260)..(263): Xaa in position 260 to 263 is any amino acid
  Variant (264)..(264): Xaa in position 264 is any or no amino acid
  Variant (267)..(268): Xaa in position 267 to 268 is any amino acid
  Variant (270)..(271): Xaa in position 270 to 271 is any amino acid
  Variant (273)..(281): Xaa in position 273 to 281 is any amino acid
  Variant (289)..(289): Xaa in position 289 is any amino acid
  Variant (291)..(300): Xaa in position 291 to 300 is any amino acid
  Variant (302)..(303): Xaa in position 302 to 303 is any amino acid
  Variant (304)..(304): Xaa in position 304 is any or no amino acid
  Variant (306)..(309): Xaa in position 306 to 309 is any amino acid
  Variant (311)..(311): Xaa in position 311 is any amino acid
  Variant (323)..(323): Xaa in position 323 is any amino acid
  Variant (324)..(329): Xaa in position 324 to 329 is any or no amino acid
  Variant (331)..(335): Xaa in position 331 to 335 is any amino acid
  Variant (342)..(343): Xaa in position 342 to 343 is any amino acid
  Variant (346)..(346): Xaa in position 346 is any amino acid
  Variant (348)..(359): Xaa in position 348 to 359 is any amino acid
  Variant (361)..(364): Xaa in position 361 to 364 is any amino acid
  Variant (366)..(369): Xaa in position 366 to 369 is any amino acid
  Variant (370)..(375): Xaa in position 370 to 375 is any or no amino acid
  Variant (377)..(378): Xaa in position 377 to 378 is any amino acid
  Variant (383)..(383): Xaa in position 383 is any amino acid
  Variant (385)..(385): Xaa in position 385 is any amino acid
  Variant (387)..(390): Xaa in position 387 to 390 is any amino acid
  Variant (391)..(401): Xaa in position 391 to 401 is any or no amino acid
  Variant (403)..(403): Xaa in position 403 is any amino acid
  Variant (413)..(414): Xaa in position 413 to 414 is any amino acid
  Variant (417)..(417): Xaa in position 417 is any amino acid
  Variant (420)..(421): Xaa in position 420 to 421 is any amino acid
  Variant (424)..(424): Xaa in position 424 is any amino acid
  Variant (426)..(436): Xaa in position 426 to 436 is any amino acid
  Variant (438)..(440): Xaa in position 438 to 440 is any amino acid
  Variant (442)..(444): Xaa in position 442 to 444 is any amino acid
  Variant (446)..(452): Xaa in position 446 to 452 is any amino acid
  Variant (453)..(459): Xaa in position 453 to 459 is any or no amino acid
  Variant (462)..(463): Xaa in position 462 to 463 is any amino acid
  Variant (465)..(465): Xaa in position 465 is any amino acid
  Variant (467)..(472): Xaa in position 467 to 472 is any amino acid
  Variant (474)..(476): Xaa in position 474 to 476 is any amino acid
  Variant (478)..(483): Xaa in position 478 to 483 is any amino acid
LXXXXXXXXXXXXXXXXXXFXXXXXXXIXXAXXRIXXXALYXXXDXXGXXXLXXXXXAKXXXPXLXXXXXVDWXRAQRXXXGXXXXXXNXXXYXXXXXXXXXXXXXXXXXXXXXXXXGVPXXXREXXGVLHXKGFXXDDXVXYSGASXNXVYLXXXXXXXXXXXXYRXDRYXXXXXXXLAXXXXXXXXXXXXXXXXVXXLXXXXXXXXXPXXXXXXXXXXXXRXXLXXXXXYXXXXXXXXXXXXXXXXXXXXXPLXGXGXXXXXLNXXIXXLXXXXXXXXXICTPYFNXPXXXXXXXXXXLXXXGXXXXIXVGDKTANDFYIXXXXXXXFXXXXXLPYLYEXXLRXFXXXXXXXXXXXXLXXXXWXXXXXXXXXXNXXHLKGXWXDXXXXXXXXXXXXXXXLXTGNNLNPRAXXLDXENXXLIXDXXXXXXXXXXXEXXXIXXXTXXXXXXXXXXXXXXYPXXVXKXXXXXXRXXXDXXXXXXL

SEQ ID NO: 125217 - protein, 40 aa, Artificial sequence
  protein pattern
  Variant (2)..(2): Xaa in position 2 is any amino acid
  Variant (4)..(4): Xaa in position 4 is Ile or Val
  Variant (5)..(5): Xaa in position 5 is any amino acid
  Variant (6)..(6): Xaa in position 6 is Gly, Asn, Ser or Thr
  Variant (9)..(9): Xaa in position 9 is any amino acid
  Variant (10)..(10): Xaa in position 10 is Phe, Leu or Met
  Variant (15)..(15): Xaa in position 15 is Phe, Ile, Leu or Val
  Variant (18)..(18): Xaa in position 18 is any amino acid
  Variant (19)..(19): Xaa in position 19 is Ile or Val
  Variant (20)..(20): Xaa in position 20 is Phe, Ile or Val
  Variant (23)..(23): Xaa in position 23 is any amino acid
  Variant (24)..(24): Xaa in position 24 is Ile, Leu or Val
  Variant (25)..(25): Xaa in position 25 is Phe, Ile, Leu or Val
  Variant (27)..(27): Xaa in position 27 is Ser or Thr
  Variant (31)..(31): Xaa in position 31 is Ile or Leu
  Variant (33)..(33): Xaa in position 33 is Asp or Asn
  Variant (34)..(34): Xaa in position 34 is Ile or Val
  Variant (37)..(39): Xaa in position 37 to 39 is any amino acid
  Variant (40)..(40): Xaa in position 40 is Asp, Glu, Gly, Asn, Gln or Thr
GXPXXXREXXGVLHXKGXXXDDXXXYXGASXNXXYLXXXX

SEQ ID NO: 125218 - protein, 22 aa, Artificial sequence
  protein pattern
  Variant (2)..(2): Xaa in position 2 is Ile or Leu
  Variant (5)..(5): Xaa in position 5 is any amino acid
  Variant (12)..(12): Xaa in position 12 is Phe or Trp
  Variant (13)..(13): Xaa in position 13 is any amino acid
  Variant (16)..(16): Xaa in position 16 is Ala or Leu
  Variant (19)..(19): Xaa in position 19 is any amino acid
  Variant (20)..(20): Xaa in position 20 is any or no amino acid
  Variant (22)..(22): Xaa in position 22 is Phe, Ile, Leu or Val
LXTGXNLNPRAXXLDXENXXLX

SEQ ID NO: 125219 - protein, 23 aa, Artificial sequence
  protein pattern
  Variant (2)..(3): Xaa in position 2 to 3 is any amino acid
  Variant (4)..(4): Xaa in position 4 is Ala, Ile or Val
  Variant (5)..(5): Xaa in position 5 is any amino acid
  Variant (7)..(8): Xaa in position 7 to 8 is Ile or Val
  Variant (12)..(12): Xaa in position 12 is any amino acid
  Variant (14)..(14): Xaa in position 14 is Asn or Ser
  Variant (17)..(18): Xaa in position 17 to 18 is any amino acid
  Variant (19)..(19): Xaa in position 19 is any or no amino acid
  Variant (21)..(22): Xaa in position 21 to 22 is any or no amino acid
GXXXXIXXGDKXAXDFXXXPXXE

SEQ ID NO: 125220 - protein, 28 aa, Artificial sequence
  protein pattern
  Variant (2)..(4): Xaa in position 2 to 4 is any amino acid
  Variant (5)..(7): Xaa in position 5 to 7 is any or no amino acid
  Variant (9)..(11): Xaa in position 9 to 11 is any amino acid
  Variant (13)..(13): Xaa in position 13 is any amino acid
  Variant (15)..(15): Xaa in position 15 is Asp or Glu
  Variant (16)..(16): Xaa in position 16 is Ile or Val
  Variant (17)..(17): Xaa in position 17 is any amino acid
  Variant (18)..(18): Xaa in position 18 is Ile or Val
  Variant (19)..(19): Xaa in position 19 is any amino acid
  Variant (20)..(20): Xaa in position 20 is Ile or Val
  Variant (22)..(22): Xaa in position 22 is Phe or Trp
  Variant (23)..(23): Xaa in position 23 is any amino acid
  Variant (26)..(26): Xaa in position 26 is Gln or Arg
  Variant (28)..(28): Xaa in position 28 is Gly or Asn
LXXXXXXKXXXPXLXXXXXXDXXRAXRX

SEQ ID NO: 125221 - protein, 21 aa, Artificial sequence
  protein pattern
  Variant (2)..(2): Xaa in position 2 is any amino acid
  Variant (3)..(3): Xaa in position 3 is Ile, Leu or Val
  Variant (4)..(5): Xaa in position 4 to 5 is any amino acid
  Variant (7)..(7): Xaa in position 7 is Lys or Arg
  Variant (8)..(8): Xaa in position 8 is Asp, Glu or His
  Variant (9)..(10): Xaa in position 9 to 10 is any amino acid
  Variant (12)..(12): Xaa in position 12 is Ser or Thr
  Variant (13)..(13): Xaa in position 13 is Phe or Tyr
  Variant (18)..(18): Xaa in position 18 is Ile, Leu, Met or Val
  Variant (19)..(20): Xaa in position 19 to 20 is any amino acid
LXXXXWXXXXNXXHLKGXXXD

SEQ ID NO: 125222 - protein, 9 aa, Artificial sequence
  protein pattern
  Variant (2)..(2): Xaa in position 2 is Cys or Ser
  Variant (8)..(8): Xaa in position 8 is any amino acid
IXTPYFNXP

SEQ ID NO: 125223 - protein, 12 aa, Artificial sequence
  protein pattern
  Variant (7)..(7): Xaa in position 7 is any amino acid
  Variant (8)..(8): Xaa in position 8 is Asn or Ser
  Variant (11)..(11): Xaa in position 11 is any amino acid
LPYLYEXXLRXF

SEQ ID NO: 125224 - protein, 25 aa, Artificial sequence
  protein pattern
  Variant (2)..(3): Xaa in position 2 to 3 is any or no amino acid
  Variant (5)..(6): Xaa in position 5 to 6 is any amino acid
  Variant (7)..(8): Xaa in position 7 to 8 is any or no amino acid
  Variant (10)..(10): Xaa in position 10 is Ile or Val
  Variant (11)..(11): Xaa in position 11 is any amino acid
  Variant (12)..(12): Xaa in position 12 is Phe, Ile, Leu or Val
  Variant (13)..(13): Xaa in position 13 is any amino acid
  Variant (17)..(17): Xaa in position 17 is any amino acid
  Variant (18)..(18): Xaa in position 18 is Glu or Gln
  Variant (19)..(19): Xaa in position 19 is any amino acid
  Variant (21)..(21): Xaa in position 21 is Asp or Glu
  Variant (22)..(22): Xaa in position 22 is Ala or Gly
  Variant (24)..(24): Xaa in position 24 is any amino acid
  Variant (25)..(25): Xaa in position 25 is Asp, Glu, Gly or Gln
IXXAXXXXRXXXXALYXXXDXXGXX

SEQ ID NO: 125225 - protein, 22 aa, Artificial sequence
  protein pattern
  Variant (2)..(3): Xaa in position 2 to 3 is any or no amino acid
  Variant (5)..(6): Xaa in position 5 to 6 is any or no amino acid
  Variant (8)..(8): Xaa in position 8 is any amino acid
  Variant (9)..(9): Xaa in position 9 is Lys or Arg
  Variant (10)..(10): Xaa in position 10 is Phe, Ile or Leu
  Variant (11)..(11): Xaa in position 11 is Ile, Leu, Met or Val
  Variant (12)..(15): Xaa in position 12 to 15 is any amino acid
  Variant (17)..(17): Xaa in position 17 is Ile, Leu or Val
  Variant (18)..(18): Xaa in position 18 is Lys or Arg
  Variant (19)..(19): Xaa in position 19 is Ala, Ile, Leu or Val
  Variant (20)..(20): Xaa in position 20 is Asp or Glu
  Variant (21)..(21): Xaa in position 21 is any amino acid
  Variant (22)..(22): Xaa in position 22 is Ile, Leu or Val
YXXPXXVXXXXXXXXRXXXXXX

SEQ ID NO: 125226 - DNA, 333 bp, Escherichia coli
  CDS (1)..(333): transl_table=11
atgttttctataaaaccaggacccagaaatttacctatcgacaaccccacattgttatcatggaacattactgacggggatctaaattccaaattaaatacattagaatatctaaactgtataacaaatattattaattcttgtggagtttaccctcaaggattaaaagacagagaaattatatcaacttttcacgcagaaaaagttattaatgatctgttaaaaaacgattataaaatttccctttctccagatacaacttaccgagagttgaataaagcagcacagcgtagcattacagcgccagacaggataggagaaagaaaaacataa

SEQ ID NO: 125227 - protein, 110 aa, Escherichia coli
MFSIKPGPRNLPIDNPTLLSWNITDGDLNSKLNTLEYLNCITNIINSCGVYPQGLKDREIISTFHAEKVINDLLKNDYKISLSPDTTYRELNKAAQRSITAPDRIGERKT

SEQ ID NO: 125228 - DNA, 1239 bp, Escherichia coli O157:H7 EDL933
  CDS (1)..(1239): transl_table=11
atgttttctataaaaccaggaccaagaaaattacctatcgacaacccctcattgttatcatggaacattactgacggggatctaaattccaaattaaatacattagaatatctaaactgtgtaacaaatattattaatgcttgtggagtttatcctcaggatttaaaagacagagaaattatatcaacttttcacgcagaaaaagtcattaatgatctgttaaaaaacgattataaaatttccctttctccagatacaacttaccgagagctgaataaagctgcacagcgtagcattacagcgccagacaggataggagaagggaaaatatgggtttatcaacgagatacaatggttgaaagaggtgataacagcggtgttcatcagtatggtccagctgaacatttcactcacattatatctgacaaaccgtccccaaaagataagtatgttgcatatgctattaacattcctgactatgagctagcagccgatgtatataatattaacgtgacgtcaccttccggacagcaagaaacatttaaaatattaatcaatccagaacatctacggcaaacacttgagcgtaaatcccttactgctgttcagaaatcacaatgtgaaatcatcacccccaaaaaacctggcgaagcgattcttcatgcttttaatgccacctaccagcaaatcagggaaaatatgtctgagtttgcacgttgccattatgggtatatacaaatccctccagtgacaactttccgcgccgacggaccagaaactcccgaagaagaaaaaggttactggtttcacgcttatcaacccgaagatctttgtaccatccataatccaatgggagatttgcaggattttatcgcattggttaaagatgctaaaaaatttggtatcgatatcattcctgattatacctttaactttatgggaatcgggggtagtggtaaaaatgacctggattatccctctgctgatatacgagcgaagatcagtaaagatatagaaggtggtatccctggctattggcaaggtcaggttttgattccatttactatagatccagtaacaaaagaacgtaaacaaatccatccagaagatatacatctcacagcaaaagacttcgaagcaagtaaagataatatttctaaggatgaatgggaaaacctccatgcattaaaagaaaagcgtttaaatggaatgcctaaaaccccccccaaaagtgactag

SEQ ID NO: 125229 - protein, 412 aa, Escherichia coli O157:H7 EDL933
MFSIKPGPRKLPIDNPSLLSWNITDGDLNSKLNTLEYLNCVTNIINACGVYPQDLKDREIISTFHAEKVINDLLKNDYKISLSPDTTYRELNKAAQRSITAPDRIGEGKIWVYQRDTMVERGDNSGVHQYGPAEHFTHIISDKPSPKDKYVAYAINIPDYELAADVYNINVTSPSGQQETFKILINPEHLRQTLERKSLTAVQKSQCEIITPKKPGEAILHAFNATYQQIRENMSEFARCHYGYIQIPPVTTFRADGPETPEEEKGYWFHAYQPEDLCTIHNPMGDLQDFIALVKDAKKFGIDIIPDYTFNFMGIGGSGKNDLDYPSADIRAKISKDIEGGIPGYWQGQVLIPFTIDPVTKERKQIHPEDIHLTAKDFEASKDNISKDEWENLHALKEKRLNGMPKTPPKSD

SEQ ID NO: 125230 - DNA, 1842 bp, Escherichia coli B
  CDS (1)..(1842): transl_table=11
atgttttctataaaaccaggacccagaaatttacctatcgacaaccccacattgttatcatggaacattactgacggggatctaaattccaaattaaatacattagaatatctaaactgtataacaaatattattaattcttgtggagtttaccctcaaggattaaaagacagagaaattatatcaacttttcacgcagaaaaagttattaatgatctgttaaaaaacgattataaaatttccctttctccagatacaacttatcgagagttgaataaagcagcacagcgtagcattacagcgccagacaggataggagaaggaaaaacatgggtttatcaacgagatacaatgattgaaagaggtgataacagcggtgtttatcagtatggtcctgctgaacacttcacccacattatatctgacaaaccttccccaaaagataaatatgttgcatatgctattaacattcctgactatgagctggcagccgatgtatataatattaacgtgacgtcaccttccggacagcaagaaacatttaaaatattaatcaatccagaacatctacggcaaacacttgagcgtaaatctcttactgctgttcagaaatcacaatgtgaaatcatcacccccaaaaaacctggcgaagcgattcttcatgcttttaatgccacctaccagcagatcagagaaaatatgtctgaatttgcacgttgccattatgggtatatacaaatccctccagtgacaactttccgtgccgacggaccagaaactcccgaagaagaaaaaggttactggtttcacgcttatcaacccgaagatctttgtaccatccacaatccaatgggagatttgcaggattttatcgcattggttaaagatgctaaaaaatttggtatcgatatcattcctgattatacctttaactttatgggaatcgggggtagtggtaaaaatgacctggattatccctctgctgatatacgagcgaagatcagtaaagatatagaaagtggtatccctggctattggcaaggtcaggttttgattccatttactatagatccagtaacaaaagaacgtaaacaaatccatccagaagatatacatctcactgcaaaagacttcgaagcaagtaaagataacatctctaaggatgaatgggaaaacctccatgcattaaaagaaaagcgtttaaatggaatgcctaaaacaacacccaaaagtgaccaggttattatgttgcaaaatcaatacgttcgtgaaatgcgaaaatatggcgtacgaggtttacgttatgatgcggcaaaacactcaaaacatgaacaaatagaaagatcaataaccccaccgcttaaaaattataatgagcggttacacaatactaacttatttaacccaaaatatcataaaaaagccgttatgaattacatggaatatctggtaacttgtcagttggatgaacaacaaatgtcatcactgctttatgaaagagatgatttaagcgccattgatttttcattgctcatgaaaacgataaaagccttttcatttggtggagatctccaaacccttgcatcaaaaccgggttccacaatctcaagtatcccatcagaaagacggatattgattaacattaaccacgattttcctaacaatggtaatcttttcaatgactttctatttaaccatcaacaagatgaacaattagcaatggcatatatagccgctctgccgttcagcaggcctttagtttactgggatggccaagtattaaaatcaacgactgaaattaaaaattatgatgggtccacgcgtgtcggcggtgaggcgtag

SEQ ID NO: 125231 - protein, 613 aa, Escherichia coli B
MFSIKPGPRNLPIDNPTLLSWNITDGDLNSKLNTLEYLNCITNIINSCGVYPQGLKDREIISTFHAEKVINDLLKNDYKISLSPDTTYRELNKAAQRSITAPDRIGEGKTWVYQRDTMIERGDNSGVYQYGPAEHFTHIISDKPSPKDKYVAYAINIPDYELAADVYNINVTSPSGQQETFKILINPEHLRQTLERKSLTAVQKSQCEIITPKKPGEAILHAFNATYQQIRENMSEFARCHYGYIQIPPVTTFRADGPETPEEEKGYWFHAYQPEDLCTIHNPMGDLQDFIALVKDAKKFGIDIIPDYTFNFMGIGGSGKNDLDYPSADIRAKISKDIESGIPGYWQGQVLIPFTIDPVTKERKQIHPEDIHLTAKDFEASKDNISKDEWENLHALKEKRLNGMPKTTPKSDQVIMLQNQYVREMRKYGVRGLRYDAAKHSKHEQIERSITPPLKNYNERLHNTNLFNPKYHKKAVMNYMEYLVTCQLDEQQMSSLLYERDDLSAIDFSLLMKTIKAFSFGGDLQTLASKPGSTISSIPSERRILININHDFPNNGNLFNDFLFNHQQDEQLAMAYIAALPFSRPLVYWDGQVLKSTTEIKNYDGSTRVGGEA

SEQ ID NO: 125232 - DNA, 25 bp, Artificial sequence
  primer
atgttttctataaaaccaggaccca

SEQ ID NO: 125233 - DNA, 27 bp, Artificial sequence
  primer
ttatgtttttctttctcctatcctgtc

SEQ ID NO: 125234 - DNA, 1038 bp, Escherichia coli
  CDS (1)..(1038): transl_table=11
atgttttccgcattgcgccaccgtaccgctgccctggcgctcggcgtatgctttattctccccgtacacgcctcgtcacctaaacctggcgattttgctaatactcaggcacgacatattgctactttctttccgggacgcatgaccggaactcctgcagaaatgttatctgccgattatattcgccaacagtttcagcaaatgggttatcgcagtgatattcggacatttaatagtcggtatatttataccgcccgcgataatcgtaagagctggcataacgtgacgggaagtacggtgattgccgctcatgaaggcaaagcgccgcagcagatcatcattatggcgcatctggatacttacgccccgctgagcgatgctgacgccgatgccaatctcggcgggctgacgttacaaggaatggatgataacgccgcaggtttaggtgtcatgctggaattggcagaacgcctgaaaaatacgcctaccgagtatggtattcgatttgtggcgaccagcggcgaagaggaagggaaattaggcgctgagaatttactcaagcggatgagtgacaccgaaaagaaaaatacgctgctggtgattaatctcgataacttaattgttggcgataaattgtatttcaacagcggtgtaaaaacccctgaggcagtaaggaaattaacgcgcgacagggcgctggcaattgcgcgcagtcacggaatagccgcaacgaccaatccgggtttgaataaaaattatccgaaaggcactgggtgttgtaatgacgcagaaatattcgacaaagcgggcattgctgtactttcggtggaagcgactaactggaatcttgggaataaggatggttatcagcaacgcgcaaaaacacctgccttcccggcgggaaatagctggcatgacgtaagactggataatcaccaacatattgataaggctcttcctggaagaatagaacgtcgctgccgtgacgttatgcggataatgctacctctggtgaaggagttggcgaaggcgtcttaa

SEQ ID NO: 125235 - protein, 345 aa, Escherichia coli
MFSALRHRTAALALGVCFILPVHASSPKPGDFANTQARHIATFFPGRMTGTPAEMLSADYIRQQFQQMGYRSDIRTFNSRYIYTARDNRKSWHNVTGSTVIAAHEGKAPQQIIIMAHLDTYAPLSDADADANLGGLTLQGMDDNAAGLGVMLELAERLKNTPTEYGIRFVATSGEEEGKLGAENLLKRMSDTEKKNTLLVINLDNLIVGDKLYFNSGVKTPEAVRKLTRDRALAIARSHGIAATTNPGLNKNYPKGTGCCNDAEIFDKAGIAVLSVEATNWNLGNKDGYQQRAKTPAFPAGNSWHDVRLDNHQHIDKALPGRIERRCRDVMRIMLPLVKELAKAS

SEQ ID NO: 125236 - DNA, 1047 bp, Salmonella typhimurium LT2
  CDS (1)..(1047): transl_table=11
atgttttccgcaacgcgccgctttgccgtcattctggcgctcggcgtaggctttatccttcctgcacaagcagcatcaccagggcctggtgaaatagcgaatactcaggcacgacatatcgccaccttttttcccgggagaatgacgggctcccccgccgagatgttgtctgccgattatttacgccaacaatttacccagatgggataccaaagcgatattcgaacgtttaatagccgatttatttataccacgaaggataatcgcaaaaactggcataacgtgacgggcagtacggtcatcgccgcccatgaagggcgcgtgccgcaacagatcatcattatggcgcatctggatacgtacgctccgcagagcgacgctgatgtcgatgccaatctgggcggtttaacgttacagggaatggatgataatgccgcgggattaggcgttatgctggaactggcggcgcgtctgaaagatataccgacccattacgggattcgttttatcgccaccagcggggaagaagagggaaagctaggcgcggaaaatttactcaaacgaatgagtgacgctgagaagaaaaatacgctgctggtcattaatctcgataacctgattgttggcgacaagctctattttaatagcgggaaaaatacgccggaagcggtgcgtacactgacccgcgatcgggcattagcgattgcgcgccgttatggcatcgccgccaacaccaatccgggacgcaatccatcctaccccaaaggaacgggttgctgtaatgatgcggaggttttcgataaagcgggaatatctgtgctttctgttgaggcgacgaactggaatctgggtaaaaaagacggataccagcaacgcgtgaaaaatgcctccttcccgaacggtaatagctggcacgacgtacggcttgataatcaacagcatattgacaaggcgctgccagggcggattgagcgccgtagccgcgatgtagtgcggataatgctgccgttggtaaaagagctggcgaaggcggaaaaaacgtcctga

SEQ ID NO: 125237 - protein, 348 aa, Salmonella typhimurium LT2
MFSATRRFAVILALGVGFILPAQAASPGPGEIANTQARHIATFFPGRMTGSPAEMLSADYLRQQFTQMGYQSDIRTFNSRFIYTTKDNRKNWHNVTGSTVIAAHEGRVPQQIIIMAHLDTYAPQSDADVDANLGGLTLQGMDDNAAGLGVMLELAARLKDIPTHYGIRFIATSGEEEGKLGAENLLKRMSDAEKKNTLLVINLDNLIVGDKLYFNSGKNTPEAVRTLTRDRALAIARRYGIAANTNPGRNPSYPKGTGCCNDAEVFDKAGISVLSVEATNWNLGKKDGYQQRVKNASFPNGNSWHDVRLDNQQHIDKALPGRIERRSRDVVRIMLPLVKELAKAEKTS

SEQ ID NO: 125238 - DNA, 1944 bp, Pseudomonas aeruginosa PAO1
  CDS (1)..(1944): transl_table=11
gtgttcaaaccattagctgtcgctgtaggcctgggatgtgctgcgctgtcgttgggtgccaacgcctatcaatacggggaatacgccggggagaccctggagcgcctgatcaccgactacccgggccgctatcgcggcaccgccagcttcgccggcgccagcaaactgatgcagtcgcgcctgggcttcggctaccagaccagtcgccaggacttcacctgggccggcaaccgcagttcgcagaacgtcatcgcctcggcgcccggcagcagcgggaagttcctggtactcggcgcgcactacgacacctactacggtcgcccgaccctgcagggcctggacgataacgcctcgggcgcggcggtgctcaccgagatcgcccgcaacctcggcggcatcgccctggagaacggcctcgaggtggtcggtttcggcgccgaggaggaaggcctgcgcggttcgcgtgcctacgtcgagtccctcgacgccagccagcgcgccaacctgctgggaatgatcaacctcgacagcctggtcaccggcgacaagatgtacgcccatgccggctccaacagcgtgtccaacccggccctcggcgcctaccgcgaacagatcctgcgcatcgcccgcgagctggacatcccgttgttcaccaaccccggcctgaacgccgaatacccggcgggtaccggctgctgcagcgacggcgaaagcttcaacgggatggacatcccggtgttgttcatcgaggcgaccaactgggaactgggcgacctggacggctacgagcagaccgacaacccggcgattcccggcggctcaacctggcacgacccggccgaggacaacaaggaagtactgaccaacgccctcggccaggagcgcatcgagcaacgcatgcgcgacttttcccgcctgctgacgcgcctggtgctggagcagaccaacgccgacctgctggcctccaccgcctccggcggcgccctggcgcggcagatggaagaccagttgcagcgccagcatcaggcactgacccgcctgcacgaccgccgctggctgaccctgctcggcagcaaccggccggtaggcagcttcgacggcgaggtgggcgcggagggcgaggtctcgccggacagcggtttcgacatgcctggcaatccggagtccaggcgcgccggcgtgcatctgctcggcgactaccgctacagcgaggccctgactctcggcggcagcctggccttccagcgcagccgcgacaagctggaccatggtgggcgcatcgagggcgacacctggcagctcggcctgttcggcctgtacaacgacggcggtccggaatggctggccggcgagctgaacctcgggcatacccgctacgacagcaagcgttcggtctacctccaggccgccggcgggccggtgctgctcgaccagcgtctgtcgggcgacacctcggcctggtcctggggcgcccggctggaaggcggctatgacttcagcttcggcgaactgcggagcgggccgctggccggcctcgactacatgcactaccgcatcgacgacttccgcgaggacgaggccctgcgtaccgcactcggctacgagaagcaggactacgactcgctggaggcgagtctcggctggcgcctgcgcggcgagctggcgctgggcgcgagaatgcgcctgcaaccctacgccagcctgcgctgggtccgcgagctggcggacggacgcctggacgacatggacctgaccagccgcggcgacgggcgtgtccgggtcgccgacatgggcggcgtggacaaggatttcggccgcgcccagcttggcgcgcaactggcgatcaccgagcagctcggggtcttcgccgaagccaacagccgcttcgcccacagcgaaggcaaccaagcgggctattcgctcggggtgaactggcagttctga

SEQ ID NO: 125239 - protein, 647 aa, Pseudomonas aeruginosa PAO1
MFKPLAVAVGLGCAALSLGANAYQYGEYAGETLERLITDYPGRYRGTASFAGASKLMQSRLGFGYQTSRQDFTWAGNRSSQNVIASAPGSSGKFLVLGAHYDTYYGRPTLQGLDDNASGAAVLTEIARNLGGIALENGLEVVGFGAEEEGLRGSRAYVESLDASQRANLLGMINLDSLVTGDKMYAHAGSNSVSNPALGAYREQILRIARELDIPLFTNPGLNAEYPAGTGCCSDGESFNGMDIPVLFIEATNWELGDLDGYEQTDNPAIPGGSTWHDPAEDNKEVLTNALGQERIEQRMRDFSRLLTRLVLEQTNADLLASTASGGALARQMEDQLQRQHQALTRLHDRRWLTLLGSNRPVGSFDGEVGAEGEVSPDSGFDMPGNPESRRAGVHLLGDYRYSEALTLGGSLAFQRSRDKLDHGGRIEGDTWQLGLFGLYNDGGPEWLAGELNLGHTRYDSKRSVYLQAAGGPVLLDQRLSGDTSAWSWGARLEGGYDFSFGELRSGPLAGLDYMHYRIDDFREDEALRTALGYEKQDYDSLEASLGWRLRGELALGARMRLQPYASLRWVRELADGRLDDMDLTSRGDGRVRVADMGGVDKDFGRAQLGAQLAITEQLGVFAEANSRFAHSEGNQAGYSLGVNWQF

SEQ ID NO: 125240 - DNA, 1038 bp, Shigella flexneri 2a str. 301
  CDS (1)..(1038): transl_table=11
atgttttccgcattgcgccaccgtaccgctgccctggcgctcggcgtatgctttattctccccgtacacgcctcgtcacctaaacctggcgattttgctaatacccaggcacgacatattgctactttctttccgggacgcatgaccggaactccagcagaaatgttatctgccgattatattcgccaacagtttcagcaaatgggttatcgcagtgatattcggacatttaatagtcggtatatttataccgcccgcgataatcgcaagaactggcataacgtgacaggaagtacggtgattgccgctcatgaaggcaaagcgccgcagcagatcatcattatggcgcatctggatacttacgccccgctgagcgatgctgacgcagatgccaatctcggcggactgacgttacaaggaatagatgataacgccgcaggtttaggtgtcatgctggaactggcagaacgcctgaaaaatacgcctaccgagtatggtattcgatttgtggcgaccagcggcgaagaggaaggaaaattaggcgctgagaatttactcaagcggatgagtgacaccgaaaagaaaaatacgctgctggtgattaatctcgataacttaattgttggcgataaattgtatttcaacagcggtgtaaaaacccctgaagcagtaaggaaattaacgcgcgacagggcgctggcaattgcacgcagtcacggaatagccgcaacgaccaatccgggtttgaataaaaattatccgaaaggcactgggtgttgtaatgacgcagaaatattcgacaaagcgggcattgctgtactttcggtggaagcgactaactggaatcttggaaataaggatggttatcagcaacgcgcaaaaacacctgccttcccggcgggaaatagctggcatgacgtaagactggataatcaacaacatattgataaggcacttcctggaagaatagaacgtcgctgccgtgacgttatgcggataatgctaccgttggtgaaggagctggcgaaggcgtcttga

SEQ ID NO: 125241 - protein, 345 aa, Shigella flexneri 2a str. 301
MFSALRHRTAALALGVCFILPVHASSPKPGDFANTQARHIATFFPGRMTGTPAEMLSADYIRQQFQQMGYRSDIRTFNSRYIYTARDNRKNWHNVTGSTVIAAHEGKAPQQIIIMAHLDTYAPLSDADADANLGGLTLQGIDDNAAGLGVMLELAERLKNTPTEYGIRFVATSGEEEGKLGAENLLKRMSDTEKKNTLLVINLDNLIVGDKLYFNSGVKTPEAVRKLTRDRALAIARSHGIAATTNPGLNKNYPKGTGCCNDAEIFDKAGIAVLSVEATNWNLGNKDGYQQRAKTPAFPAGNSWHDVRLDNQQHIDKALPGRIERRCRDVMRIMLPLVKELAKAS

SEQ ID NO: 125242 - DNA, 1047 bp, Salmonella enterica subsp. enterica serovar Typhi Ty2
  CDS (1)..(1047): transl_table=11
atgttttccgcaacgcgccgctttgccgtcattctggcgctcggcgtaggctttatccttcctgcacaagcagcatcaccagggcctggtgaaatagcgaatactcaggcacgacatatcgccaccttttttcccgggagaatgactggctcccccgccgagatgttgtctgccgattatttacgccaacaatttacccagatgggataccaaagcgatattcgaacgtttaatagccgatttatttataccacgaaggataatcgcaaaaactggcataacgtgacgggcagtacggtcatcgccgcccatgaagggcgcgtgccgcagcagatcatcattatggcgcatctggatacctacgctccgcagagcgatgctgatgtcgatgccaatctgggcggtttaacgttacagggaatggatgataatgccgcgggattaggcgttatgctggaactggcggcgcgtctgaaagatataccgacccattatgggattcgttttatcgccaccagcggggaagaagagggaaagctaggcgcggaaaatttactcaaacgaatgagtgacgctgagaagaaaaatacgctgctggtgattaatctcaataacctgattgttggggacaagctctattttaatagcgggaaaaatacgccggaagcggtgcgtacactgacccgcgatcgggcattagcgattgcgcgccgttatggcatcgccgccaacaccaatccgggacgcaatccatcctaccccaaaggaacgggttgctgtaatgatgcggaggttttcgataaagcgggaatatcggtgctttctgttgaggcgacgaactggaatctgggtaaaaaagacggataccagcaacgtgtgaaaaatgcatccttcccgaacggcaatagctggcacgacgtacggcttgataatcaacagcatatagacaaggcgctgccagggcggattgagcgccgtagccgcgatgtagtgcggataatgctgccgttggtaaaagagctggcgaaggcggaaaaaacgtcctga

SEQ ID NO: 125243 - protein, 348 aa, Salmonella enterica subsp. enterica serovar Typhi Ty2
MFSATRRFAVILALGVGFILPAQAASPGPGEIANTQARHIATFFPGRMTGSPAEMLSADYLRQQFTQMGYQSDIRTFNSRFIYTTKDNRKNWHNVTGSTVIAAHEGRVPQQIIIMAHLDTYAPQSDADVDANLGGLTLQGMDDNAAGLGVMLELAARLKDIPTHYGIRFIATSGEEEGKLGAENLLKRMSDAEKKNTLLVINLNNLIVGDKLYFNSGKNTPEAVRTLTRDRALAIARRYGIAANTNPGRNPSYPKGTGCCNDAEVFDKAGISVLSVEATNWNLGKKDGYQQRVKNASFPNGNSWHDVRLDNQQHIDKALPGRIERRSRDVVRIMLPLVKELAKAEKTS

SEQ ID NO: 125244 - DNA, 1962 bp, Erwinia carotovora subsp. atroseptica SCRI1043
  CDS (1)..(1962): transl_table=11
gtggggtgtatgttgaagcaagtagctgttgcggtagggatggcgtgtttatgtgtaccggcctgggcttatgattatggtgactatgcgcgagagaccgtggatacgctcattaatgattatccggggcgctatcgcgatacggcaaattttgttggtgcggcggactggatgacgcagcgtatggcacccggctatagcacagtcaggcaggatttttcctggacggcaggtggcacgacacgttcgtcacagaacgtgctggcctctaatgtcgggttgagcagcgaatacatcattaccggggcgcactttgataccttcttcgggcggccaacgctacaagggctggatgacaacgcatcgggtgccgccattctgacggaagtggcgcgtaattttagcggtatccagacggaaaaaacgctggtctttgctgccttcggtgcagaagaagaggggctacgcggttcgcgtgcgatggttaacgatctgattgcgcaaggaaacgcgggcgatcttaaggccatgattaacatggatagcatgatcaccggtgacaaactctacgctcacgccggcgataacagcgtggctaaccctgctctggcaagcctgcgtgaacagacgctgcgtattgcgaatgaattgggcatcgatctgttcactaatccggggttgaatgcgagttatcccgctggaaccggctgttgcagcgacggcgatagcttcaatgcggcgtttgatattcccgtgctctatatggaggccaccaactgggatattggcgatcaagatggctatgagcaaaccacaaaccccgcggtgccgggtggcgcgacatggcatgatcccaccgttgataacgaagcctttctgaccagcgtgttcgggcaggagcgtatcgaccagcacctgcgtgacgtttcacgtctggtgacgcgactgttgctggaaatctccaataccgatttactgcattcggcatattccgccgccgcgatgcagcaggcgatggaagagagtctgaagcgtcagcgtcagtcattgagtgatttgcataaccagcgctggctgctgttgcaaaataccactcggagcgtgggcacgctggatacggcgatcggggttgagggcgatgttattccgtcaaatggctttgaccgcgcaccgcagcagcgctctcggcaggcgatggcttatgcactggtggattatcaattaagtgacattgtcacgattggcggaagcctgagtctgctgcgtagtaaggataagctggagcgcaatggacacattgaaagcgatacctggcaagcgggtgtctatggtttgctgaatcagggcggacccgcctggctgggcagcgaagtgacggcaggtcgcgcagcgattgaatcacgccgctcggtttatctgcaatctgcaggcggtccggttttgttggacaacgcgctggatggtaacaccgaagcgcagtttatcggtgcccgcgttagcggcggttatgacttcccaataagcggcctgcgcactggcccggttgttggtctggattacgcgcgttatcgcatcaatgcgtttgatgacaagggcaatttgcggactggcgtgcggtatgaaaagcaggatgtcgattcgctggaggccagtctgggctggcgagtgcgtggcaaggtggaattcagcaatacgatgtcgctacaaccttacgcaacagtggcgtgggtgcgtgaactggccgatgggctcgattccagctttactgtgaaagatcatgtcgatggtgcaaaccgccgcgttgcggtgggagagcaggataagaatttcggcaaggcgacggtcggtgtgcagtggcttgcggcagagaatctgaatctatattccgaaatcggcagtcgttttggtcatcaggatggcgatcaaacgcgctacagcgtgggcgtacagtggcaattctga

SEQ ID NO: 125245 - protein, 653 aa, Erwinia carotovora subsp. atroseptica SCRI1043
MGCMLKQVAVAVGMACLCVPAWAYDYGDYARETVDTLINDYPGRYRDTANFVGAADWMTQRMAPGYSTVRQDFSWTAGGTTRSSQNVLASNVGLSSEYIITGAHFDTFFGRPTLQGLDDNASGAAILTEVARNFSGIQTEKTLVFAAFGAEEEGLRGSRAMVNDLIAQGNAGDLKAMINMDSMITGDKLYAHAGDNSVANPALASLREQTLRIANELGIDLFTNPGLNASYPAGTGCCSDGDSFNAAFDIPVLYMEATNWDIGDQDGYEQTTNPAVPGGATWHDPTVDNEAFLTSVFGQERIDQHLRDVSRLVTRLLLEISNTDLLHSAYSAAAMQQAMEESLKRQRQSLSDLHNQRWLLLQNTTRSVGTLDTAIGVEGDVIPSNGFDRAPQQRSRQAMAYALVDYQLSDIVTIGGSLSLLRSKDKLERNGHIESDTWQAGVYGLLNQGGPAWLGSEVTAGRAAIESRRSVYLQSAGGPVLLDNALDGNTEAQFIGARVSGGYDFPISGLRTGPVVGLDYARYRINAFDDKGNLRTGVRYEKQDVDSLEASLGWRVRGKVEFSNTMSLQPYATVAWVRELADGLDSSFTVKDHVDGANRRVAVGEQDKNFGKATVGVQWLAAENLNLYSEIGSRFGHQDGDQTRYSVGVQWQF

SEQ ID NO: 125246 - DNA, 1944 bp, Pseudomonas aeruginosa UCBPP-PA14
  CDS (1)..(1944): transl_table=11
gtgttcaaaccattagctgtcgctgtaggcctgggatgtgctgcgctgtcgttgggtgccaacgcctatcaatacggggaatacgccggggagaccctggagcgcctgatcaccgactacccgggccgctatcgcggcaccgccagcttcgccggcgccagcgaactgatgcagtcgcgcctgggcttcggctaccagaccagtcgccaggacttcacctgggccggcaaccgcagttcgcagaacgtcatcgcctcggcgcccggcagcagcgggaagttcctggtactcggcgcgcactacgacacctactacggtcgcccgaccctgcagggcctggacgataacgcctcgggcgcggcggtgctcaccgagatcgcccgcaacctcggcggcatcgccctggagaacggcctcgaggtggtcggtttcggcgccgaggaggaaggcctgcgcggttcgcgtgcctacgtcgagtccctcgacgccagccagcgcgccaacctgctgggaatgatcaacctcgacagcctggtcaccggcgacaagatgtacgcccatgccggctccaacagcgtgtccaacccggccctcggcgcctaccgcgaacagatcctgcgcatcgcccgcgagctggacatcccgctgttcaccaaccccggcctgaacgccgaatacccggcgggtaccggctgctgcagcgacggcgaaagcttcaacgggatggacatcccggtgttgttcatcgaggcgaccaactgggaactgggcgacctggacggctacgagcagaccgacaacccggcgattcccggcggctcaacctggcacgacccggccgaggacaacaaggaagtactgaccaacgccctcggccaagagcgcatcgagcaacgcatgcgcgacttttcccgcctgctgacgcgcctggtgctggagctgaccaacgccgacctgctggcctccaccgcctccggcggcgccctggcgcggcagatggaagaccagttgcagcgccagcaccaggcactgacccgcctgcacgaccgccgctggctgaccctgctcggcagcaaccggccggtaggcagcttcgacggcgaggtgggcgcggagggcgaggtctcgccggacagcggtttcgacatgcctggcgatccggagtccaggcgcgccggcgtgcatctgctcggcgactaccgctacagcgaggccctgaccctcggcggcagcctggccttccagcgcagccgcgacaagctggaccatggcgggcgcatcgagggcgacacctggcagctcggcctgttcggcctgtacaacgacggcggtccggaatggctggccggcgagctgaacctcgggcatacccgctacgacagcaagcgttcggtctacctccaggccgccggcgggccggtgctgctcgaccagcgtctgtcgggcgacacctcggcctggtcctggggcgcccggctggaaggcggctatgacttcagcttcggcgaactgcggagcgggccgctggccggtctcgactacatgcgctaccgcatcgacgacttccgcgaggacgaggccctgcgtaccgcactcggctacgagaagcaggactacgactcgctggaggcgagcctcggctggcgcctgcgcggcgagctggcgctgggtgcgagaatgcgcctgcaaccctacgccagcctgcgctgggtccgcgagctggcggacggacgcctggaggacatggacctgaccagccgcggcgacgggcgtgtccgggtcgccgacatgggcggcgtggacaaggatttcggccgcgcccagcttggcgcgcaactggcgatcaccgagcagctcggggtcttcgccgaagccaacagccgcttcgcccacagcgaaggcaaccaggcgggctattcgctcggggtgaactggcagttctga

SEQ ID NO: 125247 - protein, 647 aa, Pseudomonas aeruginosa UCBPP-PA14
MFKPLAVAVGLGCAALSLGANAYQYGEYAGETLERLITDYPGRYRGTASFAGASELMQSRLGFGYQTSRQDFTWAGNRSSQNVIASAPGSSGKFLVLGAHYDTYYGRPTLQGLDDNASGAAVLTEIARNLGGIALENGLEVVGFGAEEEGLRGSRAYVESLDASQRANLLGMINLDSLVTGDKMYAHAGSNSVSNPALGAYREQILRIARELDIPLFTNPGLNAEYPAGTGCCSDGESFNGMDIPVLFIEATNWELGDLDGYEQTDNPAIPGGSTWHDPAEDNKEVLTNALGQERIEQRMRDFSRLLTRLVLELTNADLLASTASGGALARQMEDQLQRQHQALTRLHDRRWLTLLGSNRPVGSFDGEVGAEGEVSPDSGFDMPGDPESRRAGVHLLGDYRYSEALTLGGSLAFQRSRDKLDHGGRIEGDTWQLGLFGLYNDGGPEWLAGELNLGHTRYDSKRSVYLQAAGGPVLLDQRLSGDTSAWSWGARLEGGYDFSFGELRSGPLAGLDYMRYRIDDFREDEALRTALGYEKQDYDSLEASLGWRLRGELALGARMRLQPYASLRWVRELADGRLEDMDLTSRGDGRVRVADMGGVDKDFGRAQLGAQLAITEQLGVFAEANSRFAHSEGNQAGYSLGVNWQF

SEQ ID NO: 125248 - DNA, 2022 bp, Pseudomonas aeruginosa
  CDS (1)..(2022): transl_table=11
atgaaacggtccgcatcctgctttccgcggcgcgagcatcattcgatgcaccatcgtaccgacacagaggaaagtgccgtgttcaaaccattagctgtcgctgtaggcctgggatgtgctgcgctgtcgttgggtgccaacgcctatcaatacggggaatacgccggggagaccctggagcgcctgatcaccgactacccgggccgctatcgcggcaccgccagcttcgccggcgccagcaaactgatgcagtcgcgcctgggcttcggctaccagaccagtcgccaggacttcacctgggccggcaaccgcagttcgcagaacgtcatcgcctcggcgcccggcagcagcgggaagttcctggtactcggcgcgcactacgacacctactacggtcgcccgaccctgcagggcctggacgataacgcctcgggcgcggcggtgctcaccgagatcgcccgcaacctcggcggcatcgccctggagaacggcctcgaggtggtcggtttcggcgccgaggaggaaggcctgcgcggttcgcgtgcctacgtcgagtccctcgacgccagccagcgcgccaacctgctgggaatgatcaacctcgacagcctggtcaccggcgacaagatgtacgcccatgccggctccaacagcgtgtccaacccggccctcggcgcctaccgcgaacagatcctgcgcatcgcccgcgagctggacatcccgttgttcaccaaccccggcctgaacgccgaatacccggcgggtaccggctgctgcagcgacggcgaaagcttcaacgggatggacatcccggtgttgttcatcgaggcgaccaactgggaactgggcgacctggacggctacgagcagaccgacaacccggcgattcccggcggctcaacctggcacgacccggccgaggacaacaaggaagtactgaccaacgccctcggccaggagcgcatcgagcaacgcatgcgcgacttttcccgcctgctgacgcgcctggtgctggagcagaccaacgccgacctgctggcctccaccgcctccggcggcgccctggcgcggcagatggaagaccagttgcagcgccagcatcaggcactgacccgcctgcacgaccgccgctggctgaccctgctcggcagcaaccggccggtaggcagcttcgacggcgaggtgggcgcggagggcgaggtctcgccggacagcggtttcgacatgcctggcaatccggagtccaggcgcgccggcgtgcatctgctcggcgactaccgctacagcgaggccctgactctcggcggcagcctggccttccagcgcagccgcgacaagctggaccatggtgggcgcatcgagggcgacacctggcagctcggcctgttcggcctgtacaacgacggcggtccggaatggctggccggcgagctgaacctcgggcatacccgctacgacagcaagcgttcggtctacctccaggccgccggcgggccggtgctgctcgaccagcgtctgtcgggcgacacctcggcctggtcctggggcgcccggctggaaggcggctatgacttcagcttcggcgaactgcggagcgggccgctggccggcctcgactacatgcactaccgcatcgacgacttccgcgaggacgaggccctgcgtaccgcactcggctacgagaagcaggactacgactcgctggaggcgagtctcggctggcgcctgcgcggcgagctggcgctgggcgcgagaatgcgcctgcaaccctacgccagcctgcgctgggtccgcgagctggcggacggacgcctggacgacatggacctgaccagccgcggcgacgggcgtgtccgggtcgccgacatgggcggcgtggacaaggatttcggccgcgcccagcttggcgcgcaactggcgatcaccgagcagctcggggtcttcgccgaagccaacagccgcttcgcccacagcgaaggcaaccaagcgggctattcgctcggggtgaactggcagttctga

SEQ ID NO: 125249 - protein, 673 aa, Pseudomonas aeruginosa
MKRSASCFPRREHHSMHHRTDTEESAVFKPLAVAVGLGCAALSLGANAYQYGEYAGETLERLITDYPGRYRGTASFAGASKLMQSRLGFGYQTSRQDFTWAGNRSSQNVIASAPGSSGKFLVLGAHYDTYYGRPTLQGLDDNASGAAVLTEIARNLGGIALENGLEVVGFGAEEEGLRGSRAYVESLDASQRANLLGMINLDSLVTGDKMYAHAGSNSVSNPALGAYREQILRIARELDIPLFTNPGLNAEYPAGTGCCSDGESFNGMDIPVLFIEATNWELGDLDGYEQTDNPAIPGGSTWHDPAEDNKEVLTNALGQERIEQRMRDFSRLLTRLVLEQTNADLLASTASGGALARQMEDQLQRQHQALTRLHDRRWLTLLGSNRPVGSFDGEVGAEGEVSPDSGFDMPGNPESRRAGVHLLGDYRYSEALTLGGSLAFQRSRDKLDHGGRIEGDTWQLGLFGLYNDGGPEWLAGELNLGHTRYDSKRSVYLQAAGGPVLLDQRLSGDTSAWSWGARLEGGYDFSFGELRSGPLAGLDYMHYRIDDFREDEALRTALGYEKQDYDSLEASLGWRLRGELALGARMRLQPYASLRWVRELADGRLDDMDLTSRGDGRVRVADMGGVDKDFGRAQLGAQLAITEQLGVFAEANSRFAHSEGNQAGYSLGVNWQF

SEQ ID NO: 125250 - DNA, 22 bp, Artificial sequence
  primer
atgttttccgcattgcgccacc

SEQ ID NO: 125251 - DNA, 24 bp, Artificial sequence
  primer
ttaagacgccttcgccaactcctt

SEQ ID NO: 125252 - protein, 329 aa, Artificial sequence
  consensus sequence
  Variant (2)..(4): Xaa in position 2 to 4 is any amino acid
  Variant (6)..(10): Xaa in position 6 to 10 is any amino acid
  Variant (12)..(13): Xaa in position 12 to 13 is any amino acid
  Variant (15)..(22): Xaa in position 15 to 22 is any amino acid
  Variant (24)..(25): Xaa in position 24 to 25 is any amino acid
  Variant (29)..(30): Xaa in position 29 to 30 is any amino acid
  Variant (32)..(32): Xaa in position 32 is any amino acid
  Variant (33)..(33): Xaa in position 33 is any or no amino acid
  Variant (35)..(38): Xaa in position 35 to 38 is any amino acid
  Variant (40)..(43): Xaa in position 40 to 43 is any amino acid
  Variant (45)..(49): Xaa in position 45 to 49 is any amino acid
  Variant (52)..(57): Xaa in position 52 to 57 is any amino acid
  Variant (59)..(68): Xaa in position 59 to 68 is any amino acid
  Variant (69)..(80): Xaa in position 69 to 80 is any or no amino acid
  Variant (84)..(86): Xaa in position 84 to 86 is any amino acid
  Variant (88)..(96): Xaa in position 88 to 96 is any amino acid
  Variant (99)..(99): Xaa in position 99 is any amino acid
  Variant (103)..(106): Xaa in position 103 to 106 is any amino acid
  Variant (107)..(117): Xaa in position 107 to 117 is any or no amino acid
  Variant (122)..(122): Xaa in position 122 is any amino acid
  Variant (127)..(127): Xaa in position 127 is any amino acid
  Variant (129)..(130): Xaa in position 129 to 130 is any amino acid
  Variant (132)..(133): Xaa in position 132 to 133 is any amino acid
  Variant (135)..(135): Xaa in position 135 is any amino acid
  Variant (137)..(138): Xaa in position 137 to 138 is any amino acid
  Variant (140)..(146): Xaa in position 140 to 146 is any amino acid
  Variant (148)..(155): Xaa in position 148 to 155 is any amino acid
  Variant (160)..(161): Xaa in position 160 to 161 is any amino acid
  Variant (163)..(176): Xaa in position 163 to 176 is any amino acid
  Variant (177)..(177): Xaa in position 177 is any or no amino acid
  Variant (179)..(179): Xaa in position 179 is any amino acid
  Variant (181)..(182): Xaa in position 181 to 182 is any amino acid
  Variant (187)..(187): Xaa in position 187 is any amino acid
  Variant (189)..(190): Xaa in position 189 to 190 is any amino acid
  Variant (194)..(194): Xaa in position 194 is any amino acid
  Variant (196)..(198): Xaa in position 196 to 198 is any amino acid
  Variant (200)..(210): Xaa in position 200 to 210 is any amino acid
  Variant (211)..(211): Xaa in position 211 is any or no amino acid
  Variant (213)..(215): Xaa in position 213 to 215 is any amino acid
  Variant (217)..(217): Xaa in position 217 is any amino acid
  Variant (221)..(223): Xaa in position 221 to 223 is any amino acid
  Variant (225)..(227): Xaa in position 225 to 227 is any amino acid
  Variant (232)..(232): Xaa in position 232 is any amino acid
  Variant (234)..(235): Xaa in position 234 to 235 is any amino acid
  Variant (238)..(238): Xaa in position 238 is any amino acid
  Variant (244)..(244): Xaa in position 244 is any amino acid
  Variant (246)..(246): Xaa in position 246 is any amino acid
  Variant (248)..(248): Xaa in position 248 is any amino acid
  Variant (250)..(253): Xaa in position 250 to 253 is any amino acid
  Variant (254)..(254): Xaa in position 254 is any or no amino acid
  Variant (256)..(256): Xaa in position 256 is any amino acid
  Variant (259)..(260): Xaa in position 259 to 260 is any amino acid
  Variant (266)..(266): Xaa in position 266 is any amino acid
  Variant (269)..(270): Xaa in position 269 to 270 is any amino acid
  Variant (274)..(274): Xaa in position 274 is any amino acid
  Variant (276)..(281): Xaa in position 276 to 281 is any amino acid
  Variant (282)..(282): Xaa in position 282 is any or no amino acid
  Variant (284)..(284): Xaa in position 284 is any amino acid
  Variant (286)..(287): Xaa in position 286 to 287 is any amino acid
  Variant (291)..(293): Xaa in position 291 to 293 is any amino acid
  Variant (296)..(301): Xaa in position 296 to 301 is any amino acid
  Variant (304)..(305): Xaa in position 304 to 305 is any amino acid
  Variant (306)..(306): Xaa in position 306 is any or no amino acid
  Variant (310)..(310): Xaa in position 310 is any amino acid
  Variant (312)..(312): Xaa in position 312 is any amino acid
  Variant (315)..(316): Xaa in position 315 to 316 is any amino acid
  Variant (318)..(321): Xaa in position 318 to 321 is any amino acid
  Variant (324)..(324): Xaa in position 324 is any amino acid
  Variant (326)..(328): Xaa in position 326 to 328 is any amino acid
LXXXAXXXXXGXXAXXXXXXXXTXXPGRXXGXXAXXXXAXXXXQXXXXXGYXXXXXXFXXXXXXXXXXXXXXXXXXXXXXVIAXXXGXXXXXXXXXAHXDTYXXXXXXXXXXXXXXXTLQGXDDNAXGXXVXXEXAXXLXXXXXXXGXXXXXXXXEEEGXXGXXXXXXXXXXXXXXXNXLXXINLDXLXXGDKXYXXXGXXXXXXXXXXXXRXXXLXIARXXXIXXXTNPGXNXXYPXGTGCCXDXEXFXXXXXIXVLXXEATNWXLGXXDGYXQXXXXXXXPXGXXWHDXXXDNXXXXXXALXXXRIEXRXRDXXRXXXXLVXEXXXA

SEQ ID NO: 125253 - protein, 34 aa, Artificial sequence
  protein pattern
  Variant (2)..(3): Xaa in position 2 to 3 is any or no amino acid
  Variant (5)..(5): Xaa in position 5 is Glu, Arg or Ser
  Variant (6)..(6): Xaa in position 6 is any amino acid
  Variant (7)..(7): Xaa in position 7 is Asp or Gly
  Variant (9)..(9): Xaa in position 9 is Ala or Pro
  Variant (10)..(10): Xaa in position 10 is Ala or Leu
  Variant (11)..(11): Xaa in position 11 is any amino acid
  Variant (16)..(16): Xaa in position 16 is any amino acid
  Variant (18)..(18): Xaa in position 18 is any amino acid
  Variant (19)..(19): Xaa in position 19 is Glu, Asn or Ser
  Variant (22)..(22): Xaa in position 22 is any amino acid
  Variant (28)..(28): Xaa in position 28 is Asn or Ser
  Variant (30)..(30): Xaa in position 30 is Ala or Gly
  Variant (32)..(32): Xaa in position 32 is any amino acid
  Variant (34)..(34): Xaa in position 34 is Asp or Asn
AXXRXXXIXXXTNPGXNXXYPXGTGCCXDXEXFX

SEQ ID NO: 125254 - protein, 23 aa, Artificial sequence
  protein pattern
  Variant (2)..(2): Xaa in position 2 is Ala, Pro or Ser
  Variant (5)..(5): Xaa in position 5 is any amino acid
  Variant (6)..(6): Xaa in position 6 is Ile or Val
  Variant (12)..(12): Xaa in position 12 is Glu or Asn
  Variant (15)..(16): Xaa in position 15 to 16 is any or no amino acid
  Variant (18)..(19): Xaa in position 18 to 19 is any or no amino acid
  Variant (22)..(22): Xaa in position 22 is Glu or Gln
IXVLXXEATNWXLGXXDXXGYXQ

SEQ ID NO: 125255 - protein, 54 aa, Artificial sequence
  protein pattern
  Variant (2)..(3): Xaa in position 2 to 3 is any amino acid
  Variant (8)..(8): Xaa in position 8 is Ile, Leu or Met
  Variant (13)..(13): Xaa in position 13 is Ala or Ser
  Variant (15)..(15): Xaa in position 15 is Ala or Leu
  Variant (16)..(16): Xaa in position 16 is Ala or Gly
  Variant (18)..(18): Xaa in position 18 is Leu or Met
  Variant (19)..(19): Xaa in position 19 is any amino acid
  Variant (21)..(21): Xaa in position 21 is Ile or Leu
  Variant (23)..(23): Xaa in position 23 is any amino acid
  Variant (24)..(24): Xaa in position 24 is Asn or Arg
  Variant (26)..(26): Xaa in position 26 is any amino acid
  Variant (27)..(27): Xaa in position 27 is Asp, Gly or Asn
  Variant (28)..(28): Xaa in position 28 is any amino acid
  Variant (29)..(29): Xaa in position 29 is Ala or Pro
  Variant (30)..(30): Xaa in position 30 is any amino acid
  Variant (31)..(31): Xaa in position 31 is Glu or His
  Variant (32)..(32): Xaa in position 32 is any amino acid
  Variant (34)..(34): Xaa in position 34 is Ile or Leu
  Variant (35)..(35): Xaa in position 35 is Glu or Arg
  Variant (36)..(36): Xaa in position 36 is Phe or Val
  Variant (37)..(37): Xaa in position 37 is Ile or Val
  Variant (38)..(38): Xaa in position 38 is Ala or Gly
  Variant (39)..(39): Xaa in position 39 is any amino acid
  Variant (40)..(40): Xaa in position 40 is Gly or Ser
  Variant (41)..(41): Xaa in position 41 is Ala or Gly
  Variant (46)..(47): Xaa in position 46 to 47 is any amino acid
  Variant (49)..(49): Xaa in position 49 is Ala or Ser
  Variant (50)..(50): Xaa in position 50 is Glu or Arg
  Variant (51)..(51): Xaa in position 51 is Ala or Asn
  Variant (52)..(52): Xaa in position 52 is any amino acid
  Variant (53)..(53): Xaa in position 53 is Leu or Val
  Variant (54)..(54): Xaa in position 54 is Glu or Lys
GXXTLQGXDDNAXGXXVXXEXAXXLXXXXXXXGXXXXXXXXEEEGXXGXXXXXX

SEQ ID NO: 125256 - protein, 55 aa, Artificial sequence
  protein pattern
  Variant (2)..(2): Xaa in position 2 is Glu, Ser or Thr
  Variant (3)..(3): Xaa in position 3 is any amino acid
  Variant (5)..(5): Xaa in position 5 is any or no amino acid
  Variant (7)..(7): Xaa in position 7 is any amino acid
  Variant (9)..(10): Xaa in position 9 to 10 is any amino acid
  Variant (11)..(13): Xaa in position 11 to 13 is any or no amino acid
  Variant (16)..(16): Xaa in position 16 is Ile, Leu or Pro
  Variant (17)..(17): Xaa in position 17 is any amino acid
  Variant (18)..(18): Xaa in position 18 is Gln or Arg
  Variant (19)..(20): Xaa in position 19 to 20 is any amino acid
  Variant (21)..(21): Xaa in position 21 is Gly, Gln or Thr
  Variant (22)..(22): Xaa in position 22 is Gln or Thr
  Variant (23)..(23): Xaa in position 23 is any amino acid
  Variant (24)..(24): Xaa in position 24 is Gly or Ser
  Variant (25)..(25): Xaa in position 25 is Phe or Tyr
  Variant (26)..(26): Xaa in position 26 is any amino acid
  Variant (27)..(27): Xaa in position 27 is Gly or Ser
  Variant (28)..(28): Xaa in position 28 is Ala or Asp
  Variant (29)..(29): Xaa in position 29 is any amino acid
  Variant (30)..(30): Xaa in position 30 is Glu, Lys or Arg
  Variant (31)..(31): Xaa in position 31 is any amino acid
  Variant (32)..(32): Xaa in position 32 is Phe or Met
  Variant (33)..(33): Xaa in position 33 is Asn or Gln
  Variant (36)..(36): Xaa in position 36 is any amino acid
  Variant (37)..(37): Xaa in position 37 is Gly or Ile
  Variant (38)..(38): Xaa in position 38 is Phe or Tyr
  Variant (39)..(39): Xaa in position 39 is Gly or Thr
  Variant (40)..(41): Xaa in position 40 to 41 is any amino acid
  Variant (42)..(42): Xaa in position 42 is Asp or Thr
  Variant (43)..(43): Xaa in position 43 is Asn or Ser
  Variant (45)..(45): Xaa in position 45 is any amino acid
  Variant (46)..(46): Xaa in position 46 is Asp, Asn or Ser
  Variant (47)..(47): Xaa in position 47 is Phe or Trp
  Variant (48)..(49): Xaa in position 48 to 49 is any amino acid
  Variant (50)..(50): Xaa in position 50 is Ala or Val
  Variant (51)..(51): Xaa in position 51 is Gly or Thr
  Variant (52)..(52): Xaa in position 52 is Gly or Asn
  Variant (53)..(53): Xaa in position 53 is Arg or Ser
  Variant (54)..(54): Xaa in position 54 is Ser or Thr
  Variant (55)..(55): Xaa in position 55 is Ser or Val
GXXAXEXLXXXXXDYXXXXXXXXXXXXXXXXXXSRXXXXXXXXRXXXXXXXXXXX

SEQ ID NO: 125257 - protein, 30 aa, Artificial sequence
  protein pattern
  Variant (2)..(2): Xaa in position 2 is any amino acid
  Variant (4)..(4): Xaa in position 4 is Gly or Leu
  Variant (5)..(5): Xaa in position 5 is Met or Val
  Variant (9)..(9): Xaa in position 9 is Asp or Asn
  Variant (10)..(10): Xaa in position 10 is Asn or Ser
  Variant (12)..(12): Xaa in position 12 is any or no amino acid
  Variant (14)..(14): Xaa in position 14 is any or no amino acid
  Variant (18)..(18): Xaa in position 18 is Leu or Met
  Variant (20)..(21): Xaa in position 20 to 21 is any amino acid
  Variant (22)..(22): Xaa in position 22 is Ala or Ser
  Variant (24)..(25): Xaa in position 24 to 25 is any amino acid
  Variant (26)..(26): Xaa in position 26 is Ser or Thr
  Variant (27)..(27): Xaa in position 27 is Pro or Val
  Variant (28)..(28): Xaa in position 28 is Glu or Ser
  Variant (29)..(29): Xaa in position 29 is Ala or Asn
  Variant (30)..(30): Xaa in position 30 is Pro or Val
NXLXXINLXXLXVXGDKXYXXXGXXXXXXX

SEQ ID NO: 125258 - protein, 28 aa, Artificial sequence
  protein pattern
  Variant (2)..(2): Xaa in position 2 is any amino acid
  Variant (3)..(5): Xaa in position 3 to 5 is any or no amino acid
  Variant (7)..(7): Xaa in position 7 is Gly or Asn
  Variant (9)..(9): Xaa in position 9 is any or no amino acid
  Variant (13)..(13): Xaa in position 13 is Pro or Val
  Variant (14)..(15): Xaa in position 14 to 15 is any amino acid
  Variant (18)..(18): Xaa in position 18 is any amino acid
  Variant (19)..(19): Xaa in position 19 is Glu or Gln
  Variant (20)..(20): Xaa in position 20 is any amino acid
  Variant (21)..(21): Xaa in position 21 is Ile or Leu
  Variant (22)..(22): Xaa in position 22 is Asp or Thr
  Variant (23)..(23): Xaa in position 23 is any amino acid
  Variant (26)..(26): Xaa in position 26 is Gly or Pro
  Variant (27)..(27): Xaa in position 27 is Gly or Gln
  Variant (28)..(28): Xaa in position 28 is Glu or Arg
PXXXXGXSXWHDXXXDNXXXXXXALXXX

SEQ ID NO: 125259 - protein, 36 aa, Artificial sequence
  protein pattern
  Variant (2)..(4): Xaa in position 2 to 4 is any amino acid
  Variant (5)..(5): Xaa in position 5 is any or no amino acid
  Variant (10)..(10): Xaa in position 10 is Ala or Val
  Variant (11)..(11): Xaa in position 11 is any amino acid
  Variant (12)..(12): Xaa in position 12 is Phe or Met
  Variant (13)..(13): Xaa in position 13 is any amino acid
  Variant (15)..(15): Xaa in position 15 is any or no amino acid
  Variant (17)..(17): Xaa in position 17 is any amino acid
  Variant (18)..(18): Xaa in position 18 is any or no amino acid
  Variant (20)..(20): Xaa in position 20 is Ala or Ser
  Variant (21)..(23): Xaa in position 21 to 23 is any amino acid
  Variant (24)..(24): Xaa in position 24 is Pro or Val
  Variant (25)..(25): Xaa in position 25 is any amino acid
  Variant (26)..(26): Xaa in position 26 is Asp or Glu
  Variant (27)..(27): Xaa in position 27 is Phe, Ile or Leu
  Variant (29)..(29): Xaa in position 29 is Asp or Asn
  Variant (30)..(30): Xaa in position 30 is Gly or Thr
  Variant (31)..(31): Xaa in position 31 is Gln or Arg
  Variant (32)..(32): Xaa in position 32 is Ala or Leu
  Variant (33)..(33): Xaa in position 33 is Asp, Glu or Arg
  Variant (34)..(34): Xaa in position 34 is Asp or His
  Variant (35)..(35): Xaa in position 35 is Ile or Met
  Variant (36)..(36): Xaa in position 36 is Ala or Asp
RXXXXLALGXXXXLXPXXAXXXXXXXXAXXXXXXXX

SEQ ID NO: 125260 - protein, 22 aa, Artificial sequence
  protein pattern
  Variant (2)..(2): Xaa in position 2 is Gln or Arg
  Variant (4)..(4): Xaa in position 4 is any amino acid
  Variant (7)..(7): Xaa in position 7 is Phe or Val
  Variant (8)..(8): Xaa in position 8 is any amino acid
  Variant (10)..(10): Xaa in position 10 is any amino acid
  Variant (11)..(11): Xaa in position 11 is any or no amino acid
  Variant (13)..(13): Xaa in position 13 is any amino acid
  Variant (14)..(14): Xaa in position 14 is any or no amino acid
  Variant (17)..(17): Xaa in position 17 is any amino acid
  Variant (19)..(19): Xaa in position 19 is any amino acid
  Variant (20)..(20): Xaa in position 20 is Ala or Thr
  Variant (21)..(21): Xaa in position 21 is any amino acid
EXRXRDXXRXXLXXLVXEXXXA

SEQ ID NO: 125261 - protein, 26 aa, Artificial sequence
  protein pattern
  Variant (3)..(6): Xaa in position 3 to 6 is any amino acid
  Variant (7)..(7): Xaa in position 7 is any or no amino acid
  Variant (9)..(9): Xaa in position 9 is any amino acid
  Variant (10)..(10): Xaa in position 10 is any or no amino acid
  Variant (12)..(12): Xaa in position 12 is Ala or Glu
  Variant (13)..(13): Xaa in position 13 is Gly or Leu
  Variant (15)..(15): Xaa in position 15 is any amino acid
  Variant (16)..(16): Xaa in position 16 is Cys, Asp or Gly
  Variant (18)..(18): Xaa in position 18 is any amino acid
  Variant (19)..(19): Xaa in position 19 is Phe or Leu
  Variant (20)..(20): Xaa in position 20 is Gly or Pro
  Variant (21)..(23): Xaa in position 21 to 23 is any amino acid
  Variant (24)..(24): Xaa in position 24 is Ala or Ser
  Variant (25)..(25): Xaa in position 25 is Gly or Ser
SAXXXXXAXXLXXGXXFXXXXXXXXP

SEQ ID NO: 125262 - protein, 30 aa, Artificial sequence
  protein pattern
  Variant (3)..(4): Xaa in position 3 to 4 is any or no amino acid
  Variant (6)..(6): Xaa in position 6 is Gly or Asn
  Variant (7)..(7): Xaa in position 7 is Leu or Val
  Variant (8)..(8): Xaa in position 8 is Cys or Gly
  Variant (9)..(9): Xaa in position 9 is Phe or His
  Variant (10)..(12): Xaa in position 10 to 12 is any amino acid
  Variant (13)..(13): Xaa in position 13 is Ala, Asp or Val
  Variant (14)..(16): Xaa in position 14 to 16 is any amino acid
  Variant (18)..(18): Xaa in position 18 is Pro or Val
  Variant (19)..(19): Xaa in position 19 is any amino acid
  Variant (20)..(20): Xaa in position 20 is Leu or Pro
  Variant (21)..(21): Xaa in position 21 is Gly or Gln
  Variant (22)..(22): Xaa in position 22 is Ala, Asp or Glu
  Variant (23)..(23): Xaa in position 23 is any amino acid
  Variant (24)..(24): Xaa in position 24 is Ala or Gly
  Variant (25)..(25): Xaa in position 25 is Gly or Asn
  Variant (26)..(26): Xaa in position 26 is Pro or Thr
  Variant (27)..(27): Xaa in position 27 is any amino acid
  Variant (28)..(28): Xaa in position 28 is Ala or Leu
  Variant (29)..(29): Xaa in position 29 is any amino acid
  Variant (30)..(30): Xaa in position 30 is Asp or His
LAXXLXXXXXXXXXXXSXXXXXXXXXXXXX

SEQ ID NO: 125263 - protein, 22 aa, Artificial sequence
  protein pattern
  Variant (2)..(2): Xaa in position 2 is any or no amino acid
  Variant (4)..(4): Xaa in position 4 is any amino acid
  Variant (5)..(5): Xaa in position 5 is Cys, Gly or Val
  Variant (6)..(6): Xaa in position 6 is any amino acid
  Variant (7)..(7): Xaa in position 7 is Ile or Pro
  Variant (8)..(8): Xaa in position 8 is any amino acid
  Variant (9)..(9): Xaa in position 9 is Pro or Ser
  Variant (10)..(10): Xaa in position 10 is Ala, Gly or Val
  Variant (11)..(11): Xaa in position 11 is any amino acid
  Variant (12)..(12): Xaa in position 12 is Ala or Asp
  Variant (13)..(13): Xaa in position 13 is any amino acid
  Variant (14)..(14): Xaa in position 14 is Pro or Ser
  Variant (15)..(15): Xaa in position 15 is Gly or Pro
  Variant (16)..(16): Xaa in position 16 is any amino acid
  Variant (18)..(18): Xaa in position 18 is Glu or Gly
  Variant (19)..(19): Xaa in position 19 is Asp, Glu or Ser
  Variant (20)..(21): Xaa in position 20 to 21 is any amino acid
  Variant (22)..(22): Xaa in position 22 is Ala or Asn
AXGXXXXXXXXXXXXXPXXXXX

SEQ ID NO: 125264 - DNA, 1182 bp, Escherichia coli
  CDS (1)..(1182): transl_table=11
atgtcgaaaagcaatccgtctgaagtgaaattggccgtaccgacatccggtggcttctccgggctgaaatcactgaatttgcaggtcttcgtgatgattgcagctatcatcgcaatcatgctgttctttacctggaccaccgatggtgcctacttaagcgcccgtaacgtctccaacctgttacgccagaccgcgattaccggcatcctcgcggtaggaatggtgttcgtcataatttctgctgaaatcgacctttccgtcggctcaatgatggggctgttaggtggcgtcgcggcgatttgtgacgtctggttaggctggcctttgccacttaccatcattgtgacgctggttctgggactgcttctcggtgcctggaacggatggtgggtcgcgtaccgtaaagtcccttcatttattgtcaccctcgcgggcatgttggcatttcgcggcatactcattggcatcaccaacggcacgactgtatcccccaccagcgccgcgatgtcacaaattgggcaaagctatctccccgccagtaccggcttcatcattggcgcgcttggcttaatggcttttgttggttggcaatggcgcggaagaatgcgccgtcaggctttgggtttacagtctccggcctctaccgcagtagtcggtcgccaggctttaaccgctatcatcgtattaggcgcaatctggctgttgaatgattaccgtggcgttcccactcctgttctgctgctgacgttgctgttactcggcggaatgtttatggcaacgcggacggcatttggacgacgcatttatgccatcggcggcaatctggaagcagcacgtctctccgggattaacgttgaacgcaccaaacttgccgtgttcgcgattaacggattaatggtagccatcgccggattaatccttagttctcgacttggcgctggttcaccttctgcgggaaatatcgccgaactggacgcaattgcagcatgcgtgattggcggcaccagcctggctggcggtgtgggaagcgttgccggagcagtaatgggggcatttatcatggcttcactggataacggcatgagtatgatggatgtaccgaccttctggcagtatatcgttaaaggtgcgattctgttgctggcagtatggatggactccgcaaccaaacgccgttcttaa

SEQ ID NO: 125265 - protein, 393 aa, Escherichia coli; identical to SEQ ID NO: 100095

SEQ ID NO: 125266 - DNA, 1287 bp, Mesorhizobium loti MAFF303099; identical to SEQ ID NO: 38775
  CDS (1)..(1287): transl_table=11

SEQ ID NO: 125267 - protein, 428 aa, Mesorhizobium loti MAFF303099; identical to SEQ ID NO: 38776

SEQ ID NO: 125268 - DNA, 999 bp, Escherichia coli O157:H7 EDL933
  CDS (1)..(999): transl_table=11
atgtctgcttcgtcattaccattgccgcagggcaagagcgtctcgctcaaacaatttgtcagtcaccatattaatgagatcggtttgctggtggtgattgccattctttatctggtcttctccctgaacgcgcctggctttatctcattgaataaccagatgaacgtgctgcgcgatgccgccaccattgggattgccgcctgggcgatgacgctgattattatctccggtgaaattgatgtcagcgttgggccgatggtggcttttgtctcggtatgcctggcatttttgctgcaatttgaagttccgttggcgattgcttgtctgctggtgttgctgttaggcgcgctgatgggaacgctcgccggggtgctgcgtggcgtgtttaacgtgccaagtttcgtggccacgctggggctgtggagcgccctgcgcggaatgggcttgtttatgaccaacgctctgccagtgccgattgacgaaaacgaggtgctggactggctgggcggacaatttctcggtgtgccggtatccgcgctgatcatgatggtgctgtttgcgctgtttgtgttcattagccgcaaaaccgccttcgggcgctcggtttttgccgttggcggtaatgccacggcggcgcagttgtgcggtattaacgttcgtcgggtacgcattcttatctttaccctttcgggattattagcggcggtgaccggcattttgttggcggcgcgcctcggttccggtaacgcaggtgccgcaaacggtctggagtttgacgtcatcgccgcggtcgtggtcggcggtacggcgctttccggtggtcgcggctcgttgttcggtacgctgcttggcgtactggtgattacgctaatcggtaacggtctggtgctgctcgggattaactcctttttccagcaggtggtgcgcggcgtcatcatcgtggtggcggtgctggcgaatatcttgctgacccagcgtagcagtaaagcgaaacgctaa

SEQ ID NO: 125269 - protein, 332 aa, Escherichia coli O157:H7 EDL933
MSASSLPLPQGKSVSLKQFVSHHINEIGLLVVIAILYLVFSLNAPGFISLNNQMNVLRDAATIGIAAWAMTLIIISGEIDVSVGPMVAFVSVCLAFLLQFEVPLAIACLLVLLLGALMGTLAGVLRGVFNVPSFVATLGLWSALRGMGLFMTNALPVPIDENEVLDWLGGQFLGVPVSALIMMVLFALFVFISRKTAFGRSVFAVGGNATAAQLCGINVRRVRILIFTLSGLLAAVTGILLAARLGSGNAGAANGLEFDVIAAVVVGGTALSGGRGSLFGTLLGVLVITLIGNGLVLLGINSFFQQVVRGVIIVVAVLANILLTQRSSKAKR

SEQ ID NO: 125270 - DNA, 966 bp, Escherichia coli O157:H7 EDL933; identical to SEQ ID NO: 38781
  CDS (1)..(966): transl_table=11
  misc_feature (601)..(601): s is g or c

SEQ ID NO: 125271 - protein, 321 aa, Escherichia coli O157:H7 EDL933; identical to SEQ ID NO: 38782
  misc_feature (201)..(201): The Xaa at location 201 stands for Ala, or Pro.

SEQ ID NO: 125272 - DNA, 975 bp, Escherichia coli O157:H7 EDL933; identical to SEQ ID NO: 99916
  CDS (1)..(975): transl_table=11

SEQ ID NO: 125273 - protein, 324 aa, Escherichia coli O157:H7 EDL933; identical to SEQ ID NO: 99917

SEQ ID NO: 125274 - DNA, 1107 bp, Agrobacterium tumefaciens str. C58
  CDS (1)..(1107): transl_table=11
atggagcgatcgggaggaaaatccatgagcgatcagccagtgcgggcgcaaccgcacaatgaatttgaaaaagtgctgtcaggaagttcgacccaggtcgctgcttttgatacgcacaacaagagtttgctggaaaaattccagcactttctgcattccagccctgcggctgttcccctgatcgttctggtgctgtcacttgccatcttcggcatgacgctgggcggcaagttcttttcggctttctcgctgacgcttattcttcagcaggtggcaatcgtcggcattgtcggcgcggcgcagtcgctggtcattctgaccgcgggtatcgatctttcggtcggtgccatcatggttctctcctccgtcgtcatgggccagttcaccttccgttatggtctgcctgcggaactttccattatctgcggtctcgcagtcggcgcgttttgtggtttcatcaacggcgtgctggtatcgcgcatgcggctgccgcccttcatcgtcacgctcggcatgtggcagatcgtgctggccaccaatttcctctattcggctaacgagacgatccgcgctcaggacattgtccagcaagcgcccattcttcagtttttcggcaataatattcgtatcggcaatgccgtcttcacctacggcgttctcgcgatggttctgctcgtcgctttgctctggtatgtgctcaaccgcaccgcttgggggcgccatctttatgcggtcggtgacgatccagacgcggctgaacttgctggcgttaacgtcaagcgcatgctgacgaccgtctataccctgtccggccttatctgcgccttcgcgggttgggctctcatcggtcgcatcggctcggtgtcgccgactgccggtcagttcgccaacattgaatccatcactgcagtggtcatcggcggcatctcgctgttcggcggacgcggttccatcatgggcatgatcttcggtgcgctgatcgtcggcgtcttttcgctgggcctcaggctcatcgggacagatccgcaatggacctatctgttgattggcgtcctcatcatcttggccgtggcaatcgaccagtggattagaaaggtagcaggctga

SEQ ID NO: 125275 - protein, 368 aa, Agrobacterium tumefaciens str. C58
MERSGGKSMSDQPVRAQPHNEFEKVLSGSSTQVAAFDTHNKSLLEKFQHFLHSSPAAVPLIVLVLSLAIFGMTLGGKFFSAFSLTLILQQVAIVGIVGAAQSLVILTAGIDLSVGAIMVLSSVVMGQFTFRYGLPAELSIICGLAVGAFCGFINGVLVSRMRLPPFIVTLGMWQIVLATNFLYSANETIRAQDIVQQAPILQFFGNNIRIGNAVFTYGVLAMVLLVALLWYVLNRTAWGRHLYAVGDDPDAAELAGVNVKRMLTTVYTLSGLICAFAGWALIGRIGSVSPTAGQFANIESITAVVIGGISLFGGRGSIMGMIFGALIVGVFSLGLRLIGTDPQWTYLLIGVLIILAVAIDQWIRKVAG

SEQ ID NO: 125276 - DNA, 1197 bp, Agrobacterium tumefaciens str. C58; identical to SEQ ID NO: 38805
  CDS (1)..(1197): transl_table=11

SEQ ID NO: 125277 - protein, 398 aa, Agrobacterium tumefaciens str. C58; identical to SEQ ID NO: 38806

SEQ ID NO: 125278 - DNA, 984 bp, Agrobacterium tumefaciens str. C58; identical to SEQ ID NO: 99924
  CDS (1)..(984): transl_table=11

SEQ ID NO: 125279 - protein, 327 aa, Agrobacterium tumefaciens str. C58; identical to SEQ ID NO: 99925

SEQ ID NO: 125280 - DNA, 1377 bp, Agrobacterium tumefaciens str. C58
  CDS (1)..(1377): transl_table=11
ttgggcgccgcgtcacgaacaggtggcgcggcgcctttcagatgtaaggaggaccggcagtccatggccgacatgacacaatccaattccacgacgtcccccaagacggaaaagaccggctcgatttcgcgtttcatcagtgccacggagctcgatacgcggctgcttggcatggtcggcgcgcttcttctgatctggatcggtttccatattctttcgggtggactgttcctgacgccgagaaacctctggaacctctccgtccagaccgcttcggtcgcggtgatggcgacgggcatggtgcttgttatcgttacccgcaacatcgatctgtcggtcgggtcgatcctcggcttttccggcatgatcatgggtgtcatgcaggcggaaatcctgccgcaaatcctcggcttcgaacattgggcgacatggatcgtcacgcttctggtcggtattctcgtcggcggcgcaatcggcatgctgcagggctcgatcatcgccttcctcaacgtgccgtccttcatcgtaacacttggtggcctgctcgtctggcgcggcggcacctggttcgtcaccagcggccgcaccgtggcaccgatggattccaccttccgcctgatgggcggcggcaccagcggctcgatcggcgcgacatggagctggatcgcagcgatcgtcgcctgcgtcgctattgtcgcggcgatcctcaattcccgtcaccagcgccgccgtttcggctttccgctgcggcccgtctgggcggaatatttcctggtggcgcttggctgcttcgtcgtcgtcggtttcgtggctgtcgtcaacagctatccctggccgatcaacattgcccgcaactatgccgatgccaatggcatagcctggccggatggcggcctgttcattccgcacggcattgccattcctgtgctgatggcgctcgcagtcggtgccgtcatgaccttcatcgcgacgaggctgcgcttcggacgttatgttttcgccatcggcggcaacccggaagcggcggaactggccggcatcaagacccgctgggtcacggtgaagatattcacgctgatgggcgttctgtgcgccatcgccgcggcaatttccactgcccgcctcaacgctgccaccaatgcccagggtgaactcgacgaactttatacgatcgcggccgcggtcatcggcggcacctcgcttgccggcggcgtcggcaccatagcgggcgcgatgctcggcgcgctcgtcatgcaatcgctgcaatccggcatggtgctggtgggcatcgatacgcccttccagcgcatcgtcgtcggtgtggtcctggtcgtcgccgtctggctcgacaccatctaccgcgcccgcgccaagtaa

SEQ ID NO: 125281 - protein, 458 aa, Agrobacterium tumefaciens str. C58
MGAASRTGGAAPFRCKEDRQSMADMTQSNSTTSPKTEKTGSISRFISATELDTRLLGMVGALLLIWIGFHILSGGLFLTPRNLWNLSVQTASVAVMATGMVLVIVTRNIDLSVGSILGFSGMIMGVMQAEILPQILGFEHWATWIVTLLVGILVGGAIGMLQGSIIAFLNVPSFIVTLGGLLVWRGGTWFVTSGRTVAPMDSTFRLMGGGTSGSIGATWSWIAAIVACVAIVAAILNSRHQRRRFGFPLRPVWAEYFLVALGCFVVVGFVAVVNSYPWPINIARNYADANGIAWPDGGLFIPHGIAIPVLMALAVGAVMTFIATRLRFGRYVFAIGGNPEAAELAGIKTRWVTVKIFTLMGVLCAIAAAISTARLNAATNAQGELDELYTIAAAVIGGTSLAGGVGTIAGAMLGALVMQSLQSGMVLVGIDTPFQRIVVGVVLVVAVWLDTIYRARAK

SEQ ID NO: 125282 - DNA, 1065 bp, Agrobacterium tumefaciens str. C58; identical to SEQ ID NO: 38787
  CDS (1)..(1065): transl_table=11

SEQ ID NO: 125283 - protein, 354 aa, Agrobacterium tumefaciens str. C58; identical to SEQ ID NO: 38788

SEQ ID NO: 125284 - DNA, 1005 bp, Agrobacterium tumefaciens str. C58; identical to SEQ ID NO: 99926
  CDS (1)..(1005): transl_table=11

SEQ ID NO: 125285 - protein, 334 aa, Agrobacterium tumefaciens str. C58; identical to SEQ ID NO: 99927

SEQ ID NO: 125286 - DNA, 1185 bp, Yersinia pestis CO92; identical to SEQ ID NO: 99932
  CDS (1)..(1185): transl_table=11

SEQ ID NO: 125287 - protein, 394 aa, Yersinia pestis CO92; identical to SEQ ID NO: 99933

SEQ ID NO: 125288 - DNA, 1197 bp, Ralstonia solanacearum GMI1000; identical to SEQ ID NO: 99938
  CDS (1)..(1197): transl_table=11

SEQ ID NO: 125289 - protein, 398 aa, Ralstonia solanacearum GMI1000; identical to SEQ ID NO: 99939

SEQ ID NO: 125290 - DNA, 1023 bp, Agrobacterium tumefaciens str. C58; identical to SEQ ID NO: 99940
  CDS (1)..(1023): transl_table=11

SEQ ID NO: 125291 - protein, 340 aa, Agrobacterium tumefaciens str. C58; identical to SEQ ID NO: 99941

SEQ ID NO: 125292 - DNA, 1314 bp, Agrobacterium tumefaciens str. C58
  CDS (1)..(1314): transl_table=11
atggccgacatgacacaatccaattccacgacgtcccccaagacggaaaagaccggctcgatttcgcgtttcatcagtgccacggagctcgatacgcggctgcttggcatggtcggcgcgcttcttctgatctggatcggtttccatattctttcgggtggactgttcctgacgccgagaaacctctggaacctctccgtccagaccgcttcggtcgcggtgatggcgacgggcatggtgcttgttatcgttacccgcaacatcgatctgtcggtcgggtcgatcctcggcttttccggcatgatcatgggtgtcatgcaggcggaaatcctgccgcaaatcctcggcttcgaacattgggcgacatggatcgtcacgcttctggtcggtattctcgtcggcggcgcaatcggcatgctgcagggctcgatcatcgccttcctcaacgtgccgtccttcatcgtaacacttggtggcctgctcgtctggcgcggcggcacctggttcgtcaccagcggccgcaccgtggcaccgatggattccaccttccgcctgatgggcggcggcaccagcggctcgatcggcgcgacatggagctggatcgcagcgatcgtcgcctgcgtcgctattgtcgcggcgatcctcaattcccgtcaccagcgccgccgtttcggctttccgctgcggcccgtctgggcggaatatttcctggtggcgcttggctgcttcgtcgtcgtcggtttcgtggctgtcgtcaacagctatccctggccgatcaacattgcccgcaactatgccgatgccaatggcatagcctggccggatggcggcctgttcattccgcacggcattgccattcctgtgctgatggcgctcgcagtcggtgccgtcatgaccttcatcgcgacgaggctgcgcttcggacgttatgttttcgccatcggcggcaacccggaagcggcggaactggccggcatcaagacccgctgggtcacggtgaagatattcacgctgatgggcgttctgtgcgccatcgccgcggcaatttccactgcccgcctcaacgctgccaccaatgcccagggtgaactcgacgaactttatacgatcgcggccgcggtcatcggcggcacctcgcttgccggcggcgtcggcaccatagcgggcgcgatgctcggcgcgctcgtcatgcaatcgctgcaatccggcatggtgctggtgggcatcgatacgcccttccagcgcatcgtcgtcggtgtggtcctggtcgtcgccgtctggctcgacaccatctaccgcgcccgcgccaagtaa

SEQ ID NO: 125293 - protein, 437 aa, Agrobacterium tumefaciens str. C58
MADMTQSNSTTSPKTEKTGSISRFISATELDTRLLGMVGALLLIWIGFHILSGGLFLTPRNLWNLSVQTASVAVMATGMVLVIVTRNIDLSVGSILGFSGMIMGVMQAEILPQILGFEHWATWIVTLLVGILVGGAIGMLQGSIIAFLNVPSFIVTLGGLLVWRGGTWFVTSGRTVAPMDSTFRLMGGGTSGSIGATWSWIAAIVACVAIVAAILNSRHQRRRFGFPLRPVWAEYFLVALGCFVVVGFVAVVNSYPWPINIARNYADANGIAWPDGGLFIPHGIAIPVLMALAVGAVMTFIATRLRFGRYVFAIGGNPEAAELAGIKTRWVTVKIFTLMGVLCAIAAAISTARLNAATNAQGELDELYTIAAAVIGGTSLAGGVGTIAGAMLGALVMQSLQSGMVLVGIDTPFQRIVVGVVLVVAVWLDTIYRARAK

SEQ ID NO: 125294 - DNA, 915 bp, Corynebacterium glutamicum ATCC 13032; identical to SEQ ID NO: 38807
  CDS (1)..(915): transl_table=11

SEQ ID NO: 125295 - protein, 304 aa, Corynebacterium glutamicum ATCC 13032; identical to SEQ ID NO: 38808

SEQ ID NO: 125296 - DNA, 1245 bp, Streptomyces coelicolor A3(2); identical to SEQ ID NO: 99946
  CDS (1)..(1245): transl_table=11

SEQ ID NO: 125297 - protein, 414 aa, Streptomyces coelicolor A3(2); identical to SEQ ID NO: 99947

SEQ ID NO: 125298 - DNA, 1293 bp, Streptomyces coelicolor A3(2); identical to SEQ ID NO: 99950
  CDS (1)..(1293): transl_table=11

SEQ ID NO: 125299 - protein, 430 aa, Streptomyces coelicolor A3(2); identical to SEQ ID NO: 99951

SEQ ID NO: 125300 - DNA, 1194 bp, Yersinia pestis KIM
  CDS (1)..(1194): transl_table=11
gtgaaacccatgtcacaagctaatcaatctgaatttaactcaccagaaaatggggataaaaagccattttttcggcttaaatccttaaatttacaagtttttgtcatgctggccgcgatcgccattattatgttgttcttcaccttcacgacagaaggggcctatctcagcgccagaaatatctctaacttgctgcgccagacggcgatcaccggcatcttggcggtcggtatggtgtttgtcattatctccgccgaaattgacttgtctgttggctcaatgatggggttattgggtggcatagcggccatttttgatgtctggctcggctggccgttgccgctgaccattgtcgttacgctggcgctggggctggtattaggggcatggaacggttggtgggtcgcgtatcgcaaagtgccttcgtttattgttacgctcgcgggcatgttggcttttcgtggcattttaattggtatcaccaatggcacgacggtttcgccgaccagtaatgcgatgtcgcagattggccagagctatctgccaagtggcattggttttggcatcggtgctattggcctgatgttgtttgtggcctggcaatggcgtcggcgtaatcaccgcatccgcttggggttaccggttgccgccccgcaaggggatgtgactcgccaaactattaccgcagttatcgttctgggtgccatatatttattgaatgattatcgtggtgtacctacgccggtactaatccttactgcattaatgctggcgggggtatttatggctactcgcaccgcttttggtcgccggatctacgctattggcggcaatattgatgcggcgcgcctgtctggaattaatgtagagcgcactaaactggcagtattcgcgattaacggactgatggtggcgatggctggtttgatcctcagttcacgtttaggcgcaggttcgccttctgcgggcaatatcgctgaactggatgcgattgcggcgtgtgtcattggcggtaccagcctggccggaggcgttggcagtgtggcgggggccgtaatgggcgcatttattatggcttctctcgataatgggatgagcatgctagatgtgccgacgttctggcagtacattgtcaaaggcgcaattttgctgctggccgtgtggatggattccgccaccaaacggcgggtgtga

SEQ ID NO: 125301 - protein, 397 aa, Yersinia pestis KIM
MKPMSQANQSEFNSPENGDKKPFFRLKSLNLQVFVMLAAIAIIMLFFTFTTEGAYLSARNISNLLRQTAITGILAVGMVFVIISAEIDLSVGSMMGLLGGIAAIFDVWLGWPLPLTIVVTLALGLVLGAWNGWWVAYRKVPSFIVTLAGMLAFRGILIGITNGTTVSPTSNAMSQIGQSYLPSGIGFGIGAIGLMLFVAWQWRRRNHRIRLGLPVAAPQGDVTRQTITAVIVLGAIYLLNDYRGVPTPVLILTALMLAGVFMATRTAFGRRIYAIGGNIDAARLSGINVERTKLAVFAINGLMVAMAGLILSSRLGAGSPSAGNIAELDAIAACVIGGTSLAGGVGSVAGAVMGAFIMASLDNGMSMLDVPTFWQYIVKGAILLLAVWMDSATKRRV

SEQ ID NO: 125302 - DNA, 1170 bp, Brucella suis 1330
  CDS (1)..(1170): transl_table=11
atgacgttgacaggcaaaagcctcagaaaatttctctcagaatacaaaatcgtggcactgctgattgttgtcgccctgatctgggcattcttcgccatcatgacttacgatcccgagatgggccggtcgcagtttctcaccgcgcgcaatttctccaatcttttgcgccagatggcaatcaccggcatgctggcttcagccatggtgtttgtcatcgtggcgggtgaaatcgatctgtcggtgggggctttgctcggcctgttaggcggtgtcgcggcggtgctcgatgtggtttacggctggccgttatgggccactatcgctacggttctggtgctgggtggagtgcttggcggtttcaacggctggctcaccgcctatctcggcattccgtccttcatcgttacgctgggcgggcaattggtgtttcgcggtattgtgctgggtatcatgggcggtgtcaccattgcgccgatttcgcccgagttcaaatatatcgggcaaggctatttgcccggctggcttggcaatgtctgtgccatggcgctgtttacagtgcttgtcctgattacgctcagaacccgttccagcaagcgcaaacacaatttgcaaacgctttcaccggcgatggaaaccgctcgccttctgggcacgggtatcctgatccttggttttatcctggtcctcaacagctatcagggcgtaccggttccggttctcgtgctgctggttattcttggcgtcttcaccgttatttcccgccagactgttttcggccggcatatttatgcggtcggttccaatcctgaagccacgcgcttttccggtgtcaacgtgaatttcgtcaaaatggccgtgtttgcgctgatgggacttatagcggcagtggcgggcctcaccacgactgcacgccttgcggccggtacgccatcggcaggtttgggcggcgaacttgatgccatcgcatcatgctttatcggcggcacatccatgcgcggcggcgtgggatccgtgattggtgcgctggtcggtgcgcttatcatgtcaagcctcgataatggtatgtcgatgctgggcgtcgatacattctggcagcaaatcatcaagggcagtattcttgtgctggccgtttatctcgatatcgtatcatcaggcacacgtcgcgcctga

SEQ ID NO: 125303 - protein, 389 aa, Brucella suis 1330
MTLTGKSLRKFLSEYKIVALLIVVALIWAFFAIMTYDPEMGRSQFLTARNFSNLLRQMAITGMLASAMVFVIVAGEIDLSVGALLGLLGGVAAVLDVVYGWPLWATIATVLVLGGVLGGFNGWLTAYLGIPSFIVTLGGQLVFRGIVLGIMGGVTIAPISPEFKYIGQGYLPGWLGNVCAMALFTVLVLITLRTRSSKRKHNLQTLSPAMETARLLGTGILILGFILVLNSYQGVPVPVLVLLVILGVFTVISRQTVFGRHIYAVGSNPEATRFSGVNVNFVKMAVFALMGLIAAVAGLTTTARLAAGTPSAGLGGELDAIASCFIGGTSMRGGVGSVIGALVGALIMSSLDNGMSMLGVDTFWQQIIKGSILVLAVYLDIVSSGTRRA

SEQ ID NO: 125304 - DNA, 996 bp, Pseudomonas putida KT2440
  CDS (1)..(996): transl_table=11
atgaaaaccaccccgctcaacaaccaggacgccgcccccgtgcgccgcagcggtacgtactttggcctgggcacctacctgggcctggctggcgccttgctggcgatgatcgtgctgttctcgttcctcagcagccacttctggtcgtatggcaccttcagcacgctggccaaccagatcccggacctgatggtgctggcggtgggcatgaccttcgtgctgatcatcggcggcatcgacctgtcggtgggctcggtgctggcgctggccgcctcgacggtgagcgtggcgatactcggctggggctggggcgtgctgccctcggcgctgctgggcatggccgtggccgccctggccggcagcattaccggtggcgtcaccgtggcctggcgcatcccgtcgttcatcgtctcgcttggtgtgttggagatggcccgtggcctggcctatcagttcaccgactcgcgcaccgcctatatcggcgacgcctatgcctggttctccaacccggtcgcctttggtgtttcgccagcgttcatcatcgccttgctggtgatcgtgctcgcccagttggtactgacgcgcacggtgttcggccgttacctgatcggtatcggcaccaacgaagaggccgtgcgcctggccggtatcgatccgcgcccttacaaagtgctggtgttcgccctgatgggcctgctcgccggcctggccgcactgttccagatctcgcggctggaagccgccgaccccaatgccggctctggcctggagctgcaggtcattgccgccgtcgtgatcggcggcaccagcctgatgggtgggcgtggctcggtcatcagcaccttctttggcgtactgatcatttccgtattggccgccgggctggcgcagatcggtgccagcgagccgaccaaacgcatcatcaccggggcggtgatcgtcatcgccgtggtgctcgacacttaccgtagccggcgcgcaggccggcggaactga

SEQ ID NO: 125305 - protein, 331 aa, Pseudomonas putida KT2440
MKTTPLNNQDAAPVRRSGTYFGLGTYLGLAGALLAMIVLFSFLSSHFWSYGTFSTLANQIPDLMVLAVGMTFVLIIGGIDLSVGSVLALAASTVSVAILGWGWGVLPSALLGMAVAALAGSITGGVTVAWRIPSFIVSLGVLEMARGLAYQFTDSRTAYIGDAYAWFSNPVAFGVSPAFIIALLVIVLAQLVLTRTVFGRYLIGIGTNEEAVRLAGIDPRPYKVLVFALMGLLAGLAALFQISRLEAADPNAGSGLELQVIAAVVIGGTSLMGGRGSVISTFFGVLIISVLAAGLAQIGASEPTKRIITGAVIVIAVVLDTYRSRRAGRRN

SEQ ID NO: 125306 - DNA, 1245 bp, Streptomyces avermitilis MA-4680
  CDS (1)..(1245): transl_table=11
atgagtgccaatgtcacggccaagacaccggccgaagcgtcacccgggggaagtccctccggatccggtcccggcctgctccggctgctggtcgacggcatgcgcagcaacatgcgccagtacggcatgctgatcgccctcggggtgatcgtggccctgttcgcggtgtggacgggtggcgacctgctcctgccgcgcaacgtgtccaacctcgtgctgcagaacagctacatcctgatcctcgcgatcggcatgatgatcgtcatcatcgcgggccacatcgacctgtcggtcggctcgatcaccgccttcgtgggcggtgtggccgcggtgctgatggtcaaccacgacgtgccctggccgctcgcggtgctgctgtgcctggccgtgggagcggccgcgggggccgcgcaggggttcatgatcgcctatctgggcatgccgtcgttcatcgtgacgctcgccggcatgctgatcttccgcggtctgaccgaggtcttcctcaagggccagacgctcggcccgttcccggagggccttcagaaggtcgccaacggcttcctgcccgaggtcggcccgaagaccaactaccacaacctcacgctgctgctcggtctcgcactggtcggcttcgtgatctggcgtgagatgaaggaccgcaagcggcaggcggagtactccctcgaggtgctgcccgccaacctgttcgcggtgaagctcgccctgctgaccgcggcgatcatcgccctcaccatggagctcggcagctacaagggcgcgccggtcgtcctgctggtcctggcggtgctcctggtcggcttcggctacgtcatgcgcaacgtggtggtcggtcgccacgtgtacgcgatcggcggcaacctgccggcggccaggctgtcgggcgtcagggacaagaaggtcaccttcctcgtcttcctcaacatggggatgatggccgcgctcgcgggcctggtcttcgcggcgcggttcaacggagcctcgccgaaggccggcgtcaacttcgaactcgaggccatcgccgcgtcgttcatcggcggtgcctcgatgagcggcggcgtgggcaccatcctcggcgccatcatcggcggcctggtcctcggtgtgctcaacaacggcatgaacctcgtcggcgtcggcaccgactggcagggggtcatcaagggcctcgtgctgctcgcggcggtcggcttcgacgtgtggaacaagcgcaaggtcggttcgtaa

SEQ ID NO: 125307 - protein, 414 aa, Streptomyces avermitilis MA-4680
MSANVTAKTPAEASPGGSPSGSGPGLLRLLVDGMRSNMRQYGMLIALGVIVALFAVWTGGDLLLPRNVSNLVLQNSYILILAIGMMIVIIAGHIDLSVGSITAFVGGVAAVLMVNHDVPWPLAVLLCLAVGAAAGAAQGFMIAYLGMPSFIVTLAGMLIFRGLTEVFLKGQTLGPFPEGLQKVANGFLPEVGPKTNYHNLTLLLGLALVGFVIWREMKDRKRQAEYSLEVLPANLFAVKLALLTAAIIALTMELGSYKGAPVVLLVLAVLLVGFGYVMRNVVVGRHVYAIGGNLPAARLSGVRDKKVTFLVFLNMGMMAALAGLVFAARFNGASPKAGVNFELEAIAASFIGGASMSGGVGTILGAIIGGLVLGVLNNGMNLVGVGTDWQGVIKGLVLLAAVGFDVWNKRKVGS

SEQ ID NO: 125308 - DNA, 1182 bp, Erwinia carotovora subsp. atroseptica SCRI1043
  CDS (1)..(1182): transl_table=11
gtgctgaaaacatcgcagtctgaacaacaacatgtcgccggatctgtctcgatgctgcaacgactgaaaagcatcaatcttcaggtctatgtgatgattgccgccatcatcgcgatcatgctcttcttcacctatatgaccgacggggcgtacctcagcgcgcgtaatctttccaacctgctgaggcaaacggcaattactggcattctggccgtcggtatggtgtttgtcattatctccgccgagatcgatctgtcggtcggatcgatgatggggttattgggcggtgcggcggctatttttgatgtctggtttggctggcctttgccgctgaccattgttgtgacgctcgcgctgggattattgcttggcgcgtggaacggctggtgggttgcctaccggaaagtcccttcttttatcgtgacgctggcggggatgctggcttttcgcggcattttgatcggtattaccaatgggacaacggtttccccgaccagtgaggcgatgtcgcagattgggcaaagctatctgccttctggcatcggttttatgttcggtgctatcgggctgatggtgtttattggctggcagtggcgtcggcgtagtagccgtgctcggttagggttaccgataaatccacccgcaggggatgtcggccgccagacagtgacagcactagtcgtattgggcgcgatctatctgctgaatgactatcgtggcgtgccaacgccggttctggtgctgacgctgttgatgctgggcggtatttttctggcgacgcgaaccgcgtttggtcgtcgtatctatgccgtgggcgggaatatcgatgccgctcgcttatcgggagtgaatgtcgaacgcaccaaaatggcggtgttcgcgattaatggcctgatggtcgcggtcgctgggctgattctcagttcacgattgggggcagggtcgccatctgccgggaatattgccgagctggatgcgattgcggcctgcgtgattggcggaaccagtctggcgggcggtattggcagcgtggcgggcgcggttatgggggcatttatcatggcgtcgctggataacggaatgagcatgttggatgtgccgacgttctggcaatacgtcgtgaaaggcggaatcctgctcttggcggtgtggatggacaccgctaccaagcggcgcgtatga

SEQ ID NO: 125309 - protein, 393 aa, Erwinia carotovora subsp. atroseptica SCRI1043
MLKTSQSEQQHVAGSVSMLQRLKSINLQVYVMIAAIIAIMLFFTYMTDGAYLSARNLSNLLRQTAITGILAVGMVFVIISAEIDLSVGSMMGLLGGAAAIFDVWFGWPLPLTIVVTLALGLLLGAWNGWWVAYRKVPSFIVTLAGMLAFRGILIGITNGTTVSPTSEAMSQIGQSYLPSGIGFMFGAIGLMVFIGWQWRRRSSRARLGLPINPPAGDVGRQTVTALVVLGAIYLLNDYRGVPTPVLVLTLLMLGGIFLATRTAFGRRIYAVGGNIDAARLSGVNVERTKMAVFAINGLMVAVAGLILSSRLGAGSPSAGNIAELDAIAACVIGGTSLAGGIGSVAGAVMGAFIMASLDNGMSMLDVPTFWQYVVKGGILLLAVWMDTATKRRV

SEQ ID NO: 125310 - DNA, 975 bp, Corynebacterium glutamicum ATCC 13032; identical to SEQ ID NO: 38841
  CDS (1)..(975): transl_table=11

SEQ ID NO: 125311 - protein, 324 aa, Corynebacterium glutamicum ATCC 13032; identical to SEQ ID NO: 38842

SEQ ID NO: 125312 - DNA, 1137 bp, Pseudomonas syringae pv. phaseolicola 1448A; identical to SEQ ID NO: 100020
  CDS (1)..(1137): transl_table=11

SEQ ID NO: 125313 - protein, 378 aa, Pseudomonas syringae pv. phaseolicola 1448A; identical to SEQ ID NO: 100021

SEQ ID NO: 125314 - DNA, 1194 bp, Moorella thermoacetica ATCC 39073
  CDS (1)..(1194): transl_table=11
gtgtttaatcttattaaaactatttcccctgcagaaacggtacaatctaaacctaaagcgaatgggtatttaagtagaatagatatacgcgcttatacaatgatattagccttattgggtatatgggctattttcacttatactacccagggtgcttttttgacttcccgtaatctatcaaacctcttcaggcagatgtcaattacctctattttagcgataggtatggtctttgtaatagtagccggtcatattgacctttccgtaggttctctcatgggacttactggaggggtagcggcaattttacaggtctggtatggttggcagaccattcctgctatttttataagctttttaattggtctgctggccggcttatggcagggctggtgggttgcctataaaaaggtgcctgctttcattgtcaccctgggcggtatgatggtatttcggggaattctaataggaattagtcatggcgaaacagtttcgcctctcatggatagttttaaacaaataggccaatcctatgtacctgaaagtacaggcttcttattagcattcctgggtattatttatgtgatctatgttactgtaaagcaacggtatactagaattaagtatggttttactgtgccttctttagctctggaaataatgcgtaccattttttacgcctttctcattggcctttttgtctatctaatgaatgattaccagggtatacctgtacctgtcctaatcgtagtggcgatggcatttatttttacgggtttagcaacgaaaactcgcttcgggcgttatgtctacgcaattggtggtaacagtgaagcagcacgtttatccggtattaatattcgatataacatcctggccgtttttgttatcagtgggttaatggctgccttaagcggtatcctgttaactgcaagattaaacggtgcttcagtagctgcagggcaaaatgctgagcttgatgccattgcagcgtgcgttataggtggtacaagtcttatgggtggtacaggtagtattggtggggcgatgataggagcacttgttatggccagtttagataatggcctgagcatgatgaataccccgaccttctggcagtttatagttaaaggtttgattcttgtgctggcggtatggatcgatatcgcaactaaaacaagggctcaaaattga

SEQ ID NO: 125315 - protein, 397 aa, Moorella thermoacetica ATCC 39073
MFNLIKTISPAETVQSKPKANGYLSRIDIRAYTMILALLGIWAIFTYTTQGAFLTSRNLSNLFRQMSITSILAIGMVFVIVAGHIDLSVGSLMGLTGGVAAILQVWYGWQTIPAIFISFLIGLLAGLWQGWWVAYKKVPAFIVTLGGMMVFRGILIGISHGETVSPLMDSFKQIGQSYVPESTGFLLAFLGIIYVIYVTVKQRYTRIKYGFTVPSLALEIMRTIFYAFLIGLFVYLMNDYQGIPVPVLIVVAMAFIFTGLATKTRFGRYVYAIGGNSEAARLSGINIRYNILAVFVISGLMAALSGILLTARLNGASVAAGQNAELDAIAACVIGGTSLMGGTGSIGGAMIGALVMASLDNGLSMMNTPTFWQFIVKGLILVLAVWIDIATKTRAQN

SEQ ID NO: 125316 - DNA, 1200 bp, Burkholderia thailandensis E264
  CDS (1)..(1200): transl_table=11
atgaataccgaactgtcttccgccccggcgcgtgcgcgcgcagcccgcggccgccgcgctcgcggcctgccgtcgcgccggctgttcgcgcgctacaaggtcctcgcgctgctgctcgcggtcgcggcgatctgggcgttcttctcggtgctgaccgacggcgcgttcgtcacgccgcgcaacgtgtcgaacctgctgcggcaaatgtcgatcaccggcatgctcgcgtgcgggatggtgttcgtgatcatcgcgggcgagatcgatctgtcggtcggctcgctgctcgggctgctcggcggcgtcgcggcgatcctcgacgcgaaccgccgctggccggtcgccgcgacggtgccggcggtgctcgcgctcggcgtggcgatcgggctcttcaacggctggtggtcgacctaccggcgcgtgccgtcgttcatcgtcggcctcggcgggatgctcgcgttccgcgggatactgctcggcgtgacgggcggctcgacgatcgcgccggtatcggacggcttcgtgttcatcgggcagggctatctgccgcgcgcggccggcgacgcgctcgcgctcgcgctgttcgcgttcgtcgtgctgctcgtcgtgcggcagcgcggcaaccggcggcgctaccggctcgcggtcgcgccgccgtggcaggacgtcgcgaaaatcgccggcgcgggcgcggtactgttcgcgttcgtcgcgacgctcgaccgctacggcggcattccggtgcccgtgctgctgctgctcgcgctgctcggcgcgttttcatgggtcgcgacgcagaccgtgttcggccggcgcatctatgcggtcggctcgaacctcgaggcgacgcgcctctcgggcatcgacacggaccgcgtgaagctcgcgatcttcgcgctgatggggctgatgtgcgcgttcgcgggcctcgtcaacaccgcgcggcttgccgccggctcgccgtcggcgggcgcgatgggcgagctcgacgcgatcgccgcgtgcttcatcggcggcacgtcgatgcgcggcgggtccggcaccgtttatggcgcgctgatcggagcgctcgtgatggcgagcctcgacaacggcatgtcgatgctggacgtcgacgcgtactggcagatgatcgtcaagggcggggtgctggtgctcgcggtgtggatcgacgtggcgtcgcggtcgaaccggcggtga

SEQ ID NO: 125317 - protein, 399 aa, Burkholderia thailandensis E264
MNTELSSAPARARAARGRRARGLPSRRLFARYKVLALLLAVAAIWAFFSVLTDGAFVTPRNVSNLLRQMSITGMLACGMVFVIIAGEIDLSVGSLLGLLGGVAAILDANRRWPVAATVPAVLALGVAIGLFNGWWSTYRRVPSFIVGLGGMLAFRGILLGVTGGSTIAPVSDGFVFIGQGYLPRAAGDALALALFAFVVLLVVRQRGNRRRYRLAVAPPWQDVAKIAGAGAVLFAFVATLDRYGGIPVPVLLLLALLGAFSWVATQTVFGRRIYAVGSNLEATRLSGIDTDRVKLAIFALMGLMCAFAGLVNTARLAAGSPSAGAMGELDAIAACFIGGTSMRGGSGTVYGALIGALVMASLDNGMSMLDVDAYWQMIVKGGVLVLAVWIDVASRSNRR

SEQ ID NO: 125318 - DNA, 1200 bp, Burkholderia xenovorans LB400
  CDS (1)..(1200): transl_table=11
atgacgcccgacgttacttcccaacgcgccgatgaagccctgccgcgaggcgcattcggcggtccgcagcgccttcagcaactgtttgcgcgctacaagattctcgcgctgctgatcgccgtggccgcgatctggattttcttttcggtgctgacgcacggcgctttcgttacgccgcgcaatctgtcgaacctgctgcggcagatgtcgattaccggcatgctcgcgtgcggcatggtgttcgtgatcattgccggcgagatcgatctgtcggtcgggtcgctactcggtttgctcggcggcgtggcggcgatactcgacgtcaaccggcactggccgctcgccgtcacgttacccgtggtgatgttgctcggcgtgctgatcggcatgttcaacggatggtggtcgacttaccggcgcgtgccgtcgttcattgtcgggctcggcggcatgctggcgtatcgcggcattctgctcggcgtgacaggcggctcgacgattgcgccggtgtcggacggcttcgtgttcgtcgggcaaggatatctgccgaggctcgcgggcgatacgcttgccgtggtgctgtttgtgctgctggcatttctgacgatacggcagcggcgaaaccgcgagcgttatcagttgcgtgtggtgccggtttggcaggacgtcgtgaaagtggtgggcgcgggcgtgattctcgccggctttgtcgctacgctcgaccgttacggcggtattccggtgccggtcctgttgctgctcgcgctgctgggtatctttacgtggatcgccacgcagacggtgttcgggcggcgcatctatgcggttggttcgaacctcgaagcgacgcgactctcgggcgtcaacaccaaccgcgtgaaactggcgattttcgcgctgatggggctgatgtgcgcgttcggcggcatcgtcaatacggcgcggcttgctgccgggtcgccttcggccggatcgatgggcgagctcgatgctattgcggcttgctttatcggtgggacgtcgatgcgcggtggttccggcacggtctacggtgcgttgatcggcgcactggtcatggcgagcctcgataacggcatgtcgatgctcgatgtcgatgcttactggcagatgatcgtgaagggcagcattctcgtgctggccgtgtggatcgatgtggtgtcggggtcgaaccggcggtga

SEQ ID NO: 125319 - protein, 399 aa, Burkholderia xenovorans LB400
MTPDVTSQRADEALPRGAFGGPQRLQQLFARYKILALLIAVAAIWIFFSVLTHGAFVTPRNLSNLLRQMSITGMLACGMVFVIIAGEIDLSVGSLLGLLGGVAAILDVNRHWPLAVTLPVVMLLGVLIGMFNGWWSTYRRVPSFIVGLGGMLAYRGILLGVTGGSTIAPVSDGFVFVGQGYLPRLAGDTLAVVLFVLLAFLTIRQRRNRERYQLRVVPVWQDVVKVVGAGVILAGFVATLDRYGGIPVPVLLLLALLGIFTWIATQTVFGRRIYAVGSNLEATRLSGVNTNRVKLAIFALMGLMCAFGGIVNTARLAAGSPSAGSMGELDAIAACFIGGTSMRGGSGTVYGALIGALVMASLDNGMSMLDVDAYWQMIVKGSILVLAVWIDVVSGSNRR

SEQ ID NO: 125320 - DNA, 1203 bp, Acidobacteria bacterium Ellin345
  CDS (1)..(1203): transl_table=11
atgagcggcaacaatcgtgcagtagccacgagtgtgcaaattgttgaggctggaaggacgagcaatcttccgccgcaagtgaagttcggtgcaaccgcgcgagcttacacgatggcggctgcgctggtggcgatttggatcgtgttcgaatacaccactcacggcgtattcctgaatgcgcgcaacttttcaaacctcacgcgacagatggctgtcaccggtgtgctctctgtgggcatgctgatggtgatcgtgattggcgaaatcgatttgtccgttggatcgctagttggtctaacagggatggctgcagcgctcgtccaggcaaacaacgcctggggtgtgaccgcgaccttgaccatcgctcttgtctttggcctgatcattggctgcgcacagggaatcctcacttcgtacgctcgcgttccgtccttcatcgtgactctcggaggactgcttgcttggcgcggcgtaacaaaagcgatcagtgcgggccagacgattccaatccaactgtacaatttcaactcaatcggccaatcctatctggacaaaccgatcggctgggcgttcgctgctctggcggtggtagcgattatcgtcacgcagcttcgctggcagtcctcgcgcaagcgccttggactatcaactctttcgagtacgcagcttgcacttcgcatcggtattccctcggttttgtccgtggccctggttgctatgctcaacgcgtatgaaggaatccctgtacccgtcctattgttcctgattgtcgcccttgctggcgcctttgttatgtcaaacacaacctggggacgttacatgtacgccgtcggcgggaaccgtgaagctgcgcgcctctccggcatcaacactcgcgcgctgaccattgcgacattcggcgtactgggattgctcgctgggttggcaggcgtaatctataccgcgcgcgtcggaagcgcatcgcctgacgctggacttctgcttgaactggatgccattgcggcgtgcgttatcggcggggccagcttgatgggcgggcgcggtaccatagcgggcgcatgcatgggcgcgctgttcatggcgagcctggacaatgggatgtcgctgaaaaacgttcccgattttacgcaagatatcgtgaagggcaccattctcgttgccgctgttgcgctcgacatgctcagccgcaagcgcaacggatag

SEQ ID NO: 125321 - protein, 400 aa, Acidobacteria bacterium Ellin345
MSGNNRAVATSVQIVEAGRTSNLPPQVKFGATARAYTMAAALVAIWIVFEYTTHGVFLNARNFSNLTRQMAVTGVLSVGMLMVIVIGEIDLSVGSLVGLTGMAAALVQANNAWGVTATLTIALVFGLIIGCAQGILTSYARVPSFIVTLGGLLAWRGVTKAISAGQTIPIQLYNFNSIGQSYLDKPIGWAFAALAVVAIIVTQLRWQSSRKRLGLSTLSSTQLALRIGIPSVLSVALVAMLNAYEGIPVPVLLFLIVALAGAFVMSNTTWGRYMYAVGGNREAARLSGINTRALTIATFGVLGLLAGLAGVIYTARVGSASPDAGLLLELDAIAACVIGGASLMGGRGTIAGACMGALFMASLDNGMSLKNVPDFTQDIVKGTILVAAVALDMLSRKRNG

SEQ ID NO: 125322 - DNA, 1074 bp, Haemophilus somnus 129PT; identical to SEQ ID NO: 100048
  CDS (1)..(1074): transl_table=11

SEQ ID NO: 125323 - protein, 357 aa, Haemophilus somnus 129PT; identical to SEQ ID NO: 100049

SEQ ID NO: 125324 - DNA, 1260 bp, Mycobacterium smegmatis str. MC2 155
  CDS (1)..(1260): transl_table=11
gtgacctccacggtgaatccgcagtcggcgcaggcggactcggctccctcgccggcgaactcgcctgccacaccacccacacctcccggcctgcggacgcggttgtccgcctacctgatgtcacatgtccggcagtccggcatggtggtggcgctcgtcgcgatcgtgctgctgttccaggtctggaccagcggcatcctgctcaagccgctcaacgtcaccaacatcatccagcagaacggctacatcctggtgctcgccatcgggatggtcatcgtgatcatcaacggccacatcgatctgtcggtcggatcggtcgcggggttcatcggcgcgatgtcggcggtcctcatggtccgcaacgacatgccgtggccggtcgcggtggtggtgtgcgtgctcgcgggcgcggtgatcggtgcctggcaggggttctggatcgcgttcgtcgggataccgtcgttcatcgtcaccctcggcggcatgctcgtgttccgtggcgccacccagtacctcctggaggggcagtccattgccccgatgccccggggtctggagcaggtcagcagcgggttcctgccggaatgggggaccaacgcgctctaccactggcccacggtcattctcggtgcggtcatcatggtggccgcggtggtggtgcagttccgcaggcgccgctcacagatccgctacgggcaggacgtctccggcgtgccggtgttcatcgccaagtgcgcggcgatcgtcgtcgcactcggcgcggtgaccctgctgctcgcgagctaccgtggcgttccgatcgtcgggatcatcctggtggtgctgacgctggtgtacgcgtttatgatgcgcaacaccgtgttcggcaggcaggtctacgccgtcggtggaaatccggctgccgcagcgctttccggtgtccgcaaccggtgggtcacgctggcggtgttcgtcaacatgggcatgctggccgccatcgcgggtctgctgttcgcggcgcgcctgaactccgcgacaccgcaggccggcatcaacttcgaactcgaggcgatcgccgcggcgttcatcggcggcgcgtcgtccagcggcggtgtcggcaccgtgttcggcgcgatcgtgggcggtctggtgctgggcgtgctcaacaacggtatgtcgatcctcggcatcggcagcgacatccagcaggtgatcaagggactcgtcctgctggccgcggtcgggttcgatgtctacaacaagcgaaaaggcggacgctag

SEQ ID NO: 125325 - protein, 419 aa, Mycobacterium smegmatis str. MC2 155
MTSTVNPQSAQADSAPSPANSPATPPTPPGLRTRLSAYLMSHVRQSGMVVALVAIVLLFQVWTSGILLKPLNVTNIIQQNGYILVLAIGMVIVIINGHIDLSVGSVAGFIGAMSAVLMVRNDMPWPVAVVVCVLAGAVIGAWQGFWIAFVGIPSFIVTLGGMLVFRGATQYLLEGQSIAPMPRGLEQVSSGFLPEWGTNALYHWPTVILGAVIMVAAVVVQFRRRRSQIRYGQDVSGVPVFIAKCAAIVVALGAVTLLLASYRGVPIVGIILVVLTLVYAFMMRNTVFGRQVYAVGGNPAAAALSGVRNRWVTLAVFVNMGMLAAIAGLLFAARLNSATPQAGINFELEAIAAAFIGGASSSGGVGTVFGAIVGGLVLGVLNNGMSILGIGSDIQQVIKGLVLLAAVGFDVYNKRKGGR

SEQ ID NO: 125326 - DNA, 1128 bp, Haemophilus influenzae R2866
  CDS (1)..(1128): transl_table=11
atgtttaagttaaaatccgtaaatttacaagtttacattatgttaatagctattgccgtcattatagcattctttagtgttgctactgatggtgcttatttaagtgcaagaaatatttctaacttgttacgccaaacttcaattactggcattcttgcaattggaatggtttttgtcattatttctgctgaaattgacttatctgttggttcacttatgggcctactgggcggatttgcagctattgccgatgtttggtggggcttcccattacctgtaactattattgcaacaattgctcttggtttaatttttggtatttggaatggttggtgggtggcttatcgcaaagtgccatcctttattgttacacttgcaggttatctcgcattccgtggaattttgattggtttgactaatggcacaactgtatctcctattagtggatctatgacagttattggacaaggttatttatcagatattgcaggatttatcttaggtggtattgcagttattggatttgttctttggggaaattatcaacgtagaagtcgccagcagcttcagctggaagtgtctgcattatcaaaagattttacgaaatatgctttgtttgcagtaattgtattaggagcaatttatttacttaatgattatcgtggcattccatttcctgttttagtactagcagttcttgcaatcttagggttattcctctctcgtaaaacttcattcggccgccacgtttatgcgattggtggcaatattgatgcggcaaaattatctggtatcaatgtagagaaaacaaaactgattatctttgcaatgaatggtgtgttagttgcaatagcagggttgattttaagtgctcgtttaggtgcaggctcaccatcggcagggcaaaatgcagaactagatgcgattgcagcttgtgtcattggaggggcaagcttagcgggtggtgtaggaagtgtgtttggggttgttattggtgcacttatcatcgcatcgcttgataatggtatgagtatgcttgatgtgccaactttttggcaatatattgtcaaaggtgccattttgttacttgctgtatggatagatactagtaataagaaaaagatgtaa

SEQ ID NO: 125327 - protein, 375 aa, Haemophilus influenzae R2866
MFKLKSVNLQVYIMLIAIAVIIAFFSVATDGAYLSARNISNLLRQTSITGILAIGMVFVIISAEIDLSVGSLMGLLGGFAAIADVWWGFPLPVTIIATIALGLIFGIWNGWWVAYRKVPSFIVTLAGYLAFRGILIGLTNGTTVSPISGSMTVIGQGYLSDIAGFILGGIAVIGFVLWGNYQRRSRQQLQLEVSALSKDFTKYALFAVIVLGAIYLLNDYRGIPFPVLVLAVLAILGLFLSRKTSFGRHVYAIGGNIDAAKLSGINVEKTKLIIFAMNGVLVAIAGLILSARLGAGSPSAGQNAELDAIAACVIGGASLAGGVGSVFGVVIGALIIASLDNGMSMLDVPTFWQYIVKGAILLLAVWIDTSNKKKM

SEQ ID NO: 125328 - DNA, 996 bp, Pseudomonas putida GB-1
  CDS (1)..(996): transl_table=11
atgaaaaccaccccgctagacagccaaggcgccgctcccgtgcgccgcagtggcacgtactttggcttggccacttacttgggcttggctggcgctttgctggcgatgatcgtgttgttctcattcctcagcagccacttttggtcttacagcaccttcagcaccttggccaaccagatcccggacctgatggtactggcggtgggcatgaccttcgtgctgattatcggcggtatcgacctgtcggtgggctcggtgctggcgctggctgcctccgcggtgagcgtggcgattctcggctggggctggggcgtgctgccctcggcgatgctgggcatggccgtggccgcgctggccggcagcattaccgggtgcgtaaccgtggcctggcgcatcccgtcattcattgtttcgctcggcgtgctggaaatggcccgtggtctggcctaccagttcaccgactcgcgcaccgcctatattggcgatgcctatgcctggttctccaacccggtcgcctttggtatttcgccagccttcatcattgccttgctggtaatcgtgttggcccagctggtgctgacccgtacggtattcggccgctacctgattggcattggcaccaacgaagaagccgtacgcctcgccggtatcgacccgcgcccctacaaagtgttggtgttcgccttgatgggcctgctcgccggcctggccgcgctgttccagatctcgcggctggaagccgccgaccccaatgctggctccggcctggaactgcaggtgattgccgctgtagtgatcggcggcaccagcctgatgggcgggcgtggctcggttatcagcaccttctttggcgtactgatcatttccgtactggccgccgggctggcgcagatcggcgccagcgaaccaaccaaacgcatcatcaccggggcggtgatcgtcatcgccgtggtgctcgacacttaccgtagccggcgtgcagcccggcggaactga

SEQ ID NO: 125329 - protein, 331 aa, Pseudomonas putida GB-1
MKTTPLDSQGAAPVRRSGTYFGLATYLGLAGALLAMIVLFSFLSSHFWSYSTFSTLANQIPDLMVLAVGMTFVLIIGGIDLSVGSVLALAASAVSVAILGWGWGVLPSAMLGMAVAALAGSITGCVTVAWRIPSFIVSLGVLEMARGLAYQFTDSRTAYIGDAYAWFSNPVAFGISPAFIIALLVIVLAQLVLTRTVFGRYLIGIGTNEEAVRLAGIDPRPYKVLVFALMGLLAGLAALFQISRLEAADPNAGSGLELQVIAAVVIGGTSLMGGRGSVISTFFGVLIISVLAAGLAQIGASEPTKRIITGAVIVIAVVLDTYRSRRAARRN

SEQ ID NO: 125330 - DNA, 1179 bp, Bacillus sp
  CDS (1)..(1179): transl_table=11
atgaaaagtttggtttcttttcgagcctccatggattcagaaaaacggagaaggctgcttccaaaattggatttccgctcatatacgcttgtcattgcccttgtgcttatagcgcttatttttggagtgttaacagacggggagttcctatcgtcacgcaatttgtccaacttatttatgcaaatgtctgtaatctcgattttagcaatcgggatgacactagttattatagcaggtcatattgatttatctgtaggctcggtcgttggattaacaggaggaattgcagccattttacaagtttggtatggttggggaactgtttctgttattgttgtggcaattattgtcggtgcattgataggactttggcaaggctggtgggtttcttatcgcaatgtgcctgcgtttattgttacactaggcggcatgctgatttttaggggaattttaatcgggatcagtaatggagagacgattgccccgttgaataaaagttttgaagcaattgggaatagttatctgccatatgcagttggatatgtactagcaatcatcggtattatcatgctatttgtttttgtgaatagaaaccgcaaaaagaggaagctattagggttaactgtccataccaaagccaatgattatggaaaagcggcgatttactcactgtgcattttggtattagtttacatgttaaaccgctactacggtattccgatcccaatgcttattgtcgttctacttgctatccttttcgtttttatcgctgtcaaaactccatttggaagatacatttacgccattggcgggaatattgaagcagcagctctctcagggataaatatcaaacgtgttgtacttactatatttgttttaatgggagcgctttctggagtagcaggcattattttaacgagtagattgaatgcggcaacagtaagtagcggggaaatgtatgagttagatgcaattgctgcctgcgtcattggaggcacaagcctaatgggcggaagaggaaatataatcggagctatgatcggcgcccttattatggctagcatcgataatgggatgagcatgatgaacatcgaaaccttttggcaatttattgtaaaaggattgattcttattatcgctgtctggattgatatatcgagtaaaagccgaactaactaa

SEQ ID NO: 125331 - protein, 392 aa, Bacillus sp
MKSLVSFRASMDSEKRRRLLPKLDFRSYTLVIALVLIALIFGVLTDGEFLSSRNLSNLFMQMSVISILAIGMTLVIIAGHIDLSVGSVVGLTGGIAAILQVWYGWGTVSVIVVAIIVGALIGLWQGWWVSYRNVPAFIVTLGGMLIFRGILIGISNGETIAPLNKSFEAIGNSYLPYAVGYVLAIIGIIMLFVFVNRNRKKRKLLGLTVHTKANDYGKAAIYSLCILVLVYMLNRYYGIPIPMLIVVLLAILFVFIAVKTPFGRYIYAIGGNIEAAALSGINIKRVVLTIFVLMGALSGVAGIILTSRLNAATVSSGEMYELDAIAACVIGGTSLMGGRGNIIGAMIGALIMASIDNGMSMMNIETFWQFIVKGLILIIAVWIDISSKSRTN

SEQ ID NO: 125332 - DNA, 1242 bp, Streptomyces kanamyceticus; identical to SEQ ID NO: 38887
  CDS (1)..(1242): transl_table=11

SEQ ID NO: 125333 - protein, 413 aa, Streptomyces kanamyceticus; identical to SEQ ID NO: 38888

SEQ ID NO: 125334 - DNA, 1167 bp, Thermoanaerobacter ethanolicus
  CDS (1)..(1167): transl_table=11
atgatggaaagcaaagtgagcaaaacaactgaaaagcgcattttaaatcatttcaagatagatataaggtcatatactatgatattagctttattggggatatggattattttttcaatattgacccatggcgattttctatctccgagaaacttgtccatgcttgccaggcaaatgtctataacagcaattttagcttcaggtatggttttagttatagttgctgggcatatagacttatctgttggttctgtggcagggtttacaggagctatagctgcaattcttcaggtgatatatcattgggatacagtgccgacaataatagtgactcttatggctgggcttgctattggagtttggcaaggattttggatagcctatagaaaagtgcctgcttttatagtgaccttaagctcaatgcttgtttttagaggtggaattttattaattacaaaaggtgttactatatctcctttaaaacaggacttcacagtcgtaggacagggatatattcctccattgtttagcgttattcttgctgtggtggcaggtgttttgtatgtaatcatggaccttaagaatagaaattctcgaattaaatacggcttaagtgtgtccagctggggaatagaactggcaaaaattgcaggagtattgattttcatcgctttgtttacaagtgttatgatatcttatgaaggaattcctgtgccagtattacttgttttggtaattgtgattttgcttacttttgtggctcaaaatacgacttttggacgttatgtttatgcgataggcggaaataaagaagcagcagcttactcaggaataaacatagctaagacgaacatgacgattttcttgattatgggggttttatcggcaattgcaggtatagttttgacttcaaggttaaatgctgctacaactagtgcaggaaatttgtttgagctggatgctatagcttcggcaattatcggtggaacaagcacgttaggaggagaaggaacagtaccaggagcgattttaggtgctcttattatggctagcatagataatggcatgagtcttatgaatatagattattctatattgacaattgtaaagggccttgtattagtacttgcagtgtgggtggatatttcaacaaagaagaggggataa

SEQ ID NO: 125335 - protein, 388 aa, Thermoanaerobacter ethanolicus
MMESKVSKTTEKRILNHFKIDIRSYTMILALLGIWIIFSILTHGDFLSPRNLSMLARQMSITAILASGMVLVIVAGHIDLSVGSVAGFTGAIAAILQVIYHWDTVPTIIVTLMAGLAIGVWQGFWIAYRKVPAFIVTLSSMLVFRGGILLITKGVTISPLKQDFTVVGQGYIPPLFSVILAVVAGVLYVIMDLKNRNSRIKYGLSVSSWGIELAKIAGVLIFIALFTSVMISYEGIPVPVLLVLVIVILLTFVAQNTTFGRYVYAIGGNKEAAAYSGINIAKTNMTIFLIMGVLSAIAGIVLTSRLNAATTSAGNLFELDAIASAIIGGTSTLGGEGTVPGAILGALIMASIDNGMSLMNIDYSILTIVKGLVLVLAVWVDISTKKRG

SEQ ID NO: 125336 - DNA, 1146 bp, Streptomyces olivaceoviridis; identical to SEQ ID NO: 100086
  CDS (1)..(1146): transl_table=11

SEQ ID NO: 125337 - protein, 381 aa, Streptomyces olivaceoviridis; identical to SEQ ID NO: 100087

SEQ ID NO: 125338 - DNA, 1011 bp, Salmonella typhimurium; identical to SEQ ID NO: 100090
  CDS (1)..(1011): transl_table=11

SEQ ID NO: 125339 - protein, 336 aa, Salmonella typhimurium; identical to SEQ ID NO: 100091

SEQ ID NO: 125340 - DNA, 969 bp, Bacillus subtilis; identical to SEQ ID NO: 38893
  CDS (1)..(969): transl_table=11

SEQ ID NO: 125341 - protein, 322 aa, Bacillus subtilis; identical to SEQ ID NO: 38894

SEQ ID NO: 125342 - DNA, 22 bp, Artificial sequence
  primer
atgtcgaaaagcaatccgtctg

SEQ ID NO: 125343 - DNA, 24 bp, Artificial sequence
  primer
ttaagaacggcgtttggttgcgga

SEQ ID NO: 125344 - protein, 376 aa, Artificial sequence
  consensus sequence
  Variant (2)..(7): Xaa in position 2 to 7 is any amino acid
  Variant (9)..(15): Xaa in position 9 to 15 is any amino acid
  Variant (17)..(17): Xaa in position 17 is any amino acid
  Variant (20)..(21): Xaa in position 20 to 21 is any amino acid
  Variant (24)..(27): Xaa in position 24 to 27 is any amino acid
  Variant (35)..(63): Xaa in position 35 to 63 is any amino acid
  Variant (64)..(75): Xaa in position 64 to 75 is any or no amino acid
  Variant (77)..(79): Xaa in position 77 to 79 is any amino acid
  Variant (81)..(83): Xaa in position 81 to 83 is any amino acid
  Variant (84)..(87): Xaa in position 84 to 87 is any or no amino acid
  Variant (89)..(96): Xaa in position 89 to 96 is any amino acid
  Variant (98)..(98): Xaa in position 98 is any amino acid
  Variant (101)..(101): Xaa in position 101 is any amino acid
  Variant (104)..(109): Xaa in position 104 to 109 is any amino acid
  Variant (112)..(135): Xaa in position 112 to 135 is any amino acid
  Variant (136)..(228): Xaa in position 136 to 228 is any or no amino acid
  Variant (230)..(230): Xaa in position 230 is any amino acid
  Variant (232)..(250): Xaa in position 232 to 250 is any amino acid
  Variant (252)..(253): Xaa in position 252 to 253 is any amino acid
  Variant (256)..(258): Xaa in position 256 to 258 is any amino acid
  Variant (260)..(260): Xaa in position 260 is any amino acid
  Variant (262)..(262): Xaa in position 262 is any amino acid
  Variant (264)..(265): Xaa in position 264 to 265 is any amino acid
  Variant (267)..(270): Xaa in position 267 to 270 is any amino acid
  Variant (272)..(285): Xaa in position 272 to 285 is any amino acid
  Variant (287)..(292): Xaa in position 287 to 292 is any amino acid
  Variant (294)..(298): Xaa in position 294 to 298 is any amino acid
  Variant (300)..(306): Xaa in position 300 to 306 is any amino acid
  Variant (309)..(311): Xaa in position 309 to 311 is any amino acid
  Variant (312)..(312): Xaa in position 312 is any or no amino acid
  Variant (315)..(316): Xaa in position 315 to 316 is any amino acid
  Variant (320)..(321): Xaa in position 320 to 321 is any amino acid
  Variant (325)..(325): Xaa in position 325 is any amino acid
  Variant (327)..(328): Xaa in position 327 to 328 is any amino acid
  Variant (331)..(331): Xaa in position 331 is any amino acid
  Variant (333)..(335): Xaa in position 333 to 335 is any amino acid
  Variant (337)..(339): Xaa in position 337 to 339 is any amino acid
  Variant (341)..(349): Xaa in position 341 to 349 is any amino acid
  Variant (351)..(360): Xaa in position 351 to 360 is any amino acid
  Variant (362)..(365): Xaa in position 362 to 365 is any amino acid
  Variant (367)..(371): Xaa in position 367 to 371 is any amino acid
  Variant (374)..(375): Xaa in position 374 to 375 is any amino acid
NXXXXXXQXXXXXXXAXGMXXVIXXXXIDLSVGSXXXXXXXXXXXXXXXXXXXXXXXXXXXXXXXXXXXXXXXXXGXXXGXXXXXXXGXXXXXXXXPXFIXTLXXXXXXRGXXXXXXXXXXXXXXXXXXXXXXXXXXXXXXXXXXXXXXXXXXXXXXXXXXXXXXXXXXXXXXXXXXXXXXXXXXXXXXXXXXXXXXXXXXXXXXXXXXXXXXXXXXXXXXXXXXXXXGXPXXXXXXXXXXXXXXXXXXXTXXGRXXXAXGXNXXAXXXXGXXXXXXXXXXXXXXGXXXXXXGXXXXXRXXXXXXXAGXXXXELXXIAAXXIGGXSXXGGXGXXXGXXXGXXXXXXXXXGXXXXXXXXXXQXXXXGXXXXXAVXXD

SEQ ID NO: 125345 - protein, 59 aa, Artificial sequence
  protein pattern
  Variant (2)..(2): Xaa in position 2 is any amino acid
  Variant (3)..(3): Xaa in position 3 is any or no amino acid
  Variant (6)..(6): Xaa in position 6 is Ala or Ser
  Variant (7)..(7): Xaa in position 7 is Ala, Cys, Ser or Val
  Variant (8)..(8): Xaa in position 8 is Phe, Ile or Val
  Variant (9)..(9): Xaa in position 9 is Ile, Leu or Val
  Variant (11)..(11): Xaa in position 11 is any amino acid
  Variant (12)..(12): Xaa in position 12 is any or no amino acid
  Variant (14)..(15): Xaa in position 14 to 15 is any amino acid
  Variant (18)..(18): Xaa in position 18 is any amino acid
  Variant (20)..(20): Xaa in position 20 is any amino acid
  Variant (21)..(21): Xaa in position 21 is Ala, Ile or Val
  Variant (22)..(22): Xaa in position 22 is any amino acid
  Variant (23)..(23): Xaa in position 23 is Gly or Ser
  Variant (24)..(24): Xaa in position 24 is Ala, Thr or Val
  Variant (25)..(26): Xaa in position 25 to 26 is any amino acid
  Variant (28)..(28): Xaa in position 28 is Ala, Gly, Thr or Val
  Variant (29)..(29): Xaa in position 29 is Phe, Ile or Leu
  Variant (30)..(30): Xaa in position 30 is Phe, Ile, Leu or Val
  Variant (31)..(31): Xaa in position 31 is Phe, Ile, Leu or Met
  Variant (32)..(32): Xaa in position 32 is Ala, Gly, Gln, Ser or Thr
  Variant (33)..(33): Xaa in position 33 is any amino acid
  Variant (34)..(34): Xaa in position 34 is Ile, Leu or Met
  Variant (35)..(36): Xaa in position 35 to 36 is any amino acid
  Variant (38)..(38): Xaa in position 38 is Phe, Leu or Met
  Variant (39)..(39): Xaa in position 39 is Ala, Asn, Ser, Thr or Val
  Variant (40)..(49): Xaa in position 40 to 49 is any amino acid
  Variant (50)..(50): Xaa in position 50 is Ile, Met or Val
  Variant (51)..(51): Xaa in position 51 is Ile or Val
  Variant (52)..(52): Xaa in position 52 is any amino acid
  Variant (53)..(53): Xaa in position 53 is Ala or Gly
  Variant (54)..(54): Xaa in position 54 is any amino acid
  Variant (55)..(55): Xaa in position 55 is Ile, Met or Val
  Variant (56)..(56): Xaa in position 56 is Ile or Leu
  Variant (57)..(57): Xaa in position 57 is Ala, Ile, Leu or Val
  Variant (58)..(58): Xaa in position 58 is any amino acid
  Variant (59)..(59): Xaa in position 59 is Ala or Thr
LXXIAXXXXGXXSXXGGXGXXXXXXXGXXXXXXXXXGXXXXXXXXXXXXXXXXXXXXXX

SEQ ID NO: 125346 - protein, 19 aa, Artificial sequence
  protein pattern
  Variant (3)..(3): Xaa in position 3 is any amino acid
  Variant (4)..(4): Xaa in position 4 is Ile, Leu, Met or Val
  Variant (5)..(5): Xaa in position 5 is any amino acid
  Variant (7)..(7): Xaa in position 7 is Ile, Leu, Met or Val
  Variant (9)..(9): Xaa in position 9 is Asp, Gly or Ser
  Variant (10)..(10): Xaa in position 10 is Asp, Asn or Ser
  Variant (11)..(12): Xaa in position 11 to 12 is any amino acid
  Variant (14)..(14): Xaa in position 14 is Ala, Ser or Thr
  Variant (15)..(16): Xaa in position 15 to 16 is any amino acid
  Variant (17)..(17): Xaa in position 17 is Ala, Cys, Ser or Val
  Variant (19)..(19): Xaa in position 19 is Ile, Leu, Met or Val
GRXXXAXGXXXXAXXXXGX

SEQ ID NO: 125347 - protein, 42 aa, Artificial sequence
  protein pattern
  Variant (2)..(8): Xaa in position 2 to 8 is any amino acid
  Variant (10)..(12): Xaa in position 10 to 12 is any amino acid
  Variant (13)..(13): Xaa in position 13 is Ala, Gly, Ser or Thr
  Variant (14)..(17): Xaa in position 14 to 17 is any amino acid
  Variant (19)..(19): Xaa in position 19 is Ala, Pro or Ser
  Variant (21)..(21): Xaa in position 21 is Ala, Ile or Val
  Variant (22)..(22): Xaa in position 22 is Ala or Val
  Variant (23)..(23): Xaa in position 23 is Gly or Thr
  Variant (25)..(25): Xaa in position 25 is Ala, Gly or Ser
  Variant (26)..(31): Xaa in position 26 to 31 is any amino acid
  Variant (33)..(39): Xaa in position 33 to 39 is any amino acid
  Variant (40)..(40): Xaa in position 40 is Ala, Glu, Gly or Ser
  Variant (41)..(41): Xaa in position 41 is any amino acid
  Variant (42)..(42): Xaa in position 42 is Ala, Gly, Asn, Pro, Ser or Thr
GXXXXXXXGXXXXXXXXPXFXXXLXXXXXXXGXXXXXXXXXX

SEQ ID NO: 125348 - DNA, 864 bp, Escherichia coli
  CDS (1)..(864): transl_table=11
atgatccgcagtatgaccgcctacgcccggcgtgaaatcaagggtgaatgggggagcgcaacctgggaaatgcgctcggtaaaccagcgttatctggaaacttactttcgtctgccggagcagttccgtagccttgaacctgtcgttcgcgagcgtattcgttctcgcctgacgcgcggtaaagtggaatgtaccctgcgctatgagccagatgttagcgcgcaaggtgagctgatcctcaacgaaaaactggctaaacagctggtaactgccgcgaactgggtaaaaatgcagagtgacgaaggggaaatcaacccggttgatattctacgctggccgggcgtgatggcagcccaggagcaggatcttgacgccattgccgctgaaattctcgcggcgctggatggtacgctggacgactttattgtcgcgcgcgaaaccgaaggtcaggcactgaaagcattgatcgagcagcgtctggaaggcgtcaccgccgaagtggtcaaagtccgctcccatatgccggaaatcctgcaatggcagcgtgagcgtctggtcgcgaagctggaagatgctcaggtgcaactggaaaacaaccgtctggagcaggaactggttctgctggcacaacgaattgacgttgccgaagaactggatcgcctcgaagcgcatgtcaaagagacctacaacattctgaagaaaaaagaagcggttggtcgtcgtctggattttatgatgcaggagttcaaccgcgagtcgaacactcttgcgtcgaagtctatcaatgccgaagtgacaaactccgccatcgagctgaaagtgttgattgagcagatgcgcgagcagattcagaacatcgaataa

SEQ ID NO: 125349 - protein, 287 aa, Escherichia coli
MIRSMTAYARREIKGEWGSATWEMRSVNQRYLETYFRLPEQFRSLEPVVRERIRSRLTRGKVECTLRYEPDVSAQGELILNEKLAKQLVTAANWVKMQSDEGEINPVDILRWPGVMAAQEQDLDAIAAEILAALDGTLDDFIVARETEGQALKALIEQRLEGVTAEVVKVRSHMPEILQWQRERLVAKLEDAQVQLENNRLEQELVLLAQRIDVAEELDRLEAHVKETYNILKKKEAVGRRLDFMMQEFNRESNTLASKSINAEVTNSAIELKVLIEQMREQIQNIE

SEQ ID NO: 125350 - DNA, 864 bp, Salmonella typhimurium LT2
  CDS (1)..(864): transl_table=11
atgatccgcagtatgaccgcctacgcccggcgtgaaatcaagggtgaatggggtagcgcgacctgggaaatgcgctcggtaaaccagcgttatctggaaacttactttcgtctgccggaacagttccgtagtcttgaacccgtcgtgcgcgaacgcattcgtacacgcctgacgcgcggcaaagtcgaatgtatgctgcgttttgaacccgatgccagcgcgcaaggcgagcttattctgaatgaaaagctagcgaaacaattagttagcgccgcaaactgggtcaaaatgcagagcgacgaaggggaaatcaatccggttgatattttgcgctggccaggtgtcatggcggcgcaagagcaggatctggacgcgattgccgcagaaattttagccgcactggacggtacgctggatgactttatcgtcgcgcgcgaaacggaaggccaggcgctgaaagcgctgattgaacaacggctggaaggcgtcagcgccgaagtagcgaaagtccgcgcgcatatgccggaaatcctgcaatggcagcgtgagcgcctggtcgcgaagctggaagatgctcaggttcagttggaaaacaaccgtctggagcaagagctggtgatgatggcgcaacgcattgatgtggcggaagagctggatcgtctggaagcgcacgtcaaagagacttacaacattctgaagaaaaaagaggcggtaggtcgccgtctggacttcatgatgcaagaatttaaccgtgagtcgaacaccctggcctccaaatccatcaacgctgatgtaactaactccgctattgaattaaaagtgttgatcgagcaaatgcgcgagcaaatccagaatattgaataa

SEQ ID NO: 125351 - protein, 287 aa, Salmonella typhimurium LT2
MIRSMTAYARREIKGEWGSATWEMRSVNQRYLETYFRLPEQFRSLEPVVRERIRTRLTRGKVECMLRFEPDASAQGELILNEKLAKQLVSAANWVKMQSDEGEINPVDILRWPGVMAAQEQDLDAIAAEILAALDGTLDDFIVARETEGQALKALIEQRLEGVSAEVAKVRAHMPEILQWQRERLVAKLEDAQVQLENNRLEQELVMMAQRIDVAEELDRLEAHVKETYNILKKKEAVGRRLDFMMQEFNRESNTLASKSINADVTNSAIELKVLIEQMREQIQNIE

SEQ ID NO: 125352 - DNA, 864 bp, Shewanella oneidensis MR-1
  CDS (1)..(864): transl_table=11
atgatccaaagcatgacagcctacgctcgcattgagcacaaagcacaatggggcactgcctcttgggaaattcgctcagttaaccagcgttatctcgaaacttaccttcgcctacccgaacaatttcgcagttttgagccagtgctgcgcgatcgcctacgcaaccgcttaagccgcggtaaagttgaggtgaacttacgctacgagttagccgacaatagcaataacgaacttaaattaaatcaagggttagccaaacagctgctcgacgctgccagttggctcaaacaagaagccggacaaggcgaagtcaacctcaccgatattttgcgctggccaggtgtactctcgagtgctgagcaagatatggacgcaattggcgccgatttaatgaccgcatttgacttagctatcgaccaatttatcgaagcccgtggccgtgagggcgcagccatcaaagacatgctgctaagtcgtttagatggcgtcagcgagcaaatcgccatcgtgcgtgagcatatgcctaaagtcatggaatatcagcgtgataaactcaccaaccgcctcgctgaaattaagggtgagctcgatcctgctcgcatcgagcaagaaatgattcttttagcccaaaaacaagatgtcgccgaagaaatggacagactcgaagcccacgttaacgaagcccgtcgcatcctcaaaaaaggcggcagtgaaggtcgtcgtttagattttatgatgcaagaatttaaccgcgaatcgaacaccctagcctctaaatccatcagcaccgaaatcacagccgccgcggttgatcttaaagttcttatcgagcagatgagagagcagatccagaatgtggaataa

SEQ ID NO: 125353 - protein, 287 aa, Shewanella oneidensis MR-1
MIQSMTAYARIEHKAQWGTASWEIRSVNQRYLETYLRLPEQFRSFEPVLRDRLRNRLSRGKVEVNLRYELADNSNNELKLNQGLAKQLLDAASWLKQEAGQGEVNLTDILRWPGVLSSAEQDMDAIGADLMTAFDLAIDQFIEARGREGAAIKDMLLSRLDGVSEQIAIVREHMPKVMEYQRDKLTNRLAEIKGELDPARIEQEMILLAQKQDVAEEMDRLEAHVNEARRILKKGGSEGRRLDFMMQEFNRESNTLASKSISTEITAAAVDLKVLIEQMREQIQNVE

SEQ ID NO: 125354 - DNA, 864 bp, Photobacterium profundum SS9
  CDS (1)..(864): transl_table=11
atgattcatagcatgaccgcttatgctcgtcgcgaaattaaaggcgattggggcactgccgtttgggaaattcgttcagttaaccaacgttacctagaaacctaccttcgcatgccagagcaattccgtagtttagagcctgtactacgtgagcgttttcgtaagcgcctagcccgcggtaaagttgaatgtaacctgcgttttgaagcgaaccaagcagcaagcagcgaactcaccatcaatgaagaattagccaagcaagtcattaaagccgctaagtgggtaaaagacacggcgggtgaaggcaacattggtccttttcaggtattgaactggcctggtgtaatggaagcccctgagcaagatttggatgcgatcaataaagatttattggttggttttgatgaagcgattgctgactttattgccgcacgtgcaagcgaaggcgaaaacatgaaggaattgattgttcaacgccttgatgccattaccgctgaagcaaccaacgtacgcgcacaaatgcctgacattattaaatggcaacgtgaacgtctaaccagccgctttgaagatgcaaaagtggagctggatgctggtcgtattgagcaagagctgatcatgatggcacaaaaaagtgatgtcgctgaagagctagatcgcctagattcgcatgtgaaagaaacacaaaaaatcatgaagaaaggaggcgcatgtggccgtcgtcttgatttcatgatgcaagaattcaaccgcgaatcgaatacgctagcatcaaaatcaatcacgactgaaatcacagcatctgctgttgaattaaaagtattgattgagcaaatgcgcgagcagatccaaaacatcgaataa

SEQ ID NO: 125355 - protein, 287 aa, Photobacterium profundum SS9
MIHSMTAYARREIKGDWGTAVWEIRSVNQRYLETYLRMPEQFRSLEPVLRERFRKRLARGKVECNLRFEANQAASSELTINEELAKQVIKAAKWVKDTAGEGNIGPFQVLNWPGVMEAPEQDLDAINKDLLVGFDEAIADFIAARASEGENMKELIVQRLDAITAEATNVRAQMPDIIKWQRERLTSRFEDAKVELDAGRIEQELIMMAQKSDVAEELDRLDSHVKETQKIMKKGGACGRRLDFMMQEFNRESNTLASKSITTEITASAVELKVLIEQMREQIQNIE

SEQ ID NO: 125356 - DNA, 864 bp, Idiomarina loihiensis L2TR
  CDS (1)..(864): transl_table=11
atgattcaaagtatgaccggttatgctcgttacgagcaaaaagccgactggggcaccgcagtttgggaaattcgttccgttaaccaacggtatctggaaacctacttccgcctgccggaaacctttcgctctctggaaaattcactacgtgagcagtttcgtaaaaagctgcagcgcggcaaagtcgagtgcaagcttagcctgcaggtagacgaagcgcagcaaagcgctttgtcgattaacgaagacctggcaaaaagcgtgattgccagcgccaagtgggtgagtcagcattccgctgcagggcagttaaaccctattgatgttttaaagtggcctggcgttgttgctgctcaggaccaggacatggacgagctgcaaaaagacgttttggccgcactggaaaagaccactaacgactttatcgagaaccgcaaaagcgaaggcgcagccattgataaaatgctgcaggaacgcctcgacggtgtgaccacgcaggtggcttttgtgcgtgagcgcatgccggaagtgatggcctggcaacgtgagcgcttactaacccgttttgaagaagctaaagttgagttagagccgcagcgcgtagagcaggaaatggtgatgctggcgcagaaaaccgacgtagccgaagagctcgaccgcttagacgcccacgtggaagaagcccgcaaaatactgaaaaaaggcggcccttgcggacgacgcctggactttatgatgcaagagttcaaccgcgaagcaaatacactcgcctctaagtctatcaactctgacattaccgcggctgcggtggaattaaaggttttgattgagcagatgcgtgagcagatccagaacatcgaataa

SEQ ID NO: 125357 - protein, 287 aa, Idiomarina loihiensis L2TR
MIQSMTGYARYEQKADWGTAVWEIRSVNQRYLETYFRLPETFRSLENSLREQFRKKLQRGKVECKLSLQVDEAQQSALSINEDLAKSVIASAKWVSQHSAAGQLNPIDVLKWPGVVAAQDQDMDELQKDVLAALEKTTNDFIENRKSEGAAIDKMLQERLDGVTTQVAFVRERMPEVMAWQRERLLTRFEEAKVELEPQRVEQEMVMLAQKTDVAEELDRLDAHVEEARKILKKGGPCGRRLDFMMQEFNREANTLASKSINSDITAAAVELKVLIEQMREQIQNIE

SEQ ID NO: 125358 - DNA, 864 bp, Actinobacillus pleuropneumoniae serovar 1 str. 4074
  CDS (1)..(864): transl_table=11
atgatttacagtatgaccgctttcgcccatttagaaattaaaaaagagtggggtaatgccgtgtgggaaatccgctcggttaatcaacgttttttagagacctattttcgtttaccggagcaattccgtaatttagaaatgaccttacgcgagcgtttacgtgcatcacttacacgcggaaaagtagaatgtagtttacgtatcgaattaagcaataaccaaaatagtgaattggcattaaataaagcgtatgcggaaaaggtaatcagctcattacaaaccttgcgaggcattgctggtgagggtgagatcaacttagtggatattttacgttatccgggggtggttgatgctcaaacacaagatttggatcaaatcgggcaagacctgttagccggtttcgaacaaattttagcggactttattgcgatgcgtggtcgtgaaggtgccaatttacaagcattgatccaacagcgattagatacgattgccgagatcgcaaccaaagtacaagcgcaaatgccggaaattctgcaatggcagaaagataaattacaacaacgttttgatgagctgaatttgcaattagatccgcaacgtttagagcaagaaatggtgttaaccgcacagcgtgtggatgtggcggaagaattagaccgcttgcaattacacgtgaaagaaacgactaacgtcttgaaaaaaggcggagcggtaggtcgtaaattggactttatgatgcaagagctaaatcgtgaatccaatacgttggcatcaaaatctattaatgcggacgtaaccaattcagcggttgaattaaaagtattaatcgaacaaatgcgtgagcaaattcagaatttagagtag

SEQ ID NO: 125359 - protein, 287 aa, Actinobacillus pleuropneumoniae serovar 1 str. 4074
MIYSMTAFAHLEIKKEWGNAVWEIRSVNQRFLETYFRLPEQFRNLEMTLRERLRASLTRGKVECSLRIELSNNQNSELALNKAYAEKVISSLQTLRGIAGEGEINLVDILRYPGVVDAQTQDLDQIGQDLLAGFEQILADFIAMRGREGANLQALIQQRLDTIAEIATKVQAQMPEILQWQKDKLQQRFDELNLQLDPQRLEQEMVLTAQRVDVAEELDRLQLHVKETTNVLKKGGAVGRKLDFMMQELNRESNTLASKSINADVTNSAVELKVLIEQMREQIQNLE

SEQ ID NO: 125360 - DNA, 873 bp, Azotobacter vinelandii
  CDS (1)..(873): transl_table=11
atggacaccatggcgcacagcatgactgccttcgcccgcgtcgagcgggccggcgcccacggcaccctgagctgggaactgcgctcggtcaatcatcgctacctcgaaccgcacctgcgtctgccggaggccttcctcgatctcgagggcgccctgcgcgacgccctgcgccaggggctttcccgcggcaaggtcgaatgcaccctgcgcttcgacgaaggcagcgccggacagccgttgcagatcgaccgcgaacgtgccagccaactggtggccgccgccgaggacatcgccgccctgatccgccagccggccccgatcgaccccttcgacgtgctggcttggcccggcgtgctggtggccgatgccgccgatcaccagcgcctcagcgccgaagccctgagcctgttcgacgaggccctggcccagctcaaggccggccgcgcccgcgaaggcgcggaactggcccggttgctcgaggaacgcctggacgccatgctccaggaggtcgagaacctgcgccagttggtcccgcagatgctcgccaaccagcgccagaagatcctcgaccgtttccgcgacacgcagctggaactggacccgctacgcctcgaacaggaactggtgctgctcgcccagaagagcgacgcggccgaggaactggatcgcctctgcacccacatcgccgaggtccgccgcgtgctcaaggacagcggcacggtcggccgccggctggacttcctgatgcaggaactcaaccgcgaggccaacacccttggctccaaggccttcgatccccgctccacgcagaccgcggtcaacctcaaggtattgatcgaacagatgcgcgagcaggtacagaacatcgagtga

SEQ ID NO: 125361 - protein, 290 aa, Azotobacter vinelandii
MDTMAHSMTAFARVERAGAHGTLSWELRSVNHRYLEPHLRLPEAFLDLEGALRDALRQGLSRGKVECTLRFDEGSAGQPLQIDRERASQLVAAAEDIAALIRQPAPIDPFDVLAWPGVLVADAADHQRLSAEALSLFDEALAQLKAGRAREGAELARLLEERLDAMLQEVENLRQLVPQMLANQRQKILDRFRDTQLELDPLRLEQELVLLAQKSDAAEELDRLCTHIAEVRRVLKDSGTVGRRLDFLMQELNREANTLGSKAFDPRSTQTAVNLKVLIEQMREQVQNIE

SEQ ID NO: 125362 - DNA, 864 bp, Haemophilus influenzae
  CDS (1)..(864): transl_table=11
atgatttacagtatgactgcctttgcacgccttgaagtgaaaaaagattggggtgatgcggtatgggaaattcgttccgttaatcaacgttatttagaaaactttttccgtttgcccgagcaatttcgcggattagaaaacacgttgcgtgagaaacttcgtcaaaatcttactcgcggtaaaattgaatgttctctacgcattgaaacaaaaaaacaagcaaatgcagaattgaatttaaataaagaacttgcgaatcaagtaattcaatctttgcaatggattaaagctcaggctggagaaggggaaattaatttgacagacgtgttgcgttaccccggcgtagtggaagcgcaagagcaagatttagatgcgattagtcaagatttattgacagcctttgatgatttactgacagattttattgcaatgcgtggtcgtgagggggaaaaactgaacgatattattcaacaacgtttagattccattgcagtggaaacggataaagtgcggtcacaaatgccagcagttttacaatggcagcgtgaacgtttattgcaacgttttgaagatgctcaacttaatcttgatccgcaacgtgtggaacaagaaatgattttactcgctcaacgcattgatgtggcggaagagctagatcgtttacaaatgcacgtgaaagaaaccacgaatattttgaaaaaaggcggtgcagttggacgtaaattagattttatgatgcaagaattgaatcgggaatccaatacccttgcgtctaaatccattaatgcagatatcacggcttctgcggtggagctaaaagtgcttattgaacaaatgcgtgagcaaattcagaatttagaatag

SEQ ID NO: 125363 - protein, 287 aa, Haemophilus influenzae
MIYSMTAFARLEVKKDWGDAVWEIRSVNQRYLENFFRLPEQFRGLENTLREKLRQNLTRGKIECSLRIETKKQANAELNLNKELANQVIQSLQWIKAQAGEGEINLTDVLRYPGVVEAQEQDLDAISQDLLTAFDDLLTDFIAMRGREGEKLNDIIQQRLDSIAVETDKVRSQMPAVLQWQRERLLQRFEDAQLNLDPQRVEQEMILLAQRIDVAEELDRLQMHVKETTNILKKGGAVGRKLDFMMQELNRESNTLASKSINADITASAVELKVLIEQMREQIQNLE

SEQ ID NO: 125364 - DNA, 867 bp, Vibrio cholerae
  CDS (1)..(867): transl_table=11
atgatttacagcatgactgcgtacgcacgcaaagaagtcaaaggcgattggggcagcgccgtgtgggaaattcgctcggttaaccaacgctatttagaaacgtacttccgcctgcctgagcagttccgtggtttagagccactgctgcgcgagcgttttcgtcagcgcctgtcacgcggtaagatcgagtgtcatttgcgctttgaagcgaatccagccgcgcaaagccacctcaccatcaatgaaggactcgcccagcaagtgattaatgccgctaaccagatcatgcacatgaccggtgaactcagccgcattaacccattccaagtgatgcagtggccgggcgtgatggaaacgcctgagcaggatatggacgccataaaccaagcactactcagtgcgtttgatgaaggcgtggacgaatttatcgccgcgcgtggccgtgaaggcgataacatgaaagcgctgattgagcagcgtttgcaagcgatcagcgccgaagtggtcaaagtacgcgcacgcatgccagaaattctggaatggcaacgcgagcgtctgttcagcaaatttgaagaggcaaaaatcgagcttgatgcgagccgcgtagagcaagagctgatcctgctggcacaaaaatcggatgtagccgaagagctggatcgtctcgactctcatgtcaaagaagcgcgtgaagtgctgaaaaaaggtggctcatgtggccgtaaactcgatttcatgatgcaagagttcaaccgtgaatcgaacaccttggcttcgaaatccatctcaaccgatatcaccgcctccggtgtggagctgaaagtactcatcgagcagatgagagagcagatccaaaacatcgaataa

SEQ ID NO: 125365 - protein, 288 aa, Vibrio cholerae
MIYSMTAYARKEVKGDWGSAVWEIRSVNQRYLETYFRLPEQFRGLEPLLRERFRQRLSRGKIECHLRFEANPAAQSHLTINEGLAQQVINAANQIMHMTGELSRINPFQVMQWPGVMETPEQDMDAINQALLSAFDEGVDEFIAARGREGDNMKALIEQRLQAISAEVVKVRARMPEILEWQRERLFSKFEEAKIELDASRVEQELILLAQKSDVAEELDRLDSHVKEAREVLKKGGSCGRKLDFMMQEFNRESNTLASKSISTDITASGVELKVLIEQMREQIQNIE

SEQ ID NO: 125366 - DNA, 891 bp, Mesorhizobium loti MAFF303099
  CDS (1)..(891): transl_table=11
atgaatttacagagcatgaccggatttgcgcgtgccgtcgccgagcatgacggcacctcgatcgcctgggaggtcaagtccgtcaacggcaagagcgtcgaggtgcggctgcggctgccgcaaggtttcgagcgtctggagccggcggtcaggcaaacgctgcagaagcgtttcgcacgcggcaatttccaggcgacgctgaccatcggccgcgccgccggcgcgcaggcgcaacccgtcgtcaacgaggcgtttctgaaggaccttgcgggtctcgccaagcggctgcaggaacagttcggcgttgctcccgcgacggccgatgggttgctgtcgctgcgtggcgtgctcgacattcccgaaaccgtggaaaccgaagaggcgcgcgccgcgctcgacatcgccatcatggctgcgctcgacgtatcgctgaacgggctggaactggcacggcaaagcgagggggcggcgctggctttgctgctgtccggccatatcgacgccatcgaggcattgacgctgcgtgcggaggcggatccgtcccgcgagacggcggcgatccgtgaacgcatcgctgagcaggtcaggctgctgatggacgcgtccgccaacctggatgcgagccggctgcacatggaagcggcattcctcgccaccaaggctgatattcgcgaggagatcgatcggctgaagacgcatgtcgcatctggccgggctttgcttgagggcggcggcgccgtcggtcggaagctcgattttctggcacaggaatttaaccgcgaatcgaatacgctgtgttcgaagtcgaacgccgcagccgtcaccgcgatcgggctggagctgaaggcggtggtcgaccagtttcgtgaacaggtccagaatctggagtag

SEQ ID NO: 125367 - protein, 296 aa, Mesorhizobium loti MAFF303099
MNLQSMTGFARAVAEHDGTSIAWEVKSVNGKSVEVRLRLPQGFERLEPAVRQTLQKRFARGNFQATLTIGRAAGAQAQPVVNEAFLKDLAGLAKRLQEQFGVAPATADGLLSLRGVLDIPETVETEEARAALDIAIMAALDVSLNGLELARQSEGAALALLLSGHIDAIEALTLRAEADPSRETAAIRERIAEQVRLLMDASANLDASRLHMEAAFLATKADIREEIDRLKTHVASGRALLEGGGAVGRKLDFLAQEFNRESNTLCSKSNAAAVTAIGLELKAVVDQFREQVQNLE

SEQ ID NO: 125368 - DNA, 864 bp, Pasteurella multocida subsp. multocida str. Pm70
  CDS (1)..(864): transl_table=11
atgatttatagtatgaccgcttttgcacgcctcgaaatcaaacaggattggggtgatgccgtgtgggaaattcgctcagttaaccagcgctatttagaaacctttttccgcttgcctgagcaatttcgtggtttagaaaataccttgcgagaaaaactgcgtcaaaaactgacgcgtggcaaaattgaatgcacattgcgtattgataataaaaaacaagctgccacagaaatccatttaaacaaagcctttgcattacaagtgatacagtcattacagtggatcaaacaacaagccggggaaggcgagattcacttaaatgacgtgttgcgctatccgggcgtcgttgaagtaccagaacaagatcttgatttgattagccaacaattactcagcgcgtttgacagcttattaaccgagtttattgcaatgcgagcaagagagggcgaaaaactcaacacactccttcaacaacgtttagatgccgttgaagttgaagccaataaagtgcggtcaaaaatgccggaaattttacaatggcaacgagatcgtttattacagcgctttgacgaaatccaattacaagtggatccccaacgtgttgagcaggaaatggtgttattagcccaacgggttgatgtcgctgaagaactcgatcgtctgcaattacacgtcaaagaaaccaaagccattttacaaaaaggcggtgcggttggcagaaaattggattttatgatgcaagaacttaaccgtgaatcaaatacgctcgcgtccaaatctatcagtactgaagtcaccaattctgcggttgaactgaaagtccttatcgaacaaatgcgtgagcaaattcaaaacttagagtaa

SEQ ID NO: 125369 - protein, 287 aa, Pasteurella multocida subsp. multocida str. Pm70
MIYSMTAFARLEIKQDWGDAVWEIRSVNQRYLETFFRLPEQFRGLENTLREKLRQKLTRGKIECTLRIDNKKQAATEIHLNKAFALQVIQSLQWIKQQAGEGEIHLNDVLRYPGVVEVPEQDLDLISQQLLSAFDSLLTEFIAMRAREGEKLNTLLQQRLDAVEVEANKVRSKMPEILQWQRDRLLQRFDEIQLQVDPQRVEQEMVLLAQRVDVAEELDRLQLHVKETKAILQKGGAVGRKLDFMMQELNRESNTLASKSISTEVTNSAVELKVLIEQMREQIQNLE

SEQ ID NO: 125370 - DNA, 903 bp, Xylella fastidiosa 9a5c
  CDS (1)..(903): transl_table=11
atgggcgcgctagggtaccatccatattttgagagcaatatgatccatagcatgactgcgttcgccgcagatgagcaccttacaccatggggcctgttagcctgcgagctgcgttcagtcaaccaccgcttcctggatatcgtcatacgccttcctgaagaactccgtgctctggaaccacaactacgtgagcgcgtggccgcacgggtcagccgcggcaagctcgatttgacagtacgcctatcaccacaggagatccacactgggaagctggtagtgaacgaactgctgttatcccagctcagcaccctggcactacgcctatcagcacagttccccgcgttacgtgtcacatttgcagagctgctacagatccctggtgtcctgaagggtgagcagatcgacatggccacgttacaaggacacgccgtggcgctgctggataaggtactgaataacttcattgccacgcgggaacgcgaaggtctcaaaatgcaagcaatgatcgcgcaacgtgctagtgccattgaacgcatcgtcggcgaggttcgcatcctgattcccaccatccgcgaaggccaacacaacaaattaagcgctcgcatgaatcacctgtcgtatcccgtcgatcccggccgcattgagcaagagttggtgctatggctacaaaagctagacgtggatgaggagttggatcggctcagcagtcacatcagcgaattacatcgcatcctccagcaacgcgaacccgtcgggcggcgcctggattttctaatgcaagaattcaaccgcgaagccaacacactcggctcaaaatcggtggacagccgcacttctaatgccacgattgagctgaaggtactgatcgaccagatccgcgagcaagtgcagaacatcgaataa

SEQ ID NO: 125371 - protein, 300 aa, Xylella fastidiosa 9a5c
MGALGYHPYFESNMIHSMTAFAADEHLTPWGLLACELRSVNHRFLDIVIRLPEELRALEPQLRERVAARVSRGKLDLTVRLSPQEIHTGKLVVNELLLSQLSTLALRLSAQFPALRVTFAELLQIPGVLKGEQIDMATLQGHAVALLDKVLNNFIATREREGLKMQAMIAQRASAIERIVGEVRILIPTIREGQHNKLSARMNHLSYPVDPGRIEQELVLWLQKLDVDEELDRLSSHISELHRILQQREPVGRRLDFLMQEFNREANTLGSKSVDSRTSNATIELKVLIDQIREQVQNIE

SEQ ID NO: 125372 - DNA, 888 bp, Agrobacterium tumefaciens str. C58
  CDS (1)..(888): transl_table=11
atgacattgcaatcgatgaccggctttgcgcgcagcgaaggaacctccggccgttaccgctgggcctgggaattgcgttctgtgaacggcaaggggctcgatgtgcgcctgcgtctgccgaccggtcttgaagcactcgaaaccggcctgcgcgaaattgcgagcgagcatctttcccgcggcaatattcaggcgggcctgacgctggcgattgcggaaaaccggcttgaggccgtgatcaaccgcgatgcgctggccgccgttctggcactcaagaaggagcttggtgatgtcgtcgatgacaagccgctgagcttcgataccttgctcactttgcgcggtctggtcgattttcgagaggcggaagacgacgctgaagcgcaggcagcgcgcaatggtgaggtgcttgccggtttcgccgctgccgtggaaaagctgaaggacatgcgcgagcgggaaggggcatcgctgtttgctatcctctccggccatatcaaccgtatcgagcagctcgtggacatcatcgagaatgatccatcccgccagcccgagcagatcgcggcacggctcgcccagcagatcgccctcatcggtgacggcatgcacgggctcgaccgtgaccgcctgcatgccgaggcggcgctgatcgccactaaggcggatctgcgtgaagagatcgaccggttgcacgcccatgtccaggcttcacgcgaactgttggagaatggcggacctgttggccgcaagctcgattttcttgcacaggaatttaaccgcgagtcgaatacaatctgttccaaatcgaatgccagtgcggtaaccgcagcgggcatagagttgaaagtggtgatcgaccagtttcgcgaacaggtccaaaatctggagtag

SEQ ID NO: 125373 - protein, 295 aa, Agrobacterium tumefaciens str. C58
MTLQSMTGFARSEGTSGRYRWAWELRSVNGKGLDVRLRLPTGLEALETGLREIASEHLSRGNIQAGLTLAIAENRLEAVINRDALAAVLALKKELGDVVDDKPLSFDTLLTLRGLVDFREAEDDAEAQAARNGEVLAGFAAAVEKLKDMREREGASLFAILSGHINRIEQLVDIIENDPSRQPEQIAARLAQQIALIGDGMHGLDRDRLHAEAALIATKADLREEIDRLHAHVQASRELLENGGPVGRKLDFLAQEFNRESNTICSKSNASAVTAAGIELKVVIDQFREQVQNLE

SEQ ID NO: 125374 - DNA, 861 bp, Xanthomonas campestris pv. campestris str. ATCC 33913
  CDS (1)..(861): transl_table=11
atgatccgaagcatgaccgcgttcgccggcggcgaacgcatcacgccatggggcacgctcggttgcgagctgcgctcggtcaaccaccgttttctggaagtgggcgtgcgcctgcccgaagaattgcgtgcgctggagccgctgttgcgcgagcgcgtggcggcccgcaacagccgcggcaagctggacctggcgctgcgcctgcgcgcgccggacagcggccagaccctggccgtcaatgaggcgctgctgcaggaactgggcgcactcgccacgcggctggatgcaagcatgcccaagctgcaggtgagcttcaccgatctgctgcaattgcccggcgtgttgcaggtgcaggatgtcgatgcaccggcgctgcaggcgcaggcgctggcgttgctggatgatgtggtgtccgggtttgtggccgcccgtgagcgcgaaggcgccaagctggccgaggcgatcagcgagcgcgtggatgccatcgagcgtattgctggtgaggtgcgcacgctgattccggtgatccgcgaaggccaacgcgccaaattggcggcccgcctggccgatctgccgcatccggtggacccgggccgcgccgagcaggaactggtgctatggctgcaaaaactcgatgtggatgaagagctggaccgcctgtccagccacatcggcgagatccggcgcgtgctcaagcagtccgagccggtcgggcggcgcctggatttcctgctgcaggagttcaaccgcgaagccaacaccctgggctccaaatcggtggacagccgcacctccaacgcggcggtggacctgaaggtgctgatcgaccagatccgcgaacaggtgcagaacatcgagtag

SEQ ID NO: 125375 - protein, 286 aa, Xanthomonas campestris pv. campestris str. ATCC 33913
MIRSMTAFAGGERITPWGTLGCELRSVNHRFLEVGVRLPEELRALEPLLRERVAARNSRGKLDLALRLRAPDSGQTLAVNEALLQELGALATRLDASMPKLQVSFTDLLQLPGVLQVQDVDAPALQAQALALLDDVVSGFVAAREREGAKLAEAISERVDAIERIAGEVRTLIPVIREGQRAKLAARLADLPHPVDPGRAEQELVLWLQKLDVDEELDRLSSHIGEIRRVLKQSEPVGRRLDFLLQEFNREANTLGSKSVDSRTSNAAVDLKVLIDQIREQVQNIE

SEQ ID NO: 125376 - DNA, 864 bp, Yersinia pestis KIM
  CDS (1)..(864): transl_table=11
atgatccgcagcatgaccgcctacgctcgacgtgatattaagggtgaatggggcaacgcagcctgggagctgcgttccgttaaccaacgctatttagaaacgtacattcgcttaccagaacaattccggagtctggaaccggtgatccgcgaacgtattcgcagccgtctgacacggggaaagattgaatgtcatttacgttttgagttggatgccaacgcacaaagctctttgatcctcaatgaaaaactggcgaagcagttagttgaagccggtaattgggtcaagatgcaaagtgatgaaggcgaaattaacccagtagatatcctgcgctggccaggggtaatgtctgctgaggaacaagatttggatgcgattagcaccgagttaatgcaggcgctagataccgccctagacgattttattgtttcccgagaaactgaaggggcagcactgaaaacgcttatcgagcagcgtttagagggggtcagcgctgaagtggttaaagtccgcgcacatatgccaaatatcttgcagtggcaacgtgagcgcttactgaacaaactggaagaagcgcaagttcagttggaaaatactcgtttggagcaggagttagtgctaatggcacagcgtatcgatgtggccgaagagctagatcgtttggaagcgcacgtcaaagaaacatacaacattctgaagaagaaagaagccgttggccgccgccttgattttatgatgcaagaattcaaccgcgagtcgaatacgctggcatcaaaatccatcaatgccgaggtcactaactccgctatcgagttaaaggtgttgattgagcagatgcgcgaacagatccagaacatcgagtaa

SEQ ID NO: 125377 - protein, 287 aa, Yersinia pestis KIM
MIRSMTAYARRDIKGEWGNAAWELRSVNQRYLETYIRLPEQFRSLEPVIRERIRSRLTRGKIECHLRFELDANAQSSLILNEKLAKQLVEAGNWVKMQSDEGEINPVDILRWPGVMSAEEQDLDAISTELMQALDTALDDFIVSRETEGAALKTLIEQRLEGVSAEVVKVRAHMPNILQWQRERLLNKLEEAQVQLENTRLEQELVLMAQRIDVAEELDRLEAHVKETYNILKKKEAVGRRLDFMMQEFNRESNTLASKSINAEVTNSAIELKVLIEQMREQIQNIE

SEQ ID NO: 125378 - DNA, 900 bp, Brucella suis 1330
  CDS (1)..(900): transl_table=11
atggcgctccagagcatgacaggttttgcgcgccatgcagcacagcatggcatggccgacggcgaggcgcgtatcgtctgggaagtgcgctcggtcaatggcaaggggcttgatcttcgcctgcgcctgccgcaagggctggaatcggtggaacatccggtccgctccctgctggcgcggcatttctcgcgcgggaattttcaggcgagcctgaccgtcgaacgcagcgaaacgcaggcgggctttgccatcaaccagcccatgctggccgaggtgctgaagctgggtgcggagttgcaggaaaaatatggcctggctccggcaagcgtggacggcattcttgcgctgcgcggcattatcgaccagtcgcaaagggcggaagacgaggaagagcgcgctgcgctggaagctacaatcgtcgcggcctttgagggcgccttgaaggcgatagccgaggcgcgcaggcaggaaggcaaggcgctttttaccattctttcgacccatctcgacacgatcgagcggctgacggcggatgcacgaaatgacccgtcgcgcgctaccgaggcgatcaaggcgcgccttgccgggcaggtggcgctgcttctggatgccacgcgcgaactggacgagacgcggctatatcaggaagcggcgtttctggccaccaaggcggatattcaggaagagcttgaccggctggaaacccatgtggccagtgcacgcaagcttctgggcgagggcgggccggtcgggcgaaagctcgattttctttcacaggaatttaatcgtgaggctaatacactgtgctccaaatcgaacgcagcgtcgatcacggctatcggactggggctgaaagcggtcgtcgatcagttccgcgaacaagtacagaatctggagtaa

SEQ ID NO: 125379 - protein, 299 aa, Brucella suis 1330
MALQSMTGFARHAAQHGMADGEARIVWEVRSVNGKGLDLRLRLPQGLESVEHPVRSLLARHFSRGNFQASLTVERSETQAGFAINQPMLAEVLKLGAELQEKYGLAPASVDGILALRGIIDQSQRAEDEEERAALEATIVAAFEGALKAIAEARRQEGKALFTILSTHLDTIERLTADARNDPSRATEAIKARLAGQVALLLDATRELDETRLYQEAAFLATKADIQEELDRLETHVASARKLLGEGGPVGRKLDFLSQEFNREANTLCSKSNAASITAIGLGLKAVVDQFREQVQNLE

SEQ ID NO: 125380 - DNA, 864 bp, Shigella flexneri 2a str. 301
  CDS (1)..(864): transl_table=11
atgatccgcagtatgaccgcctacgcccggcgtgaaatcaagggtgaatgggggagcgcaacctgggaaatgcgctcggtaaaccagcgttatctggaaacttactttcgtctgccggagcagttccgtagccttgaacctgtcgttcgcgagcgtattcgttctcgcctgacgcgcggtaaagtggaatgtaccctgcgctatgagccagatgttagcgcacaaggtgagctgatcctcaatgaaaaactggctaaacagctggtaactgccgcgaactgggtaaaaatgaagagtgacgaaggggaaatcaacccggttgatattctacgctggccgggcgtgatggcagcccaggagcaggatctcgacgcgattgccgctgaaattctcgcggcgttggatggtacgctggacgactttatcgtcgcgcgcgaaaccgaaggtcaggcactgaaagcattgatcgagcagcgtctggaaggcgtcaccgccgaagtggtcaaagtccgcgcccatatgccggaaattctgcaatggcagcgtgagcgtctggtcgcgaagctggaagatgctcaggttcagttggaaaacaaccgtctggagcaggagttggttctgctggcacaacgaattgacgttgccgaagagctggaccgcctcgaagcgcatgttaaagagacgtacaacattctgaagaaaaaagaagcggttggtcgtcgtctggactttatgatgcaggagttcaaccgtgagtcgaacactcttgcgtcgaaatctatcaatgccgaagtgacaaactccgccatcgagctgaaagtgttgattgagcagatgcgcgagcagattcagaatattgagtaa

SEQ ID NO: 125381 - protein, 287 aa, Shigella flexneri 2a str. 301
MIRSMTAYARREIKGEWGSATWEMRSVNQRYLETYFRLPEQFRSLEPVVRERIRSRLTRGKVECTLRYEPDVSAQGELILNEKLAKQLVTAANWVKMKSDEGEINPVDILRWPGVMAAQEQDLDAIAAEILAALDGTLDDFIVARETEGQALKALIEQRLEGVTAEVVKVRAHMPEILQWQRERLVAKLEDAQVQLENNRLEQELVLLAQRIDVAEELDRLEAHVKETYNILKKKEAVGRRLDFMMQEFNRESNTLASKSINAEVTNSAIELKVLIEQMREQIQNIE

SEQ ID NO: 125382 - DNA, 951 bp, Pseudomonas putida KT2440
  CDS (1)..(951): transl_table=11
ttgggcgccacggcgacactgcgctacaatcctgcgccttgcagccgagaggctcccaccgttcattcattacgcgaggtactccccatggtgcacagcatgaccgcttttgctcgtgtcgagcgcgccggcagccaaggcaccctggtctgggagctgcgttcggtcaaccaccgttatctggagccgcacctgcgcctgcccgaagccctgcgcgacctcgaaggcggtgtacgtgaaggcctgcgccagggcctgtcacgcggcaaggtggaatgcaccttgcgcctcaacgaagacagcaatggcaaaccgctgaaagtggaccatgagcgcgccgcgcaactggttgccgccgccgaggaagtggctggcctgatcaagcagccggcccccctgaacccgctggaagtgctgtcatggccaggcgtgctggtggccgacaccagcgacccccaggcactgaacgccgaagccatggcgctgttcgacgaagcgctggccgaactcaaggccgggcgccagcgcgaaggccaggaactggcccggctgatcaacgaacgcctggacaacatggccagcgaagtcactaccctgcgcgccctggtgccgcagatgctggcggcgcagcggcagaagattctcgaccgcttcggcgacatgcaagccgagctggacccacagcgcctggagcaggagatggtactgctggcccagaaaagcgacgtggcagaggaactcgaccgcctcagcacccacgtcaccgaagtgcgccgcgtgctcaagggtggcggcgccgctggccggcgcctggacttcctgatgcaggaactcaaccgcgaggccaacaccctcggctccaaggccttcgacccacgcagcacgcaagcggcggtcaacctgaaggtattgatcgaacagatgcgtgaacaagtacagaacatcgagtaa

SEQ ID NO: 125383 - protein, 316 aa, Pseudomonas putida KT2440
MGATATLRYNPAPCSREAPTVHSLREVLPMVHSMTAFARVERAGSQGTLVWELRSVNHRYLEPHLRLPEALRDLEGGVREGLRQGLSRGKVECTLRLNEDSNGKPLKVDHERAAQLVAAAEEVAGLIKQPAPLNPLEVLSWPGVLVADTSDPQALNAEAMALFDEALAELKAGRQREGQELARLINERLDNMASEVTTLRALVPQMLAAQRQKILDRFGDMQAELDPQRLEQEMVLLAQKSDVAEELDRLSTHVTEVRRVLKGGGAAGRRLDFLMQELNREANTLGSKAFDPRSTQAAVNLKVLIEQMREQVQNIE

SEQ ID NO: 125384 - DNA, 867 bp, Vibrio parahaemolyticus RIMD 2210633
  CDS (1)..(867): transl_table=11
atgatttacagtatgactgcgtatgcgcgcaaagaagtaaaaggcaattggggctcagcggtatgggaaatccgcagtgtaaaccagcgttacctagaaacctatttccgcatgccagaacaattccgagctttagaaccagttctacgcgagcgttttcgtaaacgcctagcgcgaggaaaagtggaatgtagccttcgtttcgaagcaaaccctgcagcaaaagccgaacttagcatcaatgaagcgttggcaacccaagtgattaaagctgctgaacaagttatgcacatgactggtgagcttagccgcatcaatccatttcaagtcatgcaatggcctggtgtgatggaaactcctgagcaaaacatggatgaggttaacaaagaacttcttgctgcatttgatgaagcaattagtgaatttattgaagcgcgtggccgtgaaggcgataacatgaaagcgctgatcgaacaacgcctagacgcgattaccgcagaagtggtgaaagttcgtgctcgcatgcctgaaatcctagaatggcaacgtgagcgtctattctcaaaatttgaagatgcgaaaattgaactggatgcttctcgtgtagaacaagagcttatcttgctagcgcaaaagtcagacgttgcagaagagctagatcgtctggattctcacgtgaaagaaacgaccaacatcctgaaaaaaggtggcgcagtcggtcgtcgtctggatttcatgatgcaagaattcaaccgtgagtcaaacacgctcgcttctaaatcgatcagcaccgacatcactgcgtcgggtgttgaactgaaagttctgatcgaacaaatgcgcgaacagatccaaaacatcgaataa

SEQ ID NO: 125385 - protein, 288 aa, Vibrio parahaemolyticus RIMD 2210633
MIYSMTAYARKEVKGNWGSAVWEIRSVNQRYLETYFRMPEQFRALEPVLRERFRKRLARGKVECSLRFEANPAAKAELSINEALATQVIKAAEQVMHMTGELSRINPFQVMQWPGVMETPEQNMDEVNKELLAAFDEAISEFIEARGREGDNMKALIEQRLDAITAEVVKVRARMPEILEWQRERLFSKFEDAKIELDASRVEQELILLAQKSDVAEELDRLDSHVKETTNILKKGGAVGRRLDFMMQEFNRESNTLASKSISTDITASGVELKVLIEQMREQIQNIE

SEQ ID NO: 125386 - DNA, 864 bp, Coxiella burnetii RSA 493
  CDS (1)..(864): transl_table=11
atgattgccagtatgaccgctttctctcgccagtctcatgaagcaacatgggggttattgacgtgggagatccgcacggtcaatcaccgctatctggaaattacactgcgtttgccggactttttgcgtgaatttgaacaagcttcccgagaggccattcaaaaggttttgcgccgaggcaaggttgaagccactttacggttccagcctggttgggacgtgccgtttgaaatgaatgtcaatcaagtgctgactgaacgcttggccaaagcgagtgagacggtcatctcctacttcccatcagcgacaatcaatgccatcgatgtgctctcctggcctggggtattgcaaaccaaggaaactcaggtggatgttatcggaaaggccgtattcgctttattaaattcggcattaaccgattgcatggatatacggcgtcgcgaaggcgagggacttaaactatttattgaagaacggctgaacaacgtgaaagggaaaatcgccattatcaagaaacgactgcctgctttgcaccaagcggcgcgcgagaaaatgatagtgcgttttgaagaattatccctcgcgttagataaagaacgcttggagcaagagatgctctggttggtacaaaaaagtgatgtcgccgaagaattacaacgcctagaggcgcacctgcttgaagtgaaacgtgttttagttgaaggaggtaccgtcggacgaaggctggattttttaatgcaagaattaaaccgagaggccaacaccttgggaaataaatcactggacgccgatgtttctcaagtattggtagatttaaaagtgcaaattgaacaaatgcgagaacaggtgcaaaacattgaataa

SEQ ID NO: 125387 - protein, 287 aa, Coxiella burnetii RSA 493
MIASMTAFSRQSHEATWGLLTWEIRTVNHRYLEITLRLPDFLREFEQASREAIQKVLRRGKVEATLRFQPGWDVPFEMNVNQVLTERLAKASETVISYFPSATINAIDVLSWPGVLQTKETQVDVIGKAVFALLNSALTDCMDIRRREGEGLKLFIEERLNNVKGKIAIIKKRLPALHQAAREKMIVRFEELSLALDKERLEQEMLWLVQKSDVAEELQRLEAHLLEVKRVLVEGGTVGRRLDFLMQELNREANTLGNKSLDADVSQVLVDLKVQIEQMREQVQNIE

SEQ ID NO: 125388 - DNA, 867 bp, Nitrosomonas europaea ATCC 19718
  CDS (1)..(867): transl_table=11
atgcttgcaagcatgacaggttatgcagcagtttcccgggaaatcccgcaaggatcactggctttggaactgcgttcagtcaataaccgctatcttgatctgcaattcagactccccgatgaactccgtgcacttgaatccgaaatgcgcgattttctcggtagtggactgacgcggggaaaagttgattgtcgcctgactttttcatcttattcaaacagttaccgtcaacagcgactgaatcgtgatctgttgcaagacttgcagatcatgagcgatgagatcaagtctatttttcctgctgcaggcgatttttccgttgctgaaattctgcgctggcctggcgtactcgatagtgaccatatttcgatcgatgacttgcgtaccccgtgtatggcactgttacaaactgctctacaggaactcgtctccgcccggaagcgcgagggagaaaagctgcataacctgttgttggaacgtgtacaacgaatgcgtcaactggtattggatctgttgccggggttgcctgctattctggccagttttcaggaaagattactgaacagtttgaaagcagccgggctcgatgaaaaggatgaacgtatccggcaggaattcaccctgtttgccaacagagtcgatgtagacgaggagctgtcacgcctgcagggacacctgaacgaattcgaacacattctgcttgccgggggtgtcgtcggcaaacggctcgattttctgacacaggaactcaatcgggaagccaatacgctggcctccaagtcagtggcgagagaagtcacgcgaatagcagtggaaatgaaagtgctgatcgagcaattgcgcgagcagatccagaatattgaataa

SEQ ID NO: 125389 - protein, 288 aa, Nitrosomonas europaea ATCC 19718
MLASMTGYAAVSREIPQGSLALELRSVNNRYLDLQFRLPDELRALESEMRDFLGSGLTRGKVDCRLTFSSYSNSYRQQRLNRDLLQDLQIMSDEIKSIFPAAGDFSVAEILRWPGVLDSDHISIDDLRTPCMALLQTALQELVSARKREGEKLHNLLLERVQRMRQLVLDLLPGLPAILASFQERLLNSLKAAGLDEKDERIRQEFTLFANRVDVDEELSRLQGHLNEFEHILLAGGVVGKRLDFLTQELNREANTLASKSVAREVTRIAVEMKVLIEQLREQIQNIE

SEQ ID NO: 125390 - DNA, 864 bp, Wigglesworthia glossinidia endosymbiont of Glossina brevipalpis
  CDS (1)..(864): transl_table=11
atgatacatagtatgacttctttttctagatatgaattaaaaaaaaattactacaatattatatgggaattaaaatctgttaatcataaatatcttgatataaatattaatttaccagaagaaataaaatttatagaagaaacaatttacaaaagaattagtaaatatatttcaagaggtaaaatagattgtagtgcttatattaaatcaaataaatcaaaaaaaataaatttattaattgataaaaaattaatacttcaaatattaaaaattattatttatataaataaagaaattaatttcagcacagtaaatattttagacatactaaaatggccaggagttattttaaaaaaaaaatatttaaacaaaataaataacaaagtattaatttctagctttgaatatgcttttaacaatttattgaattatagactctcagaaggaagagaaataaaaaaaataattaaaacaaaaacagaaaaaattaattttaatatagaaaaaatgaattatattttacctaaatttttagaaaaacaaaaaattaaactaaaaaataaaatactagaaattaataataatatagaaattaataaattagaacaagacatttcattttttattcaaaaaacagacataaatgaagaaatagatagaataaaaattcatattaattctttaacaaaaacattaaacaatagaaaaccaattggaagaaaattagattttattttacaagaaataataagagaatctaatactatttcatctaaatcaactgcaatagaaataattcaattatcaattgaattaaaattattaacagatcaaattagagagcaagcaaaaaatattgaataa

SEQ ID NO: 125391 - protein, 287 aa, Wigglesworthia glossinidia endosymbiont of Glossina brevipalpis
MIHSMTSFSRYELKKNYYNIIWELKSVNHKYLDININLPEEIKFIEETIYKRISKYISRGKIDCSAYIKSNKSKKINLLIDKKLILQILKIIIYINKEINFSTVNILDILKWPGVILKKKYLNKINNKVLISSFEYAFNNLLNYRLSEGREIKKIIKTKTEKINFNIEKMNYILPKFLEKQKIKLKNKILEINNNIEINKLEQDISFFIQKTDINEEIDRIKIHINSLTKTLNNRKPIGRKLDFILQEIIRESNTISSKSTAIEIIQLSIELKLLTDQIREQAKNIE

SEQ ID NO: 125392 - DNA, 873 bp, Candidatus Blochmannia floridanus
  CDS (1)..(873): transl_table=11
atgattaatagtatgactgctttttctagatatgaagttgtttatttatggggaagtgcagtgtgggaaattcgttctatgaatcaacgatatttagatatttgtattactatacctaagaatgtcaatgatttgttttggataattagaaaaaaagttaagagttctcttacaagaggtaaaatagaatgtcatttacaacttaatattaatgtagatagtattaatactgttgtgtttgataataaattattttcttttttacttgataaaatcaaatatattaaatcacaaattaatgaaggggaaattgatcttgtagaaattttatcttttccaggaataatttcatataagcataataatgatgtatatcaaataaataatgaattattagctgcttttgaactaacattatatcaattaatacgtaatagagaaaaggaaggtagttttttaaaggataatgtagttaatcggttattacaaattactacagtaatcgatgaaattcagaaatatattcctcaaatattacaacaaaagcgtaaaaaacttttggattatattcagggtttttgtattaattttgatactagtcgattagaacaagaattattgttaatgacacaaaaaattgatgtttcagaagaaatagatcgtttgaaaattcatgttgaatctatgcaaaatcttttatctcaaaaaataaataaacctgttggaagacagttagattttattactcaagaattacaaagggaggctaatactttgtcgtcgaaattaatagatgcttatgtgacaggtttggttatttctttaaagatattaattgagcaaattcgtgaacaggttcaaaatattgagtaa

SEQ ID NO: 125393 - protein, 290 aa, Candidatus Blochmannia floridanus
MINSMTAFSRYEVVYLWGSAVWEIRSMNQRYLDICITIPKNVNDLFWIIRKKVKSSLTRGKIECHLQLNINVDSINTVVFDNKLFSFLLDKIKYIKSQINEGEIDLVEILSFPGIISYKHNNDVYQINNELLAAFELTLYQLIRNREKEGSFLKDNVVNRLLQITTVIDEIQKYIPQILQQKRKKLLDYIQGFCINFDTSRLEQELLLMTQKIDVSEEIDRLKIHVESMQNLLSQKINKPVGRQLDFITQELQREANTLSSKLIDAYVTGLVISLKILIEQIREQVQNIE

SEQ ID NO: 125394 - DNA, 867 bp, Chromobacterium violaceum ATCC 12472
  CDS (1)..(867): transl_table=11
atgatattgagcatgaccggcttcgccgccgccacccgggaattccctggcggcatgttgagcctggaagtccgcgccgtcaatcaccgttacctggacgtgcagatgcgcttgccggaagagctgcgcatcatcgaaccccagctgcgcgagcagatcgccgcccgcgtcacccgcggcaagctggaatgccgcgtcggcctcaaccaggtggacagcgccgcccccacgctggaagtgaaccaggccttcctcgcccgcctgctggaagtctcccgcgacgtgcaaaaacagtgcggcgaaggcaagggactgtcggtcggcgaactgatgcgctggcccggcgtgctgaagagcaacgagctggcgccggaagtgctgcaccagctgtgcctggacgcgctgcaaaccgcgctggccgacttcaacgcctcgcgcggccgcgagggcgaaaagctgaaggccgtgctgatcgagcgcatcgaggcgatggaagccatcgtcgccgcgatcaaacccaagctgccgcaaatcctggaaaactacatggccaaactgtccggccgcctgcaggaggcgctgggcagcgtcgatgaagaccgcttgaaacaggaattcgcgctgttcgcgcagaagatagacgtggacgaggaactgtcgcgcctgaccacccacctctcagaagtgcgacgcatcctgaaatccggcggccaatccggcaagcgcctggacttcctgatgcaggagctgaaccgcgaagccaacaccctgggctccaagtcggtctccaccgacaccacccaggcctcggtggagctgaaagtgctgatcgagcagatgcgcgagcaaattcaaaacatagagtaa

SEQ ID NO: 125395 - protein, 288 aa, Chromobacterium violaceum ATCC 12472
MILSMTGFAAATREFPGGMLSLEVRAVNHRYLDVQMRLPEELRIIEPQLREQIAARVTRGKLECRVGLNQVDSAAPTLEVNQAFLARLLEVSRDVQKQCGEGKGLSVGELMRWPGVLKSNELAPEVLHQLCLDALQTALADFNASRGREGEKLKAVLIERIEAMEAIVAAIKPKLPQILENYMAKLSGRLQEALGSVDEDRLKQEFALFAQKIDVDEELSRLTTHLSEVRRILKSGGQSGKRLDFLMQELNREANTLGSKSVSTDTTQASVELKVLIEQMREQIQNIE

SEQ ID NO: 125396 - DNA, 864 bp, Photorhabdus luminescens subsp. laumondii TTO1
  CDS (1)..(864): transl_table=11
atgatccgtagtatgactgcttttgcacggcgagatatcaaaagtgaatggggaaatgcggcttgggaactacgctccgttaatcagcgttatttagaaacttatatccgcctaccagaacaattcagaagcttggaaccggtgatccgtgagcgcattcgttcccgtctgactcgcggaaaagttgagtgcaacttacgttttgaactggattcacgctctcaaggcgaacttatcctgaatgaaactttagcaaaacagctagtcaatgcggcgaactgggtcaaacaacagagcaacgaaggtgaaatcaaccctgttgatattctgcgttggcctggcgttatggccgcagaagagcaagacctggatgctatcaacactcaattgttgcaagaactggatacaacactggatgcctttattcaaagccgtgaagccgaaggcaacgcacttaaaattatgattgaacaacgtttggacgcagtaaccgaagaagtcggtaaagttcgccaacaaatgcctgaaatcatgcaatggcagcgggaacgcctgcaaaccaaattggaagaagcgcaggtacagcttgaaaataaccgtcttgagcaagagttagttttactggctcaacgcctcgatgtggcagaagagttagatcgccttgatgcccacaccaaagaaacccgtaatattctaaagaaaaaagaagccgtcggccgccgactggattttatgatgcaggaattcaatcgcgaatctaatacgcttgcctccaaatctatcaacgccgatatcactaactccgctattgaattgaaagtgctaatcgaacagatgagggagcagattcagaatattgagtaa

SEQ ID NO: 125397 - protein, 287 aa, Photorhabdus luminescens subsp. laumondii TTO1
MIRSMTAFARRDIKSEWGNAAWELRSVNQRYLETYIRLPEQFRSLEPVIRERIRSRLTRGKVECNLRFELDSRSQGELILNETLAKQLVNAANWVKQQSNEGEINPVDILRWPGVMAAEEQDLDAINTQLLQELDTTLDAFIQSREAEGNALKIMIEQRLDAVTEEVGKVRQQMPEIMQWQRERLQTKLEEAQVQLENNRLEQELVLLAQRLDVAEELDRLDAHTKETRNILKKKEAVGRRLDFMMQEFNRESNTLASKSINADITNSAIELKVLIEQMREQIQNIE

SEQ ID NO: 125398 - DNA, 903 bp, Herminiimonas arsenicoxydans
  CDS (1)..(903): transl_table=11
atgaccggctacgcggttaccactcacgagaccagcaacggcacattgacgatcgagatcaaaagcgtcaattcacgctttctcgatttgcaatttcgcatcaacgacgatttgcgcgcgcttgaaccttccctgcgcgaagcgatcatggcgcgcgttacccgcggcaaggtcgaatgccgtttgagcttcggccgcaaagttgccaccgacaccacgcaagcactgaatgcgactgccctgaatgcattggcagcactgcaaactgatctgcgccggcaatttaccgacgcagcgcctttgtcggtcggcgaattactccgctggcctggcgtcatcgaagaagctgaaatgagccaggacaccctgcaagccgacgtcatcgcggccatgcaaaccaccatgacggcgtttgtcgaaagccgcgcgcgcgaaggcaatgccctgcaaacgatgctgcttgcacgcgtcagcgatatggaagaaatcgtcttgcgcatcgcaccgctgatccctcaggtcatcgcacagttccagcaaaaagccaccgaccgcatgcaggaagcactgggcctggctgtcagaaacggggacgctaacgcacagtcggccatcagccgtgaagaagcgctggacagaatccgtcaggaagtcacgctgtacggcatacgcgtcgatgtggcggaagagctgacccgtctgtccgcacacttgggcgaaacccgcgttatcctggaaaaaggcggtcaggtcggcaaacgcctggacttcatgatgcaggagctcaatcgcgaagccaatacagtcggctccaaggctgcgctcaaggaattgtccgacgcttcaatggcgatgaaattgctgatcgaacaaatgcgcgaacaggtgcaaaatctggaataa

SEQ ID NO: 125399 - protein, 300 aa, Herminiimonas arsenicoxydans
MTGYAVTTHETSNGTLTIEIKSVNSRFLDLQFRINDDLRALEPSLREAIMARVTRGKVECRLSFGRKVATDTTQALNATALNALAALQTDLRRQFTDAAPLSVGELLRWPGVIEEAEMSQDTLQADVIAAMQTTMTAFVESRAREGNALQTMLLARVSDMEEIVLRIAPLIPQVIAQFQQKATDRMQEALGLAVRNGDANAQSAISREEALDRIRQEVTLYGIRVDVAEELTRLSAHLGETRVILEKGGQVGKRLDFMMQELNREANTVGSKAALKELSDASMAMKLLIEQMREQVQNLE

SEQ ID NO: 125400 - DNA, 864 bp, Erwinia carotovora subsp. atroseptica SCRI1043
  CDS (1)..(864): transl_table=11
atgattcgcagcatgaccgcttacgcccgccgagaaatcaagggcaactggggaagcgcagcctgggaactgcgttccgttaaccagcgctatctggaaacctatcttcgtttaccggaacaattccgcagcctcgaacccgtcgcccgtgagcgcatccgcgcccgtttgacacgcggcaaaatcgaatgcaacctgcgctttgaactcgacccaagtgcacaaagtgcgttgatcctgaacgaaaaactggctaaacagctggttaatgccgctaactgggtcaaaatgcagagcgacgagggtgaaatcaacccggtcgatattctgcgctggccgggagtgatgttggcagaagagcaggatctggacaccatcagcactgagctactgaaagcactggaaggtgcgctggatgacttcatcgccgcccgtgaaagcgaaggcaacgcgttgaaagccctgatcgaacagcgtctggctggtgttagcgccgaagtgaccaaagtccgtgcccagatgccgaacgtcctgctatggcagcgcgagcgcctgcaaagcaagctggaagatgcgcaggtacagttggaaaataaccgtctggaacaggaactagtgctgatggcgcagcgcgtcgacgtcgccgaagaactcgaccgcctcgatgctcacgtcaaagaaacctacaaaatcctgaaaaaagaagaagccgtcggccgccgcctcgacttcatgatgcaggaattcaaccgcgaatcgaacacgctggcctcgaaatccatcaacgccgacgtaaccgcttcagcaatcgagttgaaagtgctgatcgagcaaatgcgggaacagattcagaacatcgagtag

SEQ ID NO: 125401 - protein, 287 aa, Erwinia carotovora subsp. atroseptica SCRI1043
MIRSMTAYARREIKGNWGSAAWELRSVNQRYLETYLRLPEQFRSLEPVARERIRARLTRGKIECNLRFELDPSAQSALILNEKLAKQLVNAANWVKMQSDEGEINPVDILRWPGVMLAEEQDLDTISTELLKALEGALDDFIAARESEGNALKALIEQRLAGVSAEVTKVRAQMPNVLLWQRERLQSKLEDAQVQLENNRLEQELVLMAQRVDVAEELDRLDAHVKETYKILKKEEAVGRRLDFMMQEFNRESNTLASKSINADVTASAIELKVLIEQMREQIQNIE

SEQ ID NO: 125402 - DNA, 879 bp, Symbiobacterium thermophilum IAM 14863
  CDS (1)..(879): transl_table=11
ttggcgcgcagtatgacggggttcggacggggcgaggccagcggcgaagcgggcagggtgaccgtcgaggtgaaggcggtcaaccaccggttttccgaggtcgtcttccgcatgccccgccagttcagcgccctggaggaccgggtgcgccggctgatccaggggcggacggcccggggccgtttcgaggtgtacgtcgcgtgggagccctcggccgaggcccgggcggtaaaggttgacaaggatctggcgctggcatattataatgctttgaggcagctagcggaagagatcgggagcaatcaggagctttcgctcgatacgctggcgagactgcctgaggtcctctctgttcaggagggggagctttccgacgacgagatctgggccctgctggagccggcgctgacgcaggcgatggcggggctgatcgccatgcgggagcgggagggcgccgccctggccgcggacctggccggccgcctggaccgcctggaggcgttccgggccgcggccgcggctcgtgcaccgcaggtggtggaggagtaccgccagcggctcacccgccgcctggaggagctgttgccgccgaccaacccggtcgatccgcagcggctcgcccaggaagtggccctgttcgccgaccgtgcggacatcacggaggagctgcagcggctggccagccacatcgaccagttccgccgggcgctggagaccgacgacgccgtgggacgcaagctggacttcctggtccaggagatggggcgcgaggtgaacaccatcgggtccaaggccaacgacgccgacctggcggcggcggtcgtggcggccaagagcgagctggagaagatccgggagcaggtccagaatctcgaatag

SEQ ID NO: 125403 - protein, 292 aa, Symbiobacterium thermophilum IAM 14863
MARSMTGFGRGEASGEAGRVTVEVKAVNHRFSEVVFRMPRQFSALEDRVRRLIQGRTARGRFEVYVAWEPSAEARAVKVDKDLALAYYNALRQLAEEIGSNQELSLDTLARLPEVLSVQEGELSDDEIWALLEPALTQAMAGLIAMREREGAALAADLAGRLDRLEAFRAAAAARAPQVVEEYRQRLTRRLEELLPPTNPVDPQRLAQEVALFADRADITEELQRLASHIDQFRRALETDDAVGRKLDFLVQEMGREVNTIGSKANDADLAAAVVAAKSELEKIREQVQNLE

SEQ ID NO: 125404 - DNA, 864 bp, Mannheimia succiniciproducens MBEL55E
  CDS (1)..(864): transl_table=11
atgatttacagcatgacagcctttgcacgccacgagatcaaaaaagattggggcgatgccgtatgggaaatccgttccgttaatcaacgttatttggaaaatttttttcggttgccggaacagtttcgcggtttagaaaacaatctgcgcgaaaaactgcggcaaaaccttacgcgcgggaaaatcgaatgcagtttacgcatcgacagtaaaaaacaaaccagtgccgaactgaatttaaataaagatctcgccgaacaggttattcagtccctaaaatggattaaacaacaagcgggtgaaggggaaattaatttaaatgacgtgttacgttatcccggtgtagtagaagcgccggaacaggatcttgacgccatcagccaggatttattaaacgctttcgacgaattattaaaagacttcattgccatgcgtgcccgcgaaggggaaaaattacacaccgttattcggcagcgtctggacgctatttcagtggaggccgataaagtgcgcgcacaaatgccggaagtgctgcaatggcaacgcgatcgcattctgcaacgttttgaagaaatccaactgcaaccggatccgtcccgtttagaacaggaaatggtgttgttggcgcaaagaattgatgtggcggaagaacttgaccgcctgcaaatgcatgttaaagaaaccgcctcgattctgaaaaaaggcggtgcggtcgggcgtaaactggattttatgatgcaggaattaaatcgcgaatcaaataccctcgcctcaaagtcaattaatgcggatatcaccgcttccgccgtggaattaaaagtattaatcgaacaaatgcgcgaacaaattcaaaatttagaataa

SEQ ID NO: 125405 - protein, 287 aa, Mannheimia succiniciproducens MBEL55E
MIYSMTAFARHEIKKDWGDAVWEIRSVNQRYLENFFRLPEQFRGLENNLREKLRQNLTRGKIECSLRIDSKKQTSAELNLNKDLAEQVIQSLKWIKQQAGEGEINLNDVLRYPGVVEAPEQDLDAISQDLLNAFDELLKDFIAMRAREGEKLHTVIRQRLDAISVEADKVRAQMPEVLQWQRDRILQRFEEIQLQPDPSRLEQEMVLLAQRIDVAEELDRLQMHVKETASILKKGGAVGRKLDFMMQELNRESNTLASKSINADITASAVELKVLIEQMREQIQNLE

SEQ ID NO: 125406 - DNA, 867 bp, Legionella pneumophila subsp. pneumophila str. Philadelphia 1
  CDS (1)..(867): transl_table=11
atgattcatagtatgacggctttttctcgaatacaaaagcagtttgatgtaggtgatttttgttgggaaatcaggtctgttaaccatcgctatctcgatgtctcttttcgtttgccggagtcctttcgatttcttgaagcagaattaagaactttgcttcgggataagatacatcggggtaaactggagtgccatctaaagtacaaggatacaagttgtgataatcggtctatgcttataaatataggtacgattaatgcattacttgatttaagcagtaaattatctgcttctcatcatctggctaatgatatgactgtcagtcaagtgctttcatggccaggcgttgtggaggctaatctgctggatatggaggaattgtctcaaattgctttggagttatttcagaaaagtatcgataaattgtgtgaagtcagagctggggaaggcaggtcattaaaggcatatgttgaagaccgattgcaggctttgcgccaagaagtaatgaaatccaaaagcattgtggtttcaatgagtgccaagactaaagataaattacttacgcgtttgcatgaattgcaaatggacgttccagaggcgcgtgtagagcaagaaattgccttgctactagccaaacttgatgtgagtgaagagttggacaggttagagactcatatagcggaagtaagccgcactttgaatgcagaaaaggtgacgggtagaagactggattttttaatgcaagaattaaatagagaggcgaataccctaagctcaaaatcggattcagcagagttaactttatgtgctgttgaaatgaaagtattgattgagcagatgcgtgaacaaattcagaattttgagtaa

SEQ ID NO: 125407 - protein, 288 aa, Legionella pneumophila subsp. pneumophila str. Philadelphia 1
MIHSMTAFSRIQKQFDVGDFCWEIRSVNHRYLDVSFRLPESFRFLEAELRTLLRDKIHRGKLECHLKYKDTSCDNRSMLINIGTINALLDLSSKLSASHHLANDMTVSQVLSWPGVVEANLLDMEELSQIALELFQKSIDKLCEVRAGEGRSLKAYVEDRLQALRQEVMKSKSIVVSMSAKTKDKLLTRLHELQMDVPEARVEQEIALLLAKLDVSEELDRLETHIAEVSRTLNAEKVTGRRLDFLMQELNREANTLSSKSDSAELTLCAVEMKVLIEQMREQIQNFE

SEQ ID NO: 125408 - DNA, 870 bp, Methylococcus capsulatus str. Bath
  CDS (1)..(870): transl_table=11
atgatccgcagcatgacggctttcgggaccgcgcaagggacggtgggaaactggcgggtgagctgggacctgcgtgccgtcaatcatcgctatctcgatgtcggcctgcgcctgccggatcccctgcgcggcctggaactggcggtgcgcaacaggataggcgagtcgttcaagcgggggcgggtggactgcaccctgacgtggagaccctcggcgccggaagccggcccgacatgtatcgacaccgcgctggtacgcggcctgctcggtgcgctgcgaaacgtcgaagcgctggaagaccgcagctggaccggcctgagcgccatcgaactgctgcgctggccaggcgtcatgcaggaaagcgagccggacctcgccacgctcgaacccgggctcctcgccgtgctcgaccgggcgctggccgaggcgcgggcgttccgtgagcgcgagggcgcccagatcgccgcgttgctggacctgcgctgtgccgacatccagcgcgcggtcggcgcggtacgggagcgcctgccggcgattctcgccggtatccggaacaaactgagggcgcggctggccgaactggccgccgagcccgatgccgcccgcctcgaacaggaactggtctacctcgcgcagaagatggacgtcgccgaagagctggatcgactgaccgcgcataccactgaaatgcggcacatcctcacccaacgggaacccgcggggcgccgcctggatttcctgatccaggaaatgaaccgcgaggccaacacgctggcgtccaagtcggccgatctggagaccacccgcgcggccgtggacatcaaggtactgatcgagcagatgcgcgaacaggtccagaacgtggagtga

SEQ ID NO: 125409 - protein, 289 aa, Methylococcus capsulatus str. Bath
MIRSMTAFGTAQGTVGNWRVSWDLRAVNHRYLDVGLRLPDPLRGLELAVRNRIGESFKRGRVDCTLTWRPSAPEAGPTCIDTALVRGLLGALRNVEALEDRSWTGLSAIELLRWPGVMQESEPDLATLEPGLLAVLDRALAEARAFREREGAQIAALLDLRCADIQRAVGAVRERLPAILAGIRNKLRARLAELAAEPDAARLEQELVYLAQKMDVAEELDRLTAHTTEMRHILTQREPAGRRLDFLIQEMNREANTLASKSADLETTRAAVDIKVLIEQMREQVQNVE

SEQ ID NO: 125410 - DNA, 891 bp, Silicibacter pomeroyi DSS-3
  CDS (1)..(891): transl_table=11
atgatcagatccatgaccggttttgcctcggcgcgcggcgagatggcgccattcagctggagctgggagctgcgcagcgtcaatgccaaggggctggacctgcgcctgcgcgtgcccgattggctggaagggttggaaaccgcgatccgcgccgatctgggcaaggcgctgggtcggggcagcgtcacgctcagcctgcggctgtcccggggcgaagagggcgcggcgctggcgctgaaccccgccgcgctgtcggcggtgctggacgcgctgtccgaggtcgaggatcaggcgatgacgcgcggcatgacgctggcgccctcgcgcgcggcggaccttctggcgctgcgcggggtgctggaggcgggtggcggcagcgacgacccggcaccgctggtaaagcggctgaaggccgagctgggcccgctgattgccgcattcctgcagatgcgcgagaccgagggagccgcactggccgaaatcctgcaaggcaacctgatccgtgtcgcggatctgaccgcgcaggcggcggcgctggctgaagcgcgcaaaccgctggtggccgagacgctgcgcgccaatctggcccgagtgctggacaatacggacggcgccgatcccgaccgggtggcgcaggaattggccatgcttgccgtcaaagccgacgtgaccgaggaactggaccgcctgcaggcccatatcaaggccgcccgcgacctgctggccaagggcggcgcggtggggcgcaagctggatttcctgatgcaggaattcaaccgggaagcgaacactctgtgttcgaagtcacaaaacgctgatctgaccggggtagggttggagctgaaagcggtgatcgaccagatgcgcgaacaggtccagaatgtggaataa

SEQ ID NO: 125411 - protein, 296 aa, Silicibacter pomeroyi DSS-3
MIRSMTGFASARGEMAPFSWSWELRSVNAKGLDLRLRVPDWLEGLETAIRADLGKALGRGSVTLSLRLSRGEEGAALALNPAALSAVLDALSEVEDQAMTRGMTLAPSRAADLLALRGVLEAGGGSDDPAPLVKRLKAELGPLIAAFLQMRETEGAALAEILQGNLIRVADLTAQAAALAEARKPLVAETLRANLARVLDNTDGADPDRVAQELAMLAVKADVTEELDRLQAHIKAARDLLAKGGAVGRKLDFLMQEFNREANTLCSKSQNADLTGVGLELKAVIDQMREQVQNVE

SEQ ID NO: 125412 - DNA, 885 bp, Neisseria gonorrhoeae FA 1090
  CDS (1)..(885): transl_table=11
atgagcagcggaaatatccgcatccacagcatgaccggctttgccaacgcggcggcagagtgcggcagcaaacgcatcaacctcgacatccgcgccgtcaaccaccgctttttggacattcaaatcaggatgcccgacgatttgcgccatttggaaaacggcatccgcgagcagatttcatcccatctggcgcgcggcaaagtcgaatgcaaaatccaaattcaagatgcggaaaacggcaatcagtctttggaactgaatcgcgttctggtcggacagcttgccgaaatcaacaaaaacctccgcaaacattatgatttggcaaaactgggcgttgctgatattttgcgctttccgggcgtattggcaagccaaaaggaaaatacggaagcattggcgaaaaccattgtcgaactggccgacaaagcactaaaagactttaccgccgcacgtcggcgtgaagggaaaaaattgggcgaacacctgttacaacgcattaaaaacatggaagaaatcatcgatgctttgagcgaaatcttccccgcgctggtggaagcgcataaagaaaaaatccgcacccgccttgccgaagccgtcggcagcatcgacaacgacaggctgcaacaggaatttgccctctttatccaaaaatccgacatcgacgaagaattcagccgcctgcgcacccacattgccgaagtgcgccgtatcgttaccgaacacaaaggcagcagcggcaaacggttggacttcctgatgcaggaactgaaccgcgaagccaacactttgggcagcaaatccatcgctaccgaatgcacccaagcctcggtcgagctgaaagtcctgatcgaacagatgcgcgaacaggtgcagaatatcgaataa

SEQ ID NO: 125413 - protein, 294 aa, Neisseria gonorrhoeae FA 1090
MSSGNIRIHSMTGFANAAAECGSKRINLDIRAVNHRFLDIQIRMPDDLRHLENGIREQISSHLARGKVECKIQIQDAENGNQSLELNRVLVGQLAEINKNLRKHYDLAKLGVADILRFPGVLASQKENTEALAKTIVELADKALKDFTAARRREGKKLGEHLLQRIKNMEEIIDALSEIFPALVEAHKEKIRTRLAEAVGSIDNDRLQQEFALFIQKSDIDEEFSRLRTHIAEVRRIVTEHKGSSGKRLDFLMQELNREANTLGSKSIATECTQASVELKVLIEQMREQVQNIE

SEQ ID NO: 125414 - DNA, 864 bp, Colwellia psychrerythraea 34H
  CDS (1)..(864): transl_table=11
atgatctacagcatgaccgcattctctcgcattgaaattaaaggcgattggggcaacgccgtttgggaaattcgctcagttaatcaaaggtttcttgaaacctattttcgtttgccagaacaatttcgtggcatagagcctgttttacgtgagcgtttccgtaaacaacttaatcgcggaaaagtagaatgtaacttacgttttaatgccaaccctgcaaataaaagcgaattagcgcttaatgaaaatttggcgctgcaactcattcagcatgctaattggattaatgagcaaacactaaacagcaaagtaaatcctttagaagtaatgcgctggcctggtgtgatggaagcacctgaaagcgatatgtctgccattcaagctgaattacttgctgcttttgatcaagcgctaaaagactttattgctgctcgtgccagcgaaggtgaaaacctaaaagctatgattgaacaacgccttgatgcaatagctagcgaagctgataaagtagcagcgcatatgccagacgtcattgcttggcagcgtaatcgcattatcgaaaaattcaccgatgctaaaatcgatttagactcgggccgtgttgagcaagagttagttttattggcgcaaaaaatggatgttgccgaagagcttgaccgtttaaacagccatgtcactgaaacgaagaaaatattgaaaaaaggtggcgcacaaggtcgtcgtttagatttcatgatgcaagagtttaaccgcgaagcaaataccctaggctcaaaatcgattaataccgatatcacggcaagcgctgttgaattaaaagtactaatcgaacagatgcgtgagcagatcgcgaatatcgaataa

SEQ ID NO: 125415 - protein, 287 aa, Colwellia psychrerythraea 34H
MIYSMTAFSRIEIKGDWGNAVWEIRSVNQRFLETYFRLPEQFRGIEPVLRERFRKQLNRGKVECNLRFNANPANKSELALNENLALQLIQHANWINEQTLNSKVNPLEVMRWPGVMEAPESDMSAIQAELLAAFDQALKDFIAARASEGENLKAMIEQRLDAIASEADKVAAHMPDVIAWQRNRIIEKFTDAKIDLDSGRVEQELVLLAQKMDVAEELDRLNSHVTETKKILKKGGAQGRRLDFMMQEFNREANTLGSKSINTDITASAVELKVLIEQMREQIANIE

SEQ ID NO: 125416 - DNA, 867 bp, Dechloromonas aromatica RCB
  CDS (1)..(867): transl_table=11
atgatctgtagtatgactggttatgccgttaaaacgcgcgatattgagcgcggaacactgcaacttgagcttaaaagcgtcaattcccgctatctcgattttcatttccgcgtcagtgatgaattgcgctcgctggaaatgcccctgcgtgaattgctggccgcgagattatcacgcggcaaagtggaatgccgactctctttcaatgcctcggcggcccgtgccgatcagctgcaactcaatggcgaactgctcgcgtcactgaagctgctgagcgagcgtgtgcggcatgaaatgcccgatgccagcccgctatcggtcaacgaaaccctgcgctggccaggcatgttcggcgaccaaagcgtcgatttcgctgcttttggaccggtcgtcatggcgctggcgcgcgaggtgctcgatgaatttaccgccagtcgggggcgcgaaggcgacaagctggcggcgatgatcgtcgagcgcgtcaatggcatgcgcgacatcgtgcgccgggtggcaccccgtattcctgaagcccaggcgatattcaccgacaagctgcgtcaacgtttgaccgaagcgctgggcaacgccagtgacgatcgcatcctgcaggaagtggccgttttcgcgacccgaatcgatgtcgccgaagagctttcacggctgactacccacctcgatgaagtcgagagggtgctgaagcaggggggcgcctgtggcaagcgcctcgatttcctgatgcaggaactcaatcgtgaagccaataccctgggctccaagtcggcaattaccgaggtttcacaggcgtcgatggatctcaagctgctgatcgaacagatgcgcgaacagatccaaaatttggagtga

SEQ ID NO: 125417 - protein, 288 aa, Dechloromonas aromatica RCB
MICSMTGYAVKTRDIERGTLQLELKSVNSRYLDFHFRVSDELRSLEMPLRELLAARLSRGKVECRLSFNASAARADQLQLNGELLASLKLLSERVRHEMPDASPLSVNETLRWPGMFGDQSVDFAAFGPVVMALAREVLDEFTASRGREGDKLAAMIVERVNGMRDIVRRVAPRIPEAQAIFTDKLRQRLTEALGNASDDRILQEVAVFATRIDVAEELSRLTTHLDEVERVLKQGGACGKRLDFLMQELNREANTLGSKSAITEVSQASMDLKLLIEQMREQIQNLE

SEQ ID NO: 125418 - DNA, 867 bp, Thiobacillus denitrificans ATCC 25259
  CDS (1)..(867): transl_table=11
atgaccaccagcatgaccgggttcgccgcccacagcttcaatgtcgaccatgcgagcgtcaatgtcgagctgcgaagcgtcaaccaacgttatctcgaactgcacttccgcctcgccgatgagttccgtccgctcgaaacgcagctgcgtgaactgcttcagcagcgcctggcgcggggcaaggtcgagtgcaggatcggcctggcgcacctgtccgccgccccgcccgataacggcctgaatccggccattcttgagcggctggtgcgttggcaggacgacgtgctcgagcggctccccggcgccgcccccttgagcgtcaacgaagtgctgcgctggccgggggcgatgcaaaacgccgtggtatcgcaggcgacgctcgacgaggcagcgctcgccgggtttcgcgcagccctcgacgaactcgtggaaagccggcgccgcgaaggcgccaagctgcggcagcacatcctcgatcgcctcgatgccgccgaggcgcaggtcgccgtcctgaagccgctgctgcccgttcttgccgcagcccagcgcgagaaactcggcgagcgcctgcgcgaggccctcggcgaggccggccacgagcggctcgcccaggaagtggcgctcgccgcccagaaggtcgacgtcgacgaggaagtgtcgcgcctggctacccacttcaccgaggtgaggcgcgtgctcgatcagtccggcgcggtcggcaagcgcctcgacttcctgatgcaggaattgcatcgcgaagcgaacacgctcggctcgaagtcggtcgcggtcgagacctcgcgcacctcgctcgaactcaaggtgctgatcgagcagatgcgcgagcaggtgcagaatattgaatga

SEQ ID NO: 125419 - protein, 288 aa, Thiobacillus denitrificans ATCC 25259
MTTSMTGFAAHSFNVDHASVNVELRSVNQRYLELHFRLADEFRPLETQLRELLQQRLARGKVECRIGLAHLSAAPPDNGLNPAILERLVRWQDDVLERLPGAAPLSVNEVLRWPGAMQNAVVSQATLDEAALAGFRAALDELVESRRREGAKLRQHILDRLDAAEAQVAVLKPLLPVLAAAQREKLGERLREALGEAGHERLAQEVALAAQKVDVDEEVSRLATHFTEVRRVLDQSGAVGKRLDFLMQELHREANTLGSKSVAVETSRTSLELKVLIEQMREQVQNIE

SEQ ID NO: 125420 - DNA, 891 bp, Rhodobacter sphaeroides 2.4.1
  CDS (1)..(891): transl_table=11
atgatcagctcgatgaccggcttcgcggcgcgccgcggccagggcgagggccactcctggctctgggaactgcgctcggtgaacggcaagggcctcgatctgcggttgcgggtgccggactggatcgaggggctggagcccgcgatccgggccgaactcggccgggttctgcaacggggcagcgtcagcctctcgctcaaggtcgcggccgagggcggaacggacgggctccgggtcaacgtcggcgcgctccagtcgatgctgcgcgcgctggccgaggtttcggcggctgcgcacggctcggggatcgagctgcgcccggcgagcccggccgacgtgctggggctgcgtggcgtcctcgaacaggcgacgggggtcgaggatacgggcccgctccgcgcggcgctgctggccgaactgccggagctgctggcggccttcaccgagatgcggcgcagcgagggcgaggctctggcccggctgatcggcgcgcagctcgaccggatcgaggcgcttactgccgaggcccgcaccgaggccgaggcgcgccgcgaggccgcgccattcgcgcttcgtgaaaatctggcccgtctcctcgcggcaggcgagggtctcgacgagacccgcatcgcgcaggagctggcgcttctggccgtcaagcaggacgtgaccgaagagctcgaccggctggcggcccatgtcgcggccgcccgcacgcttctgggcgagacggcgcccgtggggcggcggatggatttcctcgtgcaggagttcatgcgcgaggccaacacgctctgctcgaaggcgcagtcgctggcgctgacgcgggtcgggctcgacctgaagaccgtcatcgaccagatgcgcgagcagatccagaacgtggagtaa

SEQ ID NO: 125421 - protein, 296 aa, Rhodobacter sphaeroides 2.4.1
MISSMTGFAARRGQGEGHSWLWELRSVNGKGLDLRLRVPDWIEGLEPAIRAELGRVLQRGSVSLSLKVAAEGGTDGLRVNVGALQSMLRALAEVSAAAHGSGIELRPASPADVLGLRGVLEQATGVEDTGPLRAALLAELPELLAAFTEMRRSEGEALARLIGAQLDRIEALTAEARTEAEARREAAPFALRENLARLLAAGEGLDETRIAQELALLAVKQDVTEELDRLAAHVAAARTLLGETAPVGRRMDFLVQEFMREANTLCSKAQSLALTRVGLDLKTVIDQMREQIQNVE

SEQ ID NO: 125422 - DNA, 879 bp, Geobacter metallireducens GS-15
  CDS (1)..(879): transl_table=11
atgatcaagagtatgaccggctacggcaaggccgtggtcgaaacggaaacagggcggaccaccgtcgagatacggtcggtgaaccaccgctacggcgaggtcttcgtcaagatgccccgctcgttcctggccttcgagaatgacgtgcgcaaggccgtgggggaccgtctgaagcggggaaagatcgaagtcttcgtgcagcgtgaggagggagttggcggtcagaatcagccgctggtgaaccttcccctggcacgggcctaccgtgatgcgttcgagcggatgcggtccgaacttggtctggctgatccggtgaccctgccgctcctcctctcccagcgggacgtcctggctgcccgggaggagggggccgatgaggatatcctccggggcgagcttctccaggcggttcgtggcgcggtggaggccatggaggccatgaggatgcgcgaaggcgaagcgctcctggccgatctcagggaccgccgccagacccttgcgacgctcattgaccgggtggccgagcgtgcacccgccgtggtcgctgactatgcccagaagctgcgggagcggcttgcgcagcttctcgccgatacgaccctcgacgaagcgcggctcgcccaggaggtggcgctactggccgaccggtgcgatgttaccgaggagttggtccgtttccggagccacctgatccagttcgacgagacccttgcccttgcggagccggtggggcgcaagctggatttcctcatgcaggagctgaaccgcgaggtcaataccatcgggtccaaggccaatgacgccgccatggccgccatcgtggttgaactgaaggccgaactggaaaagatccgtgaacaggtacagaacatagaatag

SEQ ID NO: 125423 - protein, 292 aa, Geobacter metallireducens GS-15
MIKSMTGYGKAVVETETGRTTVEIRSVNHRYGEVFVKMPRSFLAFENDVRKAVGDRLKRGKIEVFVQREEGVGGQNQPLVNLPLARAYRDAFERMRSELGLADPVTLPLLLSQRDVLAAREEGADEDILRGELLQAVRGAVEAMEAMRMREGEALLADLRDRRQTLATLIDRVAERAPAVVADYAQKLRERLAQLLADTTLDEARLAQEVALLADRCDVTEELVRFRSHLIQFDETLALAEPVGRKLDFLMQELNREVNTIGSKANDAAMAAIVVELKAELEKIREQVQNIE

SEQ ID NO: 125424 - DNA, 888 bp, Rhodospirillum rubrum ATCC 11170
  CDS (1)..(888): transl_table=11
atggccctttcgagcatgaccggttttgcccgtacccagggggccctggggccgcagacctgggtctgggaggcgcgcagcgtcaatggcaagggtctggatatccgcctgcgcctgccaccgggcggcgacgcccttgaccagccggcccgccgcgccgtggccgagcgtttcaagcgcggttcgatctcgcttggcctgaccatgaccagcgacgatcaggaacaggcctatcgggtcaatgagccgctgctcaaaaagctgctggccgtgacccgcgagttggcgatggacggggtggaccggccgcgcatggatggcctgctcgggttgcgcggcgtgcttgaaccggttggccaagccgaagaggagggcgtccgcgaggcccgcgaggcggcccagctgcgcagcctggaagccacccttgacgccctggccctggcgcgcagcgaggaaggcgggcgtctggccggggtgctggcggggcatctcgaggttttggaagacctgcgcgcccaggccgccaacgccgaggccctgcgccccgacatggtgcgcgcccgcctgcgccgtcagatggccgacctgcttgaggccgcccccgatgccctgcccgaggagcggctggcccaggaactggccctgctggcggtcaaggccgatatccgcgaagagcttgatcgcctgggcgcccacctggaaggggcgcgcgagctgcttacccgcggcgaggcgatgggccggcgcttggagttcctgtcccaggagctgaaccgcgaggccaacaccctgtgctcgaaatcctccgacgtcgccttgacccgcatcgggttggacatgaaggcggtgatcgaccaattccgcgaacaaatcctcaatatcgaatag

SEQ ID NO: 125425 - protein, 295 aa, Rhodospirillum rubrum ATCC 11170
MALSSMTGFARTQGALGPQTWVWEARSVNGKGLDIRLRLPPGGDALDQPARRAVAERFKRGSISLGLTMTSDDQEQAYRVNEPLLKKLLAVTRELAMDGVDRPRMDGLLGLRGVLEPVGQAEEEGVREAREAAQLRSLEATLDALALARSEEGGRLAGVLAGHLEVLEDLRAQAANAEALRPDMVRARLRRQMADLLEAAPDALPEERLAQELALLAVKADIREELDRLGAHLEGARELLTRGEAMGRRLEFLSQELNREANTLCSKSSDVALTRIGLDMKAVIDQFREQILNIE

SEQ ID NO: 125426 - DNA, 879 bp, Moorella thermoacetica ATCC 39073
  CDS (1)..(879): transl_table=11
atgttgaacagcatgacgggctacggccggggcgaggccagcggcgccggcaaaaccgtgagcgtcgagatccgggccgtcaaccagcgcttcctggacgtagtagtgcgcctgccccgggcctacggcgccctggaagaaaagatccgtcaggagttgaaaaaaagcctcaaccggggccgtgtcgaggtagtactgactataaaggaagataatgcggaaaaacggcccgtcaacgttgacacgggactggcaatggcgtattataatgctttgaaggaattggctcaaaaattgtctatttcggcggatattaccgctgccgggctgttatccctgccggaagtcatcacagtagccgaaccggagtgggacgaggctactttatggccggtggtagccagggccctggcagcggccctggcaggtctcctggaaatgcgccgggccgaggggcagcgcctccaggccgacctggaggcccgggccgcttttgtccgccgccaggtggaagccatccgcgagcgcgcgccggaggtgccgcgggaatacgccgcccgcctgcgggagcgcgtggacgaactgaccggcggtatggccctcgacccgggccgcctggagatggaagtagccctgatggcggagcgcgctgacatcaccgaagaggtcgtccgtcttaccagccacctggagcagatgcaggccgccatggctggcgccgaaccggccgggaggcggctggactttatcctccaggaaatgtggcgggagataaataccatcgggtccaaggccggcgatctgaccatcagccacctggtagtagcggtcaagggcgagctggaaaagatgcgcgagcaggtccagaacatcgagtag

SEQ ID NO: 125427 - protein, 292 aa, Moorella thermoacetica ATCC 39073
MLNSMTGYGRGEASGAGKTVSVEIRAVNQRFLDVVVRLPRAYGALEEKIRQELKKSLNRGRVEVVLTIKEDNAEKRPVNVDTGLAMAYYNALKELAQKLSISADITAAGLLSLPEVITVAEPEWDEATLWPVVARALAAALAGLLEMRRAEGQRLQADLEARAAFVRRQVEAIRERAPEVPREYAARLRERVDELTGGMALDPGRLEMEVALMAERADITEEVVRLTSHLEQMQAAMAGAEPAGRRLDFILQEMWREINTIGSKAGDLTISHLVVAVKGELEKMREQVQNIE

SEQ ID NO: 125428 - DNA, 867 bp, Saccharophagus degradans 2-40
  CDS (1)..(867): transl_table=11
atgccacgcagcatgacgggctttgcacgattagaacaacaatacgactggggcaccctctcctgcgaagttcgcacagtaaaccaccgctatttagaacccactattcgcatgcccgaatccttgcgtgccaccgagcccaaattgcgcgatcaaatacgcaaaaaactcagccgcggcaaagtagaagccaacgtgcacctgcgcacagaagcggccgactcctctaaccttggcttaaaccttactctagcaaaacaattggcaaaaatgagtgagcaactaagcgcagaactggctaacgccgcccccattaacccagtagagattctgcgctggccgggcgtaattcaaaccgcagaagtagacgccgaagtactgcaagctgccaccaccgagctatttaataaaacgctggaccagctcatcgccaaccgcgaccgcgaaggcgccgaactaggccaacttatagagcagcgcctaaacgccattgccgagcatgtggtagacgtacgcaagcgcgtacccgaaatacttgcccaatttcaagaaaagctacacgcaaaactagaagcgctaaaaatagaagtagacgaagatcgcttccaccaagaagttgtttacgtaacacaaaaatccgatgtagcagaagagctagaccgccttgaagcacacctaaccgaagtgcgcctagccctaaaacaaaaaggccccatcggccgccggttagattttttaatgcaagaattaaacagagaagccaacacactctcatcgaaatccatggcgagtgacaccactcaaaccgctgtagatttaaaagtacttatcgaacaaatgcgcgaacagattcaaaatatcgaataa

SEQ ID NO: 125429 - protein, 288 aa, Saccharophagus degradans 2-40
MPRSMTGFARLEQQYDWGTLSCEVRTVNHRYLEPTIRMPESLRATEPKLRDQIRKKLSRGKVEANVHLRTEAADSSNLGLNLTLAKQLAKMSEQLSAELANAAPINPVEILRWPGVIQTAEVDAEVLQAATTELFNKTLDQLIANRDREGAELGQLIEQRLNAIAEHVVDVRKRVPEILAQFQEKLHAKLEALKIEVDEDRFHQEVVYVTQKSDVAEELDRLEAHLTEVRLALKQKGPIGRRLDFLMQELNREANTLSSKSMASDTTQTAVDLKVLIEQMREQIQNIE

SEQ ID NO: 125430 - DNA, 867 bp, Methylobacillus flagellatus KT
  CDS (1)..(867): transl_table=11
atgattttcagcatgacgggttatgcctcgctggagcaagaggtgagccatggtgttctggtgctagaactgcgctcggtcaatcatcgctacctcgaattacaactcaagctggatgacaatgtgcgcatgttcgaaccacaggtgcgcgagctgatcggccagcgcctcaagcgtggcaaggtggaatgccgcatcagcctggctcagcgtgataccgagcaacggcaagtgcaactggatgatacggtattgcagcaattagcacagatgatggtcagcgtgcagcgccattttccggaaagccggcccttgagcgtggcggacattctgcgatggccgggggtagtgtcgagtgaagggatagaccacgaagccctgtcgatcgccattcgtgaaagcctgatgaagctggtgcagcagatgaccgaagcacgcgcacgcgagggcgccaagctcaaggccatcattgtcgaccgcctggcggaaatggaaactctggttgacagggtgcgtcccttgcttcctgagcaggtcaatatctaccgggagcgcctttatggcaaattgcaggatgcgatgggttcggcggatgatgagcgtatccgccaggagctcaccatctttgcccagcgtattgatgttgatgaggagctgagccgcctgggcgcgcatatagaggaagtcaagcgcattctcgaggcgggcagcccggcaggtaagcagctggatttcctcatgcaggaattgaaccgcgaggccaatacgctggcttccaagtctgtttccaccgaagtatcacaggccgccatggcactcaagctgctgatcgagcaaatgcgcgagcaggtgcagaacatagaatag

SEQ ID NO: 125431 - protein, 288 aa, Methylobacillus flagellatus KT
MIFSMTGYASLEQEVSHGVLVLELRSVNHRYLELQLKLDDNVRMFEPQVRELIGQRLKRGKVECRISLAQRDTEQRQVQLDDTVLQQLAQMMVSVQRHFPESRPLSVADILRWPGVVSSEGIDHEALSIAIRESLMKLVQQMTEARAREGAKLKAIIVDRLAEMETLVDRVRPLLPEQVNIYRERLYGKLQDAMGSADDERIRQELTIFAQRIDVDEELSRLGAHIEEVKRILEAGSPAGKQLDFLMQELNREANTLASKSVSTEVSQAAMALKLLIEQMREQVQNIE

SEQ ID NO: 125432 - DNA, 948 bp, Burkholderia xenovorans LB400
  CDS (1)..(948): transl_table=11
atggccacaatcgcgagaaatacgatgatctacagcatgactggctatgcgagcgccacgcgcgaactcgtcggggcctcaggcacaggcggcgtgagcgtatcggtcgaactgcgcacggtgaactcgcgctttctcgatctgaacttccgcatgccggaagacgtgcgcgtgagcgaacccacgctgcgcgaaatgttgatgaacaagctgtcgcgcggcaaggtcgatatccgtatcaatctgcaacgcagcgagcagtccgccaacgcgggctcgatcaatcgcgaagcactggcgcaactcgcgctgctcgaacgcacggtgctctccacgtttccggaagcggggcggctgcgtaccggcgaaattctgcgctggcccggcattcttgcggaaagcggcgtggcgcccgaagtgctgcgcgacgccgtgctcgcgtgcggcaagcaggccattacggacctgatcgacgtgcgcgcccgcgaaggtgcgcaactggcgaccatgctgctcgccaacgtcaccgaaatggaagcgatcgtcacgaagatcacgccgctcgtgccggaactgatcgccaagcaccagcagaagattgtcgagcgcttgcaggaagcgctcggtatcgccgcgccggatacggcggcgacgagcgtctcgcgcgaagaaatcaatgaacggattcgccaggaagtgacgatgtacggcatccgtatcgacatcgccgaagaactgtcgcgcctcacggcacacctgaacgaaacgcgtcacgtgatccagaagggcggcaaggtcggcaagcgcctcgacttcatgatgcaggagctcaatcgcgaagcgaacacgcttggttcgaaggcggccgcgaaggaactggcggattcgtcgatgaccctgaagctgctcatcgaacagatgcgcgaacaggtacagaatctggaataa

SEQ ID NO: 125433 - protein, 315 aa, Burkholderia xenovorans LB400
MATIARNTMIYSMTGYASATRELVGASGTGGVSVSVELRTVNSRFLDLNFRMPEDVRVSEPTLREMLMNKLSRGKVDIRINLQRSEQSANAGSINREALAQLALLERTVLSTFPEAGRLRTGEILRWPGILAESGVAPEVLRDAVLACGKQAITDLIDVRAREGAQLATMLLANVTEMEAIVTKITPLVPELIAKHQQKIVERLQEALGIAAPDTAATSVSREEINERIRQEVTMYGIRIDIAEELSRLTAHLNETRHVIQKGGKVGKRLDFMMQELNREANTLGSKAAAKELADSSMTLKLLIEQMREQVQNLE

SEQ ID NO: 125434 - DNA, 936 bp, Ralstonia metallidurans CH34
  CDS (1)..(936): transl_table=11
atgatccacagcatgacaggctatggcctggccacgggccaggcaccgctcaccaacgcccagggcgaaccgagtggccgtaccgcgtcggtttcggtggagttccgcactgtcaactcgcgcttcctcgacctgctgttccgcgcgccggaagagtgtcgcgccttcgagccggccctgcgcgagatgctgatgggcgagctgtcgcgtggcaagctggagtgccggatcaacctccagcgcaccgacaccggcggcgccacgctggcgctgaaccagacactgctcgaccagatccgtgcgctcgaagccaccgtcggggcaacgtttgcttcggccggcacgatgcgcatgggcgaaatcctgcgctggccgggcgtgctggtggagcccgaactgtcgcaggaagccctgcgcgatgccgtgatgggcgccgcccgggaagcgctgaaccagcttctggaagcccgccgccgtgaaggcgcggcgctcaaggccacgctggaggagcggatcgacgccatgctggcgatcgtcgagcgcctgacgccgatgattccgcagttgatcgcccaccaccaggaaaagctgaccgaacgcctgaaggaggcttttaacctggtcgcgccgaacggcatgccgtcaatgagccgcgacgagattgccgagcgcatccgccaggaagccacggtctacggcatccgcatcgacatcgccgaagaactggcgcgcctgcagacccatctcaacgaaacccggcatatcctgaagaagggtggccaggtcggtaagcggctggacttcatgatgcaggagctcaaccgcgaagcgaacacgctcggctcgaaagccgccgcgaaggaactcgccgatgcctcgatggagctcaagctcctgatcgagcagatgcgcgagcagattcaaaacctcgaataa

SEQ ID NO: 125435 - protein, 311 aa, Ralstonia metallidurans CH34
MIHSMTGYGLATGQAPLTNAQGEPSGRTASVSVEFRTVNSRFLDLLFRAPEECRAFEPALREMLMGELSRGKLECRINLQRTDTGGATLALNQTLLDQIRALEATVGATFASAGTMRMGEILRWPGVLVEPELSQEALRDAVMGAAREALNQLLEARRREGAALKATLEERIDAMLAIVERLTPMIPQLIAHHQEKLTERLKEAFNLVAPNGMPSMSRDEIAERIRQEATVYGIRIDIAEELARLQTHLNETRHILKKGGQVGKRLDFMMQELNREANTLGSKAAAKELADASMELKLLIEQMREQIQNLE

SEQ ID NO: 125436 - DNA, 864 bp, Haemophilus somnus 129PT
  CDS (1)..(864): transl_table=11
atgatttacagtatgacggcctttgctcgtgttgaaattaaaaaagaatggggggatgccgtatgggaaattcgctcggtcaatcaacgttatttagaaaccttttttcgtttaccggagcaatttcgaggattggaaaatactttgcgtgaaaaattacggcaaaaactggctcgaggtaaaatcgaatgtagcttgcgtattgacactaaaaaacaaaccgcactcaacttaaatcttaatcaaaagttcgccaaacaggttattcaatctttgcaatatataaaagcacaagccggagagggtgaaatcaatctgatggatattttacgctaccccggtgtagtggaaacgccggaacaagacttggacagtatcatcgaagatttgttgcaagcctttgatgatttgcttgtggagtttattgcaacacgagctcgtgagggagaaaaagttcaaaaattaattgaacaacgccttatggcaatttccgttgaggcacaaaaagtgcggtcttttatgccggaaatattgcaatggcaacgagatcgtttgcaacaacgttttgatgaaattcaattacaagcagatacacaacgtattgaacaagaaatggtgctattggcacaacgtattgatatagctgaagagctggatcggctacaattacatgtaaaagaaacatacgctattttgcacaaaggcggggctgtcgggcgtaaacttgattttatgatgcaagaacttaatcgtgaaagtaatacgcttgcgtctaaatctattaacgccgatattacctcatcagcggttgaattaaaggtcttaattgaacaaatgcgtgaacaaatccaaaatcttgaataa

SEQ ID NO: 125437 - protein, 287 aa, Haemophilus somnus 129PT
MIYSMTAFARVEIKKEWGDAVWEIRSVNQRYLETFFRLPEQFRGLENTLREKLRQKLARGKIECSLRIDTKKQTALNLNLNQKFAKQVIQSLQYIKAQAGEGEINLMDILRYPGVVETPEQDLDSIIEDLLQAFDDLLVEFIATRAREGEKVQKLIEQRLMAISVEAQKVRSFMPEILQWQRDRLQQRFDEIQLQADTQRIEQEMVLLAQRIDIAEELDRLQLHVKETYAILHKGGAVGRKLDFMMQELNRESNTLASKSINADITSSAVELKVLIEQMREQIQNLE

SEQ ID NO: 125438 - DNA, 864 bp, Shewanella sp. MR-4
  CDS (1)..(864): transl_table=11
atgatccaaagcatgacagcctacgctcgcatcgagcacaaagcacaatggggcactgcctcttgggaaattcgctcagtcaaccagcgttatctcgaaacttacctacgtctgccagaacaattccgcagcttcgaacccgtactgcgcgatcgtctgcgtaaacgcttaagccgcggtaaagtcgaggtcaatttacgctacgagttagccgacaacagcaataacgaactcaaattaaaccaagggttagctaagcagttgctcgacgctgccagctggttaaaacaagaagccggccaaggcgaagtcagcctaactgatattttgcgctggccaggcgtgctctcaagctcagagcaagatatggacgccataggcgccgagctattaacggctttcgatttagcgatagaccagtttatcgaagcccgtggccgcgaaggagcagcgattaaagacatgctgttaagccgtttagaaggcgtcgaagaacaaatcgctatcgtgcgcaagcacatgcctaaagtgatggaatatcagcgcgataaactcactaatcgcctcgctgagatcaaaggtgaactcgaccccgcccgcatcgagcaggagatgatcctgttagcacaaaaacaagatgtggccgaagagatggacagactcgaagcccatgtcaccgaagcgcgccgcatcctcaaaaaaggcggcagcgaaggccgccgcttagattttatgatgcaggaatttaaccgcgaatctaacaccctcgcctcaaaatccatcagcaccgaaatcaccgccgccgcagtcgagctcaaagtacttatcgaacaaatgcgcgagcagatccagaacgttgaatag

SEQ ID NO: 125439 - protein, 287 aa, Shewanella sp. MR-4
MIQSMTAYARIEHKAQWGTASWEIRSVNQRYLETYLRLPEQFRSFEPVLRDRLRKRLSRGKVEVNLRYELADNSNNELKLNQGLAKQLLDAASWLKQEAGQGEVSLTDILRWPGVLSSSEQDMDAIGAELLTAFDLAIDQFIEARGREGAAIKDMLLSRLEGVEEQIAIVRKHMPKVMEYQRDKLTNRLAEIKGELDPARIEQEMILLAQKQDVAEEMDRLEAHVTEARRILKKGGSEGRRLDFMMQEFNRESNTLASKSISTEITAAAVELKVLIEQMREQIQNVE

SEQ ID NO: 125440 - DNA, 867 bp, Alkalilimnicola ehrlichei MLHE-1
  CDS (1)..(867): transl_table=11
atgacccgcagcatgaccgccttcgaccgacagcagcaccaggccgagtggggccgcatcagctgggagctgcgctcggtaaaccaccgctacctggatgtgcaaccgcgccttcccgaggagctgcgccacctggagccggccgtgcgcgaacgcatcggggcccgcctgggccgcggcaaggtggagtgcaccctgcggttcaaacccgccgccgactaccgcggccggttgctcatcgacgaggcttacgccgaccaggtgatcgaggccgcccgcgccctgggccagcgcgtgggggccgatccggccgccaccggcctggacctgctgcgtatccccggggtgctgcaggagagcgaccccgacctggagccggtggccaacgccgcattggcgctgctcgatcactgcctggacggtttcgaggccgcccgcgagcgcgagggtgagcgcctggcgcgcatcctgcgcgaccgctcggcccggctcagcgagctggtggaccaggtcagggcgcaacgggaacaggtcaacgaccgggtgcgggagaagttcctcacccgcctggagagcctcgatgtggaggcggacgaggggcgcctggagcaggagctggccattatcgcccagaagctggacgtggacgaggaactggagcggctccaggcccactgcgccgaactggaagacgccctaaagcgccgcgaacccatcggccgccggttggacttcctgatgcaggaattcaaccgcgaggccaacaccctgtcctccaagtccaacgacaccgagaccacccgcgccgcggttgagatgaaggtgctgattgaacagatgcgggaacaggtccagaacatcgaataa

SEQ ID NO: 125441 - protein, 288 aa, Alkalilimnicola ehrlichei MLHE-1
MTRSMTAFDRQQHQAEWGRISWELRSVNHRYLDVQPRLPEELRHLEPAVRERIGARLGRGKVECTLRFKPAADYRGRLLIDEAYADQVIEAARALGQRVGADPAATGLDLLRIPGVLQESDPDLEPVANAALALLDHCLDGFEAAREREGERLARILRDRSARLSELVDQVRAQREQVNDRVREKFLTRLESLDVEADEGRLEQELAIIAQKLDVDEELERLQAHCAELEDALKRREPIGRRLDFLMQEFNREANTLSSKSNDTETTRAAVEMKVLIEQMREQVQNIE

SEQ ID NO: 125442 - DNA, 885 bp, Hyphomonas neptunium ATCC 15444
  CDS (1)..(885): transl_table=11
atgggtacactgtcggggatgacggggttcgcgcgggtaaccggcgaagccagctggggcgggtgggcctgggaggccaaaagcgtcaatggccgctcgctggatgtacgcgtaaacctgccgccgggcgctgagcagctcgagcgtgaggtcaaggccatggcggcagcacgcttcaatcgcggctcgctccaggtcagcctgcgtattgaacttgctgcatcgggcgccgcggccgttatcaatgaggcattgctttcggagctcgcccaggcggcgcgcaaggtttccgggcgcgagctttccgccgaagccatcgcgacactgatgtcggtaaagggcgtcgtcgatgccggatcaagctccacccgcgatataatggatgaggcggtgcttgcgctgctctccactggcgccgcgcaggcgctcgacgagcttgccgaaggacgcaaatctgaaggcgcctcactggagggtcttcttggtgatctcctcaaccaaatggagcacttgaaggctgaggcagagacccacgccgcgagccagcccgagctgatccgcgcgaaattgacgaaacagcttgaggatttggaccgcgaagggcgggtggacgccgagcgttatgccgccgaagtggccctgtcagcggccaaggcggatgtccgcgaggagttggatcgtctatcggcgcatatcaagacgggccgcgaattgctcagtgcaggctcgccggccgggcgcaagattgattttctggcgcaggagctgaaccgcgaagccaacaccctctgctccaaatccatcagcctcgatttgacgaatgcgggccttggcctcaaaggggtgatcgaccagttcaaggagcaatcggccaatgtcgaatag

SEQ ID NO: 125443 - protein, 294 aa, Hyphomonas neptunium ATCC 15444
MGTLSGMTGFARVTGEASWGGWAWEAKSVNGRSLDVRVNLPPGAEQLEREVKAMAAARFNRGSLQVSLRIELAASGAAAVINEALLSELAQAARKVSGRELSAEAIATLMSVKGVVDAGSSSTRDIMDEAVLALLSTGAAQALDELAEGRKSEGASLEGLLGDLLNQMEHLKAEAETHAASQPELIRAKLTKQLEDLDREGRVDAERYAAEVALSAAKADVREELDRLSAHIKTGRELLSAGSPAGRKIDFLAQELNREANTLCSKSISLDLTNAGLGLKGVIDQFKEQSANVE

SEQ ID NO: 125444 - DNA, 888 bp, Magnetococcus sp. MC-1
  CDS (1)..(888): transl_table=11
atgcccaacagtatgaccggcattggtcggagcgaagcgagcgtgcagggcatgcgtcttgcttggcgtttgcgcagtgtcaaccaacgctttttagagatgaatctgcgtctacccgatctctttttggatgcggagccacggtttcgccaacgtctacgggggcactttgcgcgtggttcggtggaggcgacactgaccatgcagcaggatggccccagtcaggttaaaatgcagcttgatcgggaacggcttggtcagatcctggcggctgagaagaacatgcgcgaactggatggctctcaccgtggtgagctcagtatggatcggctgctctcctggcctggggtgctcaaggagttgcccgttgcgtgggatagccagcagttggaagagatttggcaccaagcggacagcttgcttgagtctgcttgtgaggagatgacccagtttcgtggtcgcgaaggggccgcgctggcgcagggtattttggagcgcctacacgagctggagcagttggcccagcagatcgaggcggatctacccagagtgcgggagattttggagaagcgtctgcacgaaaagttggcgcagattgcagaaaatcctgccgatcccgcgcgcatggcgcaagaggtgggctatttgctgaccaaggtggatgtatcagaggagttggagcgtctttcgatccatattcgtgagatgcgtgacacgttagagctcagtgagccagtggggcggcgtttagattttctttgccaggagcttaatcgggagtccaacaccctctgctccaaaccccaagatccgaccatttcccgtattggtgtggatatgaaagtagccatcgagaagatccgggagcaggtacaaaatctggagtag

SEQ ID NO: 125445 - protein, 295 aa, Magnetococcus sp. MC-1
MPNSMTGIGRSEASVQGMRLAWRLRSVNQRFLEMNLRLPDLFLDAEPRFRQRLRGHFARGSVEATLTMQQDGPSQVKMQLDRERLGQILAAEKNMRELDGSHRGELSMDRLLSWPGVLKELPVAWDSQQLEEIWHQADSLLESACEEMTQFRGREGAALAQGILERLHELEQLAQQIEADLPRVREILEKRLHEKLAQIAENPADPARMAQEVGYLLTKVDVSEELERLSIHIREMRDTLELSEPVGRRLDFLCQELNRESNTLCSKPQDPTISRIGVDMKVAIEKIREQVQNLE

SEQ ID NO: 125446 - DNA, 867 bp, Azoarcus sp. BH72
  CDS (1)..(867): transl_table=11
atgatccatagcatgaccggtttcgcggtgcagacccgcgatcttggccccgtgagccttcatctcgagctgcgcagcgtcaattcccgctatctggacctgtccttccgcatcgtcgaggacctgcgccaggcggagccggccatccgcgagcagatcgcggccaagctgacgcgcggcaaggtcgaatgccgtctgaatctgcacaccaacgatgccgccccgcgcagcctcgcgctcaacaacgccctgctcggccagcttgccgacgcccaggccgcggtgcgccgccagttcgccgacgcccagccgctgtcggtgggcgaagtgctgcgctggcccggcatgctcgccgacgacagcctcgcgttcgagcagatgcagccggtgatcgccgaactggccaaggccgcgctcgacgaactggtcgccacccgccgccgcgaaggcgacaaactcgcggcgatgatccgcgaacgcgtggtgcgcatgcgcgaactggtcgcgatcgccaccccgcgcatgccggccatcgtcgccgaataccaggacaagctcaccgcccgcctgcgtgacgcagtggcttcgctcgacgaagaccgcgtgcgccaggaagtggcgctgttcgcccagcgcatcgacgtcgccgaggagctgtcgcgcctcgccacccacctcgacgaggtcgaacgcatcctcaaggccggcggctcggccggcaagcggctggatttcctgatgcaggaactcaaccgcgaggccaacaccctcgcctccaagtccgccgccaccgacatcaccaacatcgcgatggaactgaaggtgctgatcgagcagatgcgcgagcaggtgcagaacatcgagtaa

SEQ ID NO: 125447 - protein, 288 aa, Azoarcus sp. BH72
MIHSMTGFAVQTRDLGPVSLHLELRSVNSRYLDLSFRIVEDLRQAEPAIREQIAAKLTRGKVECRLNLHTNDAAPRSLALNNALLGQLADAQAAVRRQFADAQPLSVGEVLRWPGMLADDSLAFEQMQPVIAELAKAALDELVATRRREGDKLAAMIRERVVRMRELVAIATPRMPAIVAEYQDKLTARLRDAVASLDEDRVRQEVALFAQRIDVAEELSRLATHLDEVERILKAGGSAGKRLDFLMQELNREANTLASKSAATDITNIAMELKVLIEQMREQVQNIE

SEQ ID NO: 125448 - DNA, 900 bp, Magnetospirillum magnetotacticum MS-1
  CDS (1)..(900): transl_table=11
ttgaccgtcgccagcatgaccggctatgcccgggccgaaggccgcgacacccagggctcttgggtgtgggaaggcaaaagcgtcaacgggcgcggcctggaactgcggtgcaagtcggcgccgggctatgacggtctggaagtggcggcccgcgaggcggcggccaagcgcctgaagcgcggcaatgtccagatctcgctcaccgtgcgctccgagaccgaacaatcccagatccgcgtcaacgaggccatgctggaacaattgctgggcatctgccgccagtggcagggccgcttccccgagatcacgcccgcccgcatggacggattgctggccatcaagggcgtgctggaaccggtgaccgaggccgagaccggcgatgccgacaccttgcgcgccgcccgcgagggcgccatgaaggcctcgctggaggccatgctcgaccagttggccgccatgcgtcaggtggaaggtactcgcatcggcgccgtgctgaccgcgcagttggatgagatcgccaccctgtcggccaaggcgggtgaatgcgccgtgctgcgccccgaagcggtgcgcgaacgcctgcgcgcccaggtggctcaggtgctcgacgccgcgccgaccctggccgaggaccgcatcgcccaggaagtggcgctgatcgccgtcaaggccgatgtgcgcgaagaactggaccgtctggccgcccatgtggccgccgcccgcgatctgctggcccagggcggtgccatcggccgcaagctggacttcctggcccaggagttcaaccgcgaggccaacacgctgtgctccaaatcatcggacgtggaactgacccgcgtcggactcgacctcaaagccgtcatcgaccagttcaaagagcaggtccagaatatcgagtag

SEQ ID NO: 125449 - protein, 299 aa, Magnetospirillum magnetotacticum MS-1
MTVASMTGYARAEGRDTQGSWVWEGKSVNGRGLELRCKSAPGYDGLEVAAREAAAKRLKRGNVQISLTVRSETEQSQIRVNEAMLEQLLGICRQWQGRFPEITPARMDGLLAIKGVLEPVTEAETGDADTLRAAREGAMKASLEAMLDQLAAMRQVEGTRIGAVLTAQLDEIATLSAKAGECAVLRPEAVRERLRAQVAQVLDAAPTLAEDRIAQEVALIAVKADVREELDRLAAHVAAARDLLAQGGAIGRKLDFLAQEFNREANTLCSKSSDVELTRVGLDLKAVIDQFKEQVQNIE

SEQ ID NO: 125450 - DNA, 864 bp, Haemophilus influenzae R2866
  CDS (1)..(864): transl_table=11
atgatttacagtatgacagcttttgcacgccttgaagtgaaaaaagattggggtgatgcggtatgggaaattcgttccgttaatcaacgttatttagaaaactttttccgtttgcccgagcaatttcgcggattagaaaacacgttgcgtgagaaacttcgccagagtcttactcgcggtaaaattgaatgttctttgcgcattgaaacaaaaaaacaagcaaatgcagaattgaatttaaataaagagcttgcgaatcaagtgattcaatctttgcaatggattaaagctcaggctggagaaggtgaaattaatttgacagacgtgttgcgttatcccggtgtggtggaagcgcaagagcaagatttagatgcgattagtcaagatttattgacagcctttgatgatttactgacagattttattgcaatgcgtggtcgtgagggggaaaaactgaacgatattattcaacaacgcttagatgccattgctgtggaagcggataaagtgcggtcacaaatgccagcagttttacaatggcagcgtgaacgtttattgcaacgttttgaagatgctcaagttaatcttgatccgcaacgtgtggaacaagaaatgattttactcgctcaacgcgttgatgtggcggaagaactcgatcgtttacaaatgcacgtgaaagaaaccacgaatattttgaaaaaaggcggtgcagttggacgtaaattagattttatgatgcaagaattgaatcgggaatccaatacccttgcatctaaatccattaatgcagatatcacggcttctgcggtggagctaaaagtgcttattgaacaaatgcgtgagcaaattcagaatttagaatag

SEQ ID NO: 125451 - protein, 287 aa, Haemophilus influenzae R2866
MIYSMTAFARLEVKKDWGDAVWEIRSVNQRYLENFFRLPEQFRGLENTLREKLRQSLTRGKIECSLRIETKKQANAELNLNKELANQVIQSLQWIKAQAGEGEINLTDVLRYPGVVEAQEQDLDAISQDLLTAFDDLLTDFIAMRGREGEKLNDIIQQRLDAIAVEADKVRSQMPAVLQWQRERLLQRFEDAQVNLDPQRVEQEMILLAQRVDVAEELDRLQMHVKETTNILKKGGAVGRKLDFMMQELNRESNTLASKSINADITASAVELKVLIEQMREQIQNLE

SEQ ID NO: 125452 - DNA, 879 bp, Roseovarius nubinhibens ISM
  CDS (1)..(879): transl_table=11
atgacagggtttgcctcgggccggggcgcgagcgagggctatgcctgggactgggagctgcgctcggtgaacggcaaggggctcgacctgcggctgcgcgtgccggattgggttgaggggcttgagaccgccttgcgggcgcggcttggcaagggtttggcgcgcggcaatgtcacggtgaacctgcggctgcaaagcgaacagcgcgccgcacggatgcaggtcaacgaggcgcagctcgacgatgtgctcgaggcgattgcccggatcgagagcgaagcgatggcgcgcggcatctcgctcgccccgtcgcggcccggcgatattctggcgcagcgcggcgtgctcgagatggccagcagcgaggccgacaccaccgcgttgcaagcggcgcttctggcagatttcgaagcggtgctcgacggatttctcgatatgcggcgcggcgagggccgggcgctcgaggagatcctcgcaggccagctcgacgagatttcgcggctgacaagcgaggcggcggaggccgcccaatcgcggcgcgaggatgtggcgcaggcgctgcgtgacgcgctggcgcgggtgctcgacaacagcgagggggcagacccggaccggatcgcgcaggagctggcgcttctcgctgtgaaatcggatgtgaccgaagaattggaccggcttcatgcgcatgttacaacggcgcgcgacatgatcgccactggcagcccgattggccgcaagctcgattttctggcgcaggaatttaaccgcgaggccaataccttgtgttccaaggcgcaatcgggcgcgctgaccaagatcgggctcgaattgaaaacggtgatcgaccagatgcgggagcaggtgcaaaatgtcgagtga

SEQ ID NO: 125453 - protein, 292 aa, Roseovarius nubinhibens ISM
MTGFASGRGASEGYAWDWELRSVNGKGLDLRLRVPDWVEGLETALRARLGKGLARGNVTVNLRLQSEQRAARMQVNEAQLDDVLEAIARIESEAMARGISLAPSRPGDILAQRGVLEMASSEADTTALQAALLADFEAVLDGFLDMRRGEGRALEEILAGQLDEISRLTSEAAEAAQSRREDVAQALRDALARVLDNSEGADPDRIAQELALLAVKSDVTEELDRLHAHVTTARDMIATGSPIGRKLDFLAQEFNREANTLCSKAQSGALTKIGLELKTVIDQMREQVQNVE

SEQ ID NO: 125454 - DNA, 891 bp, Oceanicola batsensis HTCC2597
  CDS (1)..(891): transl_table=11
atgcatcaatccatgacgggattcgcctcggcgcaggggcatcacggcgcctattcctgggtctgggacctgaggtcggtgaacgcacgggggctggatgtccgcgtccggctgcccgattggctgccggggctggatgccgcgctcaaggcgcgtctcggaaagaggatcgcgcgcgggaacgtgaccctcggcctgcgcgtcacgcggagcgaggagacggcggcgctggccgtgaaccccgccgccctcgatcaggtgctgatcgccatggcgcaggtcgaggaccgggcgatgcagcaggggctgagcctcgccccctcccgcgcggcggatatcctgtcgcagcgcggcgtgctcgagaccgcggccgtcgaggaggacgccgaagcgctgaccgaggcccttctggccgatttcgacacgctcgcccgcgccttcgtcgcgatgcgcgagggcgagggggcggcgctggcgcggcttctcaccgatcagctcgcccggatcgaggacctggtggcgcaggccggcgccgtcctcgggacgcgccgcgaagccatgcaggaggcgctgcaggcgcagctgcgtcgcgtgctggaggcggatgtcgcggtggaccagcagcggctggaacaggagctggcgctgatcgccgtcaaggcggacgtgaccgaggaactcgaccggctgacggcccatgtcgccgccgcgcgcggcatcctggagagcggcggacccgcgggccgcaagctcgacttcctcgcgcaggaattcaaccgcgaagccaataccctgtgttccaagtcgcagaacgcggatctgaccgccgtcggcctcgatctcaaggcggtgatcgagcagatgcgcgagcaggttcagaacctcgaatga

SEQ ID NO: 125455 - protein, 296 aa, Oceanicola batsensis HTCC2597
MHQSMTGFASAQGHHGAYSWVWDLRSVNARGLDVRVRLPDWLPGLDAALKARLGKRIARGNVTLGLRVTRSEETAALAVNPAALDQVLIAMAQVEDRAMQQGLSLAPSRAADILSQRGVLETAAVEEDAEALTEALLADFDTLARAFVAMREGEGAALARLLTDQLARIEDLVAQAGAVLGTRREAMQEALQAQLRRVLEADVAVDQQRLEQELALIAVKADVTEELDRLTAHVAAARGILESGGPAGRKLDFLAQEFNREANTLCSKSQNADLTAVGLDLKAVIEQMREQVQNLE

SEQ ID NO: 125456 - DNA, 861 bp, Pseudoalteromonas tunicata D2
  CDS (1)..(861): transl_table=11
atgatccacagtatgacagcatacgctcgccaggaacaaaaaggtgattggggcacaggcacttgggaaattcgctctgttaaccaacgctatttagaaacctttatccgcgcccctgagcaatttcgtggcatggaacctgttattcgcgatcgtttgcgcaacaaccttcaacgcggcaaagtcgaagtattcttaaaatttgccgccaatccagcgcatgttggcgaaattactatcaacgaatcccttgcaagccaattagtgaacagtgccaaatgggtgcaaaatttaagtcagggtgaaatcaaccctgtagacattcttcgctggccaggtgttatggaagcacaagaagtcgatatggattcagtacaagccgaattacttgcagcacttgaccggactattatcgactttcttgaagctcgcgctgccgaaggtgcaaatttacacgaaatgatcgaaagccgcttaaatgcaatcacggaacaagttgatattgttgagcaatacatgccacaagtgaaaatttggcagcgtgaacgtttaagccaaaaacttgaagaactcaaaaccgatatcgacgaaagtcgcctagagcaagaactaatttatttagcgcaaaaacaagatgttgccgaagaactagaccgcttaaaatcacacgtaaaagaaacgcgtaaaatgcttaaaaaaggcggagcttgtgggcgccgtttagattttatgatgcaagagtttaaccgcgaagcaaacaccctagcctctaaatcaatcaatagcgacatcaccaatgctgcggtagagctaaaagtgttgattgaacagatgcgtgagcagatccaaaacattgaataa

SEQ ID NO: 125457 - protein, 286 aa, Pseudoalteromonas tunicata D2
MIHSMTAYARQEQKGDWGTGTWEIRSVNQRYLETFIRAPEQFRGMEPVIRDRLRNNLQRGKVEVFLKFAANPAHVGEITINESLASQLVNSAKWVQNLSQGEINPVDILRWPGVMEAQEVDMDSVQAELLAALDRTIIDFLEARAAEGANLHEMIESRLNAITEQVDIVEQYMPQVKIWQRERLSQKLEELKTDIDESRLEQELIYLAQKQDVAEELDRLKSHVKETRKMLKKGGACGRRLDFMMQEFNREANTLASKSINSDITNAAVELKVLIEQMREQIQNIE

SEQ ID NO: 125458 - DNA, 864 bp, Photobacterium sp. SKA34
  CDS (1)..(864): transl_table=11
atgatccatagtatgactgcttatgctcgtcgcgaaattaaaggcgattggggcactgctgtgtgggagatccgctcagtaaatcaacgttatcttgaaacctacattcgtatgcctgagcaatttcgtagcttagagcctgtattacgtgagcgtttccgtaaacgtcttgctcgcggtaaagtggaatgtaatctacgttttgaagccaatattgccgcaaacacagagctaaccatcaatgaagcgttagcaaagcaagttattaccgcagctaaatgggtaaaagaaaccgccggtgaaggtaatatcggtccattccaagtccttaattggccgggtgtgatggaagcaccagagcaagatttagatacgattaacaaagatctactgacgggttttgaactagctatggatgacttcgttgccgcacgtgcaagcgaaggcgacaacatgaagcaacttatcgaccaacgtctgaatgctatttcgattgaagcgaccaaagtacgcactatgatgccagaaatcattaactggcagcgtgagcgcattatgtctcgtcttgaagaagcaaaagttgatcttgatgctaaccgcattgaacaagagctgatcatgctagcgcaaaagagtgatgtcgcagaagagcttgatcgccttgattctcacgtgaaagaaacccaaaaaatcatcgcgaaaggtggcgcatgtggtcgtcgtttagacttcatgatgcaagagttcaaccgtgagtctaacaccctcgcatcaaaatcaatcaacactgaagtgaccgcctctgcagttgaacttaaagttctgattgagcaaatgcgcgaacagattcagaatatcgaataa

SEQ ID NO: 125459 - protein, 287 aa, Photobacterium sp. SKA34
MIHSMTAYARREIKGDWGTAVWEIRSVNQRYLETYIRMPEQFRSLEPVLRERFRKRLARGKVECNLRFEANIAANTELTINEALAKQVITAAKWVKETAGEGNIGPFQVLNWPGVMEAPEQDLDTINKDLLTGFELAMDDFVAARASEGDNMKQLIDQRLNAISIEATKVRTMMPEIINWQRERIMSRLEEAKVDLDANRIEQELIMLAQKSDVAEELDRLDSHVKETQKIIAKGGACGRRLDFMMQEFNRESNTLASKSINTEVTASAVELKVLIEQMREQIQNIE

SEQ ID NO: 125460 - DNA, 864 bp, Oceanospirillum sp. MED92
  CDS (1)..(864): transl_table=11
atgacacgtagcatgacagcatttgctcgacaggaagccgagcacgagtggggatcactgagttgggagatccgttccgttaaccatcgttaccttgaaccccatctgcgtctgccggaaaacctcaaagagctggaaggttttctgcgtgaaaaactgcgtaagaccctgagccgaggcaaggtggaatgcaccctgcgtttccacccggaagcacaggttcaacagctggtggtgaatcaggattacgctaaagaggtaattcaggcggcggaatccctgcaggggatgatgaaagaacatcagccacttgatgcgctggagctgctacgctggcccggtgtaatgcaggatgtgaagttggatatggatctggttaagaattcagctaaatccctgtttgataaagccctggatgacctgctggaaggccgtggccgtgaaggtgtggaactggcaaacctgatcaaccagcgtctcgattcgatcagtgagattgtcgcggaagtacgcgagaagatgccacagattctgcaaaaccagcgtgacaacctgaaccaacgcctggaagagctgaaagctgaactggacgaagcacgcatcgagcaggagatcgccctgatcgcccagaaagccgatgtcgatgaagagatggatcgcctagacacccatgtacaggaagtacgccgtgtgctgaaacagaaaggcccgattggccgccgtctcgacttcctgatgcaggaactaaaccgcgaagccaatacgctatcttcgaaatcgatcgtcgccagcaccacccagtgtgccgtagagctgaaagtgctgatcgaacagatgcgtgagcagatccagaacatcgaataa

SEQ ID NO: 125461 - protein, 287 aa, Oceanospirillum sp. MED92
MTRSMTAFARQEAEHEWGSLSWEIRSVNHRYLEPHLRLPENLKELEGFLREKLRKTLSRGKVECTLRFHPEAQVQQLVVNQDYAKEVIQAAESLQGMMKEHQPLDALELLRWPGVMQDVKLDMDLVKNSAKSLFDKALDDLLEGRGREGVELANLINQRLDSISEIVAEVREKMPQILQNQRDNLNQRLEELKAELDEARIEQEIALIAQKADVDEEMDRLDTHVQEVRRVLKQKGPIGRRLDFLMQELNREANTLSSKSIVASTTQCAVELKVLIEQMREQIQNIE

SEQ ID NO: 125462 - DNA, 933 bp, Xanthobacter autotrophicus Py2
  CDS (1)..(933): transl_table=11
atgaagcgtgccgccgtgaccaccaaccgcgttccggcttcggcccgggcccccctcgccagcatgactggctttgcccgcgttgccggctcccatgggccgtggcgtttcggctgggaggtgcgttcggtcaacggcaaggggctggacctgcggctgcgcctgccgccgggcttcgaggtgctggaggcggacgtgcgcacccgcaccgggcaggtcctgacccgcggctcggtctccgccaccctcgccgccacccgcgagggggagaccagcacggttcgggtcaaccagggggcgctggaggcgctgtaccggacggtgtccgagagcgctcgccgcctcggcgcgccggagcccaccctcgacgccctggtggcggtgaagggcatggtggagatcgccgaggccgatgagggcgaggaggagcgccgcgcgctcatgtccgccatgctctcggccttcgaccgggcgttgggggaactcggcgccatgcgcgcccgcgagggcgaggcgctcaatgccatcctctccgagcggctcgatgccattgccgccctgctggtgcgggccgagcgcctgcccgagcgtggcgtcgaggccatcaaggcccgcatcgccgagcaggtgcgggtgctgatggaggccgccacactggatcccgaccgcctgcaccaggaggcggtgctcgccgtcaccaaggccgacgtgcgtgaggaactggaccggctcagcgcccatatcgccgccgcgcgcgacctgctgcacaccggcggcccggccggccggcggctcgatttcctggcccaggagttcaaccgcgaggcgaacaccctgtgctccaagtccaattccgtggcgctgacgcagatcgggcttgacctgaagctgctggtggaccagttccgcgagcagatccagaacctcgagtga

SEQ ID NO: 125463 - protein, 310 aa, Xanthobacter autotrophicus Py2
MKRAAVTTNRVPASARAPLASMTGFARVAGSHGPWRFGWEVRSVNGKGLDLRLRLPPGFEVLEADVRTRTGQVLTRGSVSATLAATREGETSTVRVNQGALEALYRTVSESARRLGAPEPTLDALVAVKGMVEIAEADEGEEERRALMSAMLSAFDRALGELGAMRAREGEALNAILSERLDAIAALLVRAERLPERGVEAIKARIAEQVRVLMEAATLDPDRLHQEAVLAVTKADVREELDRLSAHIAAARDLLHTGGPAGRRLDFLAQEFNREANTLCSKSNSVALTQIGLDLKLLVDQFREQIQNLE

SEQ ID NO: 125464 - DNA, 897 bp, marine gamma proteobacterium HTCC2207
  CDS (1)..(897): transl_table=11
atgacgcatcgtaatttttctactggagataccatggcccggagtatgaccgcatttgcccgctgcagcacagagttcagctggggttcagttacctgtgaactgcgctcagtgaatcatcgctttcttgaaacgggatttcgcctgcctgacagcctgcggcccatagagatgccgctgcgagaaatcgcccgcaagaagctgagccgcggcaaggtcgactgctctctgcagctggcatttaataatgccgatgccagcctcgaagctgatctggacttggccaagcgcatgattgctatggccgagaccatcggcgctgaaatgcagtcgccagcacctatttctccgctggaaattatgcgctggcccggcattcttcaggagcaaactgtggaggcggaagccttgcataaggctgccaccgaaacctacaaagctaccattgatcagctgcttgagggacgcaaacgtgagggcgacaagctggcggagatgattgaacagcgactggtgggcattgagcagcagctggttattgtgcgagatcacctgccttcgatcctcagtgatcagcgcaagcgtcttgaacaaaagctcagcgacctcaaggagcagtttgacgcagatcgccttgaacaagagatggtgattatcgccaaccgcaccgatgtggacgaggagctagatcgcctagaagcccatattagcgagatacgccgagtattaagcggcaaagattccatcggtcgacgtctggattttttgatgcaagaactcaatcgcgaggccaacacgctgggctccaaatccatcgccggcgtcaccactcaggcttcggtggagttgaaggtacttatcgagcagatgcgtgagcagattcaaaatattgagtaa

SEQ ID NO: 125465 - protein, 298 aa, marine gamma proteobacterium HTCC2207
MTHRNFSTGDTMARSMTAFARCSTEFSWGSVTCELRSVNHRFLETGFRLPDSLRPIEMPLREIARKKLSRGKVDCSLQLAFNNADASLEADLDLAKRMIAMAETIGAEMQSPAPISPLEIMRWPGILQEQTVEAEALHKAATETYKATIDQLLEGRKREGDKLAEMIEQRLVGIEQQLVIVRDHLPSILSDQRKRLEQKLSDLKEQFDADRLEQEMVIIANRTDVDEELDRLEAHISEIRRVLSGKDSIGRRLDFLMQELNREANTLGSKSIAGVTTQASVELKVLIEQMREQIQNIE

SEQ ID NO: 125466 - DNA, 855 bp, Rickettsiella grylli
  CDS (1)..(855): transl_table=11
atgacggcttttgccaaaaaagaaaaacacgctgaatggggtcaagccgcttgggaaattcggagtgtcaaccatcgttatctagacattatactgtcgttgccagataactttagccatttagaacctttgattcgaaaacaaatgcaaaaaaatgtgcaccgcggcagagtagacataaaattacactataaaccttatcctaataaagcgattccgataaccatcgataaaccattagcgcaatcgcttataaacgcatacaaagaaattgctcaactcagtcagagtaaacgggctttcaatcctggagaactgcttcgatggccgcatttacttcaatttcccgagttacaaccccatgaaatacaaactgagttaatggctttattgacggatactttaaataatttttgtaacgtccgtcagacagaaggccacgctatttttggtgtattaaatcgacgtattcttaagctgatacattgcattaagtatattcagacgcaacttcctcaacttttaaaccgacaacgcgaaaaaatttcagctcgattacaggaaattaaagccagtttagacgctaaccgtttagaacaagaaatgctattatttgctcagaagactgacgtcgccgaagaattagaccgcttaaccattcatcttactgaatttaaaaatttgttaataaaaaatcaagtccacggcaaacaactcgattttttattacaagaattaaaccgagaagcaaatactttagcggctaaatcattcaatgcagaattaaccttatccgctgtgaacatcaaagtgttaatagaggaaatgcgtgaacaagtacagaatattgagtaa

SEQ ID NO: 125467 - protein, 284 aa, Rickettsiella grylli
MTAFAKKEKHAEWGQAAWEIRSVNHRYLDIILSLPDNFSHLEPLIRKQMQKNVHRGRVDIKLHYKPYPNKAIPITIDKPLAQSLINAYKEIAQLSQSKRAFNPGELLRWPHLLQFPELQPHEIQTELMALLTDTLNNFCNVRQTEGHAIFGVLNRRILKLIHCIKYIQTQLPQLLNRQREKISARLQEIKASLDANRLEQEMLLFAQKTDVAEELDRLTIHLTEFKNLLIKNQVHGKQLDFLLQELNREANTLAAKSFNAELTLSAVNIKVLIEEMREQVQNIE

SEQ ID NO: 125468 - DNA, 861 bp, Oceanobacter sp. RED65
  CDS (1)..(861): transl_table=11
atgcgcagcatgacaggatttgcccgtcaggatttagaaactcctttaggtcactatagtgttgaaattcgcagtgtaaattcacgctacttggaaccacattttcggttgccggattctatgcgcgctttggaaccaaaattacgcgagcgcttgaaaaatgtgttcagccgaggaaagctagaagtcagcatcaagtttcgagcggatatgagtcaacaaggcgtatctttgaacgaggcattggttgaacggatcaaccaagcagccgatcaagtgcacggtatcattggtccaggtaatgcactggatgcactcgagatcctcaaatggccaggcgtccttaatgaagcgcaattagataaagctcaaatcgaagagcaaaccttgcagtgctttgacgaagccataaagagtctactggacatgagtcagcgagaaggggatgcacttaatcaatttctcacacagcggatagaaggcatacagctgcaagtggacgaagttcgaagattaatgcctcaattgattcaagctcagcgcgagcatttacagaaaaaattggctgatctacaggtcaatgttgagccagagcgtctagagcaagaaatgatgatagtgctacaaaaaacggatgtggatgaggagcttgatcgccttgaagctcatgtaaaggaagtatcccatatcatggaacagtctgggcctgtgggccgccgattggattttatgatgcaggagcttaatcgtgaggctaatacattgagcagcaaaagtatgagttcactaacgacgaatatcgcggtggagctcaaagtcttaattgagcagatgcgagagcaagttcagaatatcgaataa

SEQ ID NO: 125469 - protein, 286 aa, Oceanobacter sp. RED65
MRSMTGFARQDLETPLGHYSVEIRSVNSRYLEPHFRLPDSMRALEPKLRERLKNVFSRGKLEVSIKFRADMSQQGVSLNEALVERINQAADQVHGIIGPGNALDALEILKWPGVLNEAQLDKAQIEEQTLQCFDEAIKSLLDMSQREGDALNQFLTQRIEGIQLQVDEVRRLMPQLIQAQREHLQKKLADLQVNVEPERLEQEMMIVLQKTDVDEELDRLEAHVKEVSHIMEQSGPVGRRLDFMMQELNREANTLSSKSMSSLTTNIAVELKVLIEQMREQVQNIE

SEQ ID NO: 125470 - DNA, 861 bp, Alteromonadales bacterium TW-7
  CDS (1)..(861): transl_table=11
atgatccacagtatgacagcttatgcgcgtcgcgagataaaaggcgattggggcactggcacttgggaagttcgatcagttaaccaacgttaccttgaaacctttattcgcgcaccagagcaatttcgtgggatggagcctattattcgtgaacgcttacgtaagcatctacagcgcggtaaagtagaagtatttttaaagtttgttgcaaacccagcccacgttggtgagttatcaatcaatcaagcattggctgagcaacttataaatagtgctaaatgggttcaacagcaaagtaatggtgacataaaccctgttgatattttacgttggcctggtgtaatggaagccgaagaactggatatggacagcgtaaacacagcgctgattgcagggcttgatgaagtaatagaagactttaaatcagcacggggtgatgaaggcgcaaatttagaagagatgatagcaactcgccttgatgcaattatagaacaagtaaacactgtagaaacccacatgccagaaattactaaatggcaacgtgagaaacttgaacaaaaattggaagatttaacgacaaatattgacgagtctcgtcttgagcaagaactaatttatttggcacaaaagcaagacgtagctgaagagctagatcgcttaaagtctcatgttaaagaaactaaaaaaattcttaaaaaaggcggcgcatgtggccgtcgcctagattttatgatgcaagagtttaaccgagaagcaaataccctcgcttctaagtctattaatagcgatattactaatgcggcggtcgagcttaaagttttaattgaacaaatgcgtgagcagatccagaatattgaatag

SEQ ID NO: 125471 - protein, 286 aa, Alteromonadales bacterium TW-7
MIHSMTAYARREIKGDWGTGTWEVRSVNQRYLETFIRAPEQFRGMEPIIRERLRKHLQRGKVEVFLKFVANPAHVGELSINQALAEQLINSAKWVQQQSNGDINPVDILRWPGVMEAEELDMDSVNTALIAGLDEVIEDFKSARGDEGANLEEMIATRLDAIIEQVNTVETHMPEITKWQREKLEQKLEDLTTNIDESRLEQELIYLAQKQDVAEELDRLKSHVKETKKILKKGGACGRRLDFMMQEFNREANTLASKSINSDITNAAVELKVLIEQMREQIQNIE

SEQ ID NO: 125472 - DNA, 870 bp, marine gamma proteobacterium HTCC2143
  CDS (1)..(870): transl_table=11
atgattcgaagtatgaccgcttttgctcgacaatccacgcagtttgaatggggctccacagtttgggaggttcgctctgtcaaccatcgctatcttgagcccagcttcaaactacccgatactgttcggcaacttgaaaacaacttacgtgatgcactccgcaacacactcaaccgcggcaaagtagaatgcagcttgcgcatacaggctgagggaagtatcagctcgactcggctatccatcgacgatgagttattgactcagcttgttgcgaccagtgaacacgttcagcagcaactgcgagaatcagccccgataaatccattgcagctgctgcagtggcccggtgtgatgacagaagccagaactgatgacgaggtcatttgcacagacgcattatcagtcttcactacaaccctacaacagcttctttcgagccgcgagcgcgaaggtgctgcgttaaagctctttattgagcagcggctagagtcgattacccgcattaccaatgacattcgtcatcaaatgcctattattttaaaagcgcaacaacagaagctgatagaccgagtcgctcaattcgccgtagaactggacaaagaacgtctcgaacaggaaatagtaatgcttgcccagaaggccgatgtcgacgaagagctcgatcgtctggaagcgcacattgctgaagtcagccgcgtattaatcaaaggtgggccctgcggtcgcagactagactttttaatgcaggagctcaatcgcgaagctaataccttgtcatctaaatcaatcgtcagcgatactacccaggcagcggtagagcttaaagtattgatagagcagatgcgcgaacagattcaaaatatcgagtag

SEQ ID NO: 125473 - protein, 289 aa, marine gamma proteobacterium HTCC2143
MIRSMTAFARQSTQFEWGSTVWEVRSVNHRYLEPSFKLPDTVRQLENNLRDALRNTLNRGKVECSLRIQAEGSISSTRLSIDDELLTQLVATSEHVQQQLRESAPINPLQLLQWPGVMTEARTDDEVICTDALSVFTTTLQQLLSSREREGAALKLFIEQRLESITRITNDIRHQMPIILKAQQQKLIDRVAQFAVELDKERLEQEIVMLAQKADVDEELDRLEAHIAEVSRVLIKGGPCGRRLDFLMQELNREANTLSSKSIVSDTTQAAVELKVLIEQMREQIQNIE

SEQ ID NO: 125474 - DNA, 852 bp, marine gamma proteobacterium HTCC2080
  CDS (1)..(852): transl_table=11
atgactggattttcgcgcgccattgtaacaactgactgcgtgtcggtcacaatagaaatgcgatcggtaaacaatcgttatctcgatgtgctggttcgctgccctgaagtccttcgatcacaggaatcccattggcgtcaaaaaattgcaaaacaaatcacccgaggcaaggtggacgtgtctatccgcaccgatctctcggagcaaagtgcatccctgagcttagatcaagggcgtcttaaggaattacaaaccgtattgggccaactaagtgagcgctttcccgacgccccaccgcctgatcagctggctttactgatggcgccgggtgttatctctagtgagaccacgcacgagtcggagtggattgaagcgggtgcagccgccctagagcgcgcgcttagcgggctggttgccagcagggaagaagaaggcggtaaactgcaaaatcttatcttaagccgctgcgaagcatttaaacactaccttgcagacttccgagcggcgctaccagatttgcagcaagccaatcgacaacggctgctcgaccggatacaaaagctgtctgtagaacccgatgctaaaagattggaagaggagctggtttataacgcccaaaaaacagatgttgatgaagagttagatcggttggacgcgcatctcgtggcaatagaggttgcgatagagagcaaccaaccctgtggccgccgcctcgattttttaatgcaggaactcaatcgggaggccaatacgctggcatcaaagtcagcatcactattaacgactcagaccgctgtagaatttaaggtgctcattgaacagatgcgggaacaaatacagaacattgaataa

SEQ ID NO: 125475 - protein, 283 aa, marine gamma proteobacterium HTCC2080
MTGFSRAIVTTDCVSVTIEMRSVNNRYLDVLVRCPEVLRSQESHWRQKIAKQITRGKVDVSIRTDLSEQSASLSLDQGRLKELQTVLGQLSERFPDAPPPDQLALLMAPGVISSETTHESEWIEAGAAALERALSGLVASREEEGGKLQNLILSRCEAFKHYLADFRAALPDLQQANRQRLLDRIQKLSVEPDAKRLEEELVYNAQKTDVDEELDRLDAHLVAIEVAIESNQPCGRRLDFLMQELNREANTLASKSASLLTTQTAVEFKVLIEQMREQIQNIE

SEQ ID NO: 125476 - DNA, 864 bp, Pseudomonas putida GB-1
  CDS (1)..(864): transl_table=11
atggtgcacagcatgaccgcttttgctcgtgtcgagcgcgccggcagccaaggcaccctggtctgggagctgcgctcggtcaaccaccgctacctggagccgcacctgcgtctgcccgaggccctgcgcgacctcgaaggcggtgtacgtgaaggcctgcgccagggcctttcgcgaggcaaggtggagtgcaccttgcgcctcaacgaagacagcaacggcaaaccgctgaaggtggaccacgcgcgcgccgcgcaactggttgccgcggccgaggaagtcgccagcctgatcaagcagccggcgcccttgaaccccctggaagtgctgtcgtggccgggcgtgctggtggctgacaccagcgacccgcaggccctgaacgctgaagccatggcgctgttcgacgaagcactggccgagctcaaggccgggcgccagcgcgaaggccaggaactggcccggctgatcaacgagcgcctggacaacatggccagcgaagtcaccaccctgcgcgccttggtcccgcagatgctggcagcacagcggcaaaagattctcgaccgcttcggcgatatgcaggctgagctggacccgcagcgcctggagcaggagatggtgctgctggcccagaagagcgacgtggccgaagaactcgaccgcctcagcactcacgttaccgaagtgcgccgggtactcaagggtggcggcgccgccggccgacgcctggatttcctgatgcaggaactcaaccgcgaagccaacaccctcggctccaaggccttcgacccacgcagcacgcaagcggcggtcaacctgaaggtattgatcgaacagatgcgtgaacaagtacagaacatcgagtaa

SEQ ID NO: 125477 - protein, 287 aa, Pseudomonas putida GB-1
MVHSMTAFARVERAGSQGTLVWELRSVNHRYLEPHLRLPEALRDLEGGVREGLRQGLSRGKVECTLRLNEDSNGKPLKVDHARAAQLVAAAEEVASLIKQPAPLNPLEVLSWPGVLVADTSDPQALNAEAMALFDEALAELKAGRQREGQELARLINERLDNMASEVTTLRALVPQMLAAQRQKILDRFGDMQAELDPQRLEQEMVLLAQKSDVAEELDRLSTHVTEVRRVLKGGGAAGRRLDFLMQELNREANTLGSKAFDPRSTQAAVNLKVLIEQMREQVQNIE

SEQ ID NO: 125478 - DNA, 867 bp, Marinobacter sp. ELB17
  CDS (1)..(867): transl_table=11
atgattcgaagtatgactgcctttgcgcgccaggaaactcgtggcgactggggtgtactgacctgcgagattcgcaccgttaaccatcgctacctggagccgtcattccgcttgccggagtgcctgcgagggctggaaaacgattttcgcgaacagctgcgcgaacaactgaagcgcggcaaggtagacgtgagtcttcggctgcacgcaagcgaccaggcccaacacagcttcgccatcgacgagccgctaacccaggcgctgaacgacgcggccaaacgcattagccggattctggacaaccctgcccacatcagcgcgctggacatattgcgctggccgggtgttatggcaacgcccgagcaggattacacccaggccaaagccgccgcggccagcctgtttgagcaaaccataaacgaactggtagcggcaagaacacgtgaaggcgagcgcttgctggctattttggaacagcgtctggtcgccatacaagcccaagtggctgacgtgcgtgagcgcatgccgcagctgcttcaggctcaggagcaacagctgcgcgaacgctttgaaaaagccaaaatagagctcgacccggaacgcatagctcaggaaatggtgatgctggcgcaaaaaagcgatgtcgccgaagaactggatcggctggacgcccacgtggccgaagtacgcgataccctggccagtgaagacgccgtcggccgacgcctggattttttgatgcaagagctgaaccgcgaagccaataccttgagcagcaaaagcattgacgccggcctgacccgcgctgcggtggacttgaaagtgtggattgagcagctgcgggagcaggtgcagaatatagagtag

SEQ ID NO: 125479 - protein, 288 aa, Marinobacter sp. ELB17
MIRSMTAFARQETRGDWGVLTCEIRTVNHRYLEPSFRLPECLRGLENDFREQLREQLKRGKVDVSLRLHASDQAQHSFAIDEPLTQALNDAAKRISRILDNPAHISALDILRWPGVMATPEQDYTQAKAAAASLFEQTINELVAARTREGERLLAILEQRLVAIQAQVADVRERMPQLLQAQEQQLRERFEKAKIELDPERIAQEMVMLAQKSDVAEELDRLDAHVAEVRDTLASEDAVGRRLDFLMQELNREANTLSSKSIDAGLTRAAVDLKVWIEQLREQVQNIE

SEQ ID NO: 125480 - DNA, 22 bp, Artificial sequence
  primer
atgatccgcagtatgaccgcct

SEQ ID NO: 125481 - DNA, 24 bp, Artificial sequence
  primer
ttattcgatgttctgaatctgctc

SEQ ID NO: 125482 - protein, 328 aa, Artificial sequence
  consensus sequence
  Variant (2)..(3): Xaa in position 2 to 3 is any amino acid
  Variant (7)..(8): Xaa in position 7 to 8 is any amino acid
  Variant (10)..(22): Xaa in position 10 to 22 is any amino acid
  Variant (23)..(33): Xaa in position 23 to 33 is any or no amino acid
  Variant (35)..(35): Xaa in position 35 is any amino acid
  Variant (40)..(40): Xaa in position 40 is any amino acid
  Variant (42)..(42): Xaa in position 42 is any amino acid
  Variant (44)..(47): Xaa in position 44 to 47 is any amino acid
  Variant (49)..(49): Xaa in position 49 is any amino acid
  Variant (51)..(56): Xaa in position 51 to 56 is any amino acid
  Variant (58)..(60): Xaa in position 58 to 60 is any amino acid
  Variant (62)..(69): Xaa in position 62 to 69 is any amino acid
  Variant (72)..(76): Xaa in position 72 to 76 is any amino acid
  Variant (78)..(118): Xaa in position 78 to 118 is any amino acid
  Variant (119)..(124): Xaa in position 119 to 124 is any or no amino acid
  Variant (126)..(127): Xaa in position 126 to 127 is any amino acid
  Variant (131)..(159): Xaa in position 131 to 159 is any amino acid
  Variant (160)..(167): Xaa in position 160 to 167 is any or no amino acid
  Variant (169)..(170): Xaa in position 169 to 170 is any amino acid
  Variant (173)..(174): Xaa in position 173 to 174 is any amino acid
  Variant (176)..(181): Xaa in position 176 to 181 is any amino acid
  Variant (183)..(197): Xaa in position 183 to 197 is any amino acid
  Variant (199)..(222): Xaa in position 199 to 222 is any amino acid
  Variant (223)..(238): Xaa in position 223 to 238 is any or no amino acid
  Variant (240)..(241): Xaa in position 240 to 241 is any amino acid
  Variant (244)..(251): Xaa in position 244 to 251 is any amino acid
  Variant (254)..(254): Xaa in position 254 is any amino acid
  Variant (258)..(258): Xaa in position 258 is any amino acid
  Variant (261)..(262): Xaa in position 261 to 262 is any amino acid
  Variant (264)..(270): Xaa in position 264 to 270 is any amino acid
  Variant (272)..(277): Xaa in position 272 to 277 is any amino acid
  Variant (278)..(279): Xaa in position 278 to 279 is any or no amino acid
  Variant (282)..(282): Xaa in position 282 is any amino acid
  Variant (286)..(287): Xaa in position 286 to 287 is any amino acid
  Variant (290)..(290): Xaa in position 290 is any amino acid
  Variant (294)..(294): Xaa in position 294 is any amino acid
  Variant (298)..(298): Xaa in position 298 is any amino acid
  Variant (302)..(312): Xaa in position 302 to 312 is any amino acid
  Variant (315)..(316): Xaa in position 315 to 316 is any amino acid
  Variant (320)..(320): Xaa in position 320 is any amino acid
  Variant (324)..(324): Xaa in position 324 is any amino acid
  Variant (327)..(327): Xaa in position 327 is any amino acid
MXXSMTXXAXXXXXXXXXXXXXXXXXXXXXXXXEXRSVNXRXLXXXXRXPXXXXXXEXXXRXXXXXXXXRGXXXXXLXXXXXXXXXXXXXXXXXXXXXXXXXXXXXXXXXXXXXXXXXXXXXXXLXXPGVXXXXXXXXXXXXXXXXXXXXXXXXXXXXXXXXXXXXXRXXEGXXLXXXXXXRXXXXXXXXXXXXXXXPXXXXXXXXXXXXXXXXXXXXXXXXXXXXXXXXXXXXXXXXRXXQEXXXXXXXXDVXEELXRLXXHXXXXXXXLXXXXXXXXGRXLDFXXQEXNREXNTLXSKSXXXXXXXXXXXLKXXIEQXREQXQNXE

SEQ ID NO: 125483 - protein, 52 aa, Artificial sequence
  protein pattern
  Variant (2)..(2): Xaa in position 2 is any amino acid
  Variant (3)..(4): Xaa in position 3 to 4 is any or no amino acid
  Variant (6)..(6): Xaa in position 6 is any or no amino acid
  Variant (10)..(10): Xaa in position 10 is Leu or Met
  Variant (11)..(11): Xaa in position 11 is any amino acid
  Variant (14)..(14): Xaa in position 14 is Phe, Leu or Met
  Variant (18)..(18): Xaa in position 18 is Ala or Ser
  Variant (21)..(21): Xaa in position 21 is Ile, Leu or Val
  Variant (22)..(22): Xaa in position 22 is Ala, Cys, Gly or Ser
  Variant (25)..(25): Xaa in position 25 is Ala, Pro or Ser
  Variant (26)..(30): Xaa in position 26 to 30 is any amino acid
  Variant (31)..(31): Xaa in position 31 is Ala, Ser or Thr
  Variant (32)..(33): Xaa in position 32 to 33 is any amino acid
  Variant (34)..(34): Xaa in position 34 is Ala, Gly, Ser or Thr
  Variant (35)..(35): Xaa in position 35 is Ile, Leu, Met or Val
  Variant (36)..(36): Xaa in position 36 is Ala, Asp, Glu, Gly, Asn or Thr
  Variant (37)..(37): Xaa in position 37 is Phe, Ile, Leu or Met
  Variant (39)..(39): Xaa in position 39 is Ala, Leu or Val
  Variant (40)..(40): Xaa in position 40 is any amino acid
  Variant (41)..(41): Xaa in position 41 is Ile or Val
  Variant (42)..(42): Xaa in position 42 is Asp or Glu
  Variant (43)..(43): Xaa in position 43 is any amino acid
  Variant (44)..(44): Xaa in position 44 is Phe, Ile, Leu or Met
  Variant (45)..(45): Xaa in position 45 is Lys or Arg
  Variant (48)..(48): Xaa in position 48 is Ile or Val
  Variant (49)..(49): Xaa in position 49 is Ala or Gln
  Variant (51)..(51): Xaa in position 51 is Phe, Ile, Leu or Val
GXXXRXLDFXXQEXNREXNTXXSKXXXXXXXXXXXXXKXXXXXXXEQXXNXE

SEQ ID NO: 125484 - protein, 15 aa, Artificial sequence
  protein pattern
  Variant (2)..(2): Xaa in position 2 is any amino acid
  Variant (5)..(5): Xaa in position 5 is any amino acid
  Variant (6)..(6): Xaa in position 6 is Lys or Arg
  Variant (7)..(7): Xaa in position 7 is any amino acid
  Variant (9)..(9): Xaa in position 9 is Asp or Glu
  Variant (10)..(11): Xaa in position 10 to 11 is any amino acid
  Variant (12)..(12): Xaa in position 12 is Phe, Ile, Leu, Met or Val
  Variant (14)..(14): Xaa in position 14 is any amino acid
  Variant (15)..(15): Xaa in position 15 is Ala, Pro or Val
RXVNXXXLXXXXRXX

SEQ ID NO: 125485 - protein, 25 aa, Artificial sequence
  protein pattern
  Variant (2)..(2): Xaa in position 2 is Phe, Ile, Leu, Met or Val
  Variant (3)..(3): Xaa in position 3 is any amino acid
  Variant (4)..(4): Xaa in position 4 is Glu or Gln
  Variant (6)..(11): Xaa in position 6 to 11 is any amino acid
  Variant (12)..(12): Xaa in position 12 is Lys or Arg
  Variant (13)..(13): Xaa in position 13 is any amino acid
  Variant (15)..(15): Xaa in position 15 is Ala, Ile or Val
  Variant (16)..(16): Xaa in position 16 is any amino acid
  Variant (20)..(20): Xaa in position 20 is Ala, Asp, Glu, Gln, Ser or Thr
  Variant (23)..(24): Xaa in position 23 to 24 is any amino acid
RXXXEXXXXXXXXDXXEELXRLXXH

SEQ ID NO: 125486 - protein, 21 aa, Artificial sequence
  protein pattern
  Variant (2)..(3): Xaa in position 2 to 3 is any amino acid
  Variant (4)..(4): Xaa in position 4 is Ile, Leu or Val
  Variant (6)..(13): Xaa in position 6 to 13 is any amino acid
  Variant (16)..(16): Xaa in position 16 is any amino acid
  Variant (17)..(17): Xaa in position 17 is Phe, Ile, Leu or Val
  Variant (18)..(18): Xaa in position 18 is Asp, Glu, Gln, Ser or Thr
  Variant (19)..(20): Xaa in position 19 to 20 is any amino acid
  Variant (21)..(21): Xaa in position 21 is Ile, Leu or Val
EXXXRXXXXXXXXRGXXXXXX

SEQ ID NO: 125487 - DNA, 717 bp, Escherichia coli
  CDS (1)..(717): transl_table=11
atgcgtttttaccggcctttggggcgcatctcggcgctcacctttgacctggatgataccctttacgataaccgtccggtgattttgcgcaccgagcgagaggcgcttacctttgtgcaaaattatcatccggcgctgcgcagcttccagaatgaagatctgcaacgcctgcgccaggcggtacgggaagcggaacccgagatttatcacgacgtgacgcgctggcgttttcgttcgattgaacaagcgatgctcgacgccgggctgagtgccgaagaagccagtgcaggcgcacacgcagcaatgatcaactttgccaaatggcgcagccgaatcgacgtcccgcagcaaactcacgacaccttaaaacagctggcgaagaaatggccgctggtggcgatcaccaacggtaacgcccagccggagctgtttggtttgggggattattttgagtttgtgctgcgcgctggcccgcacgggcgctcaaaaccgttcagcgatatgtactttttggctgcggaaaaactcaacgtgccgatcggcgagatcttacatgttggggacgatctcaccactgacgtgggtggggcaattcgcagcggaatgcaggcttgttggatcagaccggaaaatggcgatctgatgcaaacctgggacagccgtttactgccgcatctggaaatttcccggttggcatctctgacctcgctgatataa

SEQ ID NO: 125488 - protein, 238 aa, Escherichia coli
MRFYRPLGRISALTFDLDDTLYDNRPVILRTEREALTFVQNYHPALRSFQNEDLQRLRQAVREAEPEIYHDVTRWRFRSIEQAMLDAGLSAEEASAGAHAAMINFAKWRSRIDVPQQTHDTLKQLAKKWPLVAITNGNAQPELFGLGDYFEFVLRAGPHGRSKPFSDMYFLAAEKLNVPIGEILHVGDDLTTDVGGAIRSGMQACWIRPENGDLMQTWDSRLLPHLEISRLASLTSLI

SEQ ID NO: 125489 - DNA, 717 bp, Salmomella typhimurium
  CDS (1)..(717)
atgcgtttttaccggcctttggggcgtattgccgcgctcacctttgacctggatgataccctttatgataaccgtccggtgattttgcgtactgagcaggaagcgctcgcttttatgcagaattatcacccgtcgctacgttcgtttcaaaacgtcgatttacagcggatacggcaggcggtgcgtgaagcggagccggaaatctatcatgacgttacccgctggcgccatcgcgcgatagagcaggccatgcgggatgcgggattatcggcgcaggaggccattgccggcgcgaatgcggcgatgatgcattttgccaaatggcgcagccagattgaggttccgcaggctacccatgagacgttacagcagcttgcgaaaaaatggccgctggtggcgatcactaacggcaatgcccagccggaactgtttggcctcggcgattactttaagtttgtactgcgcgccggcccggatggacgttccaagccctttagcgacatgtatttcctggcggcggaaaaactgcatgtgccgatcggcgagatcctgcatgtcggcgatgatctgactaccgatgtggctggcgctattcgctgtgggatgcaggcctgctggattaaacctgaaaatgccgacctgatgcggacgcaggacagccgtttactgccgcatatcgaaatttcgcggttggcatctctcacctcgctgatataa

SEQ ID NO: 125490 - protein, 238 aa, Salmomella typhimurium
MRFYRPLGRIAALTFDLDDTLYDNRPVILRTEQEALAFMQNYHPSLRSFQNVDLQRIRQAVREAEPEIYHDVTRWRHRAIEQAMRDAGLSAQEAIAGANAAMMHFAKWRSQIEVPQATHETLQQLAKKWPLVAITNGNAQPELFGLGDYFKFVLRAGPDGRSKPFSDMYFLAAEKLHVPIGEILHVGDDLTTDVAGAIRCGMQACWIKPENADLMRTQDSRLLPHIEISRLASLTSLI

SEQ ID NO: 125491 - DNA, 711 bp, Pasteurella multocida subsp. multocida str. Pm70
  CDS (1)..(711): transl_table=11
atgaaattctaccgcactttacgccctttcaaattaatcagttttgatttggacgacaccctgtacgataacagcgacgtgattcgcctcgcggaagaaaattttattgaaaaagtcaaacttgaaagccagttaaatatctcatcagaagaatggcgagcctggaagcaacgtatcgaacaacgtcatcctatgttgtgtgaagatgtggttgcttggcggattgaaaccttgcaccaactcttagcaaattatcagaaaagtgcggcagagattgagcgagtttgtcagcaagcgatggcgttatttgtggaatggcgtcataaaattgatgtgccggtgcaaagtcaacaggtgttgaatttactaaaacaaaaatatccactggtggcgattactaacggtaatgttgagccacaacgtataggtttatcacaatttgatctcgtactacggggcggtgaacagggcagagcgaaaccccatcaagatttattccatcaaaccgcacaacactttggcgttcagccgcacgagattttacacgtcggtgataatttaatgacagacgtacaaggcgcgattcaggctgattgtcaggcggtttggattaatctttcaggcaaagtgctacgggatttcccagaagcaagattaatgccaaccttagaaattaccgagttgaaacagttgttaatgttggtggcgtaa

SEQ ID NO: 125492 - protein, 236 aa, Pasteurella multocida subsp. multocida str. Pm70
MKFYRTLRPFKLISFDLDDTLYDNSDVIRLAEENFIEKVKLESQLNISSEEWRAWKQRIEQRHPMLCEDVVAWRIETLHQLLANYQKSAAEIERVCQQAMALFVEWRHKIDVPVQSQQVLNLLKQKYPLVAITNGNVEPQRIGLSQFDLVLRGGEQGRAKPHQDLFHQTAQHFGVQPHEILHVGDNLMTDVQGAIQADCQAVWINLSGKVLRDFPEARLMPTLEITELKQLLMLVA

SEQ ID NO: 125493 - DNA, 717 bp, Escherichia coli O157:H7 EDL933
  CDS (1)..(717): transl_table=11
  misc_feature (329)..(329): s is g or c
atgcgtttttaccggcctttggggcgcatctcggcgctcacctttgacctggatgataccctttacgataaccgtccggtgattttgcgcaccgagcaggaggcgcttacctttgtgcaaaattaccatccggcgctgcgcagcttccagaatgaagatctgcaacgcctgcgccaggcggtacgggaagcggaacccgagatttatcacgacgtgacgcgctggcgttttcgctcaatagaacaagcgatgcttgacgccggattgagcgcggaagaagccagtgcaggcgcacacgcggcaatgatcaactttgctaaatggcgcascaggatcgacgtcccgcagcaaacccacgacaccttaaaacagctggcgaagaaatggccgctggtggcgatcaccaacggtaacgctcagccggaactgtttggtttgggggattattttgagtttgtgctgcgcgctggcccgcacgggcgctcgaaaccgttcagcgatatgtacttcctggcggcggaaaaactcaacgtgccgatcggcgagatcttacatgtaggtgacgatctcaccactgacgtgggtggggcaattcgcagcggaatgcaggcctgttggatcagaccggaaaatggcgatctgatgcaaacctgggatagccgtttactcccgcatctggaaatttcccggttggcatctctgacctcgctgatataa

SEQ ID NO: 125494 - protein, 238 aa, Escherichia coli O157:H7 EDL933
  misc_feature (110)..(110): The Xaa at location 110 stands for Ser, or Thr.
MRFYRPLGRISALTFDLDDTLYDNRPVILRTEQEALTFVQNYHPALRSFQNEDLQRLRQAVREAEPEIYHDVTRWRFRSIEQAMLDAGLSAEEASAGAHAAMINFAKWRXRIDVPQQTHDTLKQLAKKWPLVAITNGNAQPELFGLGDYFEFVLRAGPHGRSKPFSDMYFLAAEKLNVPIGEILHVGDDLTTDVGGAIRSGMQACWIRPENGDLMQTWDSRLLPHLEISRLASLTSLI

SEQ ID NO: 125495 - DNA, 717 bp, Yersinia pestis KIM
  CDS (1)..(717): transl_table=11
atgcatttttatcgtccacttgagcgtatttccgctattaccttcgatttggatgacacgttgtacgacaatcggccagtgatcgcgcggactgaacagcagtctgtggcttttttacaacagtatcatcccaatttagccctattacagccagcggatttccagcgcttacgtgctgaattattggcacaagatcccggtatctaccacgatgtcacgcaatggcgctggcaggcgattgaactgggcttgatgcgccatggcctgagtaaggcagaggcgcaagcgggagcggatgcggcgatggcaaactttgcgctatggcgcagccgtattgatgtgccgcaagccacacacgatacactgagcgcattagcggagcattacccactggtggccatcactaacggcaatgctgatcctaaagcttgcgggttggatcgctattttcaatttgtcttgcgctctgggcctcatggccgcgccaagccattccgcgatatgtatcataaagcggcgaaccatttggatattccgttaaaacatattctgcatgttggcgatgacctaacgacggatgttgccggctcactgcgctgtggtatgcaagcctgttggattaacgataggcaacaaaacctgatgactgcccgtgatagccgtttactgccacatattgaaatttcccagttggcatccctgacagcattgctataa

SEQ ID NO: 125496 - protein, 238 aa, Yersinia pestis KIM
MHFYRPLERISAITFDLDDTLYDNRPVIARTEQQSVAFLQQYHPNLALLQPADFQRLRAELLAQDPGIYHDVTQWRWQAIELGLMRHGLSKAEAQAGADAAMANFALWRSRIDVPQATHDTLSALAEHYPLVAITNGNADPKACGLDRYFQFVLRSGPHGRAKPFRDMYHKAANHLDIPLKHILHVGDDLTTDVAGSLRCGMQACWINDRQQNLMTARDSRLLPHIEISQLASLTALL

SEQ ID NO: 125497 - DNA, 723 bp, Shewanella oneidensis MR-1
  CDS (1)..(723): transl_table=11
atgcgttgttatcttagaccgcagaatattcgcgcgattagttttgatctcgacgacaccttatacgataacgaacctcacattatcaatgccgaagccgagttaatgcagtttttgcatcaggcttttccgttgacacaagcttggcagccgcagcagtggcgacgactcaaattacagctgctacagcaaaatccggccctagcccatgatacttcagcggcaagaatcgccacactccaccatggtttatcactcctaggttacagcgagtcggaggcgaaacgcggcgcagaggaaggtttggcctgtttctattttcatcgcagccattttcacgtttcagacgaggtcttggcactactctcgcgcttgtcggcccattttaggctgattgggatcaccaatggtaatgtggatgccgagcgggttggcttaggtgaagtatttgaatttgtgctgcatccgggaagcggtgtgcggatgaagccagcaaaagatatgttttcagaggcttgtgaacgcctaaatatcggcttagaacagttgttgcatgttggcgacagtatgaatgctgatgttcgtggcgcgcgcttggcgggatgtcaatcggtttggttaaatcccagttttggccgcgtggcatcgttgcctattgcagcactcttgccccatatggaaatagccacacttgattcattgctagagatgttattgccttga

SEQ ID NO: 125498 - protein, 240 aa, Shewanella oneidensis MR-1
MRCYLRPQNIRAISFDLDDTLYDNEPHIINAEAELMQFLHQAFPLTQAWQPQQWRRLKLQLLQQNPALAHDTSAARIATLHHGLSLLGYSESEAKRGAEEGLACFYFHRSHFHVSDEVLALLSRLSAHFRLIGITNGNVDAERVGLGEVFEFVLHPGSGVRMKPAKDMFSEACERLNIGLEQLLHVGDSMNADVRGARLAGCQSVWLNPSFGRVASLPIAALLPHMEIATLDSLLEMLLP

SEQ ID NO: 125499 - DNA, 696 bp, Pseudomonas putida KT2440
  CDS (1)..(696): transl_table=11
atgagcatcaagctgatcaccttcgacctcgacgataccctgtgggacaccgcgccggtgattgccaccgcggaagtcgtgctgcgcgactggctcgaggccaacgcaccaaccctcggcagcgtgccggtggaacacctgttcgccatccgcgagcgcctggtgcaagcagagcccggcctcaagcaccgcatcagcgccctgcgcaggcgcgtgctgtttcatgccctggaagaggtcggctacagcgaacagcacgcacaggcgctggccaacgaaggcttcgaagtgttcctgcatgcccgccaccaggtggagatcttcccagaggtgcagccggtgcttgaaatcttgcgccatcaatacatcctgggggtggtcaccaacggcaatgccgacgtcagccggctggggttggccgattacttccgctttgccctgtgcgccgaggacctgggcattggcaagccagacccggcgccgttcctcgaagcgctacgccgtggcgaggtggacgcgggtgcggcggtgcacatcggcgatcaccctggcgatgacattgccggtgcccagcgcgccggtttgcgcgcggtgtggttcaacccgcagggcaaggcctggactggcgatcaggcgccggatgccgaaatccagcgcctgtcgcagctgcccgacgtgctcgcgcgctggcgctga

SEQ ID NO: 125500 - protein, 231 aa, Pseudomonas putida KT2440
MSIKLITFDLDDTLWDTAPVIATAEVVLRDWLEANAPTLGSVPVEHLFAIRERLVQAEPGLKHRISALRRRVLFHALEEVGYSEQHAQALANEGFEVFLHARHQVEIFPEVQPVLEILRHQYILGVVTNGNADVSRLGLADYFRFALCAEDLGIGKPDPAPFLEALRRGEVDAGAAVHIGDHPGDDIAGAQRAGLRAVWFNPQGKAWTGDQAPDAEIQRLSQLPDVLARWR

SEQ ID NO: 125501 - DNA, 717 bp, Vibrio vulnificus CMCP6
  CDS (1)..(717): transl_table=11
atgaaacattaccgcccgctgcagccgatcgcggcaatgaccttcgacttagacgataccttgtatgataaccgtccggtgattgaacgcttggagcgtgaggtgttggcgtggctcgccgcgcagcatcctgcgacacaagtgatgagtcatagcgattggtctcagttaaagcgtgaagtggcggcaagctccccgcaattgcgcagtgatgtgacgcagctgcgtcatcagcaactgacccaggcatttttgcgtcttgggtacgatgtggtggcagcgcagcaagcggcggatgagggtgttgcggtagcgttgtattggcgcagccaattggtagtgccatcagaaacgcaccgtgtcatgagattactggcggacaagctgcctttagtggcgatcactaatggtaacgtggatgtcgcggcgatcggtttgcaaggctactttcaagccatcttaaaagcgggccctgatggagtggctaaaccagcgggcgatctgttccagcgtgcggagcagatcttgcagttgccggcgcagcgcattctccatgttggcgaccacttgctctcggatgtacatggtgccaatttgcatggttttatgtcgtgctggatcaatccaaagcagatcaatctacgtcagcaagccaaagccaaaactcttcctaatttagaaatcaatgaattaagtcagttactcctacttttgtaa

SEQ ID NO: 125502 - protein, 238 aa, Vibrio vulnificus CMCP6
MKHYRPLQPIAAMTFDLDDTLYDNRPVIERLEREVLAWLAAQHPATQVMSHSDWSQLKREVAASSPQLRSDVTQLRHQQLTQAFLRLGYDVVAAQQAADEGVAVALYWRSQLVVPSETHRVMRLLADKLPLVAITNGNVDVAAIGLQGYFQAILKAGPDGVAKPAGDLFQRAEQILQLPAQRILHVGDHLLSDVHGANLHGFMSCWINPKQINLRQQAKAKTLPNLEINELSQLLLLL

SEQ ID NO: 125503 - DNA, 717 bp, Salmonella enterica subsp. enterica serovar Typhi Ty2
  CDS (1)..(717): transl_table=11
atgcgtttttaccggcctttggggcgtattgccgcgctcacctttgacctggatgataccctttatgataaccgtccggtgattttgcgtactgagcaggaagcgctcgcttttatgcaaaattatcacccgtcgctacgttcgtttcaaaacgtcgatttacagcggatacggcaggcggtgcgtgaagcggagccggaaatctatcatgacgttacccgctggcgccatcgcgcgatagagcaggccatgcgggatgcgggattatcggcgcaggagtccattgccggtgcgaatgcggcgatgatgcattttgccaaatggcgcagccagattgaggttccgcaggctacccatgagacgttacagcagcttgcgaaaaaatggccgctggtggcgatcactaacggcaatgcccagccggaactgtttggcctcggcgattactttaagtttgtactgcgcgccggcccggatggacgttccaaaccgtttagcgacatgtatttcctggcggcggaaaaactgcatgtgccgatcggcgagatcctgcatgtcggcgacgatctgactaccgatgtggctggcgctattcgctgtgggatgcaggcctgctggattaaacctgaaaatgccgacctgatgcggacgcaggacagccgtttactgccgcatatcgaaatttcgcggttggcatctctcacctcgctgatataa

SEQ ID NO: 125504 - protein, 238 aa, Salmonella enterica subsp. enterica serovar Typhi Ty2
MRFYRPLGRIAALTFDLDDTLYDNRPVILRTEQEALAFMQNYHPSLRSFQNVDLQRIRQAVREAEPEIYHDVTRWRHRAIEQAMRDAGLSAQESIAGANAAMMHFAKWRSQIEVPQATHETLQQLAKKWPLVAITNGNAQPELFGLGDYFKFVLRAGPDGRSKPFSDMYFLAAEKLHVPIGEILHVGDDLTTDVAGAIRCGMQACWIKPENADLMRTQDSRLLPHIEISRLASLTSLI

SEQ ID NO: 125505 - DNA, 717 bp, Wigglesworthia glossinidia endosymbiont of Glossina brevipalpis
  CDS (1)..(717): transl_table=11
atgtatttttacagattaataaaaccatttaaagcaataacatttgatctagatgatactctttatgataataaaccagtaatagatcttgctgaaaaaaatttagtaaaatttttaatacaatctcatccaaacttaaaaaattttaatcataagtattataaattttgtaaaagtaaattattattgaataatccttgtatttattatgatatcaacttttggagaaaattatcaattaaattatcattaagaatttttaaaataaactctattgaaacgaatattattgcaaaaaaagccatgaaaatagcaaatttttggagaaataaagtttttatatcagaaaatacacatagaattctaaacaaacttagcaaaaaatttccattaatagcaattacaaatggagatttagacataaataaatgtaatttaaataaatattttttaaaaattttcagatctggaaaagatggatacccaaaacctttttctgacatgtatgatttatcagcaaaaaaattaaaattatctccacatcatattttacatgtaggagatagtttagaaactgatgtatttggttccataagatatggaatgcaatcctgttgggttaattttaaaaaaaaaaaaataatatctgatttaagcgcaaaaacacttcctcattttgaaatttctgatttaaaatatcttatgaattttatataa

SEQ ID NO: 125506 - protein, 238 aa, Wigglesworthia glossinidia endosymbiont of Glossina brevipalpis
MYFYRLIKPFKAITFDLDDTLYDNKPVIDLAEKNLVKFLIQSHPNLKNFNHKYYKFCKSKLLLNNPCIYYDINFWRKLSIKLSLRIFKINSIETNIIAKKAMKIANFWRNKVFISENTHRILNKLSKKFPLIAITNGDLDINKCNLNKYFLKIFRSGKDGYPKPFSDMYDLSAKKLKLSPHHILHVGDSLETDVFGSIRYGMQSCWVNFKKKKIISDLSAKTLPHFEISDLKYLMNFI

SEQ ID NO: 125507 - DNA, 729 bp, Candidatus Blochmannia floridanus
  CDS (1)..(729): transl_table=11
gtgatttattttcatcgaaagtttaaacctttttatgctataacactagatttagataatactttatataataattatccagttattgataaagttgaaaaagagttacggttgtttttacgaaaatatcatcctgttttacgtaactttaaaaaagaagattatcatattattcgggaaaaaattagattaattgatccagatatttaccataatgttaatagttggcgatggaaatctttggagagaatatttttacaatcaggattgtctgaacatgaagcaacattaggagctgataatgcaatggaatttgttttattttggcgtaatcaaattaatgtatctttaaaaacagatatggcattatcggctttaagttctaaatggcctttaattgctattactaatggtaatgctgattctgtattgtataattttaaaaggtattttagtgatattttgagggctggaattcatggaagagctaaaccttatacagatatgtatgatttagcatcaaaatattttgaaataccttgtcggtatattttacatataggagatgatttatatactgatgttcaaggagcaatgcgatcaggaatgcagtcttgctggataaaggaatatagtttggatatgaaaaataataatatattgatgaatccacaattgtgtccgaatttagaaatttcagatttaatgtcattaacatatttactataa

SEQ ID NO: 125508 - protein, 242 aa, Candidatus Blochmannia floridanus
MIYFHRKFKPFYAITLDLDNTLYNNYPVIDKVEKELRLFLRKYHPVLRNFKKEDYHIIREKIRLIDPDIYHNVNSWRWKSLERIFLQSGLSEHEATLGADNAMEFVLFWRNQINVSLKTDMALSALSSKWPLIAITNGNADSVLYNFKRYFSDILRAGIHGRAKPYTDMYDLASKYFEIPCRYILHIGDDLYTDVQGAMRSGMQSCWIKEYSLDMKNNNILMNPQLCPNLEISDLMSLTYLL

SEQ ID NO: 125509 - DNA, 717 bp, Photorhabdus luminescens subsp. laumondii TTO1
  CDS (1)..(717): transl_table=11
atgcgtttttaccggcctcttgcgccagtgttagcgatgacatttgatctggatgatacgctgtatgataatcatccagtcatggataaggcagaagaggaagtactgaactttgtacggcagtatgatcctaggttcagccaccttaatcatcaggatctatgtgctttccgtgaattgacacttgagcagcatcctgaaatttatcatgacatgactttatggcgctggtactcctcaaagttgatgttttgccattacggttttagccgtgaagacgctgatcggggggcagatgatgtcatggcgcatttcacactttggcgtaatcgaattgatatccctgaatcaacacataaaactctggcggcacttgctgaacaaatgccactggtagccattactaatggcaatgcagaaccagccgcctgtggtcttgccccttattttaaatttgtgctgcaagctggccctgatggacgcgcaaaaccttgcagcgatatgtactgtttggccgcggatcgtctgggtttagcgcttgggcaaatcttacatattggtgatgacttgaatactgatgtggcaggagcgctgggtagtggtatgcaagcttgctggatgaatactaagaataaaaaattattgcagacgatggaaagccgcctactgcctcacattgagatttacgatttggcttctttgacagcattgatataa

SEQ ID NO: 125510 - protein, 238 aa, Photorhabdus luminescens subsp. laumondii TTO1
MRFYRPLAPVLAMTFDLDDTLYDNHPVMDKAEEEVLNFVRQYDPRFSHLNHQDLCAFRELTLEQHPEIYHDMTLWRWYSSKLMFCHYGFSREDADRGADDVMAHFTLWRNRIDIPESTHKTLAALAEQMPLVAITNGNAEPAACGLAPYFKFVLQAGPDGRAKPCSDMYCLAADRLGLALGQILHIGDDLNTDVAGALGSGMQACWMNTKNKKLLQTMESRLLPHIEIYDLASLTALI

SEQ ID NO: 125511 - DNA, 717 bp, Vibrio vulnificus YJ016
  CDS (1)..(717): transl_table=11
atgaaacattaccgcccgctgcagccgatcgcggcaatgaccttcgacttagacgataccttgtatgataaccgtccggtgattgaacgcttggagcgtgaggtgctggcgtggctcgccgcgcagcatcctgcgacacaagtgatgagtcatagcgattggtctcagttaaagcgtgaagtggcggcaagctccccgcaattgcgcagtgatgtgacgcagctgcgtcatcagcaactgacccaggcatttttgcgtcttgggtacgatgtggcggcggcgcagcaagctgcggatgagggggtcgcggtggcgttgtattggcgcagccagttggtagtgccatccgaaacgcaccgtgtcatgagattattggcggacaaactgcctttagtggcgatcactaatggtaacgtggatgtcgcggcgatcggcctggatggctactttcaagccatcttaaaagcgggtcctgatggagtggctaaaccagcgagcgatctgttccagcgtgcggagcagatcttacagttgccggcgcagcgcattctccatgttggcgaccacttgctctcggatgtgcacggcgctaacttgcatggttttatgtcgtgctggatcaatccaaagcagatcaacctacgtcagcaagccaaagccaaaactcttcctaatttagaaatcaatgaattaagtcagttactcctacttttgtaa

SEQ ID NO: 125512 - protein, 238 aa, Vibrio vulnificus YJ016
MKHYRPLQPIAAMTFDLDDTLYDNRPVIERLEREVLAWLAAQHPATQVMSHSDWSQLKREVAASSPQLRSDVTQLRHQQLTQAFLRLGYDVAAAQQAADEGVAVALYWRSQLVVPSETHRVMRLLADKLPLVAITNGNVDVAAIGLDGYFQAILKAGPDGVAKPASDLFQRAEQILQLPAQRILHVGDHLLSDVHGANLHGFMSCWINPKQINLRQQAKAKTLPNLEINELSQLLLLL

SEQ ID NO: 125513 - DNA, 717 bp, Erwinia carotovora subsp. atroseptica SCRI1043
  CDS (1)..(717): transl_table=11
atgcatttttaccgatctcttggtccgatccgtgcgatcacgttcgatctggatgacacgctatacgacaacgcggacgtcattcgacgcacagggcaagagtcaatccgcttcctgcaagagtaccatcctgcgcttcgtgattttcaggcagatgatttccagaacttacgccagaccttgctggagcgcgaaccggacatctatcacgacgtcactgaatggcggcgccgtgcagttgaactggcgatgttagatcgtggcctgagtgccgcagagtctaaggatggcgcaaaagcggcaatggaaaactttgcccactggcgtagtcagattgcgattaccgaagagacgcaccagacgttggcagcattagctgagaaagtgccgctggcggcgatcaccaacggcaacgccgagccgcatcggttcggcctcgaacgctatttttctttcatcctgcgtgccggcccgcacggtcgtgccaagccgtttgatgatatgtaccatctggcggcggaaaaactcaatctgcctttgcatgagattctgcatgttggcgacgatctcacgaccgatgtggcggggtcgatccgctgcggtatgcaagcctgctggattaacctgcgtgaaggcagcctgacacagattggcgacgctcggctgctgccgcatattgaaatttcgcggttggcatcgctgtcggcattgctataa

SEQ ID NO: 125514 - protein, 238 aa, Erwinia carotovora subsp. atroseptica SCRI1043
MHFYRSLGPIRAITFDLDDTLYDNADVIRRTGQESIRFLQEYHPALRDFQADDFQNLRQTLLEREPDIYHDVTEWRRRAVELAMLDRGLSAAESKDGAKAAMENFAHWRSQIAITEETHQTLAALAEKVPLAAITNGNAEPHRFGLERYFSFILRAGPHGRAKPFDDMYHLAAEKLNLPLHEILHVGDDLTTDVAGSIRCGMQACWINLREGSLTQIGDARLLPHIEISRLASLSALL

SEQ ID NO: 125515 - DNA, 717 bp, Yersinia pseudotuberculosis IP 32953
  CDS (1)..(717): transl_table=11
atgcatttttatcgtccacttgagcgtatttccgctattaccttcgatttggatgacacgttgtacgacaatcggccagtgatcgcgcggactgaacagcagtctgtggcttttttacaacagtatcatcccaatttagccctattacagccagtggatttccagcgcttacgtgctgaattattggcacaagatcccggtatctaccacgatgtcacgcaatggcgctggcaggcgattgaactgggcttgatgcgccatggcctgagtaaggcagaggcgcaagcgggagcggatgcggcgatggcaaacttcgcgctatggcgcagccgtattgatgtgccgcaagccacacacgatacactgagcgcattggcggagcattacccgctggtggccatcactaacggcaatgctgatcctaaagcttgcgggttggatcgctattttcaatttgtcttacgctctgggcctcatggccgcgccaagccattccgcgatatgtatcataaagcggcgaaccatttggatattccgttaaaacatattctgcatgttggcgatgacctaacgacggatgttgccggctcactgcgctgtggtatgcaagcctgttggattaacgataggcaacaaaacctgatgactgcccgtgatagccgtttactgccacatattgaaatttcccagttggcatccctgacagcattgctataa

SEQ ID NO: 125516 - protein, 238 aa, Yersinia pseudotuberculosis IP 32953
MHFYRPLERISAITFDLDDTLYDNRPVIARTEQQSVAFLQQYHPNLALLQPVDFQRLRAELLAQDPGIYHDVTQWRWQAIELGLMRHGLSKAEAQAGADAAMANFALWRSRIDVPQATHDTLSALAEHYPLVAITNGNADPKACGLDRYFQFVLRSGPHGRAKPFRDMYHKAANHLDIPLKHILHVGDDLTTDVAGSLRCGMQACWINDRQQNLMTARDSRLLPHIEISQLASLTALL

SEQ ID NO: 125517 - DNA, 717 bp, Mannheimia succiniciproducens MBEL55E
  CDS (1)..(717): transl_table=11
atgaaattttaccgcactttagaagattttaaggttatctcttttgatttggacgatacgctttatgataattcgcaggttattttagatgcggagcggcattcggtggattttttacgggaaatcagtcaaattccgcaattggacggcggttattggcggtattggaaaaataaaaccgcactggattttccgcttttggcggaagatgtcacccaatggcgaataaaaactatcgtcgagttgttgcgggctcatcaaaaaagtgcggtcgaaattgagcgaatttctcatgcggcaatggaagatttctttgaatggcggcataaaatgcaggtaccgcagcaaagttttgaagtattaaataaattgaagagacagtataaattagccgcattaaccaacggaaacgtaacgccgtcaagagcggggtttgatcagttcgaattagtactcaccggcggtgtgcaagggcgggcaaagccccatcaggatctattccgccagaccgccggctactttaatgtgcggccccatgaaattttacacgtaggcgataatttagtcacagatgtgcaaggcgccattcaagcgggttgtcaggcagtttggattaatttatccgacaaaaaaattcagcatttcagtgaggcgacattagtacctacgttcgaaatcactgatttaaatgagttgctgttcttccgcaatctgtag

SEQ ID NO: 125518 - protein, 238 aa, Mannheimia succiniciproducens MBEL55E
MKFYRTLEDFKVISFDLDDTLYDNSQVILDAERHSVDFLREISQIPQLDGGYWRYWKNKTALDFPLLAEDVTQWRIKTIVELLRAHQKSAVEIERISHAAMEDFFEWRHKMQVPQQSFEVLNKLKRQYKLAALTNGNVTPSRAGFDQFELVLTGGVQGRAKPHQDLFRQTAGYFNVRPHEILHVGDNLVTDVQGAIQAGCQAVWINLSDKKIQHFSEATLVPTFEITDLNELLFFRNL

SEQ ID NO: 125519 - DNA, 723 bp, Burkholderia sp. 383
  CDS (1)..(723): transl_table=11
atgcgcctcacccaagtttccgctctctcgttcgacctggacgacaccctgtggccgttcgggccgtccgtcgtacgggccgaagcgacgcttcgcacgtggctgatcgagcatgcgcccggtaccgagcgtgtgctgcccacgcagcagtcgctaagcgacttgcgtgaggaatacgaacgattgtgtcccgagcttgccggcgacttccgtgccatgagaatcgggtcgatcaggcttgcgctggagcgtgcgaacgaagatgtcgcgctcaccgaccgtgcgtacgccgccttctatgccgcgcgcaaccgggtcgaattctatgacgatgcattgccggcgctcgcgtggctgagcgcgcggtttccgttgatcgcggtgaccaacggcaacgcggacctccggctgaccggcggcggcgaattctttcgtgcgacgctcagcgcgcaggcgttcggcgtcgcgaagcctgagcccgggatctttcatgcggcagcggaaacgctcgacgtgcagccggcggaactgctgcatgtcggcgacgactatcacctcgatatcgtcggtgcgttgaacgcggggcttcaggccgcgtgggtggttcgcgatacgcatccggaagcggagcgtgcgcagcaacaggccgcgacgccgcacctcacgctcagcgacctgtcgatgctgtgccgcatgctcggcgggcctgacgacgtcgcgtga

SEQ ID NO: 125520 - protein, 240 aa, Burkholderia sp. 383
MRLTQVSALSFDLDDTLWPFGPSVVRAEATLRTWLIEHAPGTERVLPTQQSLSDLREEYERLCPELAGDFRAMRIGSIRLALERANEDVALTDRAYAAFYAARNRVEFYDDALPALAWLSARFPLIAVTNGNADLRLTGGGEFFRATLSAQAFGVAKPEPGIFHAAAETLDVQPAELLHVGDDYHLDIVGALNAGLQAAWVVRDTHPEAERAQQQAATPHLTLSDLSMLCRMLGGPDDVA

SEQ ID NO: 125521 - DNA, 708 bp, Ralstonia metallidurans CH34
  CDS (1)..(708): transl_table=11
atgcgtctggccggtatctccgcaatatctctcgatctcgacgacaccctttgggctttcgaacctgccgtcgtgcgcgcggaacaggtcctgcatgactggttgctgcagcaagcgcccaaatccgcaccgatcctttcatcgccccaggtgctgcgtgacctccgcgtccagttcgaggccatgcgccccgaactggctggcaacatgcgcgcgctgcggctgggctcgatccggctggtgctcgacatgtcgaacgaagaccccggccttgccgaggccgcctacgacgctttctacgctgcgcgccagcaggtcgatttcttcgacgatgcgctgcccgcgctggaatggctgagccagcggtttccactcgtcgcggtatcgaatggcaatgcgaatctcaagctgactggcgggcaccagttcttccgggcatcgctgaacccgcagagcttcggcagcggcaaacccggcgccgcgattttccacgcggcagccgatgcagccggatgcgcgcccggccgaatgcttcacgtcggtgacgatcccgacctcgacgtagccggcgcgatcgccgccggcgcacaggccgcatgggtggtgcgctccgaagaggcgtccgccgcgcaatggtcacgcagcagcccgcctccgcacctgatcgttcgcgatctgcgggcgctgtgtcaggcactggacgcctga

SEQ ID NO: 125522 - protein, 235 aa, Ralstonia metallidurans CH34
MRLAGISAISLDLDDTLWAFEPAVVRAEQVLHDWLLQQAPKSAPILSSPQVLRDLRVQFEAMRPELAGNMRALRLGSIRLVLDMSNEDPGLAEAAYDAFYAARQQVDFFDDALPALEWLSQRFPLVAVSNGNANLKLTGGHQFFRASLNPQSFGSGKPGAAIFHAAADAAGCAPGRMLHVGDDPDLDVAGAIAAGAQAAWVVRSEEASAAQWSRSSPPPHLIVRDLRALCQALDA

SEQ ID NO: 125523 - DNA, 723 bp, Shewanella sp. MR-7
  CDS (1)..(723): transl_table=11
atgcgttgttatcttagaccccagaatattcgcgcgatcagcttcgatctcgacgacaccttatacgataacgaacctcacattctgaatgccgaagccgagttaacgcagtttttgcatcaggcttttccgctgacacaagcttggcaaccgcagcagtggcgactgctcaagttgcagctgatacaacagaacccagccctagcccatgacacctcggcggcgcgaattgcgactctgtataaaggtctttcgctgctcggttatagcgagtcggaggcaaaacggggcgcgcaggaaggtttggattgtttctattttcatcgcagccattttcaagtttcagacgaagtcttggcgctactcacgcgtttatcggcgcactttcggttgattggtatcaccaatggcaatgtggacgcacagcgtatcggcttgagtgaggtgttcgaatttgtgctgcatcctggcagtggtgtgcggatgaagcctgctaaagatatgttttcacaggcttgtgaaaggctggatatcggcttagacgaactgctgcacgtgggtgatagtatgaatgccgatgttcgcggtgcgcgcttagcggggtgtcagtcggtctggctcaacccgagttttggtcgcgtggcgtcgctgccgatagcagccctattaccccatatggaaattgcgaccctcgatgctctgctggagatgttgctgccataa

SEQ ID NO: 125524 - protein, 240 aa, Shewanella sp. MR-7
MRCYLRPQNIRAISFDLDDTLYDNEPHILNAEAELTQFLHQAFPLTQAWQPQQWRLLKLQLIQQNPALAHDTSAARIATLYKGLSLLGYSESEAKRGAQEGLDCFYFHRSHFQVSDEVLALLTRLSAHFRLIGITNGNVDAQRIGLSEVFEFVLHPGSGVRMKPAKDMFSQACERLDIGLDELLHVGDSMNADVRGARLAGCQSVWLNPSFGRVASLPIAALLPHMEIATLDALLEMLLP

SEQ ID NO: 125525 - DNA, 699 bp, Pseudomonas aeruginosa UCBPP-PA14
  CDS (1)..(699): transl_table=11
atgagcagcctgcgactgatcaccttcgacctcgacgacaccctgtgggacgtcgccccggtgatgaacaacgccgaggccctgctccgcgaatggctggcgagcaacgcggcgcgcctgggtccggtgcccatcgagcacctgtgggcgatccgcacccgcctgctggatcgcgaaccgatgctgcgccaccgtctcagcgagctgcgccggcgcatcctgttccatgccctgctcgacgccggttatccacaggcggaggcggaaagcctggccgaggccggtttccaggtattcctcgaagcgcgccaccgggtcaccctgtttcccgaagtccacccgaccctggagatcctcgccgaccgcttcaccctcggcgtgctcaccaacggtaacgccgacgtgcgccgcctgggcctggccgactacttccggttcgccctctgcgccgaggaactgggcgtcggcaagcccgacccgacgccattccgcgaagccctgaagcgcgccggcgtcgaggcctcggcagcggtacacatcggcgaccaccccaacgacgacatcgccggagcgcgccgcgccggcatgcgtgccatctggttcaacccaaacggcaagccctgggccggggaggaagagccgagcgcggagatccgcagcctcgccgagctgccggccctgctcgcccgcctgcaatga

SEQ ID NO: 125526 - protein, 232 aa, Pseudomonas aeruginosa UCBPP-PA14
MSSLRLITFDLDDTLWDVAPVMNNAEALLREWLASNAARLGPVPIEHLWAIRTRLLDREPMLRHRLSELRRRILFHALLDAGYPQAEAESLAEAGFQVFLEARHRVTLFPEVHPTLEILADRFTLGVLTNGNADVRRLGLADYFRFALCAEELGVGKPDPTPFREALKRAGVEASAAVHIGDHPNDDIAGARRAGMRAIWFNPNGKPWAGEEEPSAEIRSLAELPALLARLQ

SEQ ID NO: 125527 - DNA, 693 bp, Acidovorax sp. JS42
  CDS (1)..(693): transl_table=11
atgctcgatatttcccgcatccgcgccatcactcttgacctggatgacaccctatggcctatctggcccaccattgcacgggctgaggaggtgctgatcgagtggctgctcacggtggcgcccggcgcctcggcgctgctggcgtcgcccgacacgtcccgcatgctccgtgcgcaggtggcgtccgcccatgcgcacctgtcgcacgacctgacggtgctgcgccgcgagaccatccgcgcagcgctgcgccaggcgggcgaggacgagtcgctcacggaccaggggttcgacgtgttcttcgccgagcgccagcgggtggagctgttcgacgatgcgatagcggcgctggaattcctctcggcgcgccacccggtggtggcgctgtccaatggcaatgcggacctgcaggccatcggcatcggacagtactttcgcgccagcatcagcgcccgcgagttcggtattgccaagcccgacccccgcatcttccatgaggcggcgcgggtgctggacctgccgcccggggccgtgctgcacataggcgacgacgccacgctggatgcgcatggcgcgctgggcgccggcatgcaggcggcctggctcaatcggggcgatgcggcgtggccgcacgcggtggcgccccctgccaccgtgcgcgacctggccgcgctgtgccgtctgctggggtag

SEQ ID NO: 125528 - protein, 230 aa, Acidovorax sp. JS42
MLDISRIRAITLDLDDTLWPIWPTIARAEEVLIEWLLTVAPGASALLASPDTSRMLRAQVASAHAHLSHDLTVLRRETIRAALRQAGEDESLTDQGFDVFFAERQRVELFDDAIAALEFLSARHPVVALSNGNADLQAIGIGQYFRASISAREFGIAKPDPRIFHEAARVLDLPPGAVLHIGDDATLDAHGALGAGMQAAWLNRGDAAWPHAVAPPATVRDLAALCRLLG

SEQ ID NO: 125529 - DNA, 729 bp, Photobacterium sp. SKA34
  CDS (1)..(729): transl_table=11
atgcatttttaccgccaattaacaccaattagagccttaacttttgatcttgacgataccttatacgataaccgtccggtgattgttcgtgctgaacaagcaatgtttgactggttaacgcagatcttaccgtcacgtatcatgattgataaaaccgtttgggcatcgcttaaatcgcaattagcaatgctagatccaatgctcaaacatgatgtcagtttgtggcgatatgaaaccattaaaataggtttaatgcagctagggtttcgtctgccagaggcagaaactttagcgcagcaggggttagatactgtactggcggttcgcaaccaagtcgaggttcctgtagaaacacatcgagttttaaaacaattaagtgaccatttaccgctagtcgggttaacaaatggtaatgttgatgcagaaaaaattggcttagcgccatattttgtcgacgtgtttcaagcgggcaaagatggtttggcaaaacctgaggctgatttatttaaccttgctgttaatacccttaatttaccagcagcgacaattttacatgtgggtgatcatcttattaccgatgtcaaaggtgcgaaacagcatggctttcaggtgtgttggtttaacgatcagcaaaaattgattcagcagcaatcgaaagcgttgattttacctgacgtagaaattactcaattggcgcagctgcttgagattgttggattagagatttaa

SEQ ID NO: 125530 - protein, 242 aa, Photobacterium sp. SKA34
MHFYRQLTPIRALTFDLDDTLYDNRPVIVRAEQAMFDWLTQILPSRIMIDKTVWASLKSQLAMLDPMLKHDVSLWRYETIKIGLMQLGFRLPEAETLAQQGLDTVLAVRNQVEVPVETHRVLKQLSDHLPLVGLTNGNVDAEKIGLAPYFVDVFQAGKDGLAKPEADLFNLAVNTLNLPAATILHVGDHLITDVKGAKQHGFQVCWFNDQQKLIQQQSKALILPDVEITQLAQLLEIVGLEI

SEQ ID NO: 125531 - DNA, 711 bp, Alteromonadales bacterium TW-7
  CDS (1)..(711): transl_table=11
atgatccgatttaatcgtgcaatacgccctttttctgtcatgagctttgatttagacgacacgctatacaacaaccacccaattataaaagcagccgttagcgcccaacaaaattacttaaatgcattaccacgctaccaagaacaaggccctcaatactggcaacaatgccggcaacttgccgctctgcaacagcccgagctaaaagacaatgtaacgcagtggcgcaagcacacattgcgtttagcactatcaaagttagggtttactgaacaagaagtagcactgcacgctagtaacgcctataacgcatttgccgatgcacgcagtaacattgtagtcagcgacgacgtattagcgctacttgataacttagcgcaacattttaccttaatcgccataaccaatggcaatgttgaaatagaacgctttaatttacacaataagtttgagctagtgctacaagcgggcatgcacggtaaagctaaacctcatagcaccttatttgacaaagcagctgcgcacttaaaagtcaccaaaagcgacatacttcatattggtgatagcctagataccgacgtacaaggcgccaataacacaggttgccaatcagtgtggttaaacgatcaaagcgctaagtataactacaaaggcctagctgacgtggaaatcaccaatattcacgcattaacgcattttattcgttcataa

SEQ ID NO: 125532 - protein, 236 aa, Alteromonadales bacterium TW-7
MIRFNRAIRPFSVMSFDLDDTLYNNHPIIKAAVSAQQNYLNALPRYQEQGPQYWQQCRQLAALQQPELKDNVTQWRKHTLRLALSKLGFTEQEVALHASNAYNAFADARSNIVVSDDVLALLDNLAQHFTLIAITNGNVEIERFNLHNKFELVLQAGMHGKAKPHSTLFDKAAAHLKVTKSDILHIGDSLDTDVQGANNTGCQSVWLNDQSAKYNYKGLADVEITNIHALTHFIRS

SEQ ID NO: 125533 - DNA, 696 bp, Pseudomonas putida GB-1
  CDS (1)..(696): transl_table=11
atgagcatcaagctgatcaccttcgacctggacgataccctgtgggacaccgcgccagtgattgccactgccgaagtcgtgctgcgcgactggctcgaagccaacgccccgatccttggcggcgtgccggtggagcacctgttcgccatccgcgagcgcctggtacaagccgagcccggcctcaagcaccgcatcagcgccctgcgccggcgcgtgctgttccatgccttggaagaggtcggctacagcgagaaacatgcgcaggaactggccaacgaaggtttcgaagtattcctgcatgcccgccatcaggtggagatcttccccgaagtgcaaccggtgctggagattctgcgccaccactacaccctgggcgtggtcaccaacggcaacgccgatgtgagccggctggggctggcggactacttccgctttgccctgtgcgctgaggacctcggtatcggcaagccggacccggcgccgtttctggaagccctacgccgtggagaatcggaagccagcgcggcggtgcacattggcgatcaccccggcgatgacatcgctggcgcccagcgcgccggtctgcgtgcggtatggttcaacccacagggtaaggcatgggcgggcgaacaggcaccggatgccgagatccagcgcctgtcgcagctgcccgacatcctttcgcgctggcgttga

SEQ ID NO: 125534 - protein, 231 aa, Pseudomonas putida GB-1
MSIKLITFDLDDTLWDTAPVIATAEVVLRDWLEANAPILGGVPVEHLFAIRERLVQAEPGLKHRISALRRRVLFHALEEVGYSEKHAQELANEGFEVFLHARHQVEIFPEVQPVLEILRHHYTLGVVTNGNADVSRLGLADYFRFALCAEDLGIGKPDPAPFLEALRRGESEASAAVHIGDHPGDDIAGAQRAGLRAVWFNPQGKAWAGEQAPDAEIQRLSQLPDILSRWR

SEQ ID NO: 125535 - DNA, 717 bp, Serratia marcescens
  CDS (1)..(717): transl_table=11
atgcatttttatcgcccgctgcgcccgctggcggcgctgactttcgatctggacgacacgctgtatgacaatcgtccggtgattagacagaccgaacaacagtcggtggctttcctgcagagctaccatcccggtctgaacagcttccagtcggcggatttccaccgcctgcgccaggagctgcgtgagcaggatccggagatctaccacgatgtcacccagtggcgctggcgcgccattcatctggcgctgagccggcaggggctgcgcgacgctgaagcggcaatcggggccgatgcggcgatgcaaaacttcgcgctgtggcgcagccgcatcgaggtaccggaagcgacccacgccacgctgaaggcgctggccgcgcgctatccgctggtggcgatcaccaacggcaacgccgatccggcgcagtgcggcctggacggctacttccagttcgtgttgcgctccgggccggacgggcgcgccaaaccgtaccaggacatgtatcacctggccgtcgaacggctgggcgtggcgcccgggcagatcctgcacgtgggcgacgatctgactaccgacgtcgccggcgcgctgcgcgcggggctgcaggcctgttggatcaacgatcggcaacgctgcctgatgcaggccgccgacagccgcctgctgccgcatattgagatttcgcagttggcatcgctgacagcattgttataa

SEQ ID NO: 125536 - protein, 238 aa, Serratia marcescens
MHFYRPLRPLAALTFDLDDTLYDNRPVIRQTEQQSVAFLQSYHPGLNSFQSADFHRLRQELREQDPEIYHDVTQWRWRAIHLALSRQGLRDAEAAIGADAAMQNFALWRSRIEVPEATHATLKALAARYPLVAITNGNADPAQCGLDGYFQFVLRSGPDGRAKPYQDMYHLAVERLGVAPGQILHVGDDLTTDVAGALRAGLQACWINDRQRCLMQAADSRLLPHIEISQLASLTALL

SEQ ID NO: 125537 - DNA, 23 bp, Artificial sequence
  primer
atgcgtttttaccggcctttggg

SEQ ID NO: 125538 - DNA, 24 bp, Artificial sequence
  primer
ttatatcagcgaggtcagagatgc

SEQ ID NO: 125539 - protein, 225 aa, Artificial sequence
  consensus sequence
  Variant (8)..(8): Xaa in position 8 is any amino acid
  Variant (10)..(11): Xaa in position 10 to 11 is any amino acid
  Variant (13)..(13): Xaa in position 13 is any amino acid
  Variant (15)..(17): Xaa in position 15 to 17 is any amino acid
  Variant (19)..(28): Xaa in position 19 to 28 is any amino acid
  Variant (29)..(29): Xaa in position 29 is any or no amino acid
  Variant (31)..(50): Xaa in position 31 to 50 is any amino acid
  Variant (51)..(53): Xaa in position 51 to 53 is any or no amino acid
  Variant (55)..(63): Xaa in position 55 to 63 is any amino acid
  Variant (65)..(76): Xaa in position 65 to 76 is any amino acid
  Variant (77)..(80): Xaa in position 77 to 80 is any or no amino acid
  Variant (82)..(85): Xaa in position 82 to 85 is any amino acid
  Variant (87)..(92): Xaa in position 87 to 92 is any amino acid
  Variant (94)..(96): Xaa in position 94 to 96 is any amino acid
  Variant (98)..(109): Xaa in position 98 to 109 is any amino acid
  Variant (111)..(112): Xaa in position 111 to 112 is any amino acid
  Variant (114)..(118): Xaa in position 114 to 118 is any amino acid
  Variant (120)..(122): Xaa in position 120 to 122 is any amino acid
  Variant (127)..(132): Xaa in position 127 to 132 is any amino acid
  Variant (135)..(136): Xaa in position 135 to 136 is any amino acid
  Variant (137)..(137): Xaa in position 137 is any or no amino acid
  Variant (139)..(141): Xaa in position 139 to 141 is any amino acid
  Variant (143)..(147): Xaa in position 143 to 147 is any amino acid
  Variant (149)..(150): Xaa in position 149 to 150 is any amino acid
  Variant (153)..(159): Xaa in position 153 to 159 is any amino acid
  Variant (161)..(171): Xaa in position 161 to 171 is any amino acid
  Variant (174)..(174): Xaa in position 174 is any amino acid
  Variant (177)..(180): Xaa in position 177 to 180 is any amino acid
  Variant (183)..(183): Xaa in position 183 is any amino acid
  Variant (186)..(188): Xaa in position 186 to 188 is any amino acid
  Variant (190)..(190): Xaa in position 190 is any amino acid
  Variant (192)..(193): Xaa in position 192 to 193 is any amino acid
  Variant (195)..(207): Xaa in position 195 to 207 is any amino acid
  Variant (208)..(214): Xaa in position 208 to 214 is any or no amino acid
  Variant (216)..(216): Xaa in position 216 is any amino acid
  Variant (217)..(217): Xaa in position 217 is any or no amino acid
  Variant (220)..(221): Xaa in position 220 to 221 is any amino acid
  Variant (223)..(224): Xaa in position 223 to 224 is any amino acid
FDLDDTLXDXXPXIXXXEXXXXXXXXXXXPXXXXXXXXXXXXXXXXXXXXXXXPXXXXXXXXXRXXXXXXXXXXXXXXXXEXXXXAXXXXXXFXXXRXXXXXXXXXXXXLXXLXXXXXLXXXTNGNXXXXXXGLXXXFXXXLXXXXXGXXKPXXXXXXXAXXXXXXXXXXXLHXGDXXXXDVXGAXXXGXQXXWXXXXXXXXXXXXXXXXXXXXPXXEIXXLXXL

SEQ ID NO: 125540 - protein, 23 aa, Artificial sequence
  protein pattern
  Variant (2)..(3): Xaa in position 2 to 3 is any amino acid
  Variant (4)..(6): Xaa in position 4 to 6 is any or no amino acid
  Variant (13)..(13): Xaa in position 13 is Trp or Tyr
  Variant (14)..(14): Xaa in position 14 is Ala, Asp or Pro
  Variant (15)..(16): Xaa in position 15 to 16 is any amino acid
  Variant (17)..(17): Xaa in position 17 is Asp, Pro or Gln
  Variant (18)..(18): Xaa in position 18 is any amino acid
  Variant (19)..(19): Xaa in position 19 is Ile, Met or Val
  Variant (20)..(22): Xaa in position 20 to 22 is any amino acid
  Variant (23)..(23): Xaa in position 23 is Glu or Gly
IXXXXXDLDDTLXXXXXXXXXXX

SEQ ID NO: 125541 - DNA, 1011 bp, Escherichia coli
  CDS (1)..(1011): transl_table=11
atgagacgagaacttgccatcgaattttcccgcgtcaccgaatcagcggcgctggctggctacaaatggttaggacgcggcgataaaaacaccgcggacggcgcggcggtaaacgccatgcgtattatgctcaaccaggtcaacattgacggcaccatcgtcattggtgaaggtgaaatcgacgaagcaccgatgctctacattggtgaaaaagtcggtactggtcgcggcgacgcggtagatattgctgttgatccgattgaaggcacgcgcatgacggcgatgggccaggctaacgcgctggcggtgctggcagtaggcgataaaggctgcttcctcaatgcgccggatatgtatatggagaagctgattgtcgggccgggagccaaaggcaccattgatctgaacctgccgctggcggataacctgcgcaatgtagcggcggcgctcggcaaaccgttgagcgaactgacggtaacgattctggctaaaccacgccacgatgccgttatcgctgaaatgcagcaactcggcgtacgcgtatttgctattccggacggcgacgttgcggcctcaattctcacctgtatgccagacagcgaagttgacgtgctgtacggtattggtggcgcgccggaaggcgtagtttctgcggcggtgatccgcgcattagatggcgacatgaacggtcgtctgctggcgcgtcatgacgtcaaaggcgacaacgaagagaatcgtcgcattggcgagcaggagctggcacgctgcaaagcgatgggcatcgaagccggtaaagtattgcgcctgggcgatatggcgcgcagcgataacgtcatcttctctgccaccggtattaccaaaggcgatctgctggaaggcattagccgcaaaggcaatatcgcgactaccgaaacgctgctgatccgcggcaagtcacgcaccattcgccgcattcagtccatccactatctggatcgcaaagacccggaaatgcaggtgcacatcctctaa

SEQ ID NO: 125542 - protein, 336 aa, Escherichia coli
MRRELAIEFSRVTESAALAGYKWLGRGDKNTADGAAVNAMRIMLNQVNIDGTIVIGEGEIDEAPMLYIGEKVGTGRGDAVDIAVDPIEGTRMTAMGQANALAVLAVGDKGCFLNAPDMYMEKLIVGPGAKGTIDLNLPLADNLRNVAAALGKPLSELTVTILAKPRHDAVIAEMQQLGVRVFAIPDGDVAASILTCMPDSEVDVLYGIGGAPEGVVSAAVIRALDGDMNGRLLARHDVKGDNEENRRIGEQELARCKAMGIEAGKVLRLGDMARSDNVIFSATGITKGDLLEGISRKGNIATTETLLIRGKSRTIRRIQSIHYLDRKDPEMQVHIL

SEQ ID NO: 125543 - DNA, 984 bp, Mesorhizobium loti MAFF303099
  CDS (1)..(984): transl_table=11
atgaatgtggcccagaacatcgtcgccggccttgaccggatactcaccatggaactggtgcgcgtcaccgaaagggccgccgtggcagccgccaggctgcgcggccgtggcgacgagaaggctgccgaccaggtcgcggtcgatgccatgcgccaggagctcaaccgccttgccatcaagggcacggtggtgatcggcgagggcgagcgcgacgaggcgccgatgctctatatcggcgaggaggtcggcactggcaaaggaccggccgtcgacatcgcgctcgatccgctcgaaggcacgacgatctgcgccaagaacctgcccaacgcgcttgccgtcatcgccatcgccgagaagggcagcctgctgttcgcgcccgacgtctatatggacaagatcgccatcggtccgggctatgccgaaggcgtcatcgatatcgacgcctcgccagccgaaaacatcgccagcctcgcccgggctaagggcgtcgcggtgtccgacatcaccacctgcatcctcgaccgtccgcgccacgccaagctgatcgatgccgtgcgcgccacgggagcggcgatccggctgatcggtgacggcgatgtcgccggcgtcatccacaccaccgacccggaggaaaccggcatcgatctctatctcggcactggcggcgcgccggaaggcgtgctggcggcggcggcactgcgctgcaccggcggccagatgcagggccggctgatcctcgatacgccggaaaaggtcgcgcgcgccgccaaaatgggcatttccgatccgaagcggatctatcacgcggaagacatggcgcgcggcgacgtgctgttcgcggccaccggcgtcaccgacggcaacatgctggccggcgtcaagttcggccgcacctacatcaccacgcacacgatcgtgctgcgctcctcgtcgcggaccgtgcgcgaaatcaaggcccggcaccaggatctggataagttctag

SEQ ID NO: 125544 - protein, 327 aa, Mesorhizobium loti MAFF303099
MNVAQNIVAGLDRILTMELVRVTERAAVAAARLRGRGDEKAADQVAVDAMRQELNRLAIKGTVVIGEGERDEAPMLYIGEEVGTGKGPAVDIALDPLEGTTICAKNLPNALAVIAIAEKGSLLFAPDVYMDKIAIGPGYAEGVIDIDASPAENIASLARAKGVAVSDITTCILDRPRHAKLIDAVRATGAAIRLIGDGDVAGVIHTTDPEETGIDLYLGTGGAPEGVLAAAALRCTGGQMQGRLILDTPEKVARAAKMGISDPKRIYHAEDMARGDVLFAATGVTDGNMLAGVKFGRTYITTHTIVLRSSSRTVREIKARHQDLDKF

SEQ ID NO: 125545 - DNA, 1008 bp, Vibrio cholerae O1 biovar eltor str. N16961
  CDS (1)..(1008): transl_table=11
atgaaacgcgatttagcaatggctttttcccgcgtcaccgaaggtgccgcactcgcaggctataaatggttaggacgtggcgataaaaatgccgccgatggtgctgcggtagaagtgatgcgcatcctgctcaaccaaacggagatcagcggtgaaattgtgattggtgaaggcgaaattgatgaagcgcctatgctgtacattggcgagcaagtcggtctggggggcgatgcggttgatattgcggtcgaccctatcgaaggtactcgcatgaccgccatgggacaatccaatgccttagccgtgcttgcagccggtgaaaaaggcagtttcctgaaagcgcccgatatgtacatggaaaagttggtggttggccccggtgcaaaaggctgcatcgacctcaatttgccgctcaaagataacctaaaccatgtcgcaaaagcactcggcaaacccttaaccgatttggtggtgatcacgcttgccaaaccgcgccacgaccaagtgattgcgcaaatgcaacagatgggcgtacgcgtttttgcagtgccggatggcgatgtcgccgcatcgattctgacctgtatgcccgatagtgaagtggacatgatgtactgcattggtggggcaccagaaggcgtagtctctgcggcggtgatccgcgcgctggatggcgacatgcaaggccgtttactgccgcgtcatcaagtcaaaggcgatagcgaagataatcgcatttggggggcaaaagagctcgaacgctgtcaacaaatgggcgtagaagccggtaaagtgctgaaaatggaagacatggcacgcagcgataacgtgattttcgcggccaccggcatcaccaaaggtgatttgcttgatggcatcagtcgcaaaggcaatatcgcaacaacagaaacactgctgatccgtggccgctgtcgcaccattcgtcgtattcgctcaattcactatctggagcgtaaagaccaacaagtgcgcgacatcattctctaa

SEQ ID NO: 125546 - protein, 335 aa, Vibrio cholerae O1 biovar eltor str. N16961
MKRDLAMAFSRVTEGAALAGYKWLGRGDKNAADGAAVEVMRILLNQTEISGEIVIGEGEIDEAPMLYIGEQVGLGGDAVDIAVDPIEGTRMTAMGQSNALAVLAAGEKGSFLKAPDMYMEKLVVGPGAKGCIDLNLPLKDNLNHVAKALGKPLTDLVVITLAKPRHDQVIAQMQQMGVRVFAVPDGDVAASILTCMPDSEVDMMYCIGGAPEGVVSAAVIRALDGDMQGRLLPRHQVKGDSEDNRIWGAKELERCQQMGVEAGKVLKMEDMARSDNVIFAATGITKGDLLDGISRKGNIATTETLLIRGRCRTIRRIRSIHYLERKDQQVRDIIL

SEQ ID NO: 125547 - DNA, 972 bp, Bacillus halodurans C-125
  CDS (1)..(972): transl_table=11
ttggatcgggaattagcattagaaattgttcgtgtaaccgaagcagccgccctttcgtctgctcaatggttaggacgcggaatgaagaatgaagcagatgatgcggccaccacagcgatgcgaacgatgtttgattcagttaactgtaaaggaacggtcgtcattggtgaaggggagctagacgaagctcctatgctttatatcggtgaagaagtaggaagcggccacggtcctgaagtcgatattgccgttgatccgttggaaggaacgaatatcgtcgcgaaaggacatccaaatgcaatggccgtgatcgccgtcgccgataaaggtacattgcttcatgccccagatatgtacatggaaaaaattgctgtcggtcctaaagccgccggattgattcgcttggatgacccgattgaaaaaacgatcgatattgtggcaaaaatgaccaataaacgtgttcgcgatgtcaccgtcattatccaagagcgagagcgccatgacgaattgatcgaacggattcgaaacaaaggcgcacgggttaaactttttggtgacggagatgtgggcgcagctattgcaactgccctaccacaaacggggatcgatttgtttatcggcacaggtggtgctccagaaggtgtcatttccgcggcagccattaaagcacttggtggcgacatgcaagcacgactcgttccaatgaacgacgaagaatttgaacgctgtaaacgaatggggcttgaagatccacgtcaagtactgagcttggatgatttagtccgcggagatgatgcgatttttgctgccacaggggtatcctctggtgagcttttagaaggggtgcgctttctcggtggggatttagtggaaacagactccattgtcatgcgagcaaaaactcgtaccgttcgatacatcaaagcccaccatcgccttgatcacaaaccccatttaataattaacgactga

SEQ ID NO: 125548 - protein, 323 aa, Bacillus halodurans C-125
MDRELALEIVRVTEAAALSSAQWLGRGMKNEADDAATTAMRTMFDSVNCKGTVVIGEGELDEAPMLYIGEEVGSGHGPEVDIAVDPLEGTNIVAKGHPNAMAVIAVADKGTLLHAPDMYMEKIAVGPKAAGLIRLDDPIEKTIDIVAKMTNKRVRDVTVIIQERERHDELIERIRNKGARVKLFGDGDVGAAIATALPQTGIDLFIGTGGAPEGVISAAAIKALGGDMQARLVPMNDEEFERCKRMGLEDPRQVLSLDDLVRGDDAIFAATGVSSGELLEGVRFLGGDLVETDSIVMRAKTRTVRYIKAHHRLDHKPHLIIND

SEQ ID NO: 125549 - DNA, 966 bp, Bacillus halodurans C-125
  CDS (1)..(966): transl_table=11
atggaacgaagcctttccatggaacttgtacgtgtgacggaagctgcagcacttgcctctgctcgttggatggggcgcggaaacaaggaagaggccgatcgagcggccacggaagccatgcgtgatgtatttgatacgattccgatgaaaggaaccgtagtaatcggcgaaggtgaaatggatgaagcgccgatgctttacattggcgaaaagctaggaaacgggtatggtccacgagtggatgtggctgttgatccattagaagggacgaacatcgtggcctctggcttatggaatgcgttagccgtcattgcggttgcagaccatggtaacctccttcatgcaccggatatgtacatggagaaaattgctgtcggtccagaagcggttgggaccgtggacatcgacgctcctgtgatcgataatttacgcgcggtagcgaaagcaaaaaataaggatgtagaagatctagttgtcgtaacgttaaatcggaagcgccatgataaattaattgatgagattcgccaagcgggagctagaatcaagttaattcctgatggtgacgtggcggcggcgatcaacacagcttttgacgatacaggtgtggaccttttgttagggtcaggtggcgctcctgaaggcgttctcgcagcagtcgggttaaagtgtctaggtggtgagcttcaaggaaagctccttccacagacagatgaagaattggctcgttgtaaggcaatgggaattgaagatgtcaacaaagtcttctccctcgacgagctcgtaaaaggagatgactgcatctttgcagcaacaggtgtaaccgacggtgaattgttgaaaggcgttcattataaaggttcaaccgcaacgactcaatcccttgtcatgcgcgcaaaatcaggtacggtgcgctttgtcgacggaaagcatagcatgaagaaaaaaccggaccttgtcattaagtaa

SEQ ID NO: 125550 - protein, 321 aa, Bacillus halodurans C-125
MERSLSMELVRVTEAAALASARWMGRGNKEEADRAATEAMRDVFDTIPMKGTVVIGEGEMDEAPMLYIGEKLGNGYGPRVDVAVDPLEGTNIVASGLWNALAVIAVADHGNLLHAPDMYMEKIAVGPEAVGTVDIDAPVIDNLRAVAKAKNKDVEDLVVVTLNRKRHDKLIDEIRQAGARIKLIPDGDVAAAINTAFDDTGVDLLLGSGGAPEGVLAAVGLKCLGGELQGKLLPQTDEELARCKAMGIEDVNKVFSLDELVKGDDCIFAATGVTDGELLKGVHYKGSTATTQSLVMRAKSGTVRFVDGKHSMKKKPDLVIK

SEQ ID NO: 125551 - DNA, 1014 bp, Pasteurella multocida subsp. multocida str. Pm70
  CDS (1)..(1014): transl_table=11
atgaatagagcattagcgattgaattttcaagagtcactgaagctgccgcccttgcaggttttgcatggttaggtcgtggcgataaagaagccgcggataatgctgcagtacaagccatgcgtttgatgttaaatcaagttgaaatggatgcggaagtcgtgattggtgaaggtgaaattgatgaagcgcctatgctttatatcggtgaaaaagtgggaaatggtaaaggtgaacaaatttctattgcagttgatcctattgaaggcacaagaatgactgccatggggcaggcaaatgcgttatccgttttagctgccggtgggaaagaaacctttttaaaagcacctgatatgtatatggaaaaattagtggtgggtcctgaagtcaaaggtatggtggatctcaatttaccactagaacaaaatttacgtcgagtggcatcaaaaatggggaaattactttctcaacttacagtgattactttagataaaccccgtcatcatgagatgatcaaaagaatgcaacaattaggtgtgaaagtattggctataccagatggtgatgtagcagcctcgatattgtgttgtttaccagatggtggggtagacatgctatacggtattggtggcgcacctgaaggcgtcattgcagcggcggctgtgcgtgctttaggtggcgatatgcaagcccgtttattaccacgtgatcacgtaaaaggagatacacctgaaaatcaagcacttgctgcagaggaaattcgtcgttgccaagaaatgggcattgaagttaatcaagtattaaaactagaagatctggtacgtgatgataatttagtcttttctgccactggtattactaacggggatttgttgaaagggattcaccgtaaaggcaatcttgctacgacggaaacactacttattcgtggtcgttctcgcaccattcgtcgcatccaatcagtacattatttggatagaaaagataccgcactttatcgtattattggtgcttaa

SEQ ID NO: 125552 - protein, 337 aa, Pasteurella multocida subsp. multocida str. Pm70
MNRALAIEFSRVTEAAALAGFAWLGRGDKEAADNAAVQAMRLMLNQVEMDAEVVIGEGEIDEAPMLYIGEKVGNGKGEQISIAVDPIEGTRMTAMGQANALSVLAAGGKETFLKAPDMYMEKLVVGPEVKGMVDLNLPLEQNLRRVASKMGKLLSQLTVITLDKPRHHEMIKRMQQLGVKVLAIPDGDVAASILCCLPDGGVDMLYGIGGAPEGVIAAAAVRALGGDMQARLLPRDHVKGDTPENQALAAEEIRRCQEMGIEVNQVLKLEDLVRDDNLVFSATGITNGDLLKGIHRKGNLATTETLLIRGRSRTIRRIQSVHYLDRKDTALYRIIGA

SEQ ID NO: 125553 - DNA, 987 bp, Mycobacterium leprae TN
  CDS (1)..(987): transl_table=11
atggaacttgtccgggttaccgaagccggtgccatggccgccggccggtgggtgggccgcggcaacaaggagggcggtgacggcgcggccgtcgatacgatacgggaactggtgaacacagtctcgatgcgcggtgtcgttgtcatcggcgaaggcgagaaagaccatgcgccgatgctgtacaacggcgaggaagtcggcaacggtgacggcccagactgcgactttgcagtcgatccgattgacggcaccacgctgatgagcaaaggcatgcccaacgccatctcggtgctggcggtcgccgatcggggcgcgatgttcgacccttcggcagtgttttacatgaacaagatcaccgttggtcctgacgccgcgcacgtcctagacatcaccgcgccgatcggcgagaacatccgggcggtcgccaaggtcaaagacttatcagtgcgggacatgaccgtgtgcatactggatcggccacgacacgcccagttgatcgacgacgtccgcgccaccggcgccaggatccggctaatcaccgacggcgacgtcgccggcgcaatctccgcgtgccgcccccaatcgggcaccgacatgttggctggtatcggcggcaccccggaaggcatcatcgcagccgcggcgatccggtgcatgggcggggcgatccaagctcaactagcgccacgcgatgacgtcgaacgccgcaaggctctcgacgccggctacaacctagaccggattttgactaccgaagatctggtttccggagaaaacgtcttcttctgcgccactggggtcaccgacggcgatctgctcaagggggtgcgctactacgctggcggctgcaccacccagtcaatcgtgatgcgttcgaagtcgggcaccgttcggatgatcgaggcctaccaccggctctctaaactcaacgaatactccgccatcgacttcaccggcgataacaacgccgcctaccccctgccgtaa

SEQ ID NO: 125554 - protein, 328 aa, Mycobacterium leprae TN
MELVRVTEAGAMAAGRWVGRGNKEGGDGAAVDTIRELVNTVSMRGVVVIGEGEKDHAPMLYNGEEVGNGDGPDCDFAVDPIDGTTLMSKGMPNAISVLAVADRGAMFDPSAVFYMNKITVGPDAAHVLDITAPIGENIRAVAKVKDLSVRDMTVCILDRPRHAQLIDDVRATGARIRLITDGDVAGAISACRPQSGTDMLAGIGGTPEGIIAAAAIRCMGGAIQAQLAPRDDVERRKALDAGYNLDRILTTEDLVSGENVFFCATGVTDGDLLKGVRYYAGGCTTQSIVMRSKSGTVRMIEAYHRLSKLNEYSAIDFTGDNNAAYPLP

SEQ ID NO: 125555 - DNA, 987 bp, Mycobacterium tuberculosis CDC1551
  CDS (1)..(987): transl_table=11
atggagctggtccgggtgaccgaggccggagccatggccgcgggccgctgggtaggccgcggcgacaaggagggcggcgacggcgcggcggtcgacgcgatgcgcgaactggtcaactcggtttccatgcgcggggtggtggtcatcggcgaaggcgaaaaggaccacgcaccaatgctctacaacggcgaagaagtgggcaacggcgacggaccggaatgcgactttgccgtcgaccccattgacggcaccacgctgatgagcaagggcatgaccaacgccatctcggtgctggcggtagccgatcgcggcaccatgttcgacccgtcggcggtgttctacatgaacaaaatcgccgtcggccccgatgccgcacacgtgctggatatcaccgcgccgatctcggaaaacatccgagcggtcgccaaggtcaaggacctgtcggtgcgagacatgacggtgtgcatcctggacaggccgcggcacgcgcaactcatccacgacgtccgcgccaccggggcccggatccggctgatcaccgatggcgacgtcgccggcgcgatctcggcgtgccgaccgcactccggcaccgacctgctagctgggatcggcggcaccccggagggaatcatcgccgccgcggcgatccgctgcatgggcggggcgatccaggcgcagctcgccccgcgcgacgacgcggaacgccgcaaggccctagaagccggttacgacctgaaccaggtcttgaccaccgaagatctggtgtccggggaaaacgtcttcttctgcgccactggggtcaccgacggcgacctgctcaagggagtgcgttactaccccggcggctgcaccacccattcgatcgtgatgcgctcgaagtccggcaccgtccggatgatcgaggcctaccaccggctttcaaagctcaacgaatactccgcgatcgacttcaccggcgacagcagcgccgtgtacccattgccctaa

SEQ ID NO: 125556 - protein, 328 aa, Mycobacterium tuberculosis CDC1551
MELVRVTEAGAMAAGRWVGRGDKEGGDGAAVDAMRELVNSVSMRGVVVIGEGEKDHAPMLYNGEEVGNGDGPECDFAVDPIDGTTLMSKGMTNAISVLAVADRGTMFDPSAVFYMNKIAVGPDAAHVLDITAPISENIRAVAKVKDLSVRDMTVCILDRPRHAQLIHDVRATGARIRLITDGDVAGAISACRPHSGTDLLAGIGGTPEGIIAAAAIRCMGGAIQAQLAPRDDAERRKALEAGYDLNQVLTTEDLVSGENVFFCATGVTDGDLLKGVRYYPGGCTTHSIVMRSKSGTVRMIEAYHRLSKLNEYSAIDFTGDSSAVYPLP

SEQ ID NO: 125557 - DNA, 975 bp, Clostridium acetobutylicum ATCC 824
  CDS (1)..(975): transl_table=11
atgtttgataatgatatatccatgagtttagtaagagtaacagaagcagcagcactacaatcttcaaagtatatgggaagaggagataaaattggagctgatcaagcagcagtagatggaatggagaaggcatttagttttatgccagtaagaggccaggttgtaataggagagggagaacttgatgaagctcctatgctttatataggtcaaaagcttggtatgggaaaagactatatgcctgaaatggatatagcagtagatcctttagatggaacgattttaatttctaagggactacctaatgcaatagcagtaatagcaatgggaccaaaaggaagtttacttcatgccccagatatgtatatgaagaaaattgttgtgggacctggagcaaaaggtgctatagatataaataaatctcctgaagagaatattttaaatgtagcaaaggcattaaacaaggacatatctgaattaacagttatagttcaagaaagagaaagacatgactacatagtaaaagcagctatagaagttggagcaagagttaagctatttggtgagggcgatgttgcagctgcacttgcttgtggttttgaagatactggaatagacatacttatgggaattggaggagctccagaaggagttatagccgcagcagctatcaagtgcatgggcggagaaatgcaggctcagcttatacctcatactcaggaagaaatagatagatgtcacaaaatgggaatagatgatgtaaataaaattttcatgatagatgatttagttaaaagtgataatgtgttttttgcagctacagcaataacagaatgtgatcttcttaagggcatagtattttctaaaaatgaacgtgcaaaaacccattccatattaatgagatctaaaactggtacaataagatttgttgaagctattcatgacttgaataaaagtaaattagtggtagaataa

SEQ ID NO: 125558 - protein, 324 aa, Clostridium acetobutylicum ATCC 824
MFDNDISMSLVRVTEAAALQSSKYMGRGDKIGADQAAVDGMEKAFSFMPVRGQVVIGEGELDEAPMLYIGQKLGMGKDYMPEMDIAVDPLDGTILISKGLPNAIAVIAMGPKGSLLHAPDMYMKKIVVGPGAKGAIDINKSPEENILNVAKALNKDISELTVIVQERERHDYIVKAAIEVGARVKLFGEGDVAAALACGFEDTGIDILMGIGGAPEGVIAAAAIKCMGGEMQAQLIPHTQEEIDRCHKMGIDDVNKIFMIDDLVKSDNVFFAATAITECDLLKGIVFSKNERAKTHSILMRSKTGTIRFVEAIHDLNKSKLVVE

SEQ ID NO: 125559 - DNA, 954 bp, Caulobacter crescentus CB15
  CDS (1)..(954): transl_table=11
atgagttcgaacaccctggaccgcgctctggtcctggacgccgttcgcgtgaccgaggccgccgccatcgcctcgtggaccatgctgggccgcggcgacgaaatggccgccgatcaggctgcggtcgacgcgatgcgcaacgccctcaatgaactggatatcgatggcgagatcgtcatcggcgaaggcgagcgcgatgaggcgccgatgctgtacatcggcgagaaagtcggcaccgggaaaggcccccgcatcgacatcgcgctggacccgctggaaggcaccaccctggcggccaagtcccagcccaacgctttgacggtgatggcctgggcgcccaaggggacgctgctgaatgcgcccgacacctatatggacaagatcgcctgcggcccgggtctgccggcgggggtcatcgacctggatcgctctccggccgaaaacattcaggctgtcgccgacgccaagggcgtggcgctttccgagatcacggtctgtgttctggaccggccgcgtcacgccgagattatcgccagtgtccgcgctgtgggcgcccgtattcatctgatcacggacggtgacgtcgccggcgtgatcaacacgacggacccattgaccggcattgacctctatcttgggtccggcggcgcgcccgagggcgtcttggcctgcgcggcgctgaaatgcgtcggcggccagttccaggggcgactgctgttccgcaacgctgacgagcgcgcgcgggcggcgcgttggggcgtcacggacctcgataagaagtacgacctgcatgagatcgtgcgggacgaggcgatcttcgccgccacgggcgtgacgcgcggggggctgctggatggcgtcgtctatcgcgacggctgcgtgcacacccacacgctggtgatgaactcctcgacgggcacggtccgcgaggtccgcatgaagcggaaggtctga

SEQ ID NO: 125560 - protein, 317 aa, Caulobacter crescentus CB15
MSSNTLDRALVLDAVRVTEAAAIASWTMLGRGDEMAADQAAVDAMRNALNELDIDGEIVIGEGERDEAPMLYIGEKVGTGKGPRIDIALDPLEGTTLAAKSQPNALTVMAWAPKGTLLNAPDTYMDKIACGPGLPAGVIDLDRSPAENIQAVADAKGVALSEITVCVLDRPRHAEIIASVRAVGARIHLITDGDVAGVINTTDPLTGIDLYLGSGGAPEGVLACAALKCVGGQFQGRLLFRNADERARAARWGVTDLDKKYDLHEIVRDEAIFAATGVTRGGLLDGVVYRDGCVHTHTLVMNSSTGTVREVRMKRKV

SEQ ID NO: 125561 - DNA, 1038 bp, Synechocystis sp. PCC 6803
  CDS (1)..(1038): transl_table=11
gtggacagcaccctcggtttagaaattattgaagtcgtagaacaagcggcgatcgcctcggcaaaatggatgggcaaaggtgaaaaaaacaccgctgaccaagtagccgtagaagccatgcgggaacggatgaataaaatccacatgcggggccgcatcgtcattggcgagggggaaagggatgatgcacccatgctctacatcggcgaagaagtaggcatttgcaccagagaagatgccaaatccttctgcaatcccgacgaattggtagaaattgacattgctgttgacccctgtgaaggtaccaacctagtagcctatggtcaaaacggttccatggccgtgttggcaatttctgaaaaaggtggtttgtttgccgctcccgacttctacatgaaaaaactggcggctcccccagcggccaaaggtcatgtggacatcgacaaatcggccaccgaaaacctgaaaatcctctccgattgcctcaaccgcagcattgaagaattggtggtagtggtcatggatcgtccccgccacaaagaattgatccaagaaatccgcaatgccggtgctcgggtacgtctaatcagtgatggagacgtttccgccgccatttcctgtgctttttccggcaccaacatccacgctctgatgggcatcggggctgctcctgaaggggtaatttccgctgctgccatgcgctgtctggggggtcacttccaaggtcagttaatctacgatcccgaagtggttaaaaccggcctaatcggtgaaagtcgggaaggcaacctagagcgtctcgcttccatgggcatcaaaaatcctgaccaggtttataactgcgaagaattggcctgtggcgaaaccgtattatttgccgcctgtggtatcacccctggcactttgatggaaggagtccgcttcttccatggtggggtacggacccaaagcttggttatttctagccagtccagcaccgcccgctttgtagacactgtccatatgaaggaaagccccaaagtaatccaactgcattaa

SEQ ID NO: 125562 - protein, 345 aa, Synechocystis sp. PCC 6803
MDSTLGLEIIEVVEQAAIASAKWMGKGEKNTADQVAVEAMRERMNKIHMRGRIVIGEGERDDAPMLYIGEEVGICTREDAKSFCNPDELVEIDIAVDPCEGTNLVAYGQNGSMAVLAISEKGGLFAAPDFYMKKLAAPPAAKGHVDIDKSATENLKILSDCLNRSIEELVVVVMDRPRHKELIQEIRNAGARVRLISDGDVSAAISCAFSGTNIHALMGIGAAPEGVISAAAMRCLGGHFQGQLIYDPEVVKTGLIGESREGNLERLASMGIKNPDQVYNCEELACGETVLFAACGITPGTLMEGVRFFHGGVRTQSLVISSQSSTARFVDTVHMKESPKVIQLH

SEQ ID NO: 125563 - DNA, 1011 bp, Salmonella typhimurium LT2
  CDS (1)..(1011): transl_table=11
atgagacgagaacttgccatcgaattttcccgtgtgaccgaagcggcggcgctggctggctacaaatggctgggacgcggcgataaaaataccgcggacggcgcggcggtcaacgccatgcgtatcatgctcaaccaggtcaacattgacggcaccatcgtgattggcgaaggcgaaatcgacgaagccccgatgctctatatcggcgagaaagtcggtaccggccacggcgatgcggtagatatcgccgtcgatccgattgagggcacgcgcatgacggcgatgggtcaggcgaacgcgctggcggtgctggcggtcggcgataaaggctgtttcctgaatgcgcccgatatgtatatggaaaaactgattgtcggtccgggcgccaaaggggcaattgatctcaatctgccgctggcggataacctgcgcaacatcgcggatgcgctgggtaaaccgcttggcgatttgaccgtgaccattctggcaaaaccgcgtcatgacgaggtcatcgcagagatggccaaactgggcgtacgcgtgtttgccattcctgacggcgacgtcgcggcctccattctgacctgtatgccggatagcgaagtcgacgtgctgtacgggattggcggcgcaccagaaggcgtggtatccgcagcggtgatccgcgcgctggacggcgatatgcaggggcgtctgctggcgcgccatgacgtgaaaggcaacagcgaagaaaaccgccgcattggcgaacaggaactggcgcgctgcaaagcaatgggcattgaagcgggcaaggcgttatgcctgggcgacatggcgcgtagcgataacgttattttctccgcgaccggcatcacgaaaggcgatctactggaaggaattagccggaaaggccatattgccacgacggaaacgctgctgatccgcggcaaatcacgcaccatccgccgcattcagtctatccactatcttgatcgtaaagatccggatgtgcaggcgcatattctctag

SEQ ID NO: 125564 - protein, 336 aa, Salmonella typhimurium LT2
MRRELAIEFSRVTEAAALAGYKWLGRGDKNTADGAAVNAMRIMLNQVNIDGTIVIGEGEIDEAPMLYIGEKVGTGHGDAVDIAVDPIEGTRMTAMGQANALAVLAVGDKGCFLNAPDMYMEKLIVGPGAKGAIDLNLPLADNLRNIADALGKPLGDLTVTILAKPRHDEVIAEMAKLGVRVFAIPDGDVAASILTCMPDSEVDVLYGIGGAPEGVVSAAVIRALDGDMQGRLLARHDVKGNSEENRRIGEQELARCKAMGIEAGKALCLGDMARSDNVIFSATGITKGDLLEGISRKGHIATTETLLIRGKSRTIRRIQSIHYLDRKDPDVQAHIL

SEQ ID NO: 125565 - DNA, 1038 bp, Nostoc sp. PCC 7120
  CDS (1)..(1038): transl_table=11
gtggaaaatacacttggattagagattattgaggtagttgagcaagccgcgatcgcatccgcaaagtggatgggtaagggcgaaaagaatactgctgaccaagtagcagtagaagcaatgcgcgagcgcatgaataaaatttatatgcgcggtcgcatcgtaattggggaaggggaacgtgatgacgcgcccatgttgtatatcggggaagaagttggtatttgtacccaaccaaatgctgaccaattatgtaaccccgatgaattagtagaaattgatatcgctgttgacccctgcgaaggtacaaacctcgtagcttatggtcaacccggctcaatggcagttctggctatttccgagaaaggtggattattcgctgcgcctgacttctacatgaagaaattagccgcacctccagccgctaaaggcaaagtagacattaacaagtcagctacggaaaacctcaagattctttccgagtgtctagaccgttctattgacgaacttgtagtagtcgtcatgaaacgcgatcgccaccaaggtttaatcaaagaaatccgcgacgctggcgcaagagtacaactgatttctgatggtgatgtaggcgcagcaatatcttgtggttttgcggggactaacgttcatgcgctcatgggtattggtgctgcacctgaaggtgtcatttccgcagccgctatgcgtgctttgggcggacacttccaaggtcaattgatatacgatccagaagtagtgaaaacaggcttgattggggaaagcaaacaagcaaaccttgaccgtctcagctctatgggtatcaatgaccctgataaggtttacgatgctcatgaactagcatcaggtgaaaatgttctcttcgccggttgcggtatcacctctggtaatctcatgcaaggtgtacgcttcttccacggcggtgctagaactcaaagcttggttatttccagccagtcacaaactgctcgttttgtggacacaattcacatggctggacagcccaagactgtgcaactgcactag

SEQ ID NO: 125566 - protein, 345 aa, Nostoc sp. PCC 7120
MENTLGLEIIEVVEQAAIASAKWMGKGEKNTADQVAVEAMRERMNKIYMRGRIVIGEGERDDAPMLYIGEEVGICTQPNADQLCNPDELVEIDIAVDPCEGTNLVAYGQPGSMAVLAISEKGGLFAAPDFYMKKLAAPPAAKGKVDINKSATENLKILSECLDRSIDELVVVVMKRDRHQGLIKEIRDAGARVQLISDGDVGAAISCGFAGTNVHALMGIGAAPEGVISAAAMRALGGHFQGQLIYDPEVVKTGLIGESKQANLDRLSSMGINDPDKVYDAHELASGENVLFAGCGITSGNLMQGVRFFHGGARTQSLVISSQSQTARFVDTIHMAGQPKTVQLH

SEQ ID NO: 125567 - DNA, 987 bp, Brucella melitensis 16M
  CDS (1)..(987): transl_table=11
atggccaagaccgcagagcagcacccccacgggctggatcgcattctcacactggagctcgtccgtgtggccgagcgtgcagccgtggcggcggcaaggctgcgcgggcgcggcgatgaaatggctgccgatcaggctgctgtcgatgccatgcgccaggaattgaaccgcctgcccatcaccgggacggtggtgattggcgagggtgagcgcgatgaagcgccgatgctctatatcggcgaggaagtcggcaccaagcagggggcggctgtcgatattgcactggacccgctggaaggcactacgatctgcgccaagaacctgccgaactcgctggcggtcattgccattgccgaaaagggcaacctgctttacgcgcctgacgtctacatggaaaagattgctgtcggccccggctatcccaagggtgtcgttgatctcgatgccacgccgacggacaacatcatgtccatcgccaaggcgaagggcgtgaagccgaatgaaatcaccgcctgcatcatggaccgcccacgtcatgcgcgccttatcgaagaagtgcgggcgaccggcgctgcgatccgcctcatcggcgacggcgacgtagcgggcgtgatgcatacgacagatccggacgagaccggcatcgacatctatatcggcattggcggtgcgcctgaaggtgttctggctgctgcggcgcttcgctgcatcggtggccagatgcagggccgtttgcagctcaataccgaagagaaggttgcccgtgccgccaagatgggtatttccgatccgaaaaagatctataccttggaggaaatggccaagggcgatgtgctcttcgcggcgaccggcgtgacggatggcaatatgctttccggcgtgaaattcgcgcgggattatatccagacccatacgatcgtgatgcgctcgtcgtcgcagacggtgcgtgaaatcaaggcgcgccatcaggatttgtccaaattctag

SEQ ID NO: 125568 - protein, 328 aa, Brucella melitensis 16M
MAKTAEQHPHGLDRILTLELVRVAERAAVAAARLRGRGDEMAADQAAVDAMRQELNRLPITGTVVIGEGERDEAPMLYIGEEVGTKQGAAVDIALDPLEGTTICAKNLPNSLAVIAIAEKGNLLYAPDVYMEKIAVGPGYPKGVVDLDATPTDNIMSIAKAKGVKPNEITACIMDRPRHARLIEEVRATGAAIRLIGDGDVAGVMHTTDPDETGIDIYIGIGGAPEGVLAAAALRCIGGQMQGRLQLNTEEKVARAAKMGISDPKKIYTLEEMAKGDVLFAATGVTDGNMLSGVKFARDYIQTHTIVMRSSSQTVREIKARHQDLSKF

SEQ ID NO: 125569 - DNA, 1008 bp, Corynebacterium glutamicum ATCC 13032
  CDS (1)..(1008): transl_table=11
atgaacctaaagaaccccgaaacgccagaccgtaaccttgctatggagctggtgcgagttacggaagcagctgcactggcttctggacgttgggttggacgtggcatgaagaatgaaggcgacggtgccgctgttgacgccatgcgccagctcatcaactcagtgaccatgaagggcgtcgttgttatcggcgagggcgaaaaagacgaagctccaatgctgtacaacggcgaagaggtcggaaccggctttggacctgaggttgatatcgcagttgacccagttgacggcaccaccctgatggctgagggtcgccccaacgcaatttccattctcgcagctgcagagcgtggcaccatgtacgatccatcctccgtcttctacatgaagaagatcgccgtgggacctgaggccgcaggcaagatcgacatcgaagctccagttgcccacaacatcaacgcggtggcaaagtccaagggaatcaacccttccgacgtcaccgttgtcgtgcttgaccgtcctcgccacatcgaactgatcgcagacattcgtcgtgcaggcgcaaaggttcgtctcatctccgacggcgacgttgcaggtgcagttgcagcagctcaggattccaactccgtggacatcatgatgggcaccggcggaaccccagaaggcatcatcactgcgtgcgccatgaagtgcatgggtggcgaaatccagggcatcctggccccaatgaacgatttcgagcgccagaaggcacacgacgctggtctggttcttgatcaggttctgcacaccaacgatctggtgagctccgacaactgctacttcgtggcaaccggtgtgaccaacggtgacatgctccgtggcgtttcctaccgcgcaaacggcgcaaccacccgttccctggttatgcgcgcaaagtcaggcaccatccgccacatcgagtctgtccaccagctgtccaagctgcaggaatactccgtggttgactacaccaccgcgacctaa

SEQ ID NO: 125570 - protein, 335 aa, Corynebacterium glutamicum ATCC 13032
MNLKNPETPDRNLAMELVRVTEAAALASGRWVGRGMKNEGDGAAVDAMRQLINSVTMKGVVVIGEGEKDEAPMLYNGEEVGTGFGPEVDIAVDPVDGTTLMAEGRPNAISILAAAERGTMYDPSSVFYMKKIAVGPEAAGKIDIEAPVAHNINAVAKSKGINPSDVTVVVLDRPRHIELIADIRRAGAKVRLISDGDVAGAVAAAQDSNSVDIMMGTGGTPEGIITACAMKCMGGEIQGILAPMNDFERQKAHDAGLVLDQVLHTNDLVSSDNCYFVATGVTNGDMLRGVSYRANGATTRSLVMRAKSGTIRHIESVHQLSKLQEYSVVDYTTAT

SEQ ID NO: 125571 - DNA, 1041 bp, Fusobacterium nucleatum subsp. nucleatum ATCC 25586
  CDS (1)..(1041): transl_table=11
atgaaaagagaactagctttggaatttgcaagggttacagaagcagcagcacttgctgcacataagtgggttggtagaggaaaaaaagaatcagctgaccaagctggtgtagatgctatgagaactatgcttaatagacttgcaattgatggagaaatagtaataggggaaggagaaattgacgaagctcctatgttatatataggagaaaaagttgggcaaatatataatgaagaagaaaaagattcagttacttatgttgatcctgttgatattgctgttgaccctgttgaaggaactagaatgactgctcaaggacagccaaatgctataactgttttagctgttggtaaaaaaggaagtttcttaaaagctcctgatatgtatatggaaaaattaattgttggaccagaagcaaaaggaaaaatagatttatcaaaacctcttgaagataatattcatgctgttgcaaaagcattaaaaaaagaattaaaagatttaatgattgttattttagataaaccaagacataaagaattaataaaagatttacaagctatgggtgtaaaagtttatgctctacccgatggagatgttgcaggttcaatacttacttgtatgatagattcagatgtagacatgctttatggtattggtggagctccagaaggagttatttctgctgctgttataagagcattaggtggagatatgcaagcaagattaaaacttagaagtgaagttaaaggtgcttctcttgaaaatgataaaatatctaaatttgaaaaattaagatgtgaagaacaaggattaaaagttggagaaatcctaaaacttgaagacttagcaaaagatgatgaaataattttctctgctactggtatcacaggtggagatttgttggaaggtgtaaaaagaaaaggaaatattgctaggactcaaactcttgttgtaagaggtttatcaaaaacagttagatatataaattctatacataatttagattttaaagatgaaaaaatcactcacttggtaaaataa

SEQ ID NO: 125572 - protein, 346 aa, Fusobacterium nucleatum subsp. nucleatum ATCC 25586
MKRELALEFARVTEAAALAAHKWVGRGKKESADQAGVDAMRTMLNRLAIDGEIVIGEGEIDEAPMLYIGEKVGQIYNEEEKDSVTYVDPVDIAVDPVEGTRMTAQGQPNAITVLAVGKKGSFLKAPDMYMEKLIVGPEAKGKIDLSKPLEDNIHAVAKALKKELKDLMIVILDKPRHKELIKDLQAMGVKVYALPDGDVAGSILTCMIDSDVDMLYGIGGAPEGVISAAVIRALGGDMQARLKLRSEVKGASLENDKISKFEKLRCEEQGLKVGEILKLEDLAKDDEIIFSATGITGGDLLEGVKRKGNIARTQTLVVRGLSKTVRYINSIHNLDFKDEKITHLVK

SEQ ID NO: 125573 - DNA, 1089 bp, Methanosarcina acetivorans C2A
  CDS (1)..(1089): transl_table=11
atgcctcatccaaagaccgtagaagagatgtttgagtctgccgggccgattgaatacaggttactgcccaggctcattcatgtgaccgaagctgctgcaattgcagcagcctatcagatgggacgcggggacaaacactttgctgaccaggtagcagtcgcctccatgcgaagaatgctgaacaagcttgacatgaaaggcataattaaaataggggaaggagagagggacgaagctcccatgctttatataggagaagaggtcgggacagagaacggagatctcgaggttgatattgcagtcgaccccctggaaggcacaaaccttacggcagacggttgcccgggctcggttgcagttatggcaatggctgaaaggggagggatcttccacggccctgatatctatatggacaagattgttgtagggcccgatgtcgttcggtatgaagaagagcatcctggcgaaaggatcgaccttgatgcgcctgtcagtcataacctcgaaatcgttgcaaaagccctcggaagaaaggttgaggaacttgtagtcgtgatccttgaccgcccaaggcatgcccagaagataaccgaaattcgggaagctggagcccgtgtgaggctggttaccgatggagacctcatgccaggcgttgcaactgcggtccgaggttcaggcattcacgtggtcatgggggcaggcggttcgggagaagctgtcctgactgctgcagcaatcaagatcctgggtggaaaaatccttgcaaggcttgtcctgccaaccgtagcaaacggtaaaaccaaggaaaagatcgacgaagaaatagaggaaaagatgcccaggctcgaagcgatgggaattacccttgagaacattaatgatattcttgatattgataaacttgttcctggtaaggatgtcattttttccgcaacagccgtaactccgggccacttcctgcgcgaagtcaaccttttcggaggcggggatgccagagtacacacggtttctatgggggcatccggagctgtcaggttcacggacagtatctatatcaaggataagcgggagactccactctacctgtaa

SEQ ID NO: 125574 - protein, 362 aa, Methanosarcina acetivorans C2A
MPHPKTVEEMFESAGPIEYRLLPRLIHVTEAAAIAAAYQMGRGDKHFADQVAVASMRRMLNKLDMKGIIKIGEGERDEAPMLYIGEEVGTENGDLEVDIAVDPLEGTNLTADGCPGSVAVMAMAERGGIFHGPDIYMDKIVVGPDVVRYEEEHPGERIDLDAPVSHNLEIVAKALGRKVEELVVVILDRPRHAQKITEIREAGARVRLVTDGDLMPGVATAVRGSGIHVVMGAGGSGEAVLTAAAIKILGGKILARLVLPTVANGKTKEKIDEEIEEKMPRLEAMGITLENINDILDIDKLVPGKDVIFSATAVTPGHFLREVNLFGGGDARVHTVSMGASGAVRFTDSIYIKDKRETPLYL

SEQ ID NO: 125575 - DNA, 1032 bp, Streptomyces coelicolor A3(2)
  CDS (1)..(1032): transl_table=11
atgaccgagcatcatctcccgtccgagctggacgtcccctcggaggcccccgaccgcaacctcgccatggagctcgtgcgggtcaccgaggccgcggcgatggccgcgggccgctgggtcgggcgcggtgacaagaacggcgccgacggtgccgcggtacgcgccatgcggaccctcgtccacaccgtctcgatgaacggcgtcgtcgtcatcggcgagggcgagaaggacgaggccccgatgctcttcaacggagagcgggtcggcgacggcaccggggccgaggtcgacatcgccgtcgacccgatcgacggcaccacgctgaccgccaacggcatgaccaacgcgatcgcggtgctggccgcggccgagcgcggctccatgttcgacccgtccgcggtcttctacatggacaagctggtcacgggccccgaggccgccgacttcgtcgacatcaacgcgcccgtcgccgtgaacatccgccggatcgccaaggccaagcggcgcacgcccgaggacgtcaccgtcgtcatcctcgaccggccgcggcaccagggcctcatcaaggaggtccgggagaccggcgcccgcatcaagctgatctccgacggcgacgtggccggctccatcctggccctgcgcgagggcaccggcatcgacctgctgctcggcatcggcggcacgccggagggcatcatctcggcctgcgccgtgaagtgcctgggcggcaccatccagggcaagctgtggcccaaggacgccgaggagcggcagcgcgcggtcgacgccgggcacgacctggaccgggtgctgaccaccgacgacctggtctccggggacaacgtcttcttcgtcgccaccggcatcaccgacggcgagttgctgcgcggggtgcggtaccgctcggagacggcgacgaccgactcgatcgtgatgcggtccaagtcggggacggtgcggcggatcgactccgagcaccggctgagcaagctgcgggcgtacagcgcggtggatttcgaccgggcgaagtga

SEQ ID NO: 125576 - protein, 343 aa, Streptomyces coelicolor A3(2)
MTEHHLPSELDVPSEAPDRNLAMELVRVTEAAAMAAGRWVGRGDKNGADGAAVRAMRTLVHTVSMNGVVVIGEGEKDEAPMLFNGERVGDGTGAEVDIAVDPIDGTTLTANGMTNAIAVLAAAERGSMFDPSAVFYMDKLVTGPEAADFVDINAPVAVNIRRIAKAKRRTPEDVTVVILDRPRHQGLIKEVRETGARIKLISDGDVAGSILALREGTGIDLLLGIGGTPEGIISACAVKCLGGTIQGKLWPKDAEERQRAVDAGHDLDRVLTTDDLVSGDNVFFVATGITDGELLRGVRYRSETATTDSIVMRSKSGTVRRIDSEHRLSKLRAYSAVDFDRAK

SEQ ID NO: 125577 - DNA, 1089 bp, Methanosarcina mazei Go1
  CDS (1)..(1089): transl_table=11
atgcctcatccaaagacagtagaaaagatgtttgagtgcgccggaccaattgaatacaagttactgccaaggctcattcatgtaaccgaagctgctgcaattgccgcagcctatcagatgggacgtggggacaagcactttgccgaccaggtagcagttgcctccatgagaagaatgctcaacaaacttgacatgcagggcataataaagataggggaaggagagagggacgaagcccccatgctttatataggggaagaggtcgggacaggagttggagaccttgaagttgatatcgcagtcgacccgctggaaggcacaaacctctgtgccgacggctgtccgggttcggttgcagtcatggctatggccgaaaggggagggatcttccacggacctgacatttacatggacaagattgttgtcggacccgatgtggttcgttatgaaaaggagcaccccgacgaaaggatagatctggacgctcctgtcaggcaaaacctcgaaattgttgcaaaagccctcgggagaaatgttgaagaactcgtggtcgtgatccttgaccgtcccaggcatgcccagaagataaccgaaatacgcgaagccggagcccgtgtaaggctggttactgacggagaccttatgccaggtgttgcaactgctatccgtggctcaggcatccatatggttatgggagctggcggctcgggagaagctgtcctgacagctgccgcaattaagattctgggaggaaagatccttgcaaggcttgtcctgccatctgttgcaaacggaaaatccaaggaaaagatccaggaagaaattgaggaaaaaatgcccaggctcgaaaagatggggatcacacttgagaaactcaatgatgtcctcgatacagaaagacttgttccgggaaaagatgtaattttttcctcaacagccgtaacccccggtcatttcctgcgtgaaacacgtctttttggcgggggagatgccagagtgcatacaatttcgatgggcgcgtccggagctgtcaggttcacggatagtatttacataaaggataagcaggagactcctctctacctctaa

SEQ ID NO: 125578 - protein, 362 aa, Methanosarcina mazei Go1
MPHPKTVEKMFECAGPIEYKLLPRLIHVTEAAAIAAAYQMGRGDKHFADQVAVASMRRMLNKLDMQGIIKIGEGERDEAPMLYIGEEVGTGVGDLEVDIAVDPLEGTNLCADGCPGSVAVMAMAERGGIFHGPDIYMDKIVVGPDVVRYEKEHPDERIDLDAPVRQNLEIVAKALGRNVEELVVVILDRPRHAQKITEIREAGARVRLVTDGDLMPGVATAIRGSGIHMVMGAGGSGEAVLTAAAIKILGGKILARLVLPSVANGKSKEKIQEEIEEKMPRLEKMGITLEKLNDVLDTERLVPGKDVIFSSTAVTPGHFLRETRLFGGGDARVHTISMGASGAVRFTDSIYIKDKQETPLYL

SEQ ID NO: 125579 - DNA, 1119 bp, Yersinia pestis KIM
  CDS (1)..(1119): transl_table=11
atgcgggtaaaaagagtacagctaacacctttgcggcttcaagttagaaaggtgatagaattcttgcctatattcagtttttctattccgcaatcaacaggtctaaccatgaaacgtgaattagccatcgagttttcccgagtgactgaagccgccgcattggcaggttataagtggctgggtcggggcgataaaaatgctgccgacggtgctgcggtgcaggcaatgcgcatcatgctcaatcaagtcaatattgatgggcggattgttattggtgaaggcgagatcgacgaagccccaatgctgtttattggcgagcatgtcggtacgggtcaaggtgatgcggtagatatcgcggttgacccaattgaagggacccggatgacggccatgggccaagccaatgcactggcagtactggcggtcggagaccaaggcacattcttacatgcccctgatatgtatatggaaaaactggtggttggcccggcagccaagggggctatcgacctgaatctgccgttggaacagaacctgtgcaatatcgccaccgcactcaataaaccgctggctgatttgaccgtgatcaccttggctaaaccgcgtcatgacggcatcatcgccgcaatgcagcaactgggtgtaaaagtgttcgccattccagacggtgacgttgctgcgtcaattttgacttgtatgccagaaagcgaagtggacgtgatgtactgcattggtggcgcacctgaaggggtgatttctgctgcagtgatccgtgcgctagatggcgatatgcaaggccgcttgttaccgcgccatcaagtgaagggcgacagtgaagataaccgccgcatcggcgaacaagagttattacgttgtaaatcaatgggtattgaagcaggcaacgtgctgcagctcggtgatatggcccgtaatgataatgttatcttctctgccactggcattactaaaggtgacctgctagaaggtatctatcgtaaagggaatatggcgaccactgaaacactgctgatccggggtaaatcacgcactatccgccgcatccgctcgacccatttcctggatcgcaaagacccggcattgcacgagttcttactgtaa

SEQ ID NO: 125580 - protein, 372 aa, Yersinia pestis KIM
MRVKRVQLTPLRLQVRKVIEFLPIFSFSIPQSTGLTMKRELAIEFSRVTEAAALAGYKWLGRGDKNAADGAAVQAMRIMLNQVNIDGRIVIGEGEIDEAPMLFIGEHVGTGQGDAVDIAVDPIEGTRMTAMGQANALAVLAVGDQGTFLHAPDMYMEKLVVGPAAKGAIDLNLPLEQNLCNIATALNKPLADLTVITLAKPRHDGIIAAMQQLGVKVFAIPDGDVAASILTCMPESEVDVMYCIGGAPEGVISAAVIRALDGDMQGRLLPRHQVKGDSEDNRRIGEQELLRCKSMGIEAGNVLQLGDMARNDNVIFSATGITKGDLLEGIYRKGNMATTETLLIRGKSRTIRRIRSTHFLDRKDPALHEFLL

SEQ ID NO: 125581 - DNA, 1044 bp, Thermosynechococcus elongatus BP-1
  CDS (1)..(1044): transl_table=11
gtggataacgtcatcggcttagagatcattgaagttgtcgagcaggcggcgatcgcctcagcgcggtggatgggcaaaggtgacaaaaacatggcggatcaggcggccgtcgatgccatgcgcaaccgcatgaatcaaatccatatgcgtggtcgcattgtcattggtgagggggaacgggatgaagccccaatgctctacattggtgaagaagtgggcatttgtacccgtcccgatgctgcccaatactgtaaccctgaagagctcattgaaattgacattgccgttgacccctgcgaagggacaaacctttgcgcctacggtcaaccaggctcgatggcagtgctggccatttccgaaaaaggggggttatttgcagctcccgacttttatatgaagaaattggcagcaccccctgctgctaagggcaaagtggatattcgcaactccgcaacagaaaacctgaaaattctctctgaatgccttgaccgtgccattgatgaattggtggtggtggtcatgaagcgcgatcgccacaatgacttaattcaagaaatccgcgatgcgggtgcccgcgttcaactgatctccgatggcgacgtctccgcagctctggcctgtgctttctccggtaccaacattcatgccctcatgggaattggcgctgcgcccgaaggggtgatttctgctgctgccatgcgcgccttaggtggccacttccaagggcaactggtctatgatcccgctgtggtcatgaccaaggaatgggccaatcgcacccgcgaaggcaaccttgaagagctgaaaaaagcgggcatcaccgatcccgataaagtgtatgaagcggaagaattggcctctggggaaacggtgctctttgctgcctgtggcattacccccggcatgctcatgaaaggggtgcgtttcttcaagggaggtgcccgtacccaatctctggttatttccacgcagtcgaagacagcacgctttgtggatacaatccacatgttcgatcagcagttgaagtcactccagctgtactaa

SEQ ID NO: 125582 - protein, 347 aa, Thermosynechococcus elongatus BP-1
MDNVIGLEIIEVVEQAAIASARWMGKGDKNMADQAAVDAMRNRMNQIHMRGRIVIGEGERDEAPMLYIGEEVGICTRPDAAQYCNPEELIEIDIAVDPCEGTNLCAYGQPGSMAVLAISEKGGLFAAPDFYMKKLAAPPAAKGKVDIRNSATENLKILSECLDRAIDELVVVVMKRDRHNDLIQEIRDAGARVQLISDGDVSAALACAFSGTNIHALMGIGAAPEGVISAAAMRALGGHFQGQLVYDPAVVMTKEWANRTREGNLEELKKAGITDPDKVYEAEELASGETVLFAACGITPGMLMKGVRFFKGGARTQSLVISTQSKTARFVDTIHMFDQQLKSLQLY

SEQ ID NO: 125583 - DNA, 978 bp, Oceanobacillus iheyensis HTE831
  CDS (1)..(978): transl_table=11
atgtttgaaatggaaagaagtttatcaatggaactagtacgtgtaaccgaggcggcagcattacaatctgctcgttggatgggtagaggagtaaaagatgaagctgatgacgctgcaactactgcgatgcgtacggtgtttgataccattccaatggaaggtaccgtagtaattggcgaaggagaaatggacgaagccccaatgctttatattggagaaaagttaggcactggggacggtccaggagtagatgttgccgtagatccattagaaggtactgaaatagttgctcaaggaacgtggaatgccctagctgttattgctattgcagatagagggacattactgcatgcgccagatatgtatatggaaaaaattgcagtaggccccgatgcgataggtaaaattgatataaatgctccagtagttgataaccttaaagcagtagcaaaggcaaaaaataaatcgattgaagatgtagtagctacagttcttgatcgcccacgtcatcaaaaacttatagataaaattcgtgcttctggtgcaagaattaaattgattcctaatggagatgtagcagcagcaatcaatactgcttttgatgatacaggtgtggatatactattaggatctggtggtgcaccagagggtgttttagcagctgcagcgttaaaatgtttaggtggagaacttcaagggaagttagtaccatcgaatgatgatgaaattaaacgatgtcatgatatgggtatcactgatttaaataaagtattttacatgaatgacttttgtagcggagacgatgctatttttgcagccactggtgttacagatggagagttattaaaaggagttcagtttaaagggaagaaagcaacaacttctacgttagtaatgcgtgcgagaagtggaactgttcgtttcattgatggaactcatagtttgcagaaaaaaccggatctcgtaatcaagccataa

SEQ ID NO: 125584 - protein, 325 aa, Oceanobacillus iheyensis HTE831
MFEMERSLSMELVRVTEAAALQSARWMGRGVKDEADDAATTAMRTVFDTIPMEGTVVIGEGEMDEAPMLYIGEKLGTGDGPGVDVAVDPLEGTEIVAQGTWNALAVIAIADRGTLLHAPDMYMEKIAVGPDAIGKIDINAPVVDNLKAVAKAKNKSIEDVVATVLDRPRHQKLIDKIRASGARIKLIPNGDVAAAINTAFDDTGVDILLGSGGAPEGVLAAAALKCLGGELQGKLVPSNDDEIKRCHDMGITDLNKVFYMNDFCSGDDAIFAATGVTDGELLKGVQFKGKKATTSTLVMRARSGTVRFIDGTHSLQKKPDLVIKP

SEQ ID NO: 125585 - DNA, 1164 bp, Corynebacterium efficiens YS-314
  CDS (1)..(1164): transl_table=11
gtgggatccgtgccccacaatagaggcgtacccacccccgggatgagatcaccggcgtttcccacgcctgtgtcacgtccgggaccgggttgttcactccgctatcgtcgctatcgtcaaaagatcttcaatgtttttcaccggcttcaggaggcccccactatgaacgcacttcaccccgagcaaccggaccgtaacctggccatggaactggtccgtgttacggaggccgcagcactggcagccggacgctgggttggccgtggcatgaagaacgagggcgacggcgccgctgtggatgccatgcgtcagctcatcaactcggtcagcatgaagggtgtcatcgtcatcggtgagggcgagaaggacgaagccccgatgctctacaacggtgaagaggtgggcaccggtttcggccccgaggtcgacatcgcggttgacccggtggacggcaccaccctgatggccgagggtcgccccaatgccatcaccgtcctggccgcctcagagcgtggctccatgtatgacccgtccgccgtgttctacatgaagaagctcgccgtcggccgcgaagccgccggcaaggtcgacatcgaggcccctgtcgcacacaatatcaacgcggtggccaaggccaagggcatcagcgcctccgatgtcaccgtcgtggtcctcgaccgcccccgccacaccgacctcatcgccgacatccgtcgcgccggcgccaaggtccgcctcatctccgacggtgacgtcgccggtgccgtggcagccgcccaggacaccaactccgtggacatcatgatgggtaccggtggcaccccggagggcatcatcaccgcctgcgccatgaaatgcatgggcggcgagatccagggcatcctggcaccgatgaatgacttcgagcgtcgcaaggcactggacgcaggcctggagctggaccgcgtcctgcacaccaacgacctggtcacctccgacaactgctacttcgtggccaccggcctgaccaacggcgacatgctccgtggcgtgtcctaccgcgccaacggtgcgaccacccgttccctggtcatgcgttccaagtccggcaccatccgccacatcgagtccgtacaccagctgtccaagctgcaggaatactccgtcgtcgactacaccgtgtag

SEQ ID NO: 125586 - protein, 387 aa, Corynebacterium efficiens YS-314
MGSVPHNRGVPTPGMRSPAFPTPVSRPGPGCSLRYRRYRQKIFNVFHRLQEAPTMNALHPEQPDRNLAMELVRVTEAAALAAGRWVGRGMKNEGDGAAVDAMRQLINSVSMKGVIVIGEGEKDEAPMLYNGEEVGTGFGPEVDIAVDPVDGTTLMAEGRPNAITVLAASERGSMYDPSAVFYMKKLAVGREAAGKVDIEAPVAHNINAVAKAKGISASDVTVVVLDRPRHTDLIADIRRAGAKVRLISDGDVAGAVAAAQDTNSVDIMMGTGGTPEGIITACAMKCMGGEIQGILAPMNDFERRKALDAGLELDRVLHTNDLVTSDNCYFVATGLTNGDMLRGVSYRANGATTRSLVMRSKSGTIRHIESVHQLSKLQEYSVVDYTV

SEQ ID NO: 125587 - DNA, 1008 bp, Vibrio vulnificus CMCP6
  CDS (1)..(1008): transl_table=11
atgaaacgcgatttagcgatggccttttcccgcgtcacagaaggcgctgctctagcgggttataaatggctaggccgtggtgacaaaaacgcggcggatggcgctgcagtagaagtcatgcgcaccctgctgaataaaaccgacatcagtggcgaaattgttattggtgaaggtgaaatcgacgatgccccgatgctttacattggcgaaaatgttggcctaggtggtgatgaagtggatatcgcggtcgatccaatcgaagggacgcgcatgaccgcgatgggccaatcaaacgctcttgcggtactggctgccggtgaaaaagggagctttttaaaagcaccggatatgtacatggaaaaactggtggttggccctggtgcaaaaggagtgatcgatctcaacaagccacttaaagaaaacctcgtgaacatcgcacaagcgcttggaaaaacgcttgataccttggtggtgattacccttgcaaagcctcgtcatgatgaggtgatcgccgagatgcaacgcatgggtgttcgtgttttcgctgtgccggatggtgatgtggccgcttcgattcttacctgcatgccagacagtgaagttgacgtgatgtactgtattggtggtgcacctgaaggggttgtctcagcggccgtcattcgcgcattggatggcgacatgcatggtcgtcttttaccccgtaacgaagtaaaaggcgataacgaagaaaaccgcaagtttgcggatttcgagctcgagcgctgcgctgaaatgggcgtggaagcgaacaaagtgctaaaactggaagacatggcacgcagtgataacgtcattttctccgcaacaggcatcactaaaggcgatctacttgaaggcatcagccgtcaaggcaatattgcaaccactgaaacattgctgattcgtggccgttgtcgaacaattcgtcgtatcaagtcgattcattatcttgagcgcaaagatgacgaagtgaaagcgatcattctttaa

SEQ ID NO: 125588 - protein, 335 aa, Vibrio vulnificus CMCP6
MKRDLAMAFSRVTEGAALAGYKWLGRGDKNAADGAAVEVMRTLLNKTDISGEIVIGEGEIDDAPMLYIGENVGLGGDEVDIAVDPIEGTRMTAMGQSNALAVLAAGEKGSFLKAPDMYMEKLVVGPGAKGVIDLNKPLKENLVNIAQALGKTLDTLVVITLAKPRHDEVIAEMQRMGVRVFAVPDGDVAASILTCMPDSEVDVMYCIGGAPEGVVSAAVIRALDGDMHGRLLPRNEVKGDNEENRKFADFELERCAEMGVEANKVLKLEDMARSDNVIFSATGITKGDLLEGISRQGNIATTETLLIRGRCRTIRRIKSIHYLERKDDEVKAIIL

SEQ ID NO: 125589 - DNA, 1002 bp, Bradyrhizobium japonicum USDA 110
  CDS (1)..(1002): transl_table=11
atgtcgacccatatttcagtcccgccgcacgctttgctcgagcgcatcctcacgctggagatcgtgcgggtgaccgagcgggcggcggtgtcttcggcgcggctgcgcggccacggcaacgagaaggcggccgaccaggccgccgtggacgcgatgcggcgcgagctcaacaagctgccgatcgagggcaccatcgtgatcggcgagggcgagcgcgacgaggcgccgatgctgttcatcggcgagaaggttggcatgaatgccggcccgcaggtcgacatcgcggtcgacccgctcgagggcaccacgctgtgcgccaagaacatgccgggctcgatcgccaccatggcgatggccgacggcggcacgctgctgcacgctcccgacgtctacatgcagaagcttgcgatcggaccgggctacgacaagggtgtcgtcgatctcgatgcgagcccggctgacaacgtccgccgcctcgccaaggccaagggtgtccaaccggacggcatcaccgttctcgtgctcgaccgcccgcgccatgccagcatcatcgagagcgtgcgctcgaccggcgcggcggtgcgcctcatcaccgacggcgacgtcgccggcgtgatccattgcgccgatcccgacaacaccggcgttgatatgtatctcggcaccggcggtgcgccggaaggcgtgctcgcggccgtggcgctgcgctgcatcggcggccagatgcagtgccgcctcatcctcgattccgacgagaagcgcgagcgcgccgccaagatgggcgtcaacgatcccaagatgatctacggcatcgaggacatggcgcgcggcgactgcctgttcgccgccaccggcgtcaccacgggctcgctgctgtcgggcgtcaagttccgcaaggacggcgtgatcgagaccgagacggtggtgatgcgctccgtcaccggcaccgtgcgctacatcaaggccgagcaccgcgagctggcgaagttccacctggactga

SEQ ID NO: 125590 - protein, 333 aa, Bradyrhizobium japonicum USDA 110
MSTHISVPPHALLERILTLEIVRVTERAAVSSARLRGHGNEKAADQAAVDAMRRELNKLPIEGTIVIGEGERDEAPMLFIGEKVGMNAGPQVDIAVDPLEGTTLCAKNMPGSIATMAMADGGTLLHAPDVYMQKLAIGPGYDKGVVDLDASPADNVRRLAKAKGVQPDGITVLVLDRPRHASIIESVRSTGAAVRLITDGDVAGVIHCADPDNTGVDMYLGTGGAPEGVLAAVALRCIGGQMQCRLILDSDEKRERAAKMGVNDPKMIYGIEDMARGDCLFAATGVTTGSLLSGVKFRKDGVIETETVVMRSVTGTVRYIKAEHRELAKFHLD

SEQ ID NO: 125591 - DNA, 972 bp, Clostridium tetani E88
  CDS (1)..(972): transl_table=11
atgataaaacaagatatagcaatgggccttgtaagagtaacagaagctgcagctctatgttcttctaaatatatgggaagaggagataaaattgcagcagaccaagcagcggtagatgggatggagaaagctttttctatgttacctataaagggaactgtagttattggagaaggagaaatggacgaggcacctatgctttatataggtcaaaaattgggaataggaacagatggaatggaagaaatggatatagccgtggatccattagatggaactgttcttatagccaaaggtttacctaatgctgtatcagtaatggctatgggacctaaaggaagtttacttaatgcaccagatatgtatatgaaaaaaattgcagtaggggcttctgcaaaaggtgtaatagatataaataaaacaaataaagaaaatattataaatgtggcaatggcattaaataaagatgtaacagaacttactataatggttcaagaaagagaaagacacaatgatataataaaagatgcaagagaagttggagcaagagttaagctcttttcagaaggtgacgtagcagcggttttagcatgtgggtttgaaagtacaggagtagatatgatgatgggtacaggaggagcaccagaaggcgtcatagcggcagctgccattaaatgtatgggtggagatatgcaagctaaattagttcctcaaaacgaagaagaaataagaagatgtaaatccatgggaatagaaaatgtggaggccacattatatataaatgatttagtaaaaagtgatgatatatattttgctgcaacagctgttacggattccgatttattaaaaggagttgtatattctaaaaataattgggcaactactcaatctatagttatgagatctaaaactggaacaataagatttgtagatgcccaacatcacctatcaagaagtaatttagtattataa

SEQ ID NO: 125592 - protein, 323 aa, Clostridium tetani E88
MIKQDIAMGLVRVTEAAALCSSKYMGRGDKIAADQAAVDGMEKAFSMLPIKGTVVIGEGEMDEAPMLYIGQKLGIGTDGMEEMDIAVDPLDGTVLIAKGLPNAVSVMAMGPKGSLLNAPDMYMKKIAVGASAKGVIDINKTNKENIINVAMALNKDVTELTIMVQERERHNDIIKDAREVGARVKLFSEGDVAAVLACGFESTGVDMMMGTGGAPEGVIAAAAIKCMGGDMQAKLVPQNEEEIRRCKSMGIENVEATLYINDLVKSDDIYFAATAVTDSDLLKGVVYSKNNWATTQSIVMRSKTGTIRFVDAQHHLSRSNLVL

SEQ ID NO: 125593 - DNA, 1008 bp, Vibrio parahaemolyticus RIMD 2210633
  CDS (1)..(1008): transl_table=11
atgaaacgcgatttagcaatggcattttctcgtgtaactgaaggtgctgcactcgctggttacaaatggcttggccgtggtgacaaaaacgcagccgatggcgctgctgttgaagttatgcgcactctactgaacaaaacagacatcagtggtgaaattgtcattggtgaaggtgaaatcgatgatgctccaatgctatacatcggtgagaaagttggtctaggtggcgatgaagtggatatcgctgttgaccctattgaaggcactcgcatgaccgcaatgggtcaatcaaacgcattggcagtgcttgccgcgggtgaaaaaggcagctttttaaaagcacctgacatgtacatggaaaaactggttgttggcccaggtgcgaaaggcgtgatcgatctagaaaagccgttgaaagaaaacctagaaaacgttgctagcgcgctgaataaaacgctggacactctggttgtcatcactctagcaaaacctcgccacgatgatgtaatagctgaaatgcaggcgatgggtgtgcgtgtcttcgcggtgccagatggcgacgttgcagcttccatcctaacgtgtatgccagatagtgaagtggacctcatgtactgcattggcggtgcacctgagggggtggtatccgcagcggtgattcgcgcacttgatggtgacatgcatggccgccttctacctcgccacgaagtgaaaggcgacacagaagaaaaccgtatttacggcgcagcagaactacaacgttgtgaagaaatgggcgtaaaagccaacgtcgtcctaaaaatggaagacatggcgcgcagcgacaacgtcgtcttctcagcaacaggcattacaaaaggtgacttgctagagggaatttctcgccaaggtaatattgcgacaacagagacgctactcgtgcgaggccgttgccgtaccattcgccgtatcaagtcgacccattacttagagcgcaaagatccagaagttcgcgatatcattctgtaa

SEQ ID NO: 125594 - protein, 335 aa, Vibrio parahaemolyticus RIMD 2210633
MKRDLAMAFSRVTEGAALAGYKWLGRGDKNAADGAAVEVMRTLLNKTDISGEIVIGEGEIDDAPMLYIGEKVGLGGDEVDIAVDPIEGTRMTAMGQSNALAVLAAGEKGSFLKAPDMYMEKLVVGPGAKGVIDLEKPLKENLENVASALNKTLDTLVVITLAKPRHDDVIAEMQAMGVRVFAVPDGDVAASILTCMPDSEVDLMYCIGGAPEGVVSAAVIRALDGDMHGRLLPRHEVKGDTEENRIYGAAELQRCEEMGVKANVVLKMEDMARSDNVVFSATGITKGDLLEGISRQGNIATTETLLVRGRCRTIRRIKSTHYLERKDPEVRDIIL

SEQ ID NO: 125595 - DNA, 1101 bp, Salmonella enterica subsp. enterica serovar Typhi Ty2
  CDS (1)..(1101): transl_table=11
ttgtgcggaggcaactccgcacacacatcaattattccctccctcccctgtgctacactgcgcgccactcctttttgctacgagtttgttatgagacgagaacttgccatcgaattttcccgtgtgaccgaagcggcggcgctggctggctacaaatggctgggacgcggcgataaaaataccgcggacggcgcggcggtcaacgccatgcgtatcatgctcaaccaggtcaacattgacggcaccatcgtgattggcgaaggcgaaatcgacgaggccccgatgctctatatcggcgagaaagtcggtaccggccacggcgatgcggtagatatcgccgtcgatccgattgagggcacgcgcatgacagcgatgggtcaggcgaacgcgctggcggtactggcggtcggcgataaaggctgcttcctgaatgcgcccgatatgtatatggaaaaactgattgtcggtccgggcgccaaaggggcgatcgatctcaatctgccgctggcggataacctgcgcaacatcgcggatgcgctgggtaaaccgcttggcgatctgaccgtgaccattctggcaaaaccgcgtcatgacgaggttatcgcagagatggccaaactgggcgtacgcgtgtttgccattcctgacggcgacgtcgcggcctcaattctgacctgtatgccggatagcgaagtcgacgtgctgtacgggattggcggcgcgccagaaggcgtggtatccgcagcggtgatccgcgcgctggacggcgatatgcagggacgtctgctggcgcgccatgacgtgaaaggcgacagcgaagaaaaccgccgcattggcgaacaggaactggcgcgctgcaaagcaatggggattgaagcgggcaaggcgttatgcctgggcgacatggcgcgtagcgataacgttattttctctgcgaccggcatcacgaaaggcgatctgctggaaggaattagccgaaaaggccatatcgccacgacggaaacgctgctgatccgcggcaaatcacgcaccatccgccgcattcagtctatccactatcttgatcgtaaagatcctgatgtgcaggcgcatatcctctag

SEQ ID NO: 125596 - protein, 366 aa, Salmonella enterica subsp. enterica serovar Typhi Ty2
MCGGNSAHTSIIPSLPCATLRATPFCYEFVMRRELAIEFSRVTEAAALAGYKWLGRGDKNTADGAAVNAMRIMLNQVNIDGTIVIGEGEIDEAPMLYIGEKVGTGHGDAVDIAVDPIEGTRMTAMGQANALAVLAVGDKGCFLNAPDMYMEKLIVGPGAKGAIDLNLPLADNLRNIADALGKPLGDLTVTILAKPRHDEVIAEMAKLGVRVFAIPDGDVAASILTCMPDSEVDVLYGIGGAPEGVVSAAVIRALDGDMQGRLLARHDVKGDSEENRRIGEQELARCKAMGIEAGKALCLGDMARSDNVIFSATGITKGDLLEGISRKGHIATTETLLIRGKSRTIRRIQSIHYLDRKDPDVQAHIL

SEQ ID NO: 125597 - DNA, 1035 bp, Streptomyces avermitilis MA-4680
  CDS (1)..(1035): transl_table=11
atgaccgagaatcatcagctgccgtccgaactagaggtcccctccgaggcacccgaccggaacctcgccctggagcttgtccgggtcaccgaggccgccgcgatggccgcgggccgctgggtcggccgcggggacaagaacggcgccgacggcgcggccgtccgcgccatgcggaccctcgtctccaccgtgtcgatgaacggcgtcgtcgtcatcggcgaaggggagaaggacgaggccccgatgctcttcaacggggagcgcgtcggcgacgggaccggccccgagtgcgacatcgccgtcgacccgatcgacggaaccacgctcaccgcgaagggcatgaccaacgcgatcgccgtactggcggccgccgaccgcggcaccatgttcgacccgtccgcggtgttctacatggacaagctggtcaccgggcccgaggccgccgacttcgtcgacatcaacgccccggtctcggtgaacatccgccgggtggccaaggccaagcgctccatgcccgaggacgtcaccgtcgtcatcctcgaccggccgcgccacgacggcatcatcaaggagatccgggagaccggcgcgcgcatcaagctgatctccgacggtgatgtcgcgggctccatcctggccctgcgcgagggcaccggcatcgacctgctgctcggcatcggcggtacgcccgagggcatcatctcggcctgcgccgtgaagtgcctgggcggcaccatccagggcaagctgtggcccaaggacgacgaggagcggcagcgggcggtcgacgcgggccacgacctcgaccgcgtgctgttcaccgacgacctggtctccggcgagaacgtcttcttcgtcgcgaccggcatcaccgacggcgaactgctgcgcggcgtgcgctaccgcgccgagacagccacgaccgagtcgatcgtgatgcgctccaagtccggcacggtccgtcagatcaggtccgagcaccggttgagcaagctgcgcgcgtacagccagatcgacttcgaccgcgcgaagtag

SEQ ID NO: 125598 - protein, 344 aa, Streptomyces avermitilis MA-4680
MTENHQLPSELEVPSEAPDRNLALELVRVTEAAAMAAGRWVGRGDKNGADGAAVRAMRTLVSTVSMNGVVVIGEGEKDEAPMLFNGERVGDGTGPECDIAVDPIDGTTLTAKGMTNAIAVLAAADRGTMFDPSAVFYMDKLVTGPEAADFVDINAPVSVNIRRVAKAKRSMPEDVTVVILDRPRHDGIIKEIRETGARIKLISDGDVAGSILALREGTGIDLLLGIGGTPEGIISACAVKCLGGTIQGKLWPKDDEERQRAVDAGHDLDRVLFTDDLVSGENVFFVATGITDGELLRGVRYRAETATTESIVMRSKSGTVRQIRSEHRLSKLRAYSQIDFDRAK

SEQ ID NO: 125599 - DNA, 966 bp, Bacillus cereus ATCC 14579
  CDS (1)..(966): transl_table=11
gtggaaagaagtttatctatggagttagtacgtgtaacagaggctgcagctttatcatcagcgcgttggatggggcgcgggaaaaaggatgaggcagacggtgcagcaacatcagctatgcgtgatgtatttgatacaattccgatgaaaggtacagttgtaattggtgaaggtgagatggatgaagcaccaatgctatatatcggagagaaattaggtacaggatatggaccacgtgtagacgttgcggttgatcctttagaagggacaaacatcgtagcagccggtggctggaatgctcttgctgtcattgcaattgcagaccacggtaatttgttacatgcccctgacatgtacatgaataaaatcgcggttggcccagaagcagttggggcggtcgacattgatgcgcctattattgataacttacgtgcagttgcgaaagcgaaaaataaagatattgaagatgttgtagcgacagttttaaatcgtccacgtcatcaagaaattatcgaagaaattcgtaaagctggtgcgcgcattaaattgattaatgatggagatgtagctggagcgattaatacagcgtttgatcgtacaggtgtagatattttatttggatctggtggagcacctgaaggtgtattagcagcagttgctttaaaatgtttaggtggagaaattcacggaaaactattgccacaaaacgaagctgaattagcacgttgtaaaaaaatgggcatagaagacattaatcgtatccttcgcatggaggacttagtaaaaggtgacgatgcaatctttgcagcaacaggcgtaacagatggagaactattacgtggtgttcaatttaaaggtagcgtaggaacaacgcaatcccttgttatgcgcgcaaaatcaggcacagttcgcttcgtagatggtcgtcatagcttaaataaaaaaccgaacttggttattaaataa

SEQ ID NO: 125600 - protein, 321 aa, Bacillus cereus ATCC 14579
MERSLSMELVRVTEAAALSSARWMGRGKKDEADGAATSAMRDVFDTIPMKGTVVIGEGEMDEAPMLYIGEKLGTGYGPRVDVAVDPLEGTNIVAAGGWNALAVIAIADHGNLLHAPDMYMNKIAVGPEAVGAVDIDAPIIDNLRAVAKAKNKDIEDVVATVLNRPRHQEIIEEIRKAGARIKLINDGDVAGAINTAFDRTGVDILFGSGGAPEGVLAAVALKCLGGEIHGKLLPQNEAELARCKKMGIEDINRILRMEDLVKGDDAIFAATGVTDGELLRGVQFKGSVGTTQSLVMRAKSGTVRFVDGRHSLNKKPNLVIK

SEQ ID NO: 125601 - DNA, 1005 bp, Prochlorococcus marinus subsp. marinus str. CCMP1375
  CDS (1)..(1005): transl_table=11
gtggaccgcactctcattcaagaaattctcgaagttgtcgaacaggcagctatagcctcagccgagctaacaggtttaggacagaaagacgaagctgatgcagctgccgtagaggctatgcgtaaaaggatgggatccattcaaatgcagggaaggatagttataggagaaggcgaaagagatgaggctcctatgctttatataggtgaagaggttgggagtggttcaggaccaggagttgactttgctgtagatccatgtgaaggaaccaatctttgtgctaataatcagcgaggctctatggctgtattggctgcttctgatcgtggtggtttatttaatgcaccagatttttacatgaagaaactggcagctcctcctgctgcaaaaggtaaagttgatattaggaaatctgctacagaaaatataaatattcttagcagttgtcttggcatggctgtgagtgaactgacaattgtagttatggatagagctaggcataaagatttaatagcagaaatccgttctactggcgcaagagttcaacctatttcagatggtgatgttcaagctgctattgcatgtggctttgcaggcacagggactcattgtctaatgggaattggagctgctccagagggggttatttcggcagcagcaatgcgagctctaggaggccattttcaagggcagttggtttacgatcctgcaatagctatgactaaagagtgggctgattacactaaagaaggaaatattgctcgactcaatgaaatggggataacagatggtgacaagatttatgaagcagatgaattagcttctggagaaaatgttgtttttgctggaagtggtattacagatggtttgttatttaatggagttaaatttgaaaaggactgtacacgtacaagcagtcttgtaataagcactcttgatagtacagctcgttttacaaatacagttcatattaaggatggtgcaaagagcatatctttgagctga

SEQ ID NO: 125602 - protein, 334 aa, Prochlorococcus marinus subsp. marinus str. CCMP1375
MDRTLIQEILEVVEQAAIASAELTGLGQKDEADAAAVEAMRKRMGSIQMQGRIVIGEGERDEAPMLYIGEEVGSGSGPGVDFAVDPCEGTNLCANNQRGSMAVLAASDRGGLFNAPDFYMKKLAAPPAAKGKVDIRKSATENINILSSCLGMAVSELTIVVMDRARHKDLIAEIRSTGARVQPISDGDVQAAIACGFAGTGTHCLMGIGAAPEGVISAAAMRALGGHFQGQLVYDPAIAMTKEWADYTKEGNIARLNEMGITDGDKIYEADELASGENVVFAGSGITDGLLFNGVKFEKDCTRTSSLVISTLDSTARFTNTVHIKDGAKSISLS

SEQ ID NO: 125603 - DNA, 1002 bp, Prochlorococcus marinus subsp. pastoris str. CCMP1986
  CDS (1)..(1002): transl_table=11
gtgaatcaaactttaattcaagaaattctcgaagtagtcgagcaagccgcaatcgcatcagcaaaacttacaggtttaggtcagaaagacgaagctgatgcagctgctgttgaagcaatgaggttgcgtatggggaaaattgagatgaaaggaaaaattgtaataggtgaaggtgaacgtgacgaagcaccaatgttatacataggggaagaggtaggtagtggaaacggtccaggcgttgactttgctgtagacccttgtgaaggaactaatctatgtgctaacaaccaacgaggatccatggcagtattagctgcttccgacactggggggcttttcaatgcacctgatttttatatgaataaattggcagcacctccagcggcaaaaggaaaggtagatataaggaattcagctactgagaatttaaaaattttaagtaattgcttagatctagcgattgatgaacttactgtagtagttatggatagagcaagacataaaggtttgatcaaggagattcgagaatgtggagcaaaaattcaaccaatttctgatggagacgttcaagctgcaattgcttgcggatttgctggtacagggactcattgcttaatgggtattggagcagctccagaaggtgttatatctgccgctgcaatgagagctcttggggggcattttcaaggacagttagtttatgaccctgcaattgcgcaaacttctgaatgggctgactatacaaaagaaggaaatataaaacgtttaaatgaaatgggaattactgatattgacaaaatctatgaggccaatgaacttgcatcaggagaaaatgtgatctttgcgggaagtggaattactgatggattattatttgatggagtcaaatttgaaaaagactgtactagaaccagtagccttgtaataagtacattggatagcacttgtcgatttacaaatacaatacacatgaaagatggtgctaaaagtattagcctttaa

SEQ ID NO: 125604 - protein, 333 aa, Prochlorococcus marinus subsp. pastoris str. CCMP1986
MNQTLIQEILEVVEQAAIASAKLTGLGQKDEADAAAVEAMRLRMGKIEMKGKIVIGEGERDEAPMLYIGEEVGSGNGPGVDFAVDPCEGTNLCANNQRGSMAVLAASDTGGLFNAPDFYMNKLAAPPAAKGKVDIRNSATENLKILSNCLDLAIDELTVVVMDRARHKGLIKEIRECGAKIQPISDGDVQAAIACGFAGTGTHCLMGIGAAPEGVISAAAMRALGGHFQGQLVYDPAIAQTSEWADYTKEGNIKRLNEMGITDIDKIYEANELASGENVIFAGSGITDGLLFDGVKFEKDCTRTSSLVISTLDSTCRFTNTIHMKDGAKSISL

SEQ ID NO: 125605 - DNA, 1005 bp, Prochlorococcus marinus str. MIT 9313
  CDS (1)..(1005): transl_table=11
gtggatcgcactcttattcaggaaattctcgaggtcgttgagcaagctgccattgcgtcggcacatctgactggtctcggcaagaaagacgaagccgatgcagcagctgttgaagccatgcgcaagcggatggggcaaatccaaatgcagggtcgcatcgtcatcggtgagggggagcgcgacgaagccccgatgctttatatcggcgaagaggttggcagcggcagcggcccaggcgttgactttgccgtcgatccctgcgaaggcaccaatctttgcgccaacaaccagcgaggttcgatggctgtactggccgcatctgatcgcggtggccttttcaatgctcctgacttttacatgaaaaagttagcggcccccccgtcagcgaaaggcaaggtggacattcgcaaatctgccaccgagaacatcaacatccttagccagtgtcttgggcttgccgtgagtgaactcaccattgtcgtgatggatcgagctcgtcacaaaggcctgatttctgagatacgagccactggtgcacgtgttcaacccatctcagatggagatgttcaagctgccattgcctgtgggtttgccggcaccggcacccactgtctaatgggcatcggtgctgctcctgagggtgtgatttcagctgccgcaatgcgtgctctcggtggtcactttcagggccagctggtgtatgaccccgccattgctcaaaccagtgaatgggccgattacacaaaggaaggcaacattgcccgcctcaatgagatgggcattactgatgttgacaagatctatgaagccgaagaactggcttccggcaaaaatgttgtttttgcgggtagtgggatcactgatggactgttgttccatggagttaagttcgagcctgactgcacacgcactagcagcttggtgatcagcactcttgacaacacagctcggtttaccaataccgtgcatatcaaggatggagctaagagcatcgctctgagctaa

SEQ ID NO: 125606 - protein, 334 aa, Prochlorococcus marinus str. MIT 9313
MDRTLIQEILEVVEQAAIASAHLTGLGKKDEADAAAVEAMRKRMGQIQMQGRIVIGEGERDEAPMLYIGEEVGSGSGPGVDFAVDPCEGTNLCANNQRGSMAVLAASDRGGLFNAPDFYMKKLAAPPSAKGKVDIRKSATENINILSQCLGLAVSELTIVVMDRARHKGLISEIRATGARVQPISDGDVQAAIACGFAGTGTHCLMGIGAAPEGVISAAAMRALGGHFQGQLVYDPAIAQTSEWADYTKEGNIARLNEMGITDVDKIYEAEELASGKNVVFAGSGITDGLLFHGVKFEPDCTRTSSLVISTLDNTARFTNTVHIKDGAKSIALS

SEQ ID NO: 125607 - DNA, 1005 bp, Synechococcus sp. WH 8102
  CDS (1)..(1005): transl_table=11
gtggaccagaccctgattcaggaaattctcgaggtcgttgagcaagccgccatcgcctccgccaagctctccggcaaaggcctcaagaacgaagccgacgccgctgctgtggaagccatgcgcaagcgcatgggccagatccagatgcagggccgcatcgtgatcggtgaaggcgagcgtgacgaagccccgatgctttacatcggtgaggaagtgggcagcggcaccggaccgggcgttgacttcgccgtcgacccttgcgaaggcaccaacctctgcgccttcaatcagcgcggttccatggctgttctggccgcttccgaccgcggtggcctgttcaacgcccccgacttctacatgaagaagctggccgcacccccggctgccaagggcaaggtggacatccgcaagtccgccaccgagaacatcaaaattctcagcgagtgtctcggccttgctgttgatgaactcaccatcgttgtgatggatcgtgcccgtcacaaggatttgatcgctgagatccgcgccaccggcgcccgcatccagccgatctccgacggtgacgttcaagctgcgatcgcctgcggcttcgccggcaccggcacccactgcctgatgggcatcggcgctgctcctgaaggtgtgatctccgctgctgccatgcgcgctctcggcggccacttccagggccagctggtgtacgaccctgcggtggcacagacctctgagtgggctgacatgaccaaggagggcaacctggctcgcctggcagaaatgggcatcaccgaccccgacaaggtttatgaggccgaggagctggcctgtggtgagcacgtttgtttcgctggcagcggtatcaccgatggcctgctgttccacggggttaagttcgaacgcgattgcacacgaaccagcagcctggtgatcagcaacctggacaacacctgccgcttcaccaacaccgtgcacatcaaggacggcgcccagagcatcgctctgagctga

SEQ ID NO: 125608 - protein, 334 aa, Synechococcus sp. WH 8102
MDQTLIQEILEVVEQAAIASAKLSGKGLKNEADAAAVEAMRKRMGQIQMQGRIVIGEGERDEAPMLYIGEEVGSGTGPGVDFAVDPCEGTNLCAFNQRGSMAVLAASDRGGLFNAPDFYMKKLAAPPAAKGKVDIRKSATENIKILSECLGLAVDELTIVVMDRARHKDLIAEIRATGARIQPISDGDVQAAIACGFAGTGTHCLMGIGAAPEGVISAAAMRALGGHFQGQLVYDPAVAQTSEWADMTKEGNLARLAEMGITDPDKVYEAEELACGEHVCFAGSGITDGLLFHGVKFERDCTRTSSLVISNLDNTCRFTNTVHIKDGAQSIALS

SEQ ID NO: 125609 - DNA, 1041 bp, Gloeobacter violaceus PCC 7421
  CDS (1)..(1041): transl_table=11
atggaaaaaacccttggcttggaaattatcgaggtagtcgagcaggccgcgatcgcgtcggcccgcttgatgggcaaaggactcagaaacgaggcggacggtgtcgcggtcaaggcgatgcgcgaccgcatgaaccaaatctatatgcgcgggcggatcgtgattggcgaaggcgagcgcgacgacgccccgatgctctatatcggcgagcaggtgggtatctgcacccagcccaacgccgcccagatgtgcagtatcgacgaactgctcgaaatcgacatcgccgtggatccctgcgagggcaccaacctggtggccgagggccggcagggttcgatggcggtactggccatctccgaaaaaggcggtctgttgggggcacctgacctgtacatgaaaaagcttgccgctccgccccaggccaaaggcaaggtccatatcgactacccggccaccaagaatttgcagatcatcgccgagtgcctcgatcgcgctatcgaagatttggtggtgatcgtcatgaagcgcgaccgccacaaagacttgattagcgagatccgctcgacgggggcgcgggtgcgcttcatcgacgacggcgatatttcggcggccctttcggcgggcatcaacggcaccggcgtgcacgcgctgatgggcatcggcgcggcccccgaaggggtaatttccgccgctgccctgcgctgtttaggatcgcactttcagggccagctcatctacgatcccgatgtggtccagaccggcctgctcaagggcaccaaagccgaaatcgaagagcagctcaaagcccagggcgtcgagcagcccgacaaagtctgggaggccgaagaactcgcttccggcaagaatgtgctctttgccgcctgcgggatcaccgacggcgattttatcaagggcgtgcgctttttcaccggttccgcccgcaccgagacgatggtcatctccagccaatccaacaccgtccgcttcgtggacaccgtccacatcctcgacccggcccaccatgcctcgctggtgatctga

SEQ ID NO: 125610 - protein, 346 aa, Gloeobacter violaceus PCC 7421
MEKTLGLEIIEVVEQAAIASARLMGKGLRNEADGVAVKAMRDRMNQIYMRGRIVIGEGERDDAPMLYIGEQVGICTQPNAAQMCSIDELLEIDIAVDPCEGTNLVAEGRQGSMAVLAISEKGGLLGAPDLYMKKLAAPPQAKGKVHIDYPATKNLQIIAECLDRAIEDLVVIVMKRDRHKDLISEIRSTGARVRFIDDGDISAALSAGINGTGVHALMGIGAAPEGVISAAALRCLGSHFQGQLIYDPDVVQTGLLKGTKAEIEEQLKAQGVEQPDKVWEAEELASGKNVLFAACGITDGDFIKGVRFFTGSARTETMVISSQSNTVRFVDTVHILDPAHHASLVI

SEQ ID NO: 125611 - DNA, 1008 bp, Vibrio vulnificus YJ016
  CDS (1)..(1008): transl_table=11
atgaaacgcgatttagcgatggccttttcccgcgtcacagaaggcgctgctctagcgggttataaatggctaggccgtggtgacaaaaacgcggcggatggcgctgcagtagaagtcatgcgcaccctgctgaataaaaccgacatcagtggcgaaattgttattggtgaaggtgaaatcgacgatgccccgatgctttacattggcgaaaatgttggcctaggtggtgatgaagtggatatcgcggtcgatccaatcgaagggacgcgcatgaccgcgatgggccaatcaaacgctcttgcggtactggctgccggtgaaaaagggagctttttaaaagcaccggatatgtacatggaaaaactggtggttggccctggtgcaaaaggagtgatcgatctcaacaagccacttaaagaaaacctcgtgaacatcgcacaagcgcttggaaaaacgcttgataccttggtggtgattacccttgcaaagcctcgtcatgatgaggtgatcgccgagatgcaacgcatgggtgttcgtgttttcgctgtgccggatggtgatgtggccgcttcgattcttaccagcatgccagacagtgaagttgacgtgatgtactgtattggcggtgcacctgaaggggttgtctcagcggccgtcattcgcgcattggatggcgacatgcatggtcgtcttttacctcgtaacgaagtaaaaggcgataacgaagaaaaccgcaagtttgcggatttcgagctcgagcgctgcgctgaaatgggcgtggaagcgaacaaagtgctaaaactggaagacatggcacgcagtgataatgtcattttctccgcaacaggcatcactaaaggcgatctacttgaaggcatcagccgtcaaggcaatattgcaaccaccgaaacattgctgattcgtggccgttgtcgaaccattcgtcgtatcaagtcgattcattatcttgagcgcaaagatgacgaagtgaaagcgatcattctttaa

SEQ ID NO: 125612 - protein, 335 aa, Vibrio vulnificus YJ016
MKRDLAMAFSRVTEGAALAGYKWLGRGDKNAADGAAVEVMRTLLNKTDISGEIVIGEGEIDDAPMLYIGENVGLGGDEVDIAVDPIEGTRMTAMGQSNALAVLAAGEKGSFLKAPDMYMEKLVVGPGAKGVIDLNKPLKENLVNIAQALGKTLDTLVVITLAKPRHDEVIAEMQRMGVRVFAVPDGDVAASILTSMPDSEVDVMYCIGGAPEGVVSAAVIRALDGDMHGRLLPRNEVKGDNEENRKFADFELERCAEMGVEANKVLKLEDMARSDNVIFSATGITKGDLLEGISRQGNIATTETLLIRGRCRTIRRIKSIHYLERKDDEVKAIIL

SEQ ID NO: 125613 - DNA, 1017 bp, Corynebacterium diphtheriae NCTC 13129
  CDS (1)..(1017): transl_table=11
atgaccaacctcaacccagagattccagatcgcaacctcgccctcgagttggttcgtgttaccgaggcagctgcactggcgtctggccgctgggtcggtcgcggcatgaagaacgagggtgacggagcagctgtcgacgccatgcgtaagctcatcaactcagttcaaatgaacggcgtggttgttattggagaaggcgaaaaagacgaagcccctatgctcttcaatggcgaacaggtaggcaccggcgaaggcgcagcagttgacattgctgttgatcccgtcgatggcactaccttgatggcagaaggtcgccccaacgctatttccgtcctagccgccgccgagcgtggttccatgtacgacccatctgccgtgttctacatgcgcaagatcgccgttggaccagaagcagcgggcaccatcgacatcaacgcaccagtcgagtacaacatcaaggccgtagcaaaggctaagggtattgccccagaccaggtcaccgttgttgtcttggatcgcccacgccacgaaaccctgatcaaagacattcgcgaggccggcgctaaggtgcgcctgattcgcgatggcgacgttgcaggtgcagttgctgctgctcaagcaaccaactcagtcgacatcatgatgggtaccggtggaaccccagaaggtatcatcaccgcatgcgctatgaagtgcatgggtggcgaaatccaaggtgtgctggcccccaaggatgatgcggaggccgccaaggcacgcaatgctggccacgagctcaaccgcgttctgggaacccatgacctcgtctcttcagacaactgcttcttcgtcgctaccggtgtgactaatggcgacatgctccgtggcgtgagctaccgtgccgacggcgcaaccacccgctcgctcgttatgcgttctaagtccggcactgttcgtttcatcgaatccacccacaagctgcacaaactgcaggaatactctgtggttgattactcccagatttccccacggaagtag

SEQ ID NO: 125614 - protein, 338 aa, Corynebacterium diphtheriae NCTC 13129
MTNLNPEIPDRNLALELVRVTEAAALASGRWVGRGMKNEGDGAAVDAMRKLINSVQMNGVVVIGEGEKDEAPMLFNGEQVGTGEGAAVDIAVDPVDGTTLMAEGRPNAISVLAAAERGSMYDPSAVFYMRKIAVGPEAAGTIDINAPVEYNIKAVAKAKGIAPDQVTVVVLDRPRHETLIKDIREAGAKVRLIRDGDVAGAVAAAQATNSVDIMMGTGGTPEGIITACAMKCMGGEIQGVLAPKDDAEAAKARNAGHELNRVLGTHDLVSSDNCFFVATGVTNGDMLRGVSYRADGATTRSLVMRSKSGTVRFIESTHKLHKLQEYSVVDYSQISPRK

SEQ ID NO: 125615 - DNA, 1005 bp, Rhodopseudomonas palustris CGA009
  CDS (1)..(1005): transl_table=11
atgtcgaccaccatttccgttccgccgcaattgctgctggagcgcatcctgaccctggagatcgtgcgcgtgaccgaacgcgccgcggtgtctgcggcgcggctgcgcggccacggcaacgagaagggcgcggaccaggccgcggtcgatgcgatgcgccgcgagctcaacaagatgccgatcgaaggcaccatcgtgatcggcgagggcgagcgcgacgaagcgccgatgctgttcatcggtgagaaggtcggcgccggcatcaacgcgggtccgaaggtcgacatcgcggtcgacccgctcgaaggcaccacgctgtgcgccaagaatatgccgggctcgatcgccaccatggcgatggccgaaggcggcaccctgctgcatgcgcccgacgtctacatgcagaagatcgcgatcggtcccggttacgaaaagaacctgatcgacatcgatgcgccgccggaagacaacatcctccgtctggcgcaggccaagggcgtgccgacgagcggcgtcaccgtgctggtgctcgaccgtccgcgccacgccgaactgatcgccaagatccgcgccaccggcgccggcgtccagctgatcaccgacggcgacgttgccggcgtgatccactgcgccgacccggacaacaccggcgtcgacatctacatgggcaccggcggtgcgccggaaggcgtgctggccgcggcggcgctgcgctgcatcggcggtcagatgcagtgccggctgctgctcgacacccactccaagcgcaaccgcgccgagtcgatgggcatcgaagatccgaacttcgtgtaccagatcgaggacatggtgaagggtgactgcctgttcgccgccaccggtgtcaccgacggttcgctgctgtcgggcgtcaagttccgcaagggcgtgatccagaccgagaccgtggtgatgcggtcggtcaccggcacggttcgctacatcaaggcggaccaccgccagctcgagaagttccacctcgattaa

SEQ ID NO: 125616 - protein, 334 aa, Rhodopseudomonas palustris CGA009
MSTTISVPPQLLLERILTLEIVRVTERAAVSAARLRGHGNEKGADQAAVDAMRRELNKMPIEGTIVIGEGERDEAPMLFIGEKVGAGINAGPKVDIAVDPLEGTTLCAKNMPGSIATMAMAEGGTLLHAPDVYMQKIAIGPGYEKNLIDIDAPPEDNILRLAQAKGVPTSGVTVLVLDRPRHAELIAKIRATGAGVQLITDGDVAGVIHCADPDNTGVDIYMGTGGAPEGVLAAAALRCIGGQMQCRLLLDTHSKRNRAESMGIEDPNFVYQIEDMVKGDCLFAATGVTDGSLLSGVKFRKGVIQTETVVMRSVTGTVRYIKADHRQLEKFHLD

SEQ ID NO: 125617 - DNA, 963 bp, Bacillus methanolicus
  CDS (1)..(963): transl_table=11
atgagggaattgaaaagcgaaaagcgtgttcagtcgttagctatggaatttctctctgtagcacagcaagcagctctcgcttcttatccttggataggaaaaggtaataaaaacgaagttgatagggctggtacggaagctatgcgcaatcgactgaacctcattgatatgagcggtttaattgttattggtgaaggggaaatggacgaagctcctatgctttatattggagaggaactcggaacaggaaaaggaccccaactcgatattgcagtagaccctgttgatggaacgggtttaatggcaaaaggaatggataattcaatagcagtaattgctgcatccactagaggaagtttactgcatgccccagatatgtacatggaaaagatagctgtgggaccaaaagcaaaaggctgcgtaaatctagacgcatctttaacagaaaatatgaaatcagttgctaaagctttagggaaagatttaagagaattaactgtaatgatacaggatagaccacgtcatgatcatttgatccaacaagtaagagatgtaggggctagactcaaattattttctgatggtgacgttacaagggcaataggtactgcactcgaagaagtagacgttgatatattagtaggaactggcggtgctccagaaggagtaattgctgcaaccgcactgaagtgtttggggggagatttccaaggaagacttgctcctcaaaacgaagaagaatttgatcgctgtattacgatgggaataacagatccaagaaaaattttcacaatagatgaaattgtaaaatcagatgattgcttttttgtagcaacaggaataactgacggactgcttataaatggtattcgaaaaaaagaagatggtttaatgcaaacgcactcttttcttacaattggaggaagcagcgtaaaataccaatttattgaagcttatcattga

SEQ ID NO: 125618 - protein, 320 aa, Bacillus methanolicus
MRELKSEKRVQSLAMEFLSVAQQAALASYPWIGKGNKNEVDRAGTEAMRNRLNLIDMSGLIVIGEGEMDEAPMLYIGEELGTGKGPQLDIAVDPVDGTGLMAKGMDNSIAVIAASTRGSLLHAPDMYMEKIAVGPKAKGCVNLDASLTENMKSVAKALGKDLRELTVMIQDRPRHDHLIQQVRDVGARLKLFSDGDVTRAIGTALEEVDVDILVGTGGAPEGVIAATALKCLGGDFQGRLAPQNEEEFDRCITMGITDPRKIFTIDEIVKSDDCFFVATGITDGLLINGIRKKEDGLMQTHSFLTIGGSSVKYQFIEAYH

SEQ ID NO: 125619 - DNA, 921 bp, Wolbachia endosymbiont of Drosophila melanogaster
  CDS (1)..(921): transl_table=11
atgatggaagatttagcttataaattagttaaagtgaccgaagctgcagcacttgctgcatataaactagcaggcttcggcgatgaaaaaaaggctgatcaggttgcagttgatgcaatgcgtacagtattaaattcaatggaaataaatggtactatcgtaattggtgaaggtgagagagatgaagcgccgatgctatatattggcgagaaggttggcactggaaatggtcctgaaatcgacattgccgttgacccacttgaaggcactacgatttgtgctcattacaaatcaggggcaatgtccgttcttgctgcaacgaaaaaaggtaattttttacatgcacctgatgtttatatggaaaagatagcagtaggaaaaaatcttccagagggtgtagtctcactaaaaaatagcattgaaaagaatctagacaatttagccaaggcaaaaaaatgcaaagtgaatgatctcgtggtaactgtacttaaacgtgaaaggcacaatgaattaatagagaaaatcaggaaattaggagcaaaaattaaactaatagatgatggcgatgttgcagccgtagtttcactaataaatggcaatcatgatatgtatatcggaataggaggggcaccagaaggggtgcttgcggctgcagcgctgagttcaatcggtgggcagatggagggaagattaatatttgacacggatcaattaaaagaaagagcaaaaaatttaaatatccatgacccagaaaaaatctacaccgtaaaagatatggcaagaggtgaatcagtgtttattgcaactggagtaacaagcggagaacttgtggatggagttgataacatatgttcaactagttctttaataattctacctaataagctgataaagctgcaaacaatgcagaacttatgttag

SEQ ID NO: 125620 - protein, 306 aa, Wolbachia endosymbiont of Drosophila melanogaster
MMEDLAYKLVKVTEAAALAAYKLAGFGDEKKADQVAVDAMRTVLNSMEINGTIVIGEGERDEAPMLYIGEKVGTGNGPEIDIAVDPLEGTTICAHYKSGAMSVLAATKKGNFLHAPDVYMEKIAVGKNLPEGVVSLKNSIEKNLDNLAKAKKCKVNDLVVTVLKRERHNELIEKIRKLGAKIKLIDDGDVAAVVSLINGNHDMYIGIGGAPEGVLAAAALSSIGGQMEGRLIFDTDQLKERAKNLNIHDPEKIYTVKDMARGESVFIATGVTSGELVDGVDNICSTSSLIILPNKLIKLQTMQNLC

SEQ ID NO: 125621 - DNA, 963 bp, Bdellovibrio bacteriovorus HD100
  CDS (1)..(963): transl_table=11
atggatcgaaacctggctttagaattcgtacgtgtgaccgaagcagctgctctggcttccgcccgctgggtgggacgcggcgaggaaaaacctgcggacgcagcagccgtggacgccatgagaaaagctttcgacatcatcaacatggatggcaccgtggtgatcggtgaaggagagcgcgacgaagctcccatgctttatatcggcgaaaaagtcggcaccaattcaggggacgctccggcgttggacattgctttggatccattggaaggaaccacgatctgtgccaccggtggtgtgggttctatttctgtgatcgcggtcgctgaaaaaggaaaattcctgcacgctccggacacctacatggataaaatcgcctgtggtcccgccgccaagggcgtgatcgacattgataaatctgcgactgaaaacatccatgctgttgccaaggctttggataaagcggtgaatgacctgactgttgtaattctgaaccgccctcgtcacgaggctttgattgctgaagtgcgcagaactggagcccgtattcatttgatcggggacggagatgtttccgcggcagtgggtgcggcgtggcctgattccggcatcgatcttttgatgggtgttggtggtgcgccggaaggtgtgatctctgcggctgccatgcagtgccttgggggggacttccagggccgcctgaagttccgcaatgaagaagaacgtgctcgtgcgactcgcatggggttgaaagatctggacaaaaaattcaccgtggacgaactggcttccggttctgtgatgtttgtggcgactggtgtgacagacgggcctttcctgaaaggtgttcgcttccttccggatggtaaagccaaaagccattctgtggtgatgcgttcgcagaccggcaccatccgcaccattgaagccttccacgatctgtcccgcaagccgagcaaatag

SEQ ID NO: 125622 - protein, 320 aa, Bdellovibrio bacteriovorus HD100
MDRNLALEFVRVTEAAALASARWVGRGEEKPADAAAVDAMRKAFDIINMDGTVVIGEGERDEAPMLYIGEKVGTNSGDAPALDIALDPLEGTTICATGGVGSISVIAVAEKGKFLHAPDTYMDKIACGPAAKGVIDIDKSATENIHAVAKALDKAVNDLTVVILNRPRHEALIAEVRRTGARIHLIGDGDVSAAVGAAWPDSGIDLLMGVGGAPEGVISAAAMQCLGGDFQGRLKFRNEEERARATRMGLKDLDKKFTVDELASGSVMFVATGVTDGPFLKGVRFLPDGKAKSHSVVMRSQTGTIRTIEAFHDLSRKPSK

SEQ ID NO: 125623 - DNA, 972 bp, Bacillus cereus ATCC 10987
  CDS (1)..(972): transl_table=11
ttggaacgtgaactcgcactagaaattgtccgtgtaacagaagcagcagcattagcatccgcacagtggatgggccgcggaaagaaaaacgaagcagatgatgcagcaactacagcaatgcgtgatatgttcgattcagtaaacatggcaggtacagttgtaattggtgaaggagaacttgatgaagcaccgatgttatatattggtgaagaactaggaacaggtaacggtccagaagtagatatcgccgttgacccattagaaggtacaaacatcgttgcaaaaggtcttgcaaatgcaatggcagttatcgcaatcgcagataaaggaaaccttcttcatgctcctgatatgtacatggaaaaaatcgcggttggtccaaaagcagctggtaaaattagcttagatgatccaattgaaaaaacaattgaaattgtagcagaagctaacaataaaaagattcgcgatctaacagttatcgttcaagaacgtgaacgtcatcaagatattattgatcgtgttcgtgcaaaaggtgcacgcgtaaaattatttggtgatggtgatgttggtgcgtcaatcgcaacagcactacctggaacaggtatcgacttattcgtaggtatcggcggagctccagaaggtgttatttctgcagcagcattaaaatgccttgaaggtgaaatgcaagctcgcttagttccaatgaacgaagaagaagaagctcgttgccgtgaaatgggattagaagaccctcgtcaacttctaatgctagaagacttagtatctggtgatgacgcaatcttctcagcaactggtgtatctgctggtgaattattagacggcgtaaaattcctaggcggagatttagctgaaacatactctatcgtaatgcgttacaaaacaagaacagtacgattcattaaaacgcatcaccatttagatcataagccacacttaaacttagatatttaa

SEQ ID NO: 125624 - protein, 323 aa, Bacillus cereus ATCC 10987
MERELALEIVRVTEAAALASAQWMGRGKKNEADDAATTAMRDMFDSVNMAGTVVIGEGELDEAPMLYIGEELGTGNGPEVDIAVDPLEGTNIVAKGLANAMAVIAIADKGNLLHAPDMYMEKIAVGPKAAGKISLDDPIEKTIEIVAEANNKKIRDLTVIVQERERHQDIIDRVRAKGARVKLFGDGDVGASIATALPGTGIDLFVGIGGAPEGVISAAALKCLEGEMQARLVPMNEEEEARCREMGLEDPRQLLMLEDLVSGDDAIFSATGVSAGELLDGVKFLGGDLAETYSIVMRYKTRTVRFIKTHHHLDHKPHLNLDI

SEQ ID NO: 125625 - DNA, 966 bp, Bacillus cereus ATCC 10987
  CDS (1)..(966): transl_table=11
gtggaaagaagtttatctatggagttagtacgtgtaacagaggctgcagctttatcatcagcgcgttggatgggacgcgggaaaaaggatgaggcagacggtgcagcaacatcagctatgcgtgatgtatttgatacaattccgatgaaaggtacagttgtaattggtgaaggtgaaatggatgaagcaccaatgctatatatcggagaaaaattaggtacaggatatggtccgcgtgtagacgttgcagttgatcctttagaagggacaaacattgtagcagctggtggatggaatgctcttgctgttattgcaattgcagatcatggtaatttgttacatgctcctgacatgtacatggataaaatcgcggttggcccagaagcggttggggcggtcgatattgatgcgcctattatcgataacttacgtgcagttgcgaaagcgaaaaacaaagatattgaagatgttgtagcgacagttttaaaccgtccacgtcatcaagcaattattgaagaaattcgtaaagctggtgctcgcattaaattgattaatgatggagacgtagctggcgcaatcaacacagcatttgatcgtacaggtgtagatattttattcggctctggtggtgcgcctgagggtgtgttagcggcagttgcattaaaatgtttaggtggagaaattcacgggaaattattaccacaaaacgaagctgaattggcgcgttgcaaaaagatgggcatagacgacatcaaccgcatccttcgcatggaggacttagtaaaaggtgacgatgcaatcttcgcagcaacaggtgtaacagacggagaactattacgcggcgttcaatttaaaggtagcgtaggaacaacacaatcccttgttatgcgcgcaaaatcaggcacagtacgcttcgtagacggacgtcacagcttaaataaaaaaccgaacttggttattaaataa

SEQ ID NO: 125626 - protein, 321 aa, Bacillus cereus ATCC 10987
MERSLSMELVRVTEAAALSSARWMGRGKKDEADGAATSAMRDVFDTIPMKGTVVIGEGEMDEAPMLYIGEKLGTGYGPRVDVAVDPLEGTNIVAAGGWNALAVIAIADHGNLLHAPDMYMDKIAVGPEAVGAVDIDAPIIDNLRAVAKAKNKDIEDVVATVLNRPRHQAIIEEIRKAGARIKLINDGDVAGAINTAFDRTGVDILFGSGGAPEGVLAAVALKCLGGEIHGKLLPQNEAELARCKKMGIDDINRILRMEDLVKGDDAIFAATGVTDGELLRGVQFKGSVGTTQSLVMRAKSGTVRFVDGRHSLNKKPNLVIK

SEQ ID NO: 125627 - DNA, 1002 bp, Prochlorococcus marinus str. AS9601
  CDS (1)..(1002): transl_table=11
gtgaatcaaactttaattcaagaaattctcgaagttgtcgagcaagctgctattgcctcagcaaaactaacaggacttggtcaaaaagatgaagctgatgctgcagcagtcgaggcaatgagattgcgaatgggcaaaattgaaatgaaagggaaaattgttattggagaaggtgaaagagatgaagcacctatgctttatataggtgaagaggttggaagtggaagtggtccaggggtcgactttgcagtagatccttgtgaaggaactaatctttgtgcgaataatcaaagaggatctatggctgttttagctgcctctgatacgggtggtcttttcaatgctcctgatttttacatgaacaaattagcagcgcctcctgcagccaaaggtaaagtagatattagaaattcagcgactgaaaacttgaagatactaagtgattgcttgggtctttctattgatgagcttactgttgttgtaatggatagaactaggcataaagatttaattaaagagattcgaggatgtggtgctaaagttcaaccgatttctgatggtgatgttcaagctgcgattgcatgtggttttgcaggaattggaacacattgcttgatgggtattggtgcagctccagagggtgttatttcagctgctgcaatgagagctcttggcggacactttcaaggacaactagtttatgatccagcaatcgctcaaacttctgaatgggctgattacacaaaagaaggaaatataaaacgtcttaatgaaatgggcataaccgatatagataaaatttatgaagctaatgaattggcatcgggagaaaatgttgttttcgctggaagtggaataactgatggattactatttgacggagttaaatttgaaagggattgtgttagaacaagtagtttggttattagtacattagatagtactgcaaggttcacaaatactgtccatataaaagatggtgctaagagtatcagcctttaa

SEQ ID NO: 125628 - protein, 333 aa, Prochlorococcus marinus str. AS9601
MNQTLIQEILEVVEQAAIASAKLTGLGQKDEADAAAVEAMRLRMGKIEMKGKIVIGEGERDEAPMLYIGEEVGSGSGPGVDFAVDPCEGTNLCANNQRGSMAVLAASDTGGLFNAPDFYMNKLAAPPAAKGKVDIRNSATENLKILSDCLGLSIDELTVVVMDRTRHKDLIKEIRGCGAKVQPISDGDVQAAIACGFAGIGTHCLMGIGAAPEGVISAAAMRALGGHFQGQLVYDPAIAQTSEWADYTKEGNIKRLNEMGITDIDKIYEANELASGENVVFAGSGITDGLLFDGVKFERDCVRTSSLVISTLDSTARFTNTVHIKDGAKSISL

SEQ ID NO: 125629 - DNA, 1002 bp, Prochlorococcus marinus str. MIT 9515
  CDS (1)..(1002): transl_table=11
gtgaatcaaactttaattcaagaaattctcgaagtagtcgagcaagccgcaatcgcatcagcgaaacttacaggtctcggccagaaagatgaagccgatgctgctgctgttgaagcaatgagattgcgaatgggcaaaattgagatgaaggggaaaattgttataggtgaaggagaacgtgacgaagcaccaatgttatacataggtgaagaggtaggcagtggcaatgggcctggtgttgactttgctgtagacccttgtgagggtactaatctttgtgctaacaaccaaagaggatctatggcagtattagcggcctctgacactggtgggctttttaatgcacctgatttttacatgaataaactggcagcacctccagcagccaaaggaaaagtagatattaggaattcagcaactgaaaacttaaaaattttaagtaattgcttggatttagcaattgatgaacttacagtagttgttatggatagagctcgacataaagggttgataaaggaaattcgagaatgcggtgcaaaaattcaaccaatttctgatggagatgttcaagctgcaattgcatgtggatttgcaggcacaggtacccattgtctaatgggaattggagcagctcctgaaggcgtaatatcagccgctgccatgagagctttaggggggcattttcaaggacaattagtatatgatccctcgattgcacaaacttctgagtgggcagactatacaaaagaaggaaatataaaacgtttaaatgaaatgggaattactgatattgacaaaatctatgaggccaatgaactggcatcaggagaaaatgttatttttgcgggtagtggaattactgatggcttgttattcgacggagtcaaatttgaaaaggactgtactagaactagtagcttagtaataagtactttagatagtacatgtcgatttacaaatactattcatatgaaagatggcgctaaaagcatcaatctttaa

SEQ ID NO: 125630 - protein, 333 aa, Prochlorococcus marinus str. MIT 9515
MNQTLIQEILEVVEQAAIASAKLTGLGQKDEADAAAVEAMRLRMGKIEMKGKIVIGEGERDEAPMLYIGEEVGSGNGPGVDFAVDPCEGTNLCANNQRGSMAVLAASDTGGLFNAPDFYMNKLAAPPAAKGKVDIRNSATENLKILSNCLDLAIDELTVVVMDRARHKGLIKEIRECGAKIQPISDGDVQAAIACGFAGTGTHCLMGIGAAPEGVISAAAMRALGGHFQGQLVYDPSIAQTSEWADYTKEGNIKRLNEMGITDIDKIYEANELASGENVIFAGSGITDGLLFDGVKFEKDCTRTSSLVISTLDSTCRFTNTIHMKDGAKSINL

SEQ ID NO: 125631 - DNA, 1005 bp, Prochlorococcus marinus str. MIT 9303
  CDS (1)..(1005): transl_table=11
gtggatcgcactcttattcaggaaattctcgaggtcgttgagcaagcggccattgcgtcggcacatctgactggtctcggcaagaaagacgaagccgatgcagcagctgtggaagccatgcgcaagcggatgggaaaaatcgaaatgcagggtcgcatcgtcatcggtgagggggaacgcgacgaagccccaatgctttatatcggcgaagaggttggcagcggcagcggcccaggcgttgactttgctgtcgatccctgcgaaggcaccaatctttgcgccaacaaccagcgaggttcgatggctgtactggccgcctctgatcgcggtggccttttcaatgctcccgacttttacatgaaaaagttggcggcccccccgtcagcaaaaggcaaggtcgacattcgcaaatctgccaccgagaacatcaacatccttagccaatgtcttgggcttgccgtaagtgaactcaccattgtcgtgatggatcgagctcgtcacaaaggcctgatctctgagatacgtgccactggtgcacgtgttcaacccatctcagatggggatgttcaagccgctattgcctgtgggtttgccggcaccggcacccactgtctaatgggcatcggtgctgctcctgagggtgtgatttcagctgccgcaatgcgtgctctcggtggtcattttcagggccagctggtgtatgaccccgccattgctcaaaccagtgagtgggccgattacaccaaggaaggcaacattgcccgcctcaatgagatgggcattactgatgttgacaagatctatgaagccgaagaactggcttccggcaacaatgttgtttttgctggtagtgggatcactgatggacttttgttccatggagttaagttcgagcctgactgcacacgcactagcagcttggtgatcagcactcttgacaacacagctcggtttaccaataccgtgcatatcaaggatggagctaagagcatcgctcttagctaa

SEQ ID NO: 125632 - protein, 334 aa, Prochlorococcus marinus str. MIT 9303
MDRTLIQEILEVVEQAAIASAHLTGLGKKDEADAAAVEAMRKRMGKIEMQGRIVIGEGERDEAPMLYIGEEVGSGSGPGVDFAVDPCEGTNLCANNQRGSMAVLAASDRGGLFNAPDFYMKKLAAPPSAKGKVDIRKSATENINILSQCLGLAVSELTIVVMDRARHKGLISEIRATGARVQPISDGDVQAAIACGFAGTGTHCLMGIGAAPEGVISAAAMRALGGHFQGQLVYDPAIAQTSEWADYTKEGNIARLNEMGITDVDKIYEAEELASGNNVVFAGSGITDGLLFHGVKFEPDCTRTSSLVISTLDNTARFTNTVHIKDGAKSIALS

SEQ ID NO: 125633 - DNA, 981 bp, Thermus thermophilus HB27
  CDS (1)..(981): transl_table=11
atgatggaagccatggaaattgaacgccggctggtcctcgaggtcgtccgggtcacggagcaggcggccctggccgcaagccgcttcgcgggcaagggggacaaggaagcggtggacgaggcgggcacccaggccatgcgccgggtgctgaacgaactccccataaggggcaccgtggtcatcggcgagggggagatggacgaggcccccatgctctacatcggggaggtgctgggccagggggggctggaggtggacatcgccgtggaccccgtggagggcaccaccaccgccgccaagggcctgcccaacgccgtgaccgtgatcgccctgagcgaaaagggcgggctcttccacgcccccgacatgtacatggaaaagctcatcgtccccccgcccgccgccggcctcgtggacctcacctggcccgtctccgccaacctcaaggccctggccctcgccctccagcgctccgtggaggacctggtggtggtggtcctggaccgcccccggcacgaaaggctcatccgggagatccgggaagcgggggcccgggtcaagctcatctccgacggggacgtgatcgccgccctggccgccgccatccgcggcaccggggtccacgcggtgatggggatcggcggggccccggaaggggttttggccgccgccgccttaaagtgcctgggcggggagatccaggcccgcttcgtcccgcaaaacgaggaggaaagggcgcgcctaaaggccatgggcggggacgagcaccgcatctacaagaccgaggacctcgcccccgggaaggagatcgtcttcgccgccaccgggatcaccgacggggacatcctggagggcgtgcgcttcttcgggggcggggccaggacccactccatcgtcatgggccacgccacacgggtggtgcgcttcatagactccatccacctctttgagacgggcgcccgggtcaccatccgggtctaa

SEQ ID NO: 125634 - protein, 326 aa, Thermus thermophilus HB27
MMEAMEIERRLVLEVVRVTEQAALAASRFAGKGDKEAVDEAGTQAMRRVLNELPIRGTVVIGEGEMDEAPMLYIGEVLGQGGLEVDIAVDPVEGTTTAAKGLPNAVTVIALSEKGGLFHAPDMYMEKLIVPPPAAGLVDLTWPVSANLKALALALQRSVEDLVVVVLDRPRHERLIREIREAGARVKLISDGDVIAALAAAIRGTGVHAVMGIGGAPEGVLAAAALKCLGGEIQARFVPQNEEERARLKAMGGDEHRIYKTEDLAPGKEIVFAATGITDGDILEGVRFFGGGARTHSIVMGHATRVVRFIDSIHLFETGARVTIRV

SEQ ID NO: 125635 - DNA, 984 bp, Desulfovibrio vulgaris subsp. vulgaris str. Hildenborough
  CDS (1)..(984): transl_table=11
atggaagccccggaaaaaaacctcgctctcgaccttgttcgcgtcaccgaagccgcagcgctcgcttccgcccgctggctgggcaagggcaacaacgacgctggcgaccaggccgctgtcgacgccctgcgcctcagcttcaattcgctgcatgtgaagggccgcgtcatcatcggtgaaggcgagaaggacaacgcccccatgctgttcaacggcgaggaagtgggcaccgggcacggccccgccctcgacgtggctgtcgaccccgtcgaaggcaccaagcttctggcctatggccgccccaacgccatctctgtcgtgggtatcgcccctgcggggaccatgtacaaccccggccccagcttctacatgcagaagctggtcgtccccccggcggcccgtgacgtggtcgacatcgacgcacccgtgaaggagaacctcaagaacatcgcgaagagccttggcaaggatgtggacgacctcgtggtgttcgtcctcgacaagccccgccacgagaagctcatccacaagattcgcgaagccggtgcgcgcatccagttgcacaccgacggcgacgtggcaggagcgctcatggctgtcgacccgcgctctgaagtggacgtcatgatgggcacgggcggcacccccgaaggcgtactggcggcttgcgccatcaagggcatcggcgggcagatgctggcacgactcgacccccagtcctatgtcgagaaggaagccatccgcgaagccggaatcgatacccgcgacatactcaccgtcgacacgctcgttcgcagcgatgaagtcttcttcgccgccaccggcatctcgggcggcacgttcctgcgcggcgtgcagtacctcggcaacggtgccgtcacccactccatggtcatccgtggcaagacgggcaccctgcgctatatcgagtcgtaccataactgggatcggctcatgaagatcagttccgtcaagtacgactag

SEQ ID NO: 125636 - protein, 327 aa, Desulfovibrio vulgaris subsp. vulgaris str. Hildenborough
MEAPEKNLALDLVRVTEAAALASARWLGKGNNDAGDQAAVDALRLSFNSLHVKGRVIIGEGEKDNAPMLFNGEEVGTGHGPALDVAVDPVEGTKLLAYGRPNAISVVGIAPAGTMYNPGPSFYMQKLVVPPAARDVVDIDAPVKENLKNIAKSLGKDVDDLVVFVLDKPRHEKLIHKIREAGARIQLHTDGDVAGALMAVDPRSEVDVMMGTGGTPEGVLAACAIKGIGGQMLARLDPQSYVEKEAIREAGIDTRDILTVDTLVRSDEVFFAATGISGGTFLRGVQYLGNGAVTHSMVIRGKTGTLRYIESYHNWDRLMKISSVKYD

SEQ ID NO: 125637 - DNA, 987 bp, Bartonella quintana str. Toulouse
  CDS (1)..(987): transl_table=11
atgccttcaactcagaaaattttaaatggacttgatcgtagtctaacacttgaattggtacgtgtaactgaacgcgctgctgttgcagctgcacgctggcgcgggcggggtgatgaaaaggctgctgatcaagctgctgtagatgcaatgcgtcaagaacttaatcgattgcctgttgatggtacagtggtgattggtgaaggtgagcgtgatgaagctcctatgctttatattggagaaaaagtaggtcttcaaaatggactggcgattgatattgcacttgatccacttgagggaacaacaatttgtgctaaaaatcttgctaattccttagctgttgttgcaattgcggaaaggggtaacttactttatgctcctgacgtttatatgagaaaaattgctattggtcccggttatccaaaggggttggttgatatcgatgcttgtcctgcggacaatgttcgcgctcttgcaaaggctaagggagtggctgttaatcagattactgtttgtattatggatcggcctcgccacgaaaaactgattgatgaagtacgggcaacaggagcatcaattcgcttaattggtgatggagatgttgctgccgttattgatacaactgattcagatgaaaccggcattgatatctatatgggcattggtggagcgccagaaggcgtattagctgccgcagctttacgctgcattggtgggcagatgcaaggacgtttacagcttgatacagaagaaaaaatcgcacgtgcagccgcgatgggaatcgataatcctcataaagtttatacaatggaagaaatggcgaaaggtgatgttttattttctgcaacaggtgtcactgatgggaatatgctttctggtgttaaatttactcctcgttacattcaaacggaaactcttgtgatgcgttcacatactggtacaatccgtaaaattaaaacacagcatagaaaccattcaaaatttgattaa

SEQ ID NO: 125638 - protein, 328 aa, Bartonella quintana str. Toulouse
MPSTQKILNGLDRSLTLELVRVTERAAVAAARWRGRGDEKAADQAAVDAMRQELNRLPVDGTVVIGEGERDEAPMLYIGEKVGLQNGLAIDIALDPLEGTTICAKNLANSLAVVAIAERGNLLYAPDVYMRKIAIGPGYPKGLVDIDACPADNVRALAKAKGVAVNQITVCIMDRPRHEKLIDEVRATGASIRLIGDGDVAAVIDTTDSDETGIDIYMGIGGAPEGVLAAAALRCIGGQMQGRLQLDTEEKIARAAAMGIDNPHKVYTMEEMAKGDVLFSATGVTDGNMLSGVKFTPRYIQTETLVMRSHTGTIRKIKTQHRNHSKFD

SEQ ID NO: 125639 - DNA, 987 bp, Bartonella henselae str. Houston-1
  CDS (1)..(987): transl_table=11
atgcccacaactcagaaaattttaaatggacttgatcgtattctaacgctcgagttagtacgtgtcactgaacgggctgctgttgcagctgcacgctggcgcgggcgtggtgatgaaaaggctgctgatcaagcagctgtagatgcaatgcgtaaggaacttaatcgattgcctgttgatggtacagtggtgattggagagggtgaacgtgatgaagctcctatgctttatattggagaaaaaataggtcttcaaaatggattggcgattgatattgcacttgacccacttgaaggaacaacaatttgtgctaaaaatcttcctaattctttagctgtggttgcaattgctgaaaagggtaacctcctttatgcccctgatgtttatatgaaaaaaattgctattggccctggttatccaaagggggttgttgatatagatgcttctcctaccgataatatttacgcccttgcaaaggctaagggagtggttgttaatcagattactgtttgtattatggatcgacctcgccacgaaaaactgattaatgaagtgcgatcaacgggggcatcaattcgcttaattggtgatggggatgttgctgccgttattgatacaactgatccagatgaaaccggcattgatatctatatgggtattggtggagcaccagagggtgtattagcttctgcagctttacgctgtattggtgggcagatgcaaggatgcttgctgcttgatacagacgaaaaaattgcacgcgcggcaaaaatggggatcgataatcctcataaagtttatacaatggaagaaatggcaaagggtgatgttttgttttctgcaacaggtgtaacagatggaaatatactctctggtgttaaattcacctctcgttatattcaaacagaaacccttgtgatgcgttcacacactggtacaattcgtaatatcaaagcacaacatagagaccattcaaaatttgattaa

SEQ ID NO: 125640 - protein, 328 aa, Bartonella henselae str. Houston-1
MPTTQKILNGLDRILTLELVRVTERAAVAAARWRGRGDEKAADQAAVDAMRKELNRLPVDGTVVIGEGERDEAPMLYIGEKIGLQNGLAIDIALDPLEGTTICAKNLPNSLAVVAIAEKGNLLYAPDVYMKKIAIGPGYPKGVVDIDASPTDNIYALAKAKGVVVNQITVCIMDRPRHEKLINEVRSTGASIRLIGDGDVAAVIDTTDPDETGIDIYMGIGGAPEGVLASAALRCIGGQMQGCLLLDTDEKIARAAKMGIDNPHKVYTMEEMAKGDVLFSATGVTDGNILSGVKFTSRYIQTETLVMRSHTGTIRNIKAQHRDHSKFD

SEQ ID NO: 125641 - DNA, 972 bp, Bacillus thuringiensis serovar konkukian str. 97-27
  CDS (1)..(972): transl_table=11
ttggaacgtgaactcgcactagaaattgtccgtgtaacagaagcagcagcattagcatccgcacagtggatgggccgcggaaagaaaaatgaagcagatgatgcagcaactacagcaatgcgtgatatgttcgattcagtaaacatggcaggtacagttgtaattggtgaaggagaacttgatgaagcaccgatgttatatattggtgaagaactaggaacaggtaacggtcccgaagtagacatcgccgttgacccattagaaggtacaaacatcgttgcaaaaggtcttgcaaacgcaatggcagttatcgcaatcgcagataaaggaaaccttcttcatgctcctgatatgtacatggaaaaaatcgcggttggtccaaaagcagctggtaaaattagcttagatgatccaattgaaaaaacaattgaaattgtagcggaagctaacaataaaaagattcgcgatctaacagttatcgttcaagaacgtgaacgtcatcaagatattatcgaccgtgttcgtgcaaaaggtgcacgcgtaaaattatttggtgacggtgatgttggtgcgtcaatcgcaacagcactacctggaactggtattgatttattcgtaggtattggcggagctccagaaggcgttatttctgcagcagcattaaaatgccttgaaggtgaaatgcaagctcgcttagttccaatgaacgaagaagaagaagctcgttgtcgtgaaatgggattagaagatcctcgtcaacttcttatgttagacgatttagtatctggtgatgatgcaatcttctcagcaactggtgtatctgctggtgagttattagacggcgtgaaattcctaggcggagatttagctgaaacatactctatcgtaatgcgttacaaaacaagaacggtacgattcattaaaacgcatcaccatttagatcataagccacacttaaacttagatatttaa

SEQ ID NO: 125642 - protein, 323 aa, Bacillus thuringiensis serovar konkukian str. 97-27
MERELALEIVRVTEAAALASAQWMGRGKKNEADDAATTAMRDMFDSVNMAGTVVIGEGELDEAPMLYIGEELGTGNGPEVDIAVDPLEGTNIVAKGLANAMAVIAIADKGNLLHAPDMYMEKIAVGPKAAGKISLDDPIEKTIEIVAEANNKKIRDLTVIVQERERHQDIIDRVRAKGARVKLFGDGDVGASIATALPGTGIDLFVGIGGAPEGVISAAALKCLEGEMQARLVPMNEEEEARCREMGLEDPRQLLMLDDLVSGDDAIFSATGVSAGELLDGVKFLGGDLAETYSIVMRYKTRTVRFIKTHHHLDHKPHLNLDI

SEQ ID NO: 125643 - DNA, 966 bp, Bacillus thuringiensis serovar konkukian str. 97-27
  CDS (1)..(966): transl_table=11
gtggaaagaagtttatctatggagttagtacgtgtaacagaggctgcagctttatcatcagcgcgttggatgggacgcgggaaaaaggatgaggcagatggtgcagcaacatcagctatgcgtgatgtatttgatacaattccgatgaaaggtacagttgtaattggtgaaggtgagatggatgaagcaccaatgctgtatatcggagaaaaattaggtacaggatatggtccgcgtgtagacgttgcagttgatcctttagaagggacaaacattgtagcagctggtggatggaatgctcttgctgttattgcaattgcagatcacggtaatttgttacatgctcctgacatgtacatggataaaatcgcggttggcccagaagcggttggggcggtcgatattgatgcgcctattatcgataacttacgtgcagttgcgaaagcgaaaaacaaagatattgaagatgttgtagcgacagttttaaaccgtccacgtcatcaagcgattattgaagagattcgtaaagctggtgctcgtattaaattgattaatgatggagacgtagcaggtgcaattaatactgcatttgatcgtacaggtgtagatattttattcggttctggtggtgcgcctgagggtgtattagcagcagttgcattaaaatgtttaggtggcgaaattcacggaaagctattaccacaaaacgaagctgaattggcgcgttgcaaaaagatgggcatagaagacatcaatcgcatccttcgcatggaggacttagtaaaaggtgacgatgcaatctttgcagcaacaggtgtaacagacggagaactattacgcggcgttcaatttaaaggtagcgtaggaacaacacaatctcttgttatgcgtgcaaaatcaggcacagtacgcttcgtagacggacgtcacagcttaaataaaaaaccgaacttggttattaaataa

SEQ ID NO: 125644 - protein, 321 aa, Bacillus thuringiensis serovar konkukian str. 97-27
MERSLSMELVRVTEAAALSSARWMGRGKKDEADGAATSAMRDVFDTIPMKGTVVIGEGEMDEAPMLYIGEKLGTGYGPRVDVAVDPLEGTNIVAAGGWNALAVIAIADHGNLLHAPDMYMDKIAVGPEAVGAVDIDAPIIDNLRAVAKAKNKDIEDVVATVLNRPRHQAIIEEIRKAGARIKLINDGDVAGAINTAFDRTGVDILFGSGGAPEGVLAAVALKCLGGEIHGKLLPQNEAELARCKKMGIEDINRILRMEDLVKGDDAIFAATGVTDGELLRGVQFKGSVGTTQSLVMRAKSGTVRFVDGRHSLNKKPNLVIK

SEQ ID NO: 125645 - DNA, 1011 bp, Erwinia carotovora subsp. atroseptica SCRI1043
  CDS (1)..(1011): transl_table=11
atgaaacgtgaattagccatagagttctcgcgcgtcaccgaagcagccgcgttagcaggctataagtggttaggccgtggcgataagaatgccgctgacaatgccgccgtacaggcgatgcggattatgctgaatcaagtcaatatcaacggtcagattgtcatcggagaaggggaaatcgacgaagcgcctatgctgttcattggtgaacaggttggcactggtcagggcgatgccgtggacatcgccgtcgatccgattgaaggcacgcggatgacagcaatgggtcaggcgaacgcgctagccgtgctggccgtcggcgaaaaaggtgcatttctgcacgcgccagacatgtacatggaaaagctgatcgtcgggcccggagcaaagggggcaattgacctcaatctgccgctggcagacaacctgcgtaatgtcgcgctgaagctgggtaaaccgctcagccagttaaccgtcactacgctggctaaaccacgccacgatgcctgcatcgcggaaatgcagcaactgggggtgaaagtgttcgcgattccagatggagacgtggctgcatcgatcctcacctgcatgccggacagcgaagttgacgtactgtacggtatcggcggtgcgccagaaggcgtgatctcggcagcggttatccgggcgctcgacggcgacatgcaaggacgtttgctggcacgtcatgaagtcaaaggcgatagcgctgaaaaccgcagcatcggtgaggacgagctggcacgctgccgacaaatgggcatcgaagccggtggggtcctcaagctcgatgacatggcgcgcaacgacaacgtgattttctccgcaacaggcatcaccaaaggcgacttgctggatgggatcgcacgtaaaggcaacatggctaccacagaaacgctgctgatccgcggtaagtctcgtacgatccgccgtattaaatcgacacactatctggatcgtaaggatcgtgcgttgcacgaattcctgctgtag

SEQ ID NO: 125646 - protein, 336 aa, Erwinia carotovora subsp. atroseptica SCRI1043
MKRELAIEFSRVTEAAALAGYKWLGRGDKNAADNAAVQAMRIMLNQVNINGQIVIGEGEIDEAPMLFIGEQVGTGQGDAVDIAVDPIEGTRMTAMGQANALAVLAVGEKGAFLHAPDMYMEKLIVGPGAKGAIDLNLPLADNLRNVALKLGKPLSQLTVTTLAKPRHDACIAEMQQLGVKVFAIPDGDVAASILTCMPDSEVDVLYGIGGAPEGVISAAVIRALDGDMQGRLLARHEVKGDSAENRSIGEDELARCRQMGIEAGGVLKLDDMARNDNVIFSATGITKGDLLDGIARKGNMATTETLLIRGKSRTIRRIKSTHYLDRKDRALHEFLL

SEQ ID NO: 125647 - DNA, 1002 bp, Leifsonia xyli subsp. xyli str. CTCB07
  CDS (1)..(1002): transl_table=11
atgaccagcaccgacaccgcatccctcttcctccacccggaccggaacctcgcgatggagctcgtgcgggcgaccgaggcggcggccatccgggcgaccccgtggatcgggcgtggcgacaaaaacgcggcggacggctcggcggtggacgcgatgcgcaagttcctcgggacggtcaacttcgacggtctcgtcgtcatcggcgagggcgagaaggacaacgcgcccatgctcttcaacggcgagcatgtcggcaacggtcgtggcccggcctgcgacatcgcggtcgacccgatcgacggcacctcgctgaccgcggccggccgccagaacgcgctgtcggtgatcgcggtgtccgaccgtgggacgatgctcgacgcgtccagcgtcttctacatgtccaaaatcgtcgccgggccggagggccgcggtgtggtcgacctgtcccagtccgtcggcgacaacatccgggagctcgcgaaggccaagggcaaaccggtgggcgagctccgcgtcgccgtcctcgatcggccgcgccacgagggcctgatcgaggagatccgcgcggccggagccggtacgcgcctcatgctcgacggtgatgtcgcgggcggcatcaacgcggcgcgtcacgactcgcgcatcgatctgtgcgtcggcatcggcggcagcccggaaggcatcaccaccgcctgcgcgatcaaggcgctcggcggtttcatgcagggcaagctcgcaccgaaagacgatgcggagcgcgccgccggcatcgcgtccggcctggatctggaccgtgtctacggagcggacgacctcgtcaagggcgacaacaccttcttcgtcgcgaccggtgtgacagacggcgggctggtcgaaggcgtgcgtcgcaagggcctgatcatccgcacggagtcgatcgtgctgcgctcgaagtccggcaccattcgccgtgtcctcgcggaccacccggccgagaagtggctggatgcctccgagctttga

SEQ ID NO: 125648 - protein, 333 aa, Leifsonia xyli subsp. xyli str. CTCB07
MTSTDTASLFLHPDRNLAMELVRATEAAAIRATPWIGRGDKNAADGSAVDAMRKFLGTVNFDGLVVIGEGEKDNAPMLFNGEHVGNGRGPACDIAVDPIDGTSLTAAGRQNALSVIAVSDRGTMLDASSVFYMSKIVAGPEGRGVVDLSQSVGDNIRELAKAKGKPVGELRVAVLDRPRHEGLIEEIRAAGAGTRLMLDGDVAGGINAARHDSRIDLCVGIGGSPEGITTACAIKALGGFMQGKLAPKDDAERAAGIASGLDLDRVYGADDLVKGDNTFFVATGVTDGGLVEGVRRKGLIIRTESIVLRSKSGTIRRVLADHPAEKWLDASEL

SEQ ID NO: 125649 - DNA, 1011 bp, Yersinia pseudotuberculosis IP 32953
  CDS (1)..(1011): transl_table=11
atgaaacgtgaattagccatcgagttttcccgagtgactgaagccgccgcattggcaggttataagtggctgggtcggggcgataaaaatgctgccgacggtgctgcggtgcaggcaatgcgcatcatgctcaatcaagtcaatattgatgggcggattgttattggtgaaggcgagatcgacgaagccccaatgctgtttattggcgagcatgtcggtacgggtcaaggtgatgcggtagatatcgcggttgacccaattgaagggacccggatgacggccatgggccaagccaatgcactggcagtactggcggtcggagaccaaggcacattcttacatgcccctgatatgtatatggaaaaactggtggttggcccggcagccaagggggctatcgacctgaatctgccgttggaacagaacctgtgcaatatcgccaccgcactcaataaaccgctggctgatttgaccgtgatcaccttggctaaaccgcgtcatgacggcatcatcgccgcaatgcagcaactgggtgtaaaagtgttcgccattccagacggtgacgttgctgcgtcaattttgacttgtatgccagaaagcgaagtggacgtgatgtactgcattggtggcgcacctgaaggggtgatttctgctgcagtgatccgtgcgctagatggcgatatgcaaggccgcttgttaccgcgccatcaagtgaagggcgacagtgaagataaccgccgcatcggcgaacaagagttattacgttgtaaatcaatgggtattgaagcaggcaacgtgctgcagctcggtgatatggcccgtaatgataatgttatcttctctgccactggcattactaaaggtgacctgctagaaggtatctatcgtaaagggaatatggcgaccactgaaacactgctgatccggggtaaatcacgcactatccgccgcatccgctcgacccatttcctggatcgcaaagacccggcattgcacgagttcttactgtaa

SEQ ID NO: 125650 - protein, 336 aa, Yersinia pseudotuberculosis IP 32953
MKRELAIEFSRVTEAAALAGYKWLGRGDKNAADGAAVQAMRIMLNQVNIDGRIVIGEGEIDEAPMLFIGEHVGTGQGDAVDIAVDPIEGTRMTAMGQANALAVLAVGDQGTFLHAPDMYMEKLVVGPAAKGAIDLNLPLEQNLCNIATALNKPLADLTVITLAKPRHDGIIAAMQQLGVKVFAIPDGDVAASILTCMPESEVDVMYCIGGAPEGVISAAVIRALDGDMQGRLLPRHQVKGDSEDNRRIGEQELLRCKSMGIEAGNVLQLGDMARNDNVIFSATGITKGDLLEGIYRKGNMATTETLLIRGKSRTIRRIRSTHFLDRKDPALHEFLL

SEQ ID NO: 125651 - DNA, 972 bp, Symbiobacterium thermophilum IAM 14863
  CDS (1)..(972): transl_table=11
gtggaacgggagttggcgttggagctcgtgcggattacggaggcggccgccctggccagcgcgcgctggatgggccgcggcgacaaggagctggctgaccagctggcggtggatgcgatgcgggccgggttcgaccgggtggccatcgacggcgtggtggtgatcggcgagggcgagatggacgaggcgccgatgctctacatcggggagcaggtgggcgccggcggcattcccgtcgacgtcgcggtcgatccggtcgaggggacgaacctggtggccaagggcttgaacggcgccatcgccgtggtggccgtggcgccccgggggcacctgctgcacgcgccggacatgtatatggagaagatcgcagtgggaccccgggccaaggggtgcatcgacatcaccgcgcccatcaccgctaacctgaagtgggttgcgcaggccaagggcaaggatatcagcgacctgacggtggtcatcctggaccgggagcggcaccgctcactcatccaggagtgccgggacgccggggcgcgcatcaagctgatctccgacggcgacgtcgcgcccgccgtcgcggcggccatcgacgagacgggcgtcgacatcctgatgggcatcggcggcgcgcccgagggcgtcctcgcggcggcggccctgaagtgcctgggcggcgacatgcaggcccggctgaagccgcagaacgagcaggagtacgcccgctgcaaggccatgggcctgagcgacccggagcaggtgctcacgctggacgacctggtgaagagcgaggacgtctacttctccgccaccgggatcaccgacggcgacctgctgcgcggcgtgcgctactccggccggaacgtggcgacgacccactccattgccctgcggggcaccaccggcaccgtccggttcatcgaggccacgcacatgctcgaccgcaagccgcactggtaccggctgaaggtgtag

SEQ ID NO: 125652 - protein, 323 aa, Symbiobacterium thermophilum IAM 14863
MERELALELVRITEAAALASARWMGRGDKELADQLAVDAMRAGFDRVAIDGVVVIGEGEMDEAPMLYIGEQVGAGGIPVDVAVDPVEGTNLVAKGLNGAIAVVAVAPRGHLLHAPDMYMEKIAVGPRAKGCIDITAPITANLKWVAQAKGKDISDLTVVILDRERHRSLIQECRDAGARIKLISDGDVAPAVAAAIDETGVDILMGIGGAPEGVLAAAALKCLGGDMQARLKPQNEQEYARCKAMGLSDPEQVLTLDDLVKSEDVYFSATGITDGDLLRGVRYSGRNVATTHSIALRGTTGTVRFIEATHMLDRKPHWYRLKV

SEQ ID NO: 125653 - DNA, 966 bp, Bacillus licheniformis ATCC 14580
  CDS (1)..(966): transl_table=11
atggaaagaagcttatcgatggaacttgttcgtgtgacagaagcggctgcgctaaagtcagcgcgctggatgggaagaggtaaaaaagacgaagccgacgacgctgcgacaagcgccatgagggatgtgtttgacaccattcctatgaagggaacggtggtaatcggagaaggggaaatggacgaagcgccgatgctttatattggagaaaagctcggcaacggctacggccctcgagtagacgtagcagtagaccctctcgaagggacgaacatcgtcgctagcggcggatggaacgctctcgcagtcattgcggtggctgatcacggaaacctgctgaatgcgcctgacatgtatatggataaaatcgctgtaggtcctgaagctgtaggctgcatcgatattgaagcgcctgtgattgataacttgaaagctgtggcaaaagcaaagaataaagatgtggaagatgttgtagccacgattttgaaccgtccgcggcatgagaaaatcatccatgagcttcgcgaagcaggcgccagaatcaagctgatcaatgacggggacgtggccggtgcgattaacaccgcttttgatcatacaggcgtcgatattttattcggctcaggaggcgctccggaaggcgtactctcggctgttgcactcaaagctctcggaggggaaattcacggaaagcttcttcctcaaagtgaggaagaactgagacgctgtgaaaagatggggcttgatacgggcaaagtgctccgcatggaagacctcgtcaaaggagacgatgcgattttcgccgcaactggcgtcacagacggagagctcctgaaaggcgtgcaattcaaaggatctgttggaacgacccacagcgtagtcatgagggcaaaatccggtacggtacggtttgtggacggaagacacagtctcaagaaaaaacctaacctagtcatccggccataa

SEQ ID NO: 125654 - protein, 321 aa, Bacillus licheniformis ATCC 14580
MERSLSMELVRVTEAAALKSARWMGRGKKDEADDAATSAMRDVFDTIPMKGTVVIGEGEMDEAPMLYIGEKLGNGYGPRVDVAVDPLEGTNIVASGGWNALAVIAVADHGNLLNAPDMYMDKIAVGPEAVGCIDIEAPVIDNLKAVAKAKNKDVEDVVATILNRPRHEKIIHELREAGARIKLINDGDVAGAINTAFDHTGVDILFGSGGAPEGVLSAVALKALGGEIHGKLLPQSEEELRRCEKMGLDTGKVLRMEDLVKGDDAIFAATGVTDGELLKGVQFKGSVGTTHSVVMRAKSGTVRFVDGRHSLKKKPNLVIRP

SEQ ID NO: 125655 - DNA, 1014 bp, Mannheimia succiniciproducens MBEL55E
  CDS (1)..(1014): transl_table=11
atgaacagatcattatccattgagttttcaagagtaactgaagcggcggcaatttccgctcacagttggattggtcgcggcgataaaaacgcggcggatgaagcagcggtaaaagccatgcgttatatgttgaatcgtattcatatggacggcgaaattgtgattggcgaaggcgaaattgacgacgcgccaatgctctatatcggtgaaaaagtaggttccggcatgggcgaacaagtatctatcgcggtagatcccattgacggcaccagaatgaccgccatggggcaatccggtgcattggcggtacttgccgccggcggaaaaaataccttcttaaaagcgccggatatgtatatggaaaaattagtggtttccgccgaagcaaaaggcatgattgatttaaatttacctatcgaacaaaatctgcgtcgggtagcatcaagaaaagggaaactgatgtcggaactggtcgtcatggtgctggcaaaaccccgtcataatgaaattattaaacaaattcaatcacttggagcaaaagtattagctattccggacggtgatgtcgctgcttccgtgcaagtgtgcctgccggatgcggaagcggacgtgctgtacggtatcggcggtgcgcccgaaggtgtgattaccgcagcggcggtacgggccttaggcggagatatgcaggcgcgcttattacctcgtaacgaagtgaaagacgatacgccggaaaatcaacaaatcgcacaagaagaaatgcgccgttgtcaggaaatgggcgtggcggtgaaccaggttttatcattaaacgaactggctcatgatgataatttggtgttcgtagcaacgggcattacaaacggcgatttattaaaaggcatccagattaaaggcaacttcgcaacaacggaaaccctgatgattcgcggacaatcccacactatccgccgcattcaatccatgcactatttagacggcaaagacccggatttatataaatccatcgctttataa

SEQ ID NO: 125656 - protein, 337 aa, Mannheimia succiniciproducens MBEL55E
MNRSLSIEFSRVTEAAAISAHSWIGRGDKNAADEAAVKAMRYMLNRIHMDGEIVIGEGEIDDAPMLYIGEKVGSGMGEQVSIAVDPIDGTRMTAMGQSGALAVLAAGGKNTFLKAPDMYMEKLVVSAEAKGMIDLNLPIEQNLRRVASRKGKLMSELVVMVLAKPRHNEIIKQIQSLGAKVLAIPDGDVAASVQVCLPDAEADVLYGIGGAPEGVITAAAVRALGGDMQARLLPRNEVKDDTPENQQIAQEEMRRCQEMGVAVNQVLSLNELAHDDNLVFVATGITNGDLLKGIQIKGNFATTETLMIRGQSHTIRRIQSMHYLDGKDPDLYKSIAL

SEQ ID NO: 125657 - DNA, 966 bp, Anaplasma marginale str. St. Maries
  CDS (1)..(966): transl_table=11
gtgttgggtgatggtctgtgtatggagtttctcaatgtaacggagcgcgcagcgattgaggcgcacagatttgcgggtagggggaacgaaaaagatgctgataaggcagcggttgattctatgcgttccacgctcaacaaaatgtgcatcagcgggacaatagtcattggggaaggtgagagagataacgctcctatgctgtattctggagaaaaagtcggcattgggggcccagctttagatatagcggttgatccattagagggtactaccacatgcgccctgtacaaagatggtgcaatgtctgttattgcggtggcgcaatccgggtgcttattaaaggcgccagatgtctacatggataaaatagctgtcggtccggggttgcctcatggggtagtatccctgagtggcgatctgaaaacgaatctacatagcctatcgcacgcgaaaggatgtgccgtgtctggtttaagagccgtagtgctaaacagggataggcacgccgctttaatagagggcctaagggagctggatgtccgcataaagctaatagacgacggtgacctatctgctacgctgtcactgattcgcgaggagaacgacatttacctcggcatagggggcgcacctgaaggtgtgctttctgcagtcctgcttgcagctgtgggcgggcagattgagggaaagttggttctcaatacagatgcgctgcgtgaaagagcgaaaagcgtgggtgtggaagacatggataggtcgtacgcgaccggtgacatggtgcgaggggaggcgtttttcatagctaccggggtgaccgatagcttgataatgagggggatttcgcgcagcgagggtggatgcgttactgcagattcagtaatcttctccacgttgggtgttatttcacgggtacagagaacattttacaaaccccccgccgggcctgttgtgcgcgctcagcgctag

SEQ ID NO: 125658 - protein, 321 aa, Anaplasma marginale str. St. Maries
MLGDGLCMEFLNVTERAAIEAHRFAGRGNEKDADKAAVDSMRSTLNKMCISGTIVIGEGERDNAPMLYSGEKVGIGGPALDIAVDPLEGTTTCALYKDGAMSVIAVAQSGCLLKAPDVYMDKIAVGPGLPHGVVSLSGDLKTNLHSLSHAKGCAVSGLRAVVLNRDRHAALIEGLRELDVRIKLIDDGDLSATLSLIREENDIYLGIGGAPEGVLSAVLLAAVGGQIEGKLVLNTDALRERAKSVGVEDMDRSYATGDMVRGEAFFIATGVTDSLIMRGISRSEGGCVTADSVIFSTLGVISRVQRTFYKPPAGPVVRAQR

SEQ ID NO: 125659 - DNA, 954 bp, Silicibacter pomeroyi DSS-3
  CDS (1)..(954): transl_table=11
atgcccgaatttcatgaccgtatgctttccctgggccttgcccgcgtggccgaacaggcagcgctggcctcggcctcgctgattggacgcggcgatgagaaggccgccgaccaggccgccgtgaacgccatgcgcgaacagctgaacctgctcgacatcgccggtgtggtggtgatcggcgaaggcgaacgcgacgaggcgccgatgctgtatatcggcgaggaagtgggcaccggcaacggcccgggcgtcgatatcgcgctggatccgctggaaggcaccacgctgaccgccaaggacatgcccaacgcgctgaccgtgatcgccatgggtccgcgcggctcgatgctgcatgcgcccgacgtctatatggacaagctggccatcggcccgggctatgccgagggcgtggtctcgctcgacatgtcgccgcgcgaacgggtcgaggcgctggcagcggccaagggctgcaaaccgtcggacatcaccgtctgcattctggagcgtccgcgccacgaggcgatgattgccgaggtgcgcgaaaccggcgcttcgatccggctgatcaccgatggtgacgtcgccggggtgatgcattgcgccgaagccgaaaccaccggcatcgacatgtacatgggttccggtggcgcgcccgagggcgtgctggcggcggccgcgctgaaatgtatgggcggtcaaatcttcggccggctcctgttccgtaacgatgacgagcgtggccgcgccgccaaggccggcatcaccgatctggaccgcgtctatacccgcgacgagatggtgacgcaggacgtgatctttgccgcgacgggcgtgaccggcggctcgctgttgccgcgcatcaagcgcgagcccggctgggtcgagaccaccaccctgctgatgcggtccaagaccggatcggtgcggcggatgagctatcgcaccccggtctga

SEQ ID NO: 125660 - protein, 317 aa, Silicibacter pomeroyi DSS-3
MPEFHDRMLSLGLARVAEQAALASASLIGRGDEKAADQAAVNAMREQLNLLDIAGVVVIGEGERDEAPMLYIGEEVGTGNGPGVDIALDPLEGTTLTAKDMPNALTVIAMGPRGSMLHAPDVYMDKLAIGPGYAEGVVSLDMSPRERVEALAAAKGCKPSDITVCILERPRHEAMIAEVRETGASIRLITDGDVAGVMHCAEAETTGIDMYMGSGGAPEGVLAAAALKCMGGQIFGRLLFRNDDERGRAAKAGITDLDRVYTRDEMVTQDVIFAATGVTGGSLLPRIKREPGWVETTTLLMRSKTGSVRRMSYRTPV

SEQ ID NO: 125661 - DNA, 957 bp, Bacillus clausii KSM-K16
  CDS (1)..(957): transl_table=11
atgagagactttttattttcaatggcccacgtaaccgaacaagcagccgtcgcctcctttccttggatcggcacaggcaataaaatcgaagcagaccgggcgagcaccgaagcgatgcgggcagcgctaaaccgcattccctttcgaggcagaatcgcgattggcgaaggagaaatggatgaagcgcccatgctgtacatcggcgaaattgttggtaacggaagcggaccactgtttgatctcgccgtcgatcccctcgacggaacaacgcccgccgccaaagggcaaggcgactgcattgccgtactagcgggagcaccacacggcacattgcttcacgcgccagacatgtatatggaaaagctggcgactggagccgaagccaaaggggccgtccatttagacgcgccgatagaagcaaacattcaagccgtagcccgcgccaaaaacaaggcagtgaaagacgtcacagtcattgtccaagaccggacacgtcatcaaaaactcgtccaacgagcaagggacacaggcgcaaaagtaaaattgttccacgaagtagacgtgacggccgcattagcaaccgcattgcccgaccacgacatcgatttattcgtcggaattggcggtgcaccagaaggcgtcgtagcagccgttgcgataaaatgcttaggcggcgatttccaaggacggctgcttccagacggccaccaacaacttgcccgctgccagcaaatgggcctcgacaaccccaatcaattactgaatcttcatgatttagtcgcctcacaacaatgtttttttatcgccacaggggtgaccgacggcctgctcgtcgacggcgtcaaaaagaacagccaaggcgaactcgccacccacacctttatggtcgacggagtgtcaaatgaaatccgcgttgtccaaacgatccatcgtcctgaacaagtattgatgaaataa

SEQ ID NO: 125662 - protein, 318 aa, Bacillus clausii KSM-K16
MRDFLFSMAHVTEQAAVASFPWIGTGNKIEADRASTEAMRAALNRIPFRGRIAIGEGEMDEAPMLYIGEIVGNGSGPLFDLAVDPLDGTTPAAKGQGDCIAVLAGAPHGTLLHAPDMYMEKLATGAEAKGAVHLDAPIEANIQAVARAKNKAVKDVTVIVQDRTRHQKLVQRARDTGAKVKLFHEVDVTAALATALPDHDIDLFVGIGGAPEGVVAAVAIKCLGGDFQGRLLPDGHQQLARCQQMGLDNPNQLLNLHDLVASQQCFFIATGVTDGLLVDGVKKNSQGELATHTFMVDGVSNEIRVVQTIHRPEQVLMK

SEQ ID NO: 125663 - DNA, 966 bp, Bacillus clausii KSM-K16
  CDS (1)..(966): transl_table=11
gtggaacgtagtttatcaatggagcttgtccgagtaactgaagcagcagcgctagcttctgggcgttggatgggccttggcaataaggaagaagcggaccgtgcggctacggaagcgatgcgcgatgtgtttgacacgatcccgatgaaagggacagtcgtaattggggaaggggaaatggacgaggcgccgatgctttatattggcgaaaagctcggcaatggctatggacctcgtgtggacgtggccgtcgatcctttagaagggacaaacattgtcgcatacgggcaatggaacgcactggctgttcttgcagttgctgaccacggccatttgcttcatgcgcctgacatgtatatggacaagcttgcagtaggaccagaggctgtggggaatgtcgatatcgatgctccagtcatcgataatttaaaggcggtagccaaagctaagaacaaagacgtagaagaccttgtcgtcgtcattttaaaccgcaagcgccacgaaaagctcattcatgaagtgcgcgaagcaggggcccgcattaaattgttgcctgacggagatgtggcagctgctgttaataccggttttgacgatacgggcgtcgatttgctaatgggttctggcggcgcccctgaaggtgtccttgcagcggcagggttgaaatgccttggcggtgattttcaaggaaggctcttgccccaatcggatgtagaacttgagcgctgcaaacaaatgggcattgaggatacaagcaagctgtttcgcatggaagacttggtgagcggcgatgattgcatatttgcggcaacgggtgtaacagacggtgaattgctgacaggtgtacgctacaaaggcacaaaagcgattacacagtcgttagtcatgcgagcaaaatcaggaactgtacgcttcgttgacggtactcatagcatgaaaaagaagccaaaactcgtcattcgctaa

SEQ ID NO: 125664 - protein, 321 aa, Bacillus clausii KSM-K16
MERSLSMELVRVTEAAALASGRWMGLGNKEEADRAATEAMRDVFDTIPMKGTVVIGEGEMDEAPMLYIGEKLGNGYGPRVDVAVDPLEGTNIVAYGQWNALAVLAVADHGHLLHAPDMYMDKLAVGPEAVGNVDIDAPVIDNLKAVAKAKNKDVEDLVVVILNRKRHEKLIHEVREAGARIKLLPDGDVAAAVNTGFDDTGVDLLMGSGGAPEGVLAAAGLKCLGGDFQGRLLPQSDVELERCKQMGIEDTSKLFRMEDLVSGDDCIFAATGVTDGELLTGVRYKGTKAITQSLVMRAKSGTVRFVDGTHSMKKKPKLVIR

SEQ ID NO: 125665 - DNA, 921 bp, Ehrlichia ruminantium str. Welgevonden
  CDS (1)..(921): transl_table=11
atgcaagatttatgttttaaattattatcagttactgaagctgctgctgtagcttcttataagtgcctaggtataggtgatgagaagaaagcagatgcagttgcagttgatgctatgcgtgagtcgttaaattttttaaatattagtggtactgttgtaattggggaaggagaaagagatcatgctcctatgttatatattggagaaaaggttggtcttggtggtattgaacttgatattgctcttgatccacttgagggaactactatatgtgctcattatcaagatggagctatgtctgttcttgcggtgacagaaaagggaggttttttacatgctcctgatgtttatatggaaaaaattgctgttggacctggtattcctaaaggggttatctcattaaggtatgatataaaaactaatctatataatttagcagaaataaaaggatgtaacatagctgatttagtagttacggtattaaaaagagaaagacatttagaattgattaaaaacattagagaatgtggggcacgtgtaaagcttatagatgatggggatatttcagctgtggtatcactaatgcatggaaatcacgatttgtatattggtattggtggtgcaccggaaggtgtgcttgccgcagctgcgttgttatcagtaggaggttatattgaaggtaggcttattattgatacagatcagttaagagcgagagctaaaaaatttggaatagatgatatagataaaatttattgtatagacgaaatggttagatctgatgcaatatttatcgctacaggtattacagatagtagtttagttaagggtattagatattctaagggtttgctttttatagagtctattattattaaatcagcacgtgtaatgcatattagtaatactgtatatacttag

SEQ ID NO: 125666 - protein, 306 aa, Ehrlichia ruminantium str. Welgevonden
MQDLCFKLLSVTEAAAVASYKCLGIGDEKKADAVAVDAMRESLNFLNISGTVVIGEGERDHAPMLYIGEKVGLGGIELDIALDPLEGTTICAHYQDGAMSVLAVTEKGGFLHAPDVYMEKIAVGPGIPKGVISLRYDIKTNLYNLAEIKGCNIADLVVTVLKRERHLELIKNIRECGARVKLIDDGDISAVVSLMHGNHDLYIGIGGAPEGVLAAAALLSVGGYIEGRLIIDTDQLRARAKKFGIDDIDKIYCIDEMVRSDAIFIATGITDSSLVKGIRYSKGLLFIESIIIKSARVMHISNTVYT

SEQ ID NO: 125667 - DNA, 1002 bp, Haemophilus influenzae 86-028NP
  CDS (1)..(1002): transl_table=11
atgaatcgagcattagccattgaattttcacgagtaacagaagcagccgctctagcagcttacacgtggcttggtcgaggagataaaaatgcggcagacgatgcagcggtaaaagcgatgcgttatatgctgaatttgattcatatggacgctgaaatcgttataggagagggcgaaattgatgaagccccaatgctttatattggcgaaaaagtcggttctggcttaggggaattagtttctatcgcagtagatcctattgatggtacacgtatgaccgcaatggggcaatctaatgctatttctgtcttggctgcaggtggcaaaaatacctttttaaaagcacctgatatgtatatggaaaaattagtggtgggttcaaatgtaaaaggcatcattgatttaaatttaccactggaacaaaatcttcgccgcatcgcatctaagctaggaaaatccctttctgaccttaccgtaatggtattagcaaaaccacgtcacgatgccgtaattaaacaaatacataacttgggcgcgaaagtattggcaattcctgatggcgatgtggcaggttccgtattgtgttgtttacctgatgctgaagtcgatcttctttatggaattggtggtgcgccagaaggcgtggcagctgctgcagccattcgagcattaggtggcgatatgcaagctcgtttaatcccacgcaatgaagtaaaaggcgacaccgaagaaaataaaaaaattgcagctaatgagattcaacgctgtgcagcactgggcataaaagtgaatgaagtgttaaaacttgaagatctcgtgcgtgatgacaatcttgtatttactgcaacaggcattaccaatggcgatttgcttaaaggtatctcccgcaaaggcaatttagccagtactgaaaccattttaattcgaggaaaatcccgcacaattcgtaaaattcaatctattcattatttggatgacctttataaaattttgaatatttag

SEQ ID NO: 125668 - protein, 333 aa, Haemophilus influenzae 86-028NP
MNRALAIEFSRVTEAAALAAYTWLGRGDKNAADDAAVKAMRYMLNLIHMDAEIVIGEGEIDEAPMLYIGEKVGSGLGELVSIAVDPIDGTRMTAMGQSNAISVLAAGGKNTFLKAPDMYMEKLVVGSNVKGIIDLNLPLEQNLRRIASKLGKSLSDLTVMVLAKPRHDAVIKQIHNLGAKVLAIPDGDVAGSVLCCLPDAEVDLLYGIGGAPEGVAAAAAIRALGGDMQARLIPRNEVKGDTEENKKIAANEIQRCAALGIKVNEVLKLEDLVRDDNLVFTATGITNGDLLKGISRKGNLASTETILIRGKSRTIRKIQSIHYLDDLYKILNI

SEQ ID NO: 125669 - DNA, 1026 bp, Thermobifida fusca YX
  CDS (1)..(1026): transl_table=11
atgaccactgcgaacgctccggtaccgatcccgcacgatgctcccgaccgcaacctggccctggaactggtacgggtcactgaggctgccgccctggccgctgcgcgctgggtggggcgcggcgacaagaacggcgcggacgacgcagccgtgcgcggcatgcgccacctgatcagcaccgtgtccatgaaaggcacggtggtgatcggggagggcgaaaaagacaacgcccccatgctgtacaacggcgagcaggtcggtgacggcaacggcgccgaatgcgatgtcgcggtggacccgatcgacggtacccggttgaccgcgatgggtatgcccaacgcgatctcggtgatcgcggtgagcccgcgcggttccatgttcgacccgtctgccgtgttctacatggagaagctggtcaccgggccggatgcggcgaacgtggtcgacatcaacgcgccggtggccgacaacattcgcgcggtcgctaaagccaagggcggcgacccgcgggacatcaccgtggtcatcctcgaccggccgcggcacgagcggctggtccacgaggtgcgggagaccggggcccgcatcaagttcatctccgacggtgacgtggccggggcgatcatggcggcacgcgccggtaccggtgtcgacctgctgctggggatcggcggcaccccggaggggatcatcgcggcgtgcgccatcaagtgcctgggcggggtgatccaggggaagctgtggccgcgcgacgacgaggagcggcgcaaggctgaggccgcaggacacgacctgtcccgggtgctgaccactgacgacctggtctcgtcagaggatgtgttcttcgcggccaccgggatcaccggcggggagctgctcagcggagtgaagtacgtggacggcggggcgttcactgattcgctggtcatgcgggggcgcagcggcacgatccgccggatcagcagcgagcaccggctgcgcaagctgtcgtcctaccgcggagtggacgtttctggtgcccgctga

SEQ ID NO: 125670 - protein, 341 aa, Thermobifida fusca YX
MTTANAPVPIPHDAPDRNLALELVRVTEAAALAAARWVGRGDKNGADDAAVRGMRHLISTVSMKGTVVIGEGEKDNAPMLYNGEQVGDGNGAECDVAVDPIDGTRLTAMGMPNAISVIAVSPRGSMFDPSAVFYMEKLVTGPDAANVVDINAPVADNIRAVAKAKGGDPRDITVVILDRPRHERLVHEVRETGARIKFISDGDVAGAIMAARAGTGVDLLLGIGGTPEGIIAACAIKCLGGVIQGKLWPRDDEERRKAEAAGHDLSRVLTTDDLVSSEDVFFAATGITGGELLSGVKYVDGGAFTDSLVMRGRSGTIRRISSEHRLRKLSSYRGVDVSGAR

SEQ ID NO: 125671 - DNA, 1005 bp, Prochlorococcus marinus str. NATL2A
  CDS (1)..(1005): transl_table=11
gtggatcgtactctcgtccaagaaattcttgaagtagttgagcaagctgcaattgcttcggctcaattgactggtttgggtcaaaaagatgaggctgatgccgccgccgtagaggcaatgcgaaagagaatgggaacgattcaaatgcaaggaagaatcgttattggagaaggagaaagagatgaagctccaatgctttatataggagaagaagttggatcaggaacaggtcctggagttgatttcgctgtagatccttgtgaggggacaaatttatgtgctaacagtcagcgtggatcgatggctgttttagcagcgtcagataggggaggattatttaacgctccagatttttatatgaataaattagctgctcctccagcagctaaaggcaaagttgatatcagaaaaactcccacagaaaatataaaaatcttgagtgactgtcttggtatcgcaattagtgatttaacgatagttgttatggatagagctagacacaaaaatctagtttccgaaattagatctactggtgccaggattcagcctatttcagatggagatgtccaagcggcaattgcatgtggatttgaagggactggtactcattgcttaatgggcattggagcggctcctgagggagttatttcagcagctgccatgagggcacttggaggacatttccagggacaacttgtttatgatcctgcaatagctcaaacatcagagtgggcagactatacaaaagagggaaatataaaaagattgaatgaaatgggcataactgatatcgacaagatctatgaagcgaatgaacttgcctcaggagaaaatgtagcttttgctggtagtggaattacagatggattgcttttcgatggagttaaatttgaaaaagattgcaccagaactagcagtcttgtgattagtacgcttgatcaaacagctagatttaccaatacagttcacatcaaagatggtgctcaaagcatctctttgaagtga

SEQ ID NO: 125672 - protein, 334 aa, Prochlorococcus marinus str. NATL2A
MDRTLVQEILEVVEQAAIASAQLTGLGQKDEADAAAVEAMRKRMGTIQMQGRIVIGEGERDEAPMLYIGEEVGSGTGPGVDFAVDPCEGTNLCANSQRGSMAVLAASDRGGLFNAPDFYMNKLAAPPAAKGKVDIRKTPTENIKILSDCLGIAISDLTIVVMDRARHKNLVSEIRSTGARIQPISDGDVQAAIACGFEGTGTHCLMGIGAAPEGVISAAAMRALGGHFQGQLVYDPAIAQTSEWADYTKEGNIKRLNEMGITDIDKIYEANELASGENVAFAGSGITDGLLFDGVKFEKDCTRTSSLVISTLDQTARFTNTVHIKDGAQSISLK

SEQ ID NO: 125673 - DNA, 930 bp, Ehrlichia canis str. Jake
  CDS (1)..(930): transl_table=11
atgcaaaatttgtgttttaagttgttatcagtgactgaagctgcagctttagcatcttataaatgtcttggtatgggtgatgaaaagggtgcagatcgtgttgctgttgatgctatgcgaaagtcattgaatttgttagaaattagtgggactgttgttataggagaaggggaaagagacaatgctcctatgctatatattggggaaaaagtaggtactggtggaattgatgttgatattgctcttgatccacttgaaggtactacaatgtgtgctcattataaaaatggagcaatgtctgtgcttgcagtaacagagaaaggaggttttttaaatgctcctgatgtgtatatggaaaaaattgctgttggccctaatatacctaggggtgtaatatctttaaaatatgatgtaaaaacaaatttatataatttagcagcagtaaagaagtgtaaagtggatgagttggttgtaacagtgttatatagagaaagacacttggaattaataaaaaacattagagaatgtggagtacgtataaaacttatagatgatggagatgtatcagctgtagtatcactcatgaaagggatgcatgatttatatgttggtataggaggagctccagagggtgtacttgcagctgcagctttgttatctatgggtggttatatggaaggtaaattagtccttgatacagagtctttaaaaacgagagcagaaaaatttgggattaaagatccggataaaatttattctatagaagaaatggtaaaatcagatgcaatttttttagcaactggtattactgatagtagtttagttcaaggtattaagtattcacaagggtcttttatgattgagtctgtaatcattaagccagctagtattatgtatattaataatactattcctgaaagcgttggataa

SEQ ID NO: 125674 - protein, 309 aa, Ehrlichia canis str. Jake
MQNLCFKLLSVTEAAALASYKCLGMGDEKGADRVAVDAMRKSLNLLEISGTVVIGEGERDNAPMLYIGEKVGTGGIDVDIALDPLEGTTMCAHYKNGAMSVLAVTEKGGFLNAPDVYMEKIAVGPNIPRGVISLKYDVKTNLYNLAAVKKCKVDELVVTVLYRERHLELIKNIRECGVRIKLIDDGDVSAVVSLMKGMHDLYVGIGGAPEGVLAAAALLSMGGYMEGKLVLDTESLKTRAEKFGIKDPDKIYSIEEMVKSDAIFLATGITDSSLVQGIKYSQGSFMIESVIIKPASIMYINNTIPESVG

SEQ ID NO: 125675 - DNA, 1098 bp, Methanosarcina barkeri str. Fusaro
  CDS (1)..(1098): transl_table=11
ttgattcttatatctcatccaaaaaccgtagaggaaatgattgattgttcagggcctatagaatgtgacttattgcccagacttattcatgtgaccgaagctgcagccattgccgcagcgtaccagatggggcgtggaaacaaaagttttgccgaccaggtagcagttgccgctatgcgaaggatgctgaataaacttgacatgaaaggcataatccagataggggaaggagaaagggatgaggctcccatgctttatatcggggagcacgtaggaacaggaaaaggagaccttgaagttgatattgcagtcgacccgcttgaggggacaaaccttaccgcagatggcgggcctggctcggttgcagttatggcaatggctgaaaggggtggaattttccacggccctgatatctatatggacaagattgttgtagggccagatgtagtgcgctacgaagaggaacaccctgatgaaaggattgacctggatgctcctgtcaagcgcaatcttgagatagtcgcaaaggctctcgacagaagtgttgacgagcttgtagtcgttgtgcttgaccggccaaggcatgcccagaaaataactgagattcgggaagcaggcgcccgcgtaaagctaatcagtgacggagaccttatgcccggagtttcaactgcaatccgtggttcgggcgttcatatggtaatgggatcaggcggttcgggtgaagcagtactcacagcggctgcaatcaaaatactaggcggaaaagtccttgcaaggcttttgcttcccacagttgcaaacggaaagagccaggataaggtcgacaaagaaattgaagaaaaaatgccaaggctcgaaaaaatgggaatcactcttcaaaacatcaatgatgtccttgacaccgacaggcttgtgccagggaacgacgtgatcttttcagcatcagctgtaactcccggccattttcttcgagaagtcaacctgttcggcagcggggatgccagggtacacacaatctcaatgggcgcatccgggtctgtcagatttacggacagtatttatataaaggataagcgtgagactcctctctacttgtaa

SEQ ID NO: 125676 - protein, 365 aa, Methanosarcina barkeri str. Fusaro
MILISHPKTVEEMIDCSGPIECDLLPRLIHVTEAAAIAAAYQMGRGNKSFADQVAVAAMRRMLNKLDMKGIIQIGEGERDEAPMLYIGEHVGTGKGDLEVDIAVDPLEGTNLTADGGPGSVAVMAMAERGGIFHGPDIYMDKIVVGPDVVRYEEEHPDERIDLDAPVKRNLEIVAKALDRSVDELVVVVLDRPRHAQKITEIREAGARVKLISDGDLMPGVSTAIRGSGVHMVMGSGGSGEAVLTAAAIKILGGKVLARLLLPTVANGKSQDKVDKEIEEKMPRLEKMGITLQNINDVLDTDRLVPGNDVIFSASAVTPGHFLREVNLFGSGDARVHTISMGASGSVRFTDSIYIKDKRETPLYL

SEQ ID NO: 125677 - DNA, 1038 bp, Anabaena variabilis ATCC 29413
  CDS (1)..(1038): transl_table=11
gtggaaaatacacttggattagagattattgaggtagttgagcaagccgcgatcgcatccgcaaagtggatgggtaaaggcgaaaagaatactgctgaccaagtagcagtagaagcaatgcgggagcgcatgaacaaaatttatatgcgcggtcgcatcgtaattggggaaggggaacgggacgacgcgcccatgttgtatatcggcgaagaagttggtatctgtacccaaccaaatgctgaccaattatgtaaccccgatgaattagtagaaattgacatcgctgttgacccctgcgaaggtacaaacctcgtagcttatggtcaacccggctcaatggcggttctggctatttctgagaaaggtggattattcgctgcgcctgacttctacatgaagaaattagcagcgcctccagcagctaaaggcaaagtagacattaacaagtcagctacggaaaacctcaagattctttctgagtgtctagaccgtgctattgacgaacttgtagtagtcgtcatgaaacgcgatcgccaccagggtttaatcaaagaaatccgcgacgcaggtgcaagagtacagctgatttctgacggtgacgtaggcgcagcaatatcttgtggatttgctggtactaacatccatgcactcatgggtatcggtgctgcacctgaaggtgtcatttccgcagctgctatgcgtgctttgggcggacacttccaaggtcaattgatctacgatccagaagtagtaaaaacaggcttgattggggaaagcaaggaagccaaccttgagcgtttaagctctatgggtatcaatgaccctgataaggtttacgacgctcatgaactcgcatccggagaaacagttctcttcgcagcttgcggtatcacctctggtaatctcatgcaaggtgtacgcttcttccacggcggtgctagaactcaaagtttggttatttccagccagtcacaaactgctcgttttgtggacacaattcacatggctggacagcccaagactgtgcaactgcactag

SEQ ID NO: 125678 - protein, 345 aa, Anabaena variabilis ATCC 29413
MENTLGLEIIEVVEQAAIASAKWMGKGEKNTADQVAVEAMRERMNKIYMRGRIVIGEGERDDAPMLYIGEEVGICTQPNADQLCNPDELVEIDIAVDPCEGTNLVAYGQPGSMAVLAISEKGGLFAAPDFYMKKLAAPPAAKGKVDINKSATENLKILSECLDRAIDELVVVVMKRDRHQGLIKEIRDAGARVQLISDGDVGAAISCGFAGTNIHALMGIGAAPEGVISAAAMRALGGHFQGQLIYDPEVVKTGLIGESKEANLERLSSMGINDPDKVYDAHELASGETVLFAACGITSGNLMQGVRFFHGGARTQSLVISSQSQTARFVDTIHMAGQPKTVQLH

SEQ ID NO: 125679 - DNA, 966 bp, Rhodobacter sphaeroides 2.4.1
  CDS (1)..(966): transl_table=11
atggcagacgccgcacaatttcatgaccgaatgctttcgctgggcctcgcccgtgtgtccgaggccgctgccctcgcctcggctcgcctgatcgggcgcggcgacgagaaggccgccgaccaggctgcggtcaacgcgatgcgcgaccagctcaacctgctcgacatcgccggcgtcgtcgtcatcggcgagggcgaacgcgacgaggcgccgatgctcttcatcggcgaggaagtcggcaccggccatggcccggccgtggatattgccctcgacccgctggaaggcacgacgctgaccgccaaggacatgccgaacgcgctgaccgtgatcgccatggcgccgcgcggcacgctgctgcacgcccccgacgtctacatggaaaagctcgccatcggcccgggctatgcgcccgacacggtgacgctgaagatgacccccgccgagcgggtccatgcgctggccaaggccaaggacggcacccccgaggatgtcacggtctgcattctcgagcgtccgcgccacgaggagctgatcgccgaggtccgctcgaccggggccgcgatccggctcatcaccgacggcgacgtggccggcgtgatccactgcgccgaggcgcatctgaccggcatcgacatgtacatgggctcgggcggcgctcccgagggcgtgctcgccgccgccgcgctgaaatgcatgggcggccagatgtatggccagctcctgttccgcaacgacgacgagcgctcgcgcgcccgccgcgccggcatccaggatctcgaccggatctacacccgcgacgagctggtgacggccgacgtgatcttcgccgcgaccggcgtgaccaacggctcgatcctcgccggcatcaagcgcgagccgggctgggtgaccaccgaaacgatcctgatgcggtcgaagaccggctcggtccggcggatgagctaccgcagcccggtgaaatga

SEQ ID NO: 125680 - protein, 321 aa, Rhodobacter sphaeroides 2.4.1
MADAAQFHDRMLSLGLARVSEAAALASARLIGRGDEKAADQAAVNAMRDQLNLLDIAGVVVIGEGERDEAPMLFIGEEVGTGHGPAVDIALDPLEGTTLTAKDMPNALTVIAMAPRGTLLHAPDVYMEKLAIGPGYAPDTVTLKMTPAERVHALAKAKDGTPEDVTVCILERPRHEELIAEVRSTGAAIRLITDGDVAGVIHCAEAHLTGIDMYMGSGGAPEGVLAAAALKCMGGQMYGQLLFRNDDERSRARRAGIQDLDRIYTRDELVTADVIFAATGVTNGSILAGIKREPGWVTTETILMRSKTGSVRRMSYRSPVK

SEQ ID NO: 125681 - DNA, 984 bp, Carboxydothermus hydrogenoformans Z-2901
  CDS (1)..(984): transl_table=11
atggagatggagagaaagctatccttggaatttgcccgggtaacggaagcggcggcggtagcttctgcccgctggatgggccggggggataagcataaggctgaccaggccgctactgaagcaatgcgggcggtttttgataccatagatattcgcggtgaagtggttatcggcgaaggggaaatggatgaagcgccgatgctttacatcggggaaaaattaggtaccggttatggcccggctttagatattgccgttgatcctctggaagggaccaatcttgtcgccaaaggtttaaatggcgccattgcggtggtggctgctgctcccaaggggtgtcttttaaacgctcccgatatgtacatggaaaaaattgccgttggtccggcagcagcgggtaaaatccaccttgatgctcccgttaaagataacctgaggatagttgccgaaagtctgaaaaaatcggtagccgatttaacggtggtgattttggatcgcccccgccacgaaaaaataattaaagaagtgcgggaggcgggagccagaataatgctgatctccgatggagatgtttcaccggctatagcctgtgcttttgaggattccggggtggatatgatgattggtattggtggagccccggagggagttttagctgccgctgctttaaaatgtctgggcggagagctgatggggaggcttgtgccggaagatgatgagcagatggaacggtgccggaaaatgggtcttgctgatccccggcaaattttaacgttagatgatttggtaaagagcgatgatgtcatttttgcggctaccggaatcaccaacagtaaccttttaaaaggcgtgcggtttacggccaatggagcggccactcatacgttagttgttcgggggaaaaccggtaccgttaggtttattgaagccttgcaccgtttcgataagaagccaatatataatttaataggtttgaatgtttaa

SEQ ID NO: 125682 - protein, 327 aa, Carboxydothermus hydrogenoformans Z-2901
MEMERKLSLEFARVTEAAAVASARWMGRGDKHKADQAATEAMRAVFDTIDIRGEVVIGEGEMDEAPMLYIGEKLGTGYGPALDIAVDPLEGTNLVAKGLNGAIAVVAAAPKGCLLNAPDMYMEKIAVGPAAAGKIHLDAPVKDNLRIVAESLKKSVADLTVVILDRPRHEKIIKEVREAGARIMLISDGDVSPAIACAFEDSGVDMMIGIGGAPEGVLAAAALKCLGGELMGRLVPEDDEQMERCRKMGLADPRQILTLDDLVKSDDVIFAATGITNSNLLKGVRFTANGAATHTLVVRGKTGTVRFIEALHRFDKKPIYNLIGLNV

SEQ ID NO: 125683 - DNA, 1005 bp, Synechococcus sp. CC9605
  CDS (1)..(1005): transl_table=11
gtggatcagaccctcattcaggaaattctcgagatcgtcgagcaggccgccatcgcttccgcctcgctctccggcaaaggcctgaaggatgaagccgacgcattggccgttgatgccatgcgcaagcgcatgaatcagatccagatgcaaggccgcatcgtgatcggcgagggggaacgtgatgaagccccgatgctctacatcggagaagaggtcggcaccggcactggccctggtgttgattttgctgtcgacccctgcgaaggcaccaacctctgcgccttcaaccagcgcggctccatggctgttctcgccgcttccgatcggggcggtctgttcaatgcccccgacttctacatgaagaagttggctgctcctccagcagccaaggggaaggtggacatccgcaaatcagccactgaaaacatcaagatccttagcgagtgcctgggtctccccgtcgacgagctgaacatcgttgtgatggatcgcgcccgtcacaaggacctgatcgctgagatacgtggcaccggcgctcgcatccagcccatctctgatggagacgttcaggccgccatcgcctgcggtttcgctggcaccggaacccactgcctgatgggcatcggcgctgcccctgagggtgtgatttcagccgctgccatgcgcgctcttggtggccacttccagggccaactggtgtacgaccccgcgattgctcagacctccgaatgggctgacatgaccaaagagggcaaccttgcgcgtctcgctgagatgggcattgctgaccccgacaaggtctacgaagccgaggagctggcctgcggcgagcatgtttgtttcgctggcagcggcatcacggatggtctgctcttcaatggcgttaagttcgaaaaggactgcacccgcacaagcagcctggtgatcagcaatctggataacacctgccgcttcaccaacaccgtgcacatcaaagaagacgcccagagcattgctctgagctga

SEQ ID NO: 125684 - protein, 334 aa, Synechococcus sp. CC9605
MDQTLIQEILEIVEQAAIASASLSGKGLKDEADALAVDAMRKRMNQIQMQGRIVIGEGERDEAPMLYIGEEVGTGTGPGVDFAVDPCEGTNLCAFNQRGSMAVLAASDRGGLFNAPDFYMKKLAAPPAAKGKVDIRKSATENIKILSECLGLPVDELNIVVMDRARHKDLIAEIRGTGARIQPISDGDVQAAIACGFAGTGTHCLMGIGAAPEGVISAAAMRALGGHFQGQLVYDPAIAQTSEWADMTKEGNLARLAEMGIADPDKVYEAEELACGEHVCFAGSGITDGLLFNGVKFEKDCTRTSSLVISNLDNTCRFTNTVHIKEDAQSIALS

SEQ ID NO: 125685 - DNA, 984 bp, Desulfovibrio desulfuricans G20
  CDS (1)..(984): transl_table=11
atggaagcccctcaaaaaaaccttgctcttgacctcgtacgcgtaacggaagccgctgcgcttgcttctgcgcgctggctcggcaaaggaaatcaggatgcaggtgatcaggctgctgtggacgccatgcggctctgcttcaactcgctgaatatttccggcgtggttgtcatcggcgaaggtgaaaaggataatgctccgatgctgttcaacggagaaaaagtcggtgccggcaacggtcctgctctggacgtggcggttgatccggttgaggggaccaagctgctggcatatggccgtcctaatgcaatttccgtcatcggggtggctcctgcaggcaccatgtataatccgggtcccagcttttacatgcagaagctggtggtgcccggtgccgcgaaaaatgttgttgatcttgatgcgcctgtggctgaaaacctgcacaagattgccaaggcccttgataaggacgttgatgaccttgtggtctttgtgctggacaaaccccgccatgccagcctgattgagcaggtgcgcgcagccggggcacgtatacagctgcataccgacggcgacgtgtcgggtgccctcatggctgtggacccccgttctgaagttgacgtcatgatgggtaccggcggcactcccgaaggagttcttgcagcctgtgccatcaaaggtatcggcggtgaaatgtttgcccgccttgatcctcagtcatatgtggaaaaagaggctatccttgaagccggcattgacctgcgtgaaatccacactgtggatactcttgtgcgcagtgacgaagtctttttctccgccaccggtatatccggcggtaccttccttaaaggggtgcagtacacaggtaccggtgccgtgacccattccatggtcatacgcggacgtacaggtaccctgcgctacatcgagtccatcaataactgggacaagctgatgaaaatcagctcggtgaaatacgattaa

SEQ ID NO: 125686 - protein, 327 aa, Desulfovibrio desulfuricans G20
MEAPQKNLALDLVRVTEAAALASARWLGKGNQDAGDQAAVDAMRLCFNSLNISGVVVIGEGEKDNAPMLFNGEKVGAGNGPALDVAVDPVEGTKLLAYGRPNAISVIGVAPAGTMYNPGPSFYMQKLVVPGAAKNVVDLDAPVAENLHKIAKALDKDVDDLVVFVLDKPRHASLIEQVRAAGARIQLHTDGDVSGALMAVDPRSEVDVMMGTGGTPEGVLAACAIKGIGGEMFARLDPQSYVEKEAILEAGIDLREIHTVDTLVRSDEVFFSATGISGGTFLKGVQYTGTGAVTHSMVIRGRTGTLRYIESINNWDKLMKISSVKYD

SEQ ID NO: 125687 - DNA, 1062 bp, Prochlorococcus marinus str. MIT 9312
  CDS (1)..(1062): transl_table=11
atgacattttttgtgagatcatactctaaaccttttagaaaaaccctcaaaaatttaattgtgaatcaaactttaattcaagaaattctcgaagtagtcgagcaagcagcaattgcctcagcaaaactaacaggacttggtcaaaaagatgaagcggatgctgcagctgtagaagcaatgagattgcgaatgggcaaaattgagatgaaagggaaaattgttattggagaaggtgaaagagatgaagcacctatgctttatataggtgaagaggtaggaagtggaagtggtccaggagttgactttgcagtagatccttgtgaaggaacaaatctttgtgcgaataatcaaagaggttctatggcggttttggcagcctctgataccggcggtctttttaatgctcctgatttttacatgaacaaattagcagctcctccagctgcgaaagggaaagtagatattagaaattcggctactgaaaacttgaagattcttagtgattgcttggatctttctattgatgaacttactgttgttgtaatggatagaactaggcataaagatttaattaaagagattcgaggatgtggtgctaaagtacaaccgatttctgatggtgatgttcaagctgctattgcatgtggcttcgcaggtactggaactcattgcttaatgggtataggtgcagctccagaaggtgttatttcggctgccgcaatgagagctctaggaggacactttcaaggacaactagtttatgatccagcaatcgctcaaacttctgaatgggctgactatacaaaagagggaaatataaaacgactaaatgaaatgggtataacggatatagataaaatctatgaagctaatgaattggcatcgggagaaaatgttgtgttcgctggaagtggtataactgatggattattatttgacggagttaaattcgaaagggattgtgtgagaacaagcagtctagtaattagcacattagatagtactgcaagattcacaaatactgtccatataaaagatggtgcaaagagtatcagcctttaa

SEQ ID NO: 125688 - protein, 353 aa, Prochlorococcus marinus str. MIT 9312
MTFFVRSYSKPFRKTLKNLIVNQTLIQEILEVVEQAAIASAKLTGLGQKDEADAAAVEAMRLRMGKIEMKGKIVIGEGERDEAPMLYIGEEVGSGSGPGVDFAVDPCEGTNLCANNQRGSMAVLAASDTGGLFNAPDFYMNKLAAPPAAKGKVDIRNSATENLKILSDCLDLSIDELTVVVMDRTRHKDLIKEIRGCGAKVQPISDGDVQAAIACGFAGTGTHCLMGIGAAPEGVISAAAMRALGGHFQGQLVYDPAIAQTSEWADYTKEGNIKRLNEMGITDIDKIYEANELASGENVVFAGSGITDGLLFDGVKFERDCVRTSSLVISTLDSTARFTNTVHIKDGAKSISL

SEQ ID NO: 125689 - DNA, 1038 bp, Synechococcus elongatus PCC 7942
  CDS (1)..(1038): transl_table=11
gtggagaagacgatcggtctcgagattattgaagttgtcgagcaggcagcgatcgcctcggcccgcctgatgggcaaaggcgaaaagaatgaagccgatcgcgtcgcagtagaagcgatgcgggtgcggatgaaccaagtggaaatgctgggccgcatcgtcatcggtgaaggcgagcgcgacgaagcaccgatgctctatatcggtgaagaagtgggcatctaccgcgatgcagacaagcgggctggcgtaccggctggcaagctggtggaaatcgacatcgccgttgacccctgcgaaggcaccaacctctgcgcctacggtcagcccggctcgatggcagttttggccatctccgagaaaggcggcctgtttgcagctcccgacttctacatgaagaaactggctgcacccccagctgccaaaggcaaagtagacatcaataagtccgcgaccgaaaacctgaaaattctctcggaatgtctcgatcgcgccatcgatgaattggtggtcgtggtcatggatcgtccccgccacaaagagctaatccaagagatccgccaagcgggtgcccgcgtccgtctgatcagcgatggtgacgtttcggccgcgatctcctgcggttttgctggcaccaacacccacgccctgatgggcatcggtgcagctcccgagggtgtgatttcggcagcagcaatgcgttgcctcggcggtcacttccaaggccagctgatctacgacccagaagtggtcaaaaccggcctgatcggtgaaagccgtgagagcaacatcgctcgcctgcaagaaatgggcatcaccgatcccgatcgcgtctacgacgccaacgaactggcttcgggtcaagaagtgctgtttgcggcttgcggtatcaccccgggcttgctgatggaaggcgtgcgcttcttcaaaggcggcgctcgcacccagagcttggtgatctccagccagtcacggacggctcgcttcgttgacaccgttcacatgttcgacgatgtcaaaacggttagcctccgttaa

SEQ ID NO: 125690 - protein, 345 aa, Synechococcus elongatus PCC 7942
MEKTIGLEIIEVVEQAAIASARLMGKGEKNEADRVAVEAMRVRMNQVEMLGRIVIGEGERDEAPMLYIGEEVGIYRDADKRAGVPAGKLVEIDIAVDPCEGTNLCAYGQPGSMAVLAISEKGGLFAAPDFYMKKLAAPPAAKGKVDINKSATENLKILSECLDRAIDELVVVVMDRPRHKELIQEIRQAGARVRLISDGDVSAAISCGFAGTNTHALMGIGAAPEGVISAAAMRCLGGHFQGQLIYDPEVVKTGLIGESRESNIARLQEMGITDPDRVYDANELASGQEVLFAACGITPGLLMEGVRFFKGGARTQSLVISSQSRTARFVDTVHMFDDVKTVSLR

SEQ ID NO: 125691 - DNA, 1008 bp, Rhodospirillum rubrum ATCC 11170
  CDS (1)..(1008): transl_table=11
ttgtccagtgtcgcgtcattttccgccgatcccgttttgtccgccgcccttgatcgcaatctggcccttgatgtggcgcgagtgaccgaggcggctgccatcgccgccgcccgttacatggggcggggcgacgagcgggcggcggatctggcggcgacggcggcgatgcgcgaggcgctgaccaccgtgccgatggccgggacgatcacgctgggcgccctggccgatcccgacgacggtttgttccgcctgggcgaaggcgtgggcaacggcaccgggctgttgatcgatgtcggcgttaccccattggagggggcgacgatctgcgccatgggggcgcccaacgccacggcctgcatggctttggcccgcaagggcgaattgctggcggtgccgccggtctatatggaaaagatcgccgttggtccgggggtgcccgagggctgcctcagcctggatgccgatccggccgagaacattcgcgccctggccaaggtgcgcggcgtcccggccgaggcgctgctgatctgcgtgcttgaccgcccgcgtaacgaggccctggtcgaccgggtgcgctcgaccggggcgcggatcaccctgatctccgatggcgacgtctcgggcgcggtggccgtcggcctgcccgaaaccggggttgatatgtatatgggatcgggcggggcggccgagggcgtgttggccgccgccggtttgcggtgtttgggcggggttcttcagggccggttgatggtgcgcggcgactccgagaaggccgccgtgcgggcggccggcatcaccgatcccgaccgcatcctgaccatggccgatatggtgccgggcgagacgatgttcgccgccaccggggtgaccgacggcgccttgctgcgcggcgtgcggctccacgccggcagtgcccgttcctcgaccctggtgatgcgatcgcgcaccggaacgctgcgttttatcgacacccgccacgatttgtcgaagctgagcgccgatcggtaa

SEQ ID NO: 125692 - protein, 335 aa, Rhodospirillum rubrum ATCC 11170
MSSVASFSADPVLSAALDRNLALDVARVTEAAAIAAARYMGRGDERAADLAATAAMREALTTVPMAGTITLGALADPDDGLFRLGEGVGNGTGLLIDVGVTPLEGATICAMGAPNATACMALARKGELLAVPPVYMEKIAVGPGVPEGCLSLDADPAENIRALAKVRGVPAEALLICVLDRPRNEALVDRVRSTGARITLISDGDVSGAVAVGLPETGVDMYMGSGGAAEGVLAAAGLRCLGGVLQGRLMVRGDSEKAAVRAAGITDPDRILTMADMVPGETMFAATGVTDGALLRGVRLHAGSARSSTLVMRSRTGTLRFIDTRHDLSKLSADR

SEQ ID NO: 125693 - DNA, 1056 bp, Frankia sp. CcI3
  CDS (1)..(1056): transl_table=11
gtgtcttccactgctgaatcctccgcctccaggccttccgacgcctcgtccgtgcccgacacgctggccgtgcaagggcaggctccggatcgcaacctcgcgctcgaactcgtccgggtaaccgaggcagccgcgctcgccgcggcgcgctgggtcggccgtggcgacaagaacggcgcggacggggccgccgtcgacgcgatgcgtcgactggtcggcaccgtctcgatgcgcggggtcgtcgtgatcggcgagggggagaaggacgaggcccccatgctgttcaacggcgaggtggtcggttcgggcgagggccccgaatgcgacgtcgccgtggatcccgtggacggtacgacgctgacctccaaggggatgaataacgccatctcggtcatggcggtcagcgagcgtggctcgatgtacgacgcgagcgcgtgtttctacatggagaagctggtcaccggcccggaggcggccggggtggtggatatcgcggcctcggtggaggacaacatccgcgccgtggcgaaggccaaggagatcctcccgcgggacgtcaccgtggtggtcttggaccggccccggcacagccaactggtcgagcagatcagggcggccggcgcccgggttaagctgatctccgacggcgacgtcgccggagcggtgatggctgcctcggcggacaccggcgtggacctgctgctggggatcggcggcactcccgaggggatcatcacggcctgcgccgtgacctgcctgggtggagtgatccagggccggctgtggccgcgggacgacgcggagtatcgcaaggttgccgacctcgggggcgacccggcccgggtactgtccacccgggacctcgtcgacagtgacaacgtcttcttcgtggcgaccggcatcacggacggcgaactgctcgccggggtgcggtaccggccgggcggggcaaacacgtcctcgctggtgatgcggtcacgctcgggcaccatccgccgggtggacagccagcatcagctcaccaagctgcaggcgtactccaccgttccgttctga

SEQ ID NO: 125694 - protein, 351 aa, Frankia sp. CcI3
MSSTAESSASRPSDASSVPDTLAVQGQAPDRNLALELVRVTEAAALAAARWVGRGDKNGADGAAVDAMRRLVGTVSMRGVVVIGEGEKDEAPMLFNGEVVGSGEGPECDVAVDPVDGTTLTSKGMNNAISVMAVSERGSMYDASACFYMEKLVTGPEAAGVVDIAASVEDNIRAVAKAKEILPRDVTVVVLDRPRHSQLVEQIRAAGARVKLISDGDVAGAVMAASADTGVDLLLGIGGTPEGIITACAVTCLGGVIQGRLWPRDDAEYRKVADLGGDPARVLSTRDLVDSDNVFFVATGITDGELLAGVRYRPGGANTSSLVMRSRSGTIRRVDSQHQLTKLQAYSTVPF

SEQ ID NO: 125695 - DNA, 993 bp, Novosphingobium aromaticivorans DSM 12444
  CDS (1)..(993): transl_table=11
gtgaccgacaagcccaccaaccccgccgcatcccacgtcctcgaccgcgtcctcgtgctcgagatggtgcgcgtgaccgaggccgccgcgatcggcgcatcgcgcctgatcggccgtggcgacgagaaggcggccgatgccgccgccgtcgaggccatgcgcgccgccttcaacgaactgtggatggatggcaccgtcgtgatcggcgagggcgaacgtgacgaagcgccgatgctctatatcggcgagaaggtcggcgcggcccccggcaccgggccgaagatcgacatcgcactcgatcccctggaaggtacgacgatcaccgccaaggccggcccgaacgcgctggccgtgctcgcggtggccgaagaaggcggcctgctcaacgcgcccgacgtctacatggacaagctggcggtcggcccgggctaccccgaaggcatcatcgacctcgacaagacgccgagcgaaaacgtgcgcgccgttgccgccgccaagggcgtgcagccgggcgacatcatcgtctgcgtgctcgatcgcccccgccattcggatctcatcgcggaactgcgcagcctcggctgcggcatctcgctgatccccgatggcgacgttgccggcgtgatcgcggtgacgaacgaggaaaccggcgtcgacatgtacatggggaccggcggcgcgcccgaaggcgtccttgccgctgcggcgctgcgttgcgttggcggccagttcaagggccgcctgctgttccgcaacgaggacgagaagtcccgcgcccgcaagtggggcatcgaggacctgaacaagcaatacgacctgatcgaactggccaagggcgactgcatcttcgccgccaccggcgtgaccgacggttcgcttctcgccggcgtgaaggtccacaagaacggcacgatgaccaccgagagcgtcgtcatgcgcgcctcgtcgggcaccgtgcgctgggtcaagggcgaacaccgcaaggtccgctga

SEQ ID NO: 125696 - protein, 330 aa, Novosphingobium aromaticivorans DSM 12444
MTDKPTNPAASHVLDRVLVLEMVRVTEAAAIGASRLIGRGDEKAADAAAVEAMRAAFNELWMDGTVVIGEGERDEAPMLYIGEKVGAAPGTGPKIDIALDPLEGTTITAKAGPNALAVLAVAEEGGLLNAPDVYMDKLAVGPGYPEGIIDLDKTPSENVRAVAAAKGVQPGDIIVCVLDRPRHSDLIAELRSLGCGISLIPDGDVAGVIAVTNEETGVDMYMGTGGAPEGVLAAAALRCVGGQFKGRLLFRNEDEKSRARKWGIEDLNKQYDLIELAKGDCIFAATGVTDGSLLAGVKVHKNGTMTTESVVMRASSGTVRWVKGEHRKVR

SEQ ID NO: 125697 - DNA, 939 bp, Neorickettsia sennetsu str. Miyayama
  CDS (1)..(939): transl_table=11
atgttgcattcgtatattttggagtttttatctgtggcgcagaaaacagcaatttcttgctacgatatggctggcctgggtgatagtaaagaggcggatcgtgtcgctgtagagacgatgcggaatgctctgaatgagatcaatgcaactactaatgttatgataggcgaaggcgaaagagattgtgcgccaatgttacgtgtaggagaagtgctgggcaagggagggccactcttagatctagctgtggatccattagagggaacagatatttgtgcatcctttatggatggttcgctagttgtacttggctttggtgagtccggaagcataatttctgctccggacgtttatatggaaaagatatacacaccttatgactgtgatataggttttggtaacacggttgctgaaaacttgaaaaagattgcttctgctaagggggttaaagggcccgaagagcttattgttgtaattctaaggcgagaacgtaatcaacaactcattgctgaagttagggatgttggtgcaagggtccaactggtgacggatggagatatatcagctattgtctcaatggttattgggaatgccggagatgcgtatatgggcagtggtggcgctccagaaggtgtcttgtcagctatggctgtacgtaatctcggaggacgaatggtaggtaaattcctttttaagagcgatgagcagagggagcgtgcacgaaaagttgggatcacagattttgagaggtcttattcacatgatgaactcgtaaaggggaatgtaatacttattttaactggcgttacggaggggaagttgttggatggtgtcagaaaggataagcttgaacacctaacttattgtgaatcactagttatattgccagggtcgtttaacaaggtgtgttccactattcgaggctcgcatgtaggataa

SEQ ID NO: 125698 - protein, 312 aa, Neorickettsia sennetsu str. Miyayama
MLHSYILEFLSVAQKTAISCYDMAGLGDSKEADRVAVETMRNALNEINATTNVMIGEGERDCAPMLRVGEVLGKGGPLLDLAVDPLEGTDICASFMDGSLVVLGFGESGSIISAPDVYMEKIYTPYDCDIGFGNTVAENLKKIASAKGVKGPEELIVVILRRERNQQLIAEVRDVGARVQLVTDGDISAIVSMVIGNAGDAYMGSGGAPEGVLSAMAVRNLGGRMVGKFLFKSDEQRERARKVGITDFERSYSHDELVKGNVILILTGVTEGKLLDGVRKDKLEHLTYCESLVILPGSFNKVCSTIRGSHVG

SEQ ID NO: 125699 - DNA, 924 bp, Ehrlichia chaffeensis str. Arkansas
  CDS (1)..(924): transl_table=11
atgcaaagtttaatatttaaattattatcagttactgaagctgcagctttagcatcttataaatgtcttggtatgggtaatgaaaaagaagcagatcgtgttgctgttcatgctatgcgaaagtcattaaacttattagaaattaatgggactgttgttattggagaaggggaaagagataatgctcctatgctatatattggagaaaaagtgggtattggaggaattgatgttgacattgctcttgatccacttgaaggtactactatgtgtgctcattataaaaatggagctatgtctgttctcgcaatagcgaaaaaaggtgaatttttaaatgctcctgatgtttatatgaaaaaaattgctgtaggtcctaatgttcctaaaggtgtggtttctttaaaatatgatataaaaactaatttgtataatttagctgaggtcagaaagtgtaatgtaaatgaactgattgtaatggttttatatagagaaagacatttagaattaattaaaagtattagagaatgtggagctcgtataaagcttatagatgatggggatgtttcggctgtagtatcactgatgaaaggaactcatgatttatatgttggaactggaggagctccagagggtgtacttgcagctgctgctttgtcatcgatgggaggatacatggaaggtaaactaatttttgatacagagtatttaagagcaagagcagaacaatttggaattaaagatataaataaaatttactctatagaagaaatggtgaaatctgaatcaatttttatagctactggtattactgatagtgctttggttaaaggtattagatattcgcaagggtcttttattatagagtctataatcattaaaccggctagtgttatgtatgttaataatactgttcctgaggtatag

SEQ ID NO: 125700 - protein, 307 aa, Ehrlichia chaffeensis str. Arkansas
MQSLIFKLLSVTEAAALASYKCLGMGNEKEADRVAVHAMRKSLNLLEINGTVVIGEGERDNAPMLYIGEKVGIGGIDVDIALDPLEGTTMCAHYKNGAMSVLAIAKKGEFLNAPDVYMKKIAVGPNVPKGVVSLKYDIKTNLYNLAEVRKCNVNELIVMVLYRERHLELIKSIRECGARIKLIDDGDVSAVVSLMKGTHDLYVGTGGAPEGVLAAAALSSMGGYMEGKLIFDTEYLRARAEQFGIKDINKIYSIEEMVKSESIFIATGITDSALVKGIRYSQGSFIIESIIIKPASVMYVNNTVPEV

SEQ ID NO: 125701 - DNA, 981 bp, Desulfitobacterium hafniense Y51
  CDS (1)..(981): transl_table=11
atggccatggaacgggaactcaccatggagtttgcccgggttacggaggcagcagccttggcctcggcccgctgggttggccgcgggaataaagaagccgcagatgatgcggcagtacaagccatgcgctccgtgtttgacaccattcgtatgcagggaacggtggtcattggcgaaggggaaatggatgaagcccccatgctctatatcggtgaaaaagtgggaagcggcgaagctccggaattggatgtggccgtggatcccctggaaggaacgaatagtgtcgccaagggcttagccggtgctattgctgtggttgctattgccagaaaaggcggtctcctgcatgccccggatatgtatatggacaaaatcgccgtcggccccctggccaaaggcaaaatacacttggatgcccctgtccaggagaatttggccaatgtagcccgggctctgggcaagagtatggatgaccttaccgtagttattctggaccgtccccgtcatgagaagatcattcatgacgtccgggaggcgggcgcccggattcgcctgatcacggatggtgatgtatctccggcggtggcttgtgctattgaaggaaccggggtcgatgtgatgatgggaatcggcggagccccggaaggggtactggctgcagctgcgctgcggtgtctgggcggagagatgcagggaaggctttggccggagaatgaagaggatgttctgcgggcccagaagctgggcgtcagtgatgtcgctaaattgttaacgatggatgatctggtctgctctgatgatgtcttctttgcagccaccggtatcaccgaaggcccgctgctcaaaggggtgcattttacttcccagggagctctgacccatactgtggtgatgcgtggaaaaacggggacagtgcgctttattgaggcgcggcatcgttttgacaaaaagcccgcctatgccatgaagggtgctgtgtag

SEQ ID NO: 125702 - protein, 326 aa, Desulfitobacterium hafniense Y51
MAMERELTMEFARVTEAAALASARWVGRGNKEAADDAAVQAMRSVFDTIRMQGTVVIGEGEMDEAPMLYIGEKVGSGEAPELDVAVDPLEGTNSVAKGLAGAIAVVAIARKGGLLHAPDMYMDKIAVGPLAKGKIHLDAPVQENLANVARALGKSMDDLTVVILDRPRHEKIIHDVREAGARIRLITDGDVSPAVACAIEGTGVDVMMGIGGAPEGVLAAAALRCLGGEMQGRLWPENEEDVLRAQKLGVSDVAKLLTMDDLVCSDDVFFAATGITEGPLLKGVHFTSQGALTHTVVMRGKTGTVRFIEARHRFDKKPAYAMKGAV

SEQ ID NO: 125703 - DNA, 1089 bp, Methanococcoides burtonii DSM 6242
  CDS (1)..(1089): transl_table=11
ttgcctcacccaaagacagtagagaacatgataaaatgcgcaggtcctgtcgaatgtgcattacttccaagccttatccacgtaacagaagctgcagccattgctgcatcataccagatgggcaagggcaacaagaactacgcagatcaggtttccgtagaagccatgcgtagaatgatgaacacccttgatttcaaaggtgttatcaagatcggtgaaggcgagcgcgatgaagctcctatgctattcatcggcgaggaagtcggtaccggcaaaggtgacatcgtagtagacattgcggtcgatcctcttgaagggacaaatctgaccgcagacggtatacctggttctatctccgttatggcaatggcagagcctggtggattgttccacggtcctgatgtttatatggacaagatcgttgttggtcctgatgttgtcaggtatgaaaaggaacatcctgatgaaaagatagatcttgatgcacctatcataaagaatcttgagatcgttgcaaaggcactggaaagggatattggggagatcgtggttgtcattctcgaaagggataggcacaagaatatgatcgaggagatccgcgccactggtgcacgtgtaaaccttgtttctgacggagatctcatgccaggcgtttccacagctatacgtggttcaggcattcatgtcgtaatgggttcaggcggttcaggtgaggccgtgctgactgcagctgcgatcaagatccttggtggcaaggtccttgcaaggctcgtccttccgacagtagccaatggtggatctgaagaagagatagcagaagagaaagcagagaagatgcctcgtcttgctaccatgggtatcacagaagacaacatcaatgatattcttgacactgacaaactcgttccagggactgatttcatatttgcagcatccggggtcacaagtggtcagttcctgaaccaggtgaaccttttcggtggtgggaatgccagggtccacagtatttgcatgggcagttctggtgttgtgaaactaaccgattccatctatatcggcgacaaagaacagacacctctgcgtctgtaa

SEQ ID NO: 125704 - protein, 362 aa, Methanococcoides burtonii DSM 6242
MPHPKTVENMIKCAGPVECALLPSLIHVTEAAAIAASYQMGKGNKNYADQVSVEAMRRMMNTLDFKGVIKIGEGERDEAPMLFIGEEVGTGKGDIVVDIAVDPLEGTNLTADGIPGSISVMAMAEPGGLFHGPDVYMDKIVVGPDVVRYEKEHPDEKIDLDAPIIKNLEIVAKALERDIGEIVVVILERDRHKNMIEEIRATGARVNLVSDGDLMPGVSTAIRGSGIHVVMGSGGSGEAVLTAAAIKILGGKVLARLVLPTVANGGSEEEIAEEKAEKMPRLATMGITEDNINDILDTDKLVPGTDFIFAASGVTSGQFLNQVNLFGGGNARVHSICMGSSGVVKLTDSIYIGDKEQTPLRL

SEQ ID NO: 125705 - DNA, 1017 bp, Acidobacteria bacterium Ellin345
  CDS (1)..(1017): transl_table=11
atgtcgacaaacaccaccacaaccaccaccgcgagccgccccggaattgagagcgacctcgcactcgagttcctacaggttgtggaagaggccgccatcgggtgcgccaaactcatgggccgcggtgatcgcacccaggccgacctcgttgccacggaatccatgcgctccaccatggaaagcgtgcgcatgaaaggctgcatcgtgatcggcgaaggcgagcgcgacgaagctcccatgctctacatcggcgaaaaagtcggccggcagcaagacactgatcctgaaattgacatcgcggtcgatccgctggaaggcacgaacctctgcgccaccggcgctcccggcgccatcaccgtgctggccgcgagcgaacgtggcggcctattgcatgcgcccgattgctacatggagaagatcatcgttggcgctcccgcaagtggcgtggtgcacctcgatcgtccggtggaggagaacctcaaagcaatcgccgtcgcaatgaagcgcgatgtcgaagaccttgtcatcatcgtgctcgaccgtccgcgccacgaaaagctcatcgaagatatccgcaaagcgggcgcgcgcattcgcctgatcagcgacggcgacgtcgcggccggtattgccgcggccgtacgcggcaccggcgttcacgcggtcatgggcgtcggcggcgctccagagggagtaatcaccgccgcggctatccgttgcttgaatggctacatggaaggccgtctcgtcggctacaccaaggagcaggaagcccgcatggccgggatgggcatcaccgacctcaagcgcatctatcgcgccgacgagctcgcccccggcaagaacatcatcttcgccgctacgggcgtcaccgaaggcccgctgctcaaggccgtgcgctttttcggtgaaggcgttcgcaccagttccttagtcatgaagttgaatatcggcaaagtgcgattcatcgacaccattcacctcgaccgtcagccgaacgcggaaatccgcttctaa

SEQ ID NO: 125706 - protein, 338 aa, Acidobacteria bacterium Ellin345
MSTNTTTTTTASRPGIESDLALEFLQVVEEAAIGCAKLMGRGDRTQADLVATESMRSTMESVRMKGCIVIGEGERDEAPMLYIGEKVGRQQDTDPEIDIAVDPLEGTNLCATGAPGAITVLAASERGGLLHAPDCYMEKIIVGAPASGVVHLDRPVEENLKAIAVAMKRDVEDLVIIVLDRPRHEKLIEDIRKAGARIRLISDGDVAAGIAAAVRGTGVHAVMGVGGAPEGVITAAAIRCLNGYMEGRLVGYTKEQEARMAGMGITDLKRIYRADELAPGKNIIFAATGVTEGPLLKAVRFFGEGVRTSSLVMKLNIGKVRFIDTIHLDRQPNAEIRF

SEQ ID NO: 125707 - DNA, 984 bp, Silicibacter sp. TM1040
  CDS (1)..(984): transl_table=11
atgacttcgaccaccgccgacgcgccgtttcacgaccgcctgctgtccctgggcctcgcccgagttgcggaacaggctgctctggcctctgccccgctgatcggacgcggcgatgaaaaggccgcagaccaagccgccgtaaacgcgatgcgcgaacagctgaaccttctggacatcgccggtgtggtggtgatcggcgaaggcgagcgcgacgaggcgccgatgctctatatcggcgaggaagtgggcaccggcaacggccccggcgtggacatcgcgctggacccgctcgaaggcaccacgctcaccgcaaaggacatgcccaacgcgctcaccgtgatcgccatgggtccacgtggctccatgctgcatgcgcccgacacctatatggacaagctggccgtgggtccgggctaccccgagggcgtggtctctctggacatgtcgccacgcgaacgcgttgaggcgctggccaaggccaagggctgcacacccgcggacatcactgtctgcatcctggaacgtccccgccatgaggcgatgatcgctgaggtgcgcgaaaccggcgcgtcaatccgcctgatcaccgacggcgatgtggcgggcgtcatgcattgcgcagaagcagaggtcacaggcatcgacatgtatatgggccaaggcggcgcgcccgaaggcgtgctggcggcagcggcgctcaaatgcatgggcggtcagatctttggccgtctcttgttccgcaacgacgacgaaaaagcccgcgccgccaaggccggcatcaccgatctggaccgcgtctattcccgcgacgagatggtgacacaggatgtgatctttgccgctaccggcgtcaccggaggctcgctgctgccgcgcatcaagcgtgagccgggctgggtcgagaccaccacactgctgatgcgctccaagaccggctcggtgcgccgcatgagctatcgcacacctctgagcgcgcatcagtaa

SEQ ID NO: 125708 - protein, 327 aa, Silicibacter sp. TM1040
MTSTTADAPFHDRLLSLGLARVAEQAALASAPLIGRGDEKAADQAAVNAMREQLNLLDIAGVVVIGEGERDEAPMLYIGEEVGTGNGPGVDIALDPLEGTTLTAKDMPNALTVIAMGPRGSMLHAPDTYMDKLAVGPGYPEGVVSLDMSPRERVEALAKAKGCTPADITVCILERPRHEAMIAEVRETGASIRLITDGDVAGVMHCAEAEVTGIDMYMGQGGAPEGVLAAAALKCMGGQIFGRLLFRNDDEKARAAKAGITDLDRVYSRDEMVTQDVIFAATGVTGGSLLPRIKREPGWVETTTLLMRSKTGSVRRMSYRTPLSAHQ

SEQ ID NO: 125709 - DNA, 966 bp, Myxococcus xanthus DK 1622
  CDS (1)..(966): transl_table=11
atggatcgcaacctggcaatggaggtcgtgcgcgtcaccgagatggcggccatcgcctccgcacgactgatgggccgcggcaacaaggacgagtcggatcaggccgccgtggacgccatgcgccgcgccttcgacgcgctgcagattgatggcaccgtcgtcatcggcgagggcgagcgcgacgaggcgcccatgctctacatcggcgagaaggtgggcaagcgtggcgagggtgcgcccgaggtggacatcgccctggacccgctggagggcaccaacctgtgcgcctacggccgtccgggttccatcgccgtggtggccatggcgggcaagggcgggctgctcaacgcccccgacacgtacatggagaagatggccgtgggcccgcgcgcccggggcgccatcgacctgcgcaagacgcccacggagaacctccgctccatcgcggagaagatgaaggtctatgtggaagacctcacggtggtggtgctggaccgcgagcgtcacaccgacctcatcaaggagattcgcgcggcgggcgcccgcatccggctcatcgaggacggtgacgtggccggcgccatcgccacgtgtttcgaggacacgggcgtggaggtgctgatgggcatcggcggcgcgcccgagggcgtcatcgccgcggcggccatccgcgccaccggcggtgacatgcagggccggctcgttccccgcaaccagggcgaaatcgaccgcgccaggtcgatgggcatcaccgacatctcgaagatctacaccgccgaggagctggccaagggcgaggtcatgttcgccgcctccggcgtcaccaccggcgacttcctcaagggcgtgcgcttcttcggcggcggctgcgagacgcactccgtcgtcatgcgcagcaagacgggcaccgtccgcttcatccagtcggtgcacaagttcgacaagaagccggggtacgctttctag

SEQ ID NO: 125710 - protein, 321 aa, Myxococcus xanthus DK 1622
MDRNLAMEVVRVTEMAAIASARLMGRGNKDESDQAAVDAMRRAFDALQIDGTVVIGEGERDEAPMLYIGEKVGKRGEGAPEVDIALDPLEGTNLCAYGRPGSIAVVAMAGKGGLLNAPDTYMEKMAVGPRARGAIDLRKTPTENLRSIAEKMKVYVEDLTVVVLDRERHTDLIKEIRAAGARIRLIEDGDVAGAIATCFEDTGVEVLMGIGGAPEGVIAAAAIRATGGDMQGRLVPRNQGEIDRARSMGITDISKIYTAEELAKGEVMFAASGVTTGDFLKGVRFFGGGCETHSVVMRSKTGTVRFIQSVHKFDKKPGYAF

SEQ ID NO: 125711 - DNA, 1062 bp, Mycobacterium sp. MCS
  CDS (1)..(1062): transl_table=11
atgccagctgaccctgatgctcttcgcgcaagcggctcatcgcgccgcagagaagcccccgaccgcaacctcgccctcgaactcgtccgcgtcaccgaggccggcgccatggcggcgggccgctgggtagggcgcggggacaaggagggcggcgacggcgcagcggtcgacgccatgcgcgaactggtcaactcggtgtcgatgcgcggcgtcgtggtgatcggcgagggcgagaaggacaacgcgccgatgctctacaacggcgaggaggtcggcaacggcgacgggcccgactgcgacttcgccgtcgaccccatcgacggcaccacgctgatgagcaagggcatgccgaacgcgatctcggtgctcgccgtggccgagcgcggcgcgatgttcgacccgtcggcggtgttctacatgaacaagatcgccgtcggtccggacgccgtcgacgccatcgacatcaccgcgccgatcggcgagaacgtgcgcgccgtggccaaggtcaaggggctgtcggtgcgcgacgtgacggtctgcatcctcgaccggccgcgtcacgaacagctcatcgccgacgtccgcgactccggcgcccgcatccggctgatctccgacggtgacgtcgcgggcgcgatctcggcgtgccggccgaattcgggtaccgacatgctggccggtatcggtggcacccccgagggcatcatcaccgccgccgccatccgctgtatgggcggcgccatccacgcccagctcgcccccaaggacgacgaggagcgccagaaggccatcgacgccggccacgacatcgaccgcgtgctcaagaccgaggatctggtgtcgggcgagaacgtgttcttctgcgcgaccggcgtcaccgacggcgacctgctgcagggcgtgcgctacaccggcggcgggtgcaccacccagtcgatcgtgatgcggtcgaagtccggcacggtccgcatgatcgaggcctaccaccggctgtccaagctcaacgagtactccgctgtcgacttcaccggcgacagcaacgccgcctatcccctgccgtaa

SEQ ID NO: 125712 - protein, 353 aa, Mycobacterium sp. MCS
MPADPDALRASGSSRRREAPDRNLALELVRVTEAGAMAAGRWVGRGDKEGGDGAAVDAMRELVNSVSMRGVVVIGEGEKDNAPMLYNGEEVGNGDGPDCDFAVDPIDGTTLMSKGMPNAISVLAVAERGAMFDPSAVFYMNKIAVGPDAVDAIDITAPIGENVRAVAKVKGLSVRDVTVCILDRPRHEQLIADVRDSGARIRLISDGDVAGAISACRPNSGTDMLAGIGGTPEGIITAAAIRCMGGAIHAQLAPKDDEERQKAIDAGHDIDRVLKTEDLVSGENVFFCATGVTDGDLLQGVRYTGGGCTTQSIVMRSKSGTVRMIEAYHRLSKLNEYSAVDFTGDSNAAYPLP

SEQ ID NO: 125713 - DNA, 987 bp, Mesorhizobium sp. BNC1
  CDS (1)..(987): transl_table=11
atgaccttcatgccgaaaagcccacaggccggcctcgatcgaatcttgacgctcgaactcgtccgcgtgacggagagggcggcggtcgccgcggcaaggctgcgcgggcgcggtgatgagaaagccgccgatcaggtggccgtggacgcgatgcgttcggaactgaaccgtttgccgatccagggtacggtcgtaatcggcgagggcgagcgggacgaggcgccgatgctttacatcggcgaggaggtcggccttggtgagggcccggctgtcgatatcgcgctcgatccgctcgaaggcaccacaatctgcgcgaagaaccttcccaattcgctggcggtcatcgcgatcgccgagcgcggcagcctgctttacgcgccggacgtttatatggagaagatcgcggtcggacccggctatccggaaggcattgtgaacctggatgcgccggcagccgaaaacatcgaaaatcttgccaaggcgaagggcgtgccggtctcggagatcaccgcctgcattcttgatcgcccgcgccacgcgcgcctgatcgaggaggtccgcgccaccggagccgccatccggcttatcggtgacggcgacgtggcaggcgtcatccacaccaccgatccggacaataccggcatcgacatttatatgggaatcggcggcgcccccgagggggttcttgccgcggcggcgctgcgctgcatcggtggccagatgcagggccggctccagctcaacaccgaggaaaaggtggcgcgcgcggccaatatgggaatttccgatcccaacaagatctatctcatggaggagatggcgagcggggatgtgctcttcgccgcgacgggtgtgacagacggcaatctgctcgcgggcgtgaaattcggccgcgattcgatccagacccatacgatcgtcatgcgctcttcctcacgcacggtccgtgagatcaaggcgcggcatcaagatttggaaaagttctga

SEQ ID NO: 125714 - protein, 328 aa, Mesorhizobium sp. BNC1
MTFMPKSPQAGLDRILTLELVRVTERAAVAAARLRGRGDEKAADQVAVDAMRSELNRLPIQGTVVIGEGERDEAPMLYIGEEVGLGEGPAVDIALDPLEGTTICAKNLPNSLAVIAIAERGSLLYAPDVYMEKIAVGPGYPEGIVNLDAPAAENIENLAKAKGVPVSEITACILDRPRHARLIEEVRATGAAIRLIGDGDVAGVIHTTDPDNTGIDIYMGIGGAPEGVLAAAALRCIGGQMQGRLQLNTEEKVARAANMGISDPNKIYLMEEMASGDVLFAATGVTDGNLLAGVKFGRDSIQTHTIVMRSSSRTVREIKARHQDLEKF

SEQ ID NO: 125715 - DNA, 1041 bp, Rhodococcus sp. RHA1
  CDS (1)..(1041): transl_table=11
atgacggctagcaccacttcgagtcgccgcgaggccccggaccgaaatcttgctctggaattggtccgagtcaccgaggctggtgcgatggctgccggtcgctgggtcggccgtggcgacaaggagggtggcgacggcgccgccgtcgacgccatgcgccagctcgtgagctcggtctcgatgcgcggcgtcgtcgtcatcggcgagggcgagaaggacgaagccccgatgctgttcaacggcgaagaggtcggcaacggcgacggacccgactgcgacttcgccgtcgacccggtcgacggaacgaccctgatggcgaagggcatgcccaacgcgatcgccgtcctcgcggtcgccgagcgcggcgcgatgttcgacccgtccgccgtgttctacatggagaagatcgccgtcggccccgacgccgccgatgtcatcgacatcacagcgcccgtcgccgagaacatcaagcgcgtcgcgaaggtccgcaaggcgtccccctccgacgtgacggtctgcatcctcgaccgtccccggcacgccaggctcatccaggaggtccgggacaccggcgcccggatccgtctcatctccgacggcgacgtcgcgggtgcgatcgccgccgcgcggcccgagtcgggcaccgacatcctgatcggcaccggcggcacgccggagggcatcatcgccgccgccgccatgcgctgtatgggtggttcgctgcagggccggctggcccccaccgacgacgccgagcgtcagaaggccatcgacgcaggccacgacctggaccgcgtgctcaccaccgaagatctcgtgtccggtgagaacgtcttcttctgcgccaccggcgtcacggacggcgacctgctccgcggtgtccgctactacggcggcggcgcctcgacccagtcgatcgtgatgcggtcgaagtcgggcaccgtccgcatgatcgacgcgtaccaccgtctcgagaagctgcgcgagtactcgtccgtggacttcacgggcgaagacggcgccgttccgccgacgttctag

SEQ ID NO: 125716 - protein, 346 aa, Rhodococcus sp. RHA1
MTASTTSSRREAPDRNLALELVRVTEAGAMAAGRWVGRGDKEGGDGAAVDAMRQLVSSVSMRGVVVIGEGEKDEAPMLFNGEEVGNGDGPDCDFAVDPVDGTTLMAKGMPNAIAVLAVAERGAMFDPSAVFYMEKIAVGPDAADVIDITAPVAENIKRVAKVRKASPSDVTVCILDRPRHARLIQEVRDTGARIRLISDGDVAGAIAAARPESGTDILIGTGGTPEGIIAAAAMRCMGGSLQGRLAPTDDAERQKAIDAGHDLDRVLTTEDLVSGENVFFCATGVTDGDLLRGVRYYGGGASTQSIVMRSKSGTVRMIDAYHRLEKLREYSSVDFTGEDGAVPPTF

SEQ ID NO: 125717 - DNA, 1038 bp, Trichodesmium erythraeum IMS101
  CDS (1)..(1038): transl_table=11
atggataatgtaatcggtttagaaattatcgaagtagtagaacaagcagcgatcgcctctgctcgttggatgggaaaaggggagaaaaatactgcagacgaagtagctgtagaagctatgcgcgaacgtatgaacaaaattcacatgagaggccgcattgtaattggagaaggggagcgagatgaagcacccatgctctacattggggaagaagtaggaatttgtactcagcctgatgcgaaaaaaatgtgtgaggtagaacagctaatcgagattgacatagcagtggacccttgtgaaggtacaaacctagttgcttatggtcaaaatggttctatggcagtattagctatttctgagaaaggtggtttgttggcagcaccagatgtctatatgaaaaaactagcggcaccagcagtagctaaaaatcatgtagatattaataagtcggctaccgaaaacctcaaaattatttcagaatgcatggaccgtgctgttgaagaattggtagttgtagttatggatcgtccacgtcacaaacagttaattagtgaaattcgtcaagctggtgctagagttcgtctaattagtgatggtgacgtttctgctgcaatttcctgtgcatttgcaggtacaaatattcatgctttgatgggtattggtgcagccccagagggagtaatttctgcagcagctatgcgtgctttaggaggccatttccaaggacaactgatttatgacccagctattgtcaaaactggtttaattggagaaagcaaagaagataatatgaagcgactcaaagatatgggtattgaagatccagacaaagtttataatgctgaagaattagcttctggagaaacagtcctatttgcagcttgtggtattactcctggtactctgatggaaggagtacgtttcttccccaatggcgctcgtacccaaagtttagttatttcttctcagtcaaaaactgctcgttttgtagatactgttcatatgtttggagaaacaaaaacactgcagctgaaatag

SEQ ID NO: 125718 - protein, 345 aa, Trichodesmium erythraeum IMS101
MDNVIGLEIIEVVEQAAIASARWMGKGEKNTADEVAVEAMRERMNKIHMRGRIVIGEGERDEAPMLYIGEEVGICTQPDAKKMCEVEQLIEIDIAVDPCEGTNLVAYGQNGSMAVLAISEKGGLLAAPDVYMKKLAAPAVAKNHVDINKSATENLKIISECMDRAVEELVVVVMDRPRHKQLISEIRQAGARVRLISDGDVSAAISCAFAGTNIHALMGIGAAPEGVISAAAMRALGGHFQGQLIYDPAIVKTGLIGESKEDNMKRLKDMGIEDPDKVYNAEELASGETVLFAACGITPGTLMEGVRFFPNGARTQSLVISSQSKTARFVDTVHMFGETKTLQLK

SEQ ID NO: 125719 - DNA, 1074 bp, Synechococcus sp. CC9311
  CDS (1)..(1074): transl_table=11
atgagacagaaatccctgctgttgcaggctttctcctcaaagcctccctttaccccccgcagcacttacgtggatcgcactctcatccaggaaattctcgagatcgtcgagcaggccgccatcgcttccgccacgctctccggcaaaggtctgaaggatgaagccgatgctttggctgttgatgccatgcgcaagcgcatgaatcagattcaaatgaagggccgcattgtgatcggtgagggggaacgcgacgaagctcccatgctctacatcggtgaagaagtcggtaccggcactggccctggagtcgacttcgctgttgacccttgcgaaggcacaaacctttgtgcgtacagccaacgcggctccatggcggttctcgcagcgtccgaccgcggtggactgttcaacgctcccgacttctacatgaagaaattggctgctccaccggcagcgaaaggcaaggttgacattcgcaagtctgcgactgaaaacatcaagattctgagtgagtgcttgggtcttgctcctgatgaactcaccatcgtggtgatggaccgtgcccgtcacaaagacctcatcactgaaatccgcgccaccggtgctcgtattcagcccatctcagatggtgatgtacaagcggctattgcttgtggttttgctggaactggaacccactgcctgatgggcattggtgctgctcctgagggtgtgatctccgcggccgcgatgcgcgcattaggcggacacttccaaggacaactggtgtatgacccagccattgctcagacctctgagtgggcagatatgacgaaggaaggcaatctcgcccgcctcgcagaaatgggcattaccgaccccgataaggtgtacgaagccagtgagcttgcctgcggagagcacgttgtgttcgccggcagcggcatcacagatggtcttcttttcaacggagtgaagttcgaaactgattgcacccgcacgagcagcttgatcatcagcaacctgaacaacacctgcagtttcactaacaccatccacatgaaggatggagctcaaagcatcgctttgaactga

SEQ ID NO: 125720 - protein, 357 aa, Synechococcus sp. CC9311
MRQKSLLLQAFSSKPPFTPRSTYVDRTLIQEILEIVEQAAIASATLSGKGLKDEADALAVDAMRKRMNQIQMKGRIVIGEGERDEAPMLYIGEEVGTGTGPGVDFAVDPCEGTNLCAYSQRGSMAVLAASDRGGLFNAPDFYMKKLAAPPAAKGKVDIRKSATENIKILSECLGLAPDELTIVVMDRARHKDLITEIRATGARIQPISDGDVQAAIACGFAGTGTHCLMGIGAAPEGVISAAAMRALGGHFQGQLVYDPAIAQTSEWADMTKEGNLARLAEMGITDPDKVYEASELACGEHVVFAGSGITDGLLFNGVKFETDCTRTSSLIISNLNNTCSFTNTIHMKDGAQSIALN

SEQ ID NO: 125721 - DNA, 954 bp, Hyphomonas neptunium ATCC 15444
  CDS (1)..(954): transl_table=11
atggataacagcgttctgacttccagccttgcagatgcaatggttaatgttgcggaattggctgcgattgcggcgtcccgccttgtgggacacggcgacgagaagaaagccgacgctgccgctgtggatgccatgcggacggccttcaatgcggtggacttcaagggccgggttgtcatcggcgagggcgagcgtgacgaagcgccgatgctctacatcggtgaggaagtcggcaccggcaacggcccggaaatcgacatcgcgctggacccgctggaaggcacgaccctgacggcgaaagccatgccggacgcctgcgctgtgctggcgattgccccgcgcggcggcctgctgcatgcgcccgacacctatatggacaaaattgccattggccccggctatcccgaaggcatcatcagcctggaggcgagccccgccgacaacatcaaggcgctggccaagcaccgcaagcgcaaggtggaagagatgaccgtgtgcgtgctcgatcgcccgcgccaccagggcatcatcgactcgctgcgctctgcgggcgcgcgggttgtgctgatcaccgatggcgatgtggccggcgtgatcgctaccaccgatccgctgacgggcatcgacatgtatgtcggccagggcggcgcgccggaaggcgtgctggcagccgccgcgctgaaatgcgtgggcgggcagatgctcggccgtctcgtgttccgcaatgacgacgagaagaagcgcgcgagccgtaccgggatcaccgatttcggcaagacctacagcctcaacgagctggcctcgggcgagaccgtgttctgcgcaaccggcgtgaccaagggaacgctgctggacggcgtggtccagaaggatggccgtatccatacgcacacgctggtgatgacctccaccaacggcctggtgcgcaatgtgcggtcttcgcgccgcatctga

SEQ ID NO: 125722 - protein, 317 aa, Hyphomonas neptunium ATCC 15444
MDNSVLTSSLADAMVNVAELAAIAASRLVGHGDEKKADAAAVDAMRTAFNAVDFKGRVVIGEGERDEAPMLYIGEEVGTGNGPEIDIALDPLEGTTLTAKAMPDACAVLAIAPRGGLLHAPDTYMDKIAIGPGYPEGIISLEASPADNIKALAKHRKRKVEEMTVCVLDRPRHQGIIDSLRSAGARVVLITDGDVAGVIATTDPLTGIDMYVGQGGAPEGVLAAAALKCVGGQMLGRLVFRNDDEKKRASRTGITDFGKTYSLNELASGETVFCATGVTKGTLLDGVVQKDGRIHTHTLVMTSTNGLVRNVRSSRRI

SEQ ID NO: 125723 - DNA, 972 bp, Solibacter usitatus Ellin6076
  CDS (1)..(972): transl_table=11
atgtttgacctttcgctcgaattgctccgcgtcgtggaaggcgcggcgatcgcgtcggcccgcacgatgggaatgggggacgccaatctcgctgaccaggccgcggtggaatccatgcgccgatgcctggacacgctggcgatcgaagggaccatcgtcatcggcgaaggtgagcgcgatgaagcgcccatgctgttcatcggtgagcgggtgggcgccggcactccgaacggcatgacagtggatatcgcggtggacccgctggagggcaccaacctctgcgccaccggcggcgccggagcgatcacggtgctggcggcgagcgaggccggcggcctgctgcatgcgcccgattgctacatggagaagatcatcgtaggtccggcggccaagggcgcggtggaactggatgcgccggtgaagcagaacctcaaagcgatcgcacgcaggctgcagcggggcgtggacgatctggtggtggtggtgctcgaccggccgcggcaccagaaactgatcgcggacattcgcgaagcgggcgcacgcatccggctgatctccgatggcgatctctcggcgggaatcgcggcgtgcgttgccgggacgggcgtgcacgcggtgatggggtcgggcggcgcaccagaaggtgtgctgacggcggcggcgctgcgctgcctgaatggcgaaattctgggacgcctggtggtgaaggacggcgcccagaaggaacgcatgcaggccatgggaattgaggacgtgaatcgcgtctacagcactcccgagctcgcgcccggaaagcacatcgtattcgcagccagcggagtgaccgatggcgatctgctgcagggcgtgcgcttcaccggcgacggggtgcacacgcagtcggtagtcatgaactgcagcccggcacgggtgcgtttcgtggacacgacgcacttggagaataaaccggacgtcaaggtgcggttccgctaa

SEQ ID NO: 125724 - protein, 323 aa, Solibacter usitatus Ellin6076
MFDLSLELLRVVEGAAIASARTMGMGDANLADQAAVESMRRCLDTLAIEGTIVIGEGERDEAPMLFIGERVGAGTPNGMTVDIAVDPLEGTNLCATGGAGAITVLAASEAGGLLHAPDCYMEKIIVGPAAKGAVELDAPVKQNLKAIARRLQRGVDDLVVVVLDRPRHQKLIADIREAGARIRLISDGDLSAGIAACVAGTGVHAVMGSGGAPEGVLTAAALRCLNGEILGRLVVKDGAQKERMQAMGIEDVNRVYSTPELAPGKHIVFAASGVTDGDLLQGVRFTGDGVHTQSVVMNCSPARVRFVDTTHLENKPDVKVRFR

SEQ ID NO: 125725 - DNA, 1080 bp, Mycobacterium avium 104
  CDS (1)..(1080): transl_table=11
atgacagttgagggcgaccgctcgtccgccgccaccggccgggccccggcgcagggccggccgcgcggcgaggcaccagaccgcaacctggcgttggaactggtccgcgtcaccgaggccggcgccatggccgccggccgctgggtcggccgcggcgacaaagagggcggcgacggggcggcggtcgacgcgatgcgtgagctggtcaacacggtgtcgatgcgcggtgtggtggtcatcggcgagggcgagaaggaccacgcgccgatgctctacaacggcgaggaggtcggcaacggcgacggcccggaatgcgacttcgccgtcgacccgatcgacggcaccacgctgatgagcaagggcatgcccaacgccatctccgtgctggcggtggccgaccgcggcgccatgttcgacccgtcggcggtgttctacatgaacaagatcgccgtcgggcccgaggccgcgcacgtgctggacatcaccgcgccgatcgccgagaacatcaaggccgtcgccaaggtcaaggccctgtcggtgcgcgacatgaccgtgtgcatcctggaccggccgcggcacgcgaagctcatcgacgaggtccgcgagaccggggcccggatccggctgatcaccgacggcgacgtggccggcgcgatctcggcctgccgcccgcactccggcaccgacatgctggccggcatcggcggcaccccggagggcatcatcgccgccgccgccatccgctgcatgggcggcgccatccaggcgcagctggccccccgcgacgacgaggaacgccagaaggccatcgacgccggctacgacctggaccagatcctgacgaccgaggacctggtctccggtgagaacgtcttcttctgcgccaccggggtcaccaacggtgacctgctcaagggtgtgcagtactaccccggcggctgcaccacccagtcgatcgtcatgcgatcgaagtcgggcaccgtccggatgatcgaggcctaccaccggctgtcgaagctcaacgagtactccgccatcgacttcaccggcgacagctctgccgcctatcccctgccctga

SEQ ID NO: 125726 - protein, 359 aa, Mycobacterium avium 104
MTVEGDRSSAATGRAPAQGRPRGEAPDRNLALELVRVTEAGAMAAGRWVGRGDKEGGDGAAVDAMRELVNTVSMRGVVVIGEGEKDHAPMLYNGEEVGNGDGPECDFAVDPIDGTTLMSKGMPNAISVLAVADRGAMFDPSAVFYMNKIAVGPEAAHVLDITAPIAENIKAVAKVKALSVRDMTVCILDRPRHAKLIDEVRETGARIRLITDGDVAGAISACRPHSGTDMLAGIGGTPEGIIAAAAIRCMGGAIQAQLAPRDDEERQKAIDAGYDLDQILTTEDLVSGENVFFCATGVTNGDLLKGVQYYPGGCTTQSIVMRSKSGTVRMIEAYHRLSKLNEYSAIDFTGDSSAAYPLP

SEQ ID NO: 125727 - DNA, 1029 bp, Mycobacterium smegmatis str. MC2 155
  CDS (1)..(1029): transl_table=11
atgacaccctcgcgcggcgaagcaccggatcgaaatctggcccttgaacttgtccgggtaaccgaggcaggagcgatggccgcgggccgctgggttggccgcggcgacaaggaaggcggcgacggtgcggccgtcgacgccatgcgtgagctggtcaactcggtgtcgatgcgcggcgtcgtggtgatcggtgagggcgagaaggacaacgccccgatgctctacaacggcgaagaggtgggcaacggcgacgggccggagtgcgacttcgccgtcgacccgatcgacggcaccacgctgatgagcaagggtatgcccaacgccatctcggttctcgcggtcgccgagcgcggtgcgatgttcgacccgtcggcggtgttctacatgaacaagatcgccgcgggtcccgacgtcgccgacttcatcgacatcacctcgccgatcgcggccaacatccagcgcatcgccaagatgcgcaaggcctcggtctccgacatcaccgtctgcatcctggaccgcccgcgccacgccaagctgatcgccgacgtccgcgcggccggcgcacggatccggctgatctccgacggcgacgtcgccggtgcgatctcggcgtgccgccccgattcgggcaccgacctgctcgcgggcatcggcggcacgcccgagggcatcatcaccgccgcggcgatccgctgcatgggcggcgagatccaggcgaccctggcccccaccgacgacgaggagcgccagaaggccatcgaccgcggccacgacctggaccgggtgctcaccaccaaggacctggtgtcgggtgagaacgtgttcttctgcgccaccggcgtcaccgacggggacctgctcaaaggggtgcggttcttcggcggcgggtgcaccacccagtcgatcgtcatgcgctcgaagtcgggcacggtccggatgatcgaggcctaccaccggttgtccaagctcaacgaatactccgcgatcaatttcaccggcgacagctctgccgcctatcccctgccgtaa

SEQ ID NO: 125728 - protein, 342 aa, Mycobacterium smegmatis str. MC2 155
MTPSRGEAPDRNLALELVRVTEAGAMAAGRWVGRGDKEGGDGAAVDAMRELVNSVSMRGVVVIGEGEKDNAPMLYNGEEVGNGDGPECDFAVDPIDGTTLMSKGMPNAISVLAVAERGAMFDPSAVFYMNKIAAGPDVADFIDITSPIAANIQRIAKMRKASVSDITVCILDRPRHAKLIADVRAAGARIRLISDGDVAGAISACRPDSGTDLLAGIGGTPEGIITAAAIRCMGGEIQATLAPTDDEERQKAIDRGHDLDRVLTTKDLVSGENVFFCATGVTDGDLLKGVRFFGGGCTTQSIVMRSKSGTVRMIEAYHRLSKLNEYSAINFTGDSSAAYPLP

SEQ ID NO: 125729 - DNA, 1020 bp, Nocardioides sp. JS614
  CDS (1)..(1020): transl_table=11
atgccccacggtttcgcactcgagtccgaccagtcgcccgatcgcaacctggccctggagctggtccgggtcaccgaggccgccgcgatggccgccggccgctgggtcggccgcggtgacaagaacggcgcggacggcgtcgcggtcaacgcgatgcgggtgatgatctccacgatcggcatggacggcaccgtggtgatcggcgagggcgagaaggacaacgccccgatgctctacaacggggagcgggtcggcgacggcaccggcccggagtgcgacgtcgccgtcgacccgatcgacggcaccacgctcacggcgaaggggatgaccaacgccgtctccgtgctcgcggtcgcgccgcgcgggtcgatgtacgacccgtcggcggtgttctacatggagaagctcgtcaccggccccgaggcggccggcgtcgtggacatccgcctgcccgtcgccgagaacatccaccaggtcgcgaaggccaagggcaagctcccctccgacgtcaccgtggtgctgcttgaccggccgcggcacgcccagctggtcgacgagatccgggccaccggggcgatgatcaagttcatcaccgacggcgacgtcgccggcgccatcatggccgctcggcccgagaccggcatcgacctgctgctcgggatcggtggcactcccgaggggatcatcgccgcgtgcgccatgaaggcgctcggcggtgtcatccagggccgcctgtggccgcagggcgacaaggagcggcagaaggcgatcgacgccggccacgacctcgaccccgaccacgtgctctccaccgaggacctggtcaccggcgacgacacgttcttcgtcgccaccggcatcaccgacggcgagctgctgcgcggcgttcgctaccggtccgacagcgtgaccacgcactcgatcgtgatgcgcgcgcgcagcggcacgatccgccggatcatctccgagcaccagccgcagaagctacgcgctttttccgcggtcaacttcgagagctga

SEQ ID NO: 125730 - protein, 339 aa, Nocardioides sp. JS614
MPHGFALESDQSPDRNLALELVRVTEAAAMAAGRWVGRGDKNGADGVAVNAMRVMISTIGMDGTVVIGEGEKDNAPMLYNGERVGDGTGPECDVAVDPIDGTTLTAKGMTNAVSVLAVAPRGSMYDPSAVFYMEKLVTGPEAAGVVDIRLPVAENIHQVAKAKGKLPSDVTVVLLDRPRHAQLVDEIRATGAMIKFITDGDVAGAIMAARPETGIDLLLGIGGTPEGIIAACAMKALGGVIQGRLWPQGDKERQKAIDAGHDLDPDHVLSTEDLVTGDDTFFVATGITDGELLRGVRYRSDSVTTHSIVMRARSGTIRRIISEHQPQKLRAFSAVNFES

SEQ ID NO: 125731 - DNA, 996 bp, Magnetospirillum magnetotacticum MS-1
  CDS (1)..(996): transl_table=11
atgtcggtggccaataccgggatcttcagcgatcccacggcgcggggtctgaccctcgaactggtgcgcgtgaccgaggccgccgccatcgccgccgcccgcctgcggggccagggccgcgagaaggaggccgatcaggccgccgtcgacgctatgcgcgccgaactgatggtgctgccgatcgaggggagcgtggtgatcggcgagggcgagcgcgacgaggcgccgatgctgtacatcggtgagcgggtcggcaccggcaacggtccctcggtcgacatcgccgtcgatccgctggaaggcaccacgctctgcgccaaggacatgccgggcgccatcgccgtgatggccctcgccgagcgcgggaccctgctcgccgcccccgacgtctacatgcagaagatcgccatcgggcccggctatccgcccggcacggtcgatctcgactggagcccggcgaagaacatcgcctccctcgcccgcgccaagggggtggagccctccggcatcaccgcgatcatcctcgaccgcccccgccacatggacctgatcgccgccgtgcgcgacaccggcgccggcatccgcctgatctcggacggggacatcgccgcgatcatccattgcaccaggcccgacgagaccggcgtcgacatctacatgggcaccggcgccgcgccggaaggcgtgatcgccgcgagcgtgctgcgctgcatcggcggccagatgcagggccggctgatcctcgattccgccgaccggcgggcacgggccgccaagatgggcatcaccgatccgggccggaaatacgacatgcacgacttggctcgcggcgatgtcatcgtcgcagccaccggcgtgaccaccggggcgctgctctcgggcgtgcgcttccgccccggcatcatcgagacggagacggtggtctaccgctcgaacaccggcacgatccggcgcatcgcctgcgagcaccgccagccgggcaatgcgccgggctga

SEQ ID NO: 125732 - protein, 331 aa, Magnetospirillum magnetotacticum MS-1
MSVANTGIFSDPTARGLTLELVRVTEAAAIAAARLRGQGREKEADQAAVDAMRAELMVLPIEGSVVIGEGERDEAPMLYIGERVGTGNGPSVDIAVDPLEGTTLCAKDMPGAIAVMALAERGTLLAAPDVYMQKIAIGPGYPPGTVDLDWSPAKNIASLARAKGVEPSGITAIILDRPRHMDLIAAVRDTGAGIRLISDGDIAAIIHCTRPDETGVDIYMGTGAAPEGVIAASVLRCIGGQMQGRLILDSADRRARAAKMGITDPGRKYDMHDLARGDVIVAATGVTTGALLSGVRFRPGIIETETVVYRSNTGTIRRIACEHRQPGNAPG

SEQ ID NO: 125733 - DNA, 957 bp, Magnetospirillum magnetotacticum MS-1
  CDS (1)..(957): transl_table=11
atgtccgagcgttccaagaccgtcggagcctacgaactgcgccgcgccaccgaggcagcggcacgggccgcctatgcctggatcggacgcggcgacaaggccctggccgacgatgccgccgtggcggccatgcagaccgaactggacggcctcgacctcaacgggctgatgctcatcggcgaaggccccaaggacgagatcggcatgctctatcacggccagcgcttcggcgcggcgacggcagagcccgcctgggatctggtggtcgatccgctggaaggcacctccttcctggccaagggcatgaccaatgccatggcggtggtggccatggcgccccacggcaccctgttcgacccggcgcctgcccgctatatggaaaaactggccgcgccgcccgccgccaaaggcaaaatcgatcccaaggccccggtggccgagcgcttggcgcaattgtccgccgccctgaacaagcccatcgaggacatcaccgtctatgtcatcgagaagccccgccacaaggccctggtcaacgccatccacaatgccggagcccgtgtcgccctctatccggcgggtgatgtggcgggcgccttgatggcggccatccccggttccggcatcgacgcattgatgggcaccggcggcacgcccgaaggcctgctctcggccatggccatccgcgccatgggcggcgagttcctgggccgcatcgacccgcagctggccaccgaggccgccgccgtggaagaggccgggatggacctgaaccactggtaccagttggacgagatggtgcgctcggacaaggtggtgttctgcgccaccggcatcaccaccggcctgttgctggacggggtggaacgcacccgcgaccaggaaaagactcagacattgatgatcggcggggccgccgggccgcgccagatgttgacctcgtggcaccgccgcgcctga

SEQ ID NO: 125734 - protein, 318 aa, Magnetospirillum magnetotacticum MS-1
MSERSKTVGAYELRRATEAAARAAYAWIGRGDKALADDAAVAAMQTELDGLDLNGLMLIGEGPKDEIGMLYHGQRFGAATAEPAWDLVVDPLEGTSFLAKGMTNAMAVVAMAPHGTLFDPAPARYMEKLAAPPAAKGKIDPKAPVAERLAQLSAALNKPIEDITVYVIEKPRHKALVNAIHNAGARVALYPAGDVAGALMAAIPGSGIDALMGTGGTPEGLLSAMAIRAMGGEFLGRIDPQLATEAAAVEEAGMDLNHWYQLDEMVRSDKVVFCATGITTGLLLDGVERTRDQEKTQTLMIGGAAGPRQMLTSWHRRA

SEQ ID NO: 125735 - DNA, 993 bp, Magnetospirillum magnetotacticum MS-1
  CDS (1)..(993): transl_table=11
atgtccatccacaccgccaccctgcccgtcctcgaccgcaacctcgccctggaagtggtgcgcgtcaccgaagccagcgcattggcagccgcccgccagaccggacgcggcgacgaacgcgccgccgatgaggccgcctgctcggccatgcgccacgcgctgaacggcctgtccatggacggcgtcatcgtcaatggcgagggcgacgattccacccagccgctgcacaccggcgagaaggtgggcaacggcaaagggcccaaggtcgatatcgtgctgaccgcgctggagggccgctccatctgcgcgcgcggcgcccacaacgcgctgtcggtggtggccatgaccgaggaaggcagcttcctcaaagtgccgcagcattcctatatggaaaagatcgtggtgggcgcgggcatgccttcgagcatcatcgatctcgactccaccccagaggaaaatctgtcgcgcatcgccaaggccaagggcgtcaccctgtcggaactgaccgtcagcgtgctggaccgcccccgccatggcgagctgatcgagcgcctctatgccgccggtgtgcgggtcatgctgttcgacgacggcgacgtgtcgggcgccctggccgctggcctgcccgattccggcgtggacgtctatatgggctcgggcggcgccgcccagggcgtgctggccgccgccgggctgaaatgcctgggggcccagatgcaatgccgcctgctgtgccggtccgaccaggatcatgcggcggcgcgccgggtcggcattgccgatacaaggcgcaagtggaatatcgaggacatggtgcgcggcgaggtcatgttcgccgccacgggcatcaccgacggccatgtgctgaaaggcgcccgcttggctcccaacaaccgggcggaaagccattccctggtcatgcgctcggttaccggcaccatccgctacttaagcgtccagcacgatctcagccggagccacctgcccgcatga

SEQ ID NO: 125736 - protein, 330 aa, Magnetospirillum magnetotacticum MS-1
MSIHTATLPVLDRNLALEVVRVTEASALAAARQTGRGDERAADEAACSAMRHALNGLSMDGVIVNGEGDDSTQPLHTGEKVGNGKGPKVDIVLTALEGRSICARGAHNALSVVAMTEEGSFLKVPQHSYMEKIVVGAGMPSSIIDLDSTPEENLSRIAKAKGVTLSELTVSVLDRPRHGELIERLYAAGVRVMLFDDGDVSGALAAGLPDSGVDVYMGSGGAAQGVLAAAGLKCLGAQMQCRLLCRSDQDHAAARRVGIADTRRKWNIEDMVRGEVMFAATGITDGHVLKGARLAPNNRAESHSLVMRSVTGTIRYLSVQHDLSRSHLPA

SEQ ID NO: 125737 - DNA, 999 bp, Actinobacillus pleuropneumoniae serovar 1 str. 4074
  CDS (1)..(999): transl_table=11
atgaaacgtgctatttcttttgagttttctcgggtaacggaagctgccgcacttgccgcttacgagtggatcggtcgaggtgataaaaatgccgccgacgatgcggcggtaaaagcgatgcgcttagttatgaataaaatggaaatacgcggcgaaatcgtaattggtgaaggcgagattgatgaagcgccgatgctgtatatcggtgaaaaagtaggtcgttctcagcctgaagataaagaagtggcaattgcggttgatccgattgacggtactcgtatgacggcgatggggcaagccggggcgttatcggttttagcggcaggtagcaaagaaacgtttctccaagcaccggatatgtatatggaaaaactggtggtggatagcgaagcaaaaggtatgatcgacttggatctgccgcttgagcaaaatattcgccgtgttgcgtctaaaaaaggcaaattgcttacacaaatgacggtggcaatcttggcgaaaccgcgtcacgatgaaattattaaaaccgtgcagaaattaggtgtaaaagttatggcgattcctgacggcgacgttgccgccgcagtacaatgttgcttaccggatagcgatttggatttagtttatggtatcggcggtgcgccggaaggagtggttgccgccgctgcggttcgcgctttaggcggcgatattcaaggtcgccttattcctcgtaatcaagtcaagggtaattcgccggaaaatcttttcgccgcagaaaaagagctttctcgctgtgcgcaaatgaatgtaccggttaataaagtattaaaattggaagacttggtacgtgacgataatgtgttgtttgccgcaacgggtattactaccggcgatttgttaaaaggtgtgcaacgtaagggcagtatgatgtttaccgaaacgttattaattcgcggtcgttcccgtacgattcgtaaattagcttcttatcacgatatttctcgtttatctgaagattaa

SEQ ID NO: 125738 - protein, 332 aa, Actinobacillus pleuropneumoniae serovar 1 str. 4074
MKRAISFEFSRVTEAAALAAYEWIGRGDKNAADDAAVKAMRLVMNKMEIRGEIVIGEGEIDEAPMLYIGEKVGRSQPEDKEVAIAVDPIDGTRMTAMGQAGALSVLAAGSKETFLQAPDMYMEKLVVDSEAKGMIDLDLPLEQNIRRVASKKGKLLTQMTVAILAKPRHDEIIKTVQKLGVKVMAIPDGDVAAAVQCCLPDSDLDLVYGIGGAPEGVVAAAAVRALGGDIQGRLIPRNQVKGNSPENLFAAEKELSRCAQMNVPVNKVLKLEDLVRDDNVLFAATGITTGDLLKGVQRKGSMMFTETLLIRGRSRTIRKLASYHDISRLSED

SEQ ID NO: 125739 - DNA, 1041 bp, Fusobacterium nucleatum subsp. vincentii ATCC 49256
  CDS (1)..(1041): transl_table=11
atgaaaagagaactagctttggaatttgcaagagttacagaagcagcagcacttgctgcatataaatgggttggtagggggaaaaaagaatcagctgaccaagctggtgttgatgctatgagaactatgcttaatagacttgcaattgatggagaaatagtaataggagaaggagaaattgatgaagctcctatgttatatataggagaaaaagttggtcaaatctataatgaagaagaaaaagattcagttacttatgttgaccctgttgatattgctgttgaccctgtggaagggactagaatgactgctcaaggacaaccaaatgctattactgtgttagcagttggtaaaaaaggaagttttttaaaagctcctgatatgtatatggaaaaactaattgttggtccagaagcaaaagggaagatagatttatcaaaacctcttgaagataatattcatgctgttgcaaaagcattaaataaagagttaaaagatttaatgatagttgttttagataaaccaagacataaagaattaataaaagatttacaagctatgggaataaaagtttatgctctaccagatggagatgttgctggttcaatacttacttgtatgatagattcagatgtggatatgctttatggtgttggaggagctcctgagggagttatttctgctgctgttataagagccttaggtggagatatgcaagcaagattaaaacttagaagtgaagttaaaggtgcaactctagaaaatgataaaatatctaaatttgaaaaattaagatgtgaggaacaaggattaaaagttggagaaatcttaaaacttgatgatttagcaaaagatgatgaaataattttttctgctactggtatcacaggtggagatttattagaaggtgtaaaaaggaaaggaaatattgctaggactcaaactcttgttgtaagaggtttatcaaaaacaattagatatataaattctatacataatttagattttaaagatgaaaaaattactcacttggtaaaataa

SEQ ID NO: 125740 - protein, 346 aa, Fusobacterium nucleatum subsp. vincentii ATCC 49256
MKRELALEFARVTEAAALAAYKWVGRGKKESADQAGVDAMRTMLNRLAIDGEIVIGEGEIDEAPMLYIGEKVGQIYNEEEKDSVTYVDPVDIAVDPVEGTRMTAQGQPNAITVLAVGKKGSFLKAPDMYMEKLIVGPEAKGKIDLSKPLEDNIHAVAKALNKELKDLMIVVLDKPRHKELIKDLQAMGIKVYALPDGDVAGSILTCMIDSDVDMLYGVGGAPEGVISAAVIRALGGDMQARLKLRSEVKGATLENDKISKFEKLRCEEQGLKVGEILKLDDLAKDDEIIFSATGITGGDLLEGVKRKGNIARTQTLVVRGLSKTIRYINSIHNLDFKDEKITHLVK

SEQ ID NO: 125741 - DNA, 1002 bp, Haemophilus influenzae R2846
  CDS (1)..(1002): transl_table=11
atgaatcgagcattagccattgaattttcacgagtaacagaagccgccgctctagcagcttacacgtggcttggtcgaggaaataaaaatgcggcagacgatgcagcggtaaaagcgatgcgttatatgctgaatttgattcatatggacgctgaaatcgttataggagagggcgaaattgatgaagccccaatgctttatattggcgaaaaagtcggttctggcttaggggaattagtttctatcgcagtagatcctattgatggtacacgtatgaccgcaatggggcaatctaatgctatttctgtcttggctgcaggtggcaaaaatacctttttaaaagcacctgatatgtatatggaaaaattagtggtgggttcaaatgtaaaaggcatcattgatttaaatttaccactggaacaaaatcttcgccgcatcgcatctaagctaggaaaatccctttctgaccttaccgtaatggtattagccaaaccacgtcacgatgccgtaattaaacaaatacataacttgggcgcgaaagtattggcaattcctgatggcgatgtggtaggttccgtattgtgttgtttacctgatgctgaagtcgatcttctttatggaattggtggtgcgccagaaggcgtggcagctgctgcagccattcgagcattaggtggcgatatgcaagctcgtttaatcccacgcaatgaagtaaaaagcgacaccgaagaaaataaaaaaattgcagctaatgagattcaacgctgtgcagcactgggcgtaaaagtgaatgaagtgttaaaacttgaagatctcgtgcgtgatgacaatcttgtatttactgcaacaggcattaccaatggcgatttgcttaaaggtatctcccgcaaaggcaatttagccagtactgaaaccattttaattcgaggaaagtcccgcacaattcgtaaaattcaatctattcattatttggatgacctttataaaattttgaatatttag

SEQ ID NO: 125742 - protein, 333 aa, Haemophilus influenzae R2846
MNRALAIEFSRVTEAAALAAYTWLGRGNKNAADDAAVKAMRYMLNLIHMDAEIVIGEGEIDEAPMLYIGEKVGSGLGELVSIAVDPIDGTRMTAMGQSNAISVLAAGGKNTFLKAPDMYMEKLVVGSNVKGIIDLNLPLEQNLRRIASKLGKSLSDLTVMVLAKPRHDAVIKQIHNLGAKVLAIPDGDVVGSVLCCLPDAEVDLLYGIGGAPEGVAAAAAIRALGGDMQARLIPRNEVKSDTEENKKIAANEIQRCAALGVKVNEVLKLEDLVRDDNLVFTATGITNGDLLKGISRKGNLASTETILIRGKSRTIRKIQSIHYLDDLYKILNI

SEQ ID NO: 125743 - DNA, 1002 bp, Haemophilus influenzae R2866
  CDS (1)..(1002): transl_table=11
atgaatcgagcattagccattgaattttcacgagtaacagaagccgccgctctagtagcttacacgtggcttggtcgaggaaataaaaatgcggcagacgatgcagcggtaaaagcgatgcgttatatgctgaatttgattcatatggacgctgaaatcgttataggagagggcgaaattgatgaagccccaatgctttatgttggcgaaaaagtcggttctggcttaggggaattagtttctatcgcagtagatcctattgatggcacacgtatgaccgcaatggggcaatctaatgctatttctgtcttggctgcaggtggcaaaaatacctttttaaaagcacctgatatgtatatggaaaaattagtggtgggttcaaatgtaaaaggcatcattgatttaaatttaccactggaacaaaatcttcgccgcatcgcatctaagctaggaaaatccctttctgaccttaccgtaatggtattagcaaaaccacgtcacgatgctgtaattaaacaaatacataacttgggcgcgaaagtattggcaattcctgatggcgatgtggcaggttctgtgctttgctgcttacctgatgctgaagtcgatcttctttatggaattggtggtgcgccagaaggcgtggcagctgctgcagccattcgagcattaggtggtgatatgcaagctcgtttaatcccacgcaatgaagtaaaaagcgataccgaagaaaataaaaaaattgcagctaatgaaattcaacgctgtgcagcattgggcgtaaaagtgaatgaagtgttaaaacttgaagatctcgtgcgtgatgacaatcttgtatttactgcaacaggcattaccaatggcgatttgcttaaaggtatctcccgcaaaggcaatttagccagtactgaaaccattttaattcgaggaaaatcccgcacaattcgtaaaattcaatctattcattatttggatgacctttataaaattttgaatatttag

SEQ ID NO: 125744 - protein, 333 aa, Haemophilus influenzae R2866
MNRALAIEFSRVTEAAALVAYTWLGRGNKNAADDAAVKAMRYMLNLIHMDAEIVIGEGEIDEAPMLYVGEKVGSGLGELVSIAVDPIDGTRMTAMGQSNAISVLAAGGKNTFLKAPDMYMEKLVVGSNVKGIIDLNLPLEQNLRRIASKLGKSLSDLTVMVLAKPRHDAVIKQIHNLGAKVLAIPDGDVAGSVLCCLPDAEVDLLYGIGGAPEGVAAAAAIRALGGDMQARLIPRNEVKSDTEENKKIAANEIQRCAALGVKVNEVLKLEDLVRDDNLVFTATGITNGDLLKGISRKGNLASTETILIRGKSRTIRKIQSIHYLDDLYKILNI

SEQ ID NO: 125745 - DNA, 948 bp, Bacillus cereus G9241
  CDS (1)..(948): transl_table=11
atggagttagtacgtgtaacagaggctgcagctttatcatcagcgcgttggatgggacgcgggaaaaaggatgaggcagacggtgcagcaacatcagctatgcgtgatgtatttgatacaattccgatgaaaggtacagttgtaattggtgaaggtgaaatggatgaagcaccaatgctatatatcggagaaaaattaggtacaggatatggtccacgtgtagacgttgcagttgatcctttagaagggacaaacattgtagcagctggtgggtggaatgctcttgctgttattgcaattgcagatcacggtaatttgttacatgctcctgacatgtacatggataaaatcgcggttggcccagaagcggttggggcggtcgatattgatgcgcctattatcgataacttacgtgcagttgcgaaagcgaaaaacaaagatattgaagatgttgtagcgacagttttaaaccgtccacgtcatcaagcaattattgaagaaattcgtaaagctggtgctcgcattaaattgattaatgatggagacgtagctggcgcaatcaacaccgcatttgatcgtacaggtgtagatattttattcggatctggtggtgcgcctgagggtgtattagcggcagttgcattaaaatgtttaggtggcgagattcacgggaaattattaccacaaaacgaagctgaattggcgcgttgcaaaaagatgggcatagaagacatcaaccgcatccttcgcatggaggacttagtaaaaggtgacgatgcaatcttcgcagcaacaggcgtaacagacggagaactattacgcggcgttcaatttaaaggtagcgtaggaacaacacaatctcttgttatgcgtgcaaaatcaggcacagtacgcttcgtagacggacgtcatagcttaaataaaaaaccaaacttggttattaaataa

SEQ ID NO: 125746 - protein, 315 aa, Bacillus cereus G9241
MELVRVTEAAALSSARWMGRGKKDEADGAATSAMRDVFDTIPMKGTVVIGEGEMDEAPMLYIGEKLGTGYGPRVDVAVDPLEGTNIVAAGGWNALAVIAIADHGNLLHAPDMYMDKIAVGPEAVGAVDIDAPIIDNLRAVAKAKNKDIEDVVATVLNRPRHQAIIEEIRKAGARIKLINDGDVAGAINTAFDRTGVDILFGSGGAPEGVLAAVALKCLGGEIHGKLLPQNEAELARCKKMGIEDINRILRMEDLVKGDDAIFAATGVTDGELLRGVQFKGSVGTTQSLVMRAKSGTVRFVDGRHSLNKKPNLVIK

SEQ ID NO: 125747 - DNA, 1038 bp, Crocosphaera watsonii WH 8501
  CDS (1)..(1038): transl_table=11
ttggaaagcacactaggtttagaaattattgaagttgtcgaacaagcggcgatcgcttcagccaaatggatgggtaaaggcgagaaaaatactgctgacgaagtagcagtagaagccatgcgcgaaagaatgaacaaaattcatatgcgtggccggatcgtcattggagaaggagaacgggatgatgctcccatgctctatatcggtgaagaagttggcatttgtacccaggaagatgccaaaaatgtctgtaacccagaagaattgattgaaattgacatcgctgttgacccctgtgaaggaaccaacctggttgcttacggacaaaacggttctatggctgtattggctatttctgaaaaaggcggtttatttgctgcccctgacttctacatgaagaagttagccgctcctcctgcagcgaaaggtcacgttgacatcaataaatcagctaccgaaaatctccaaatcttaggagactgcttagaacgtagcgttgaggaattagtagttgtggtgatggatcgtcctcgtcacaaagaattaattcaagaaattcgtgcggctggcgcaagagttcgtctcatcagcgatggtgacgtttctgctgctatttcctgtgggttcgctggaaccaatattcacgccttaatgggtattggtgctgctcctgaaggggtaatttcagccgctgccatgcgttgtttaggcggtcacttccaaggacaattaatttatgatcctgaagtggtcaaaaccggattaattggagaaagccgtgacggaaacttggctcgtctcaaagagatgggtatcgaagaccctgacagggtttacaccgatagtgaattagccagtggtgaaactgtcttatttgctgcttgtggtattactccaggaaccttaatggaaggtgttcgcttcttccacggtggtgccagaacccaaagtttggttatctccagtcagtctcagacagcgcgctttgtagataccatccatatccaagaacagcctaagtatatcgaactcaaataa

SEQ ID NO: 125748 - protein, 345 aa, Crocosphaera watsonii WH 8501
MESTLGLEIIEVVEQAAIASAKWMGKGEKNTADEVAVEAMRERMNKIHMRGRIVIGEGERDDAPMLYIGEEVGICTQEDAKNVCNPEELIEIDIAVDPCEGTNLVAYGQNGSMAVLAISEKGGLFAAPDFYMKKLAAPPAAKGHVDINKSATENLQILGDCLERSVEELVVVVMDRPRHKELIQEIRAAGARVRLISDGDVSAAISCGFAGTNIHALMGIGAAPEGVISAAAMRCLGGHFQGQLIYDPEVVKTGLIGESRDGNLARLKEMGIEDPDRVYTDSELASGETVLFAACGITPGTLMEGVRFFHGGARTQSLVISSQSQTARFVDTIHIQEQPKYIELK

SEQ ID NO: 125749 - DNA, 966 bp, Exiguobacterium sibiricum 255-15
  CDS (1)..(966): transl_table=11
atggagagaagtttatcgatggaactcgtacgcgtaacagaggcagcagcactggcttcggcacgctggatggggaagggcttgaaaaacgaggcggatgatgcagcaaccagcgccatgcgtgatgtatttgatacgatcccgatgaaaggaacagtcgtcatcggcgaaggggaaatggatgaggcaccgatgctgtatatcggtgagaaactcggaaatggatacggaccgcgtcttgatgtcgcagttgatccgcttgaggggacgaacatcgtcgccaaaggaacatggggtgcactcgcagttcttgcagtcgcagatgccggtgatttgttacacgcaccggatatgtacatggataaaattgcggtcggaccggaagcagcgggacatatcagcttagatgcgacaatcgaagaaaacatcgctgcagtcgcaaaagcgaaaaacaaagaaatcgaagacgtcgtcgtctcgattcttgaccgggaacgccatgaagaaatcattcaacgtattcgcgcaacaggggcccggattcgtttgattggtgacggagatgtcgcggcagccatcaatacagctttcccgcacaccgggattgatattctgctcggttcaggcggggcgccggaaggtgttcttgcagccgttgccttaaaatgtctcggcggagaacttcaaggccgtctcttgccggcggatgaagcagaagtcgcacgatgcaagaagatgggcatcgaagatccgtcgaaaatccttatgatggatgatcttgtcacgggagatgactgcatcttcgcagcaaccggtgtcacagacagcgagttgatgaaaggtgttcagttcacggcacaaggcggtcaaacgcactcggtcgtcatgcgggcgaagtcgggaacggttcgtttcgttgaaggtattcactcgttcaagaaaaaaccgaagcttgtgattaagtaa

SEQ ID NO: 125750 - protein, 321 aa, Exiguobacterium sibiricum 255-15
MERSLSMELVRVTEAAALASARWMGKGLKNEADDAATSAMRDVFDTIPMKGTVVIGEGEMDEAPMLYIGEKLGNGYGPRLDVAVDPLEGTNIVAKGTWGALAVLAVADAGDLLHAPDMYMDKIAVGPEAAGHISLDATIEENIAAVAKAKNKEIEDVVVSILDRERHEEIIQRIRATGARIRLIGDGDVAAAINTAFPHTGIDILLGSGGAPEGVLAAVALKCLGGELQGRLLPADEAEVARCKKMGIEDPSKILMMDDLVTGDDCIFAATGVTDSELMKGVQFTAQGGQTHSVVMRAKSGTVRFVEGIHSFKKKPKLVIK

SEQ ID NO: 125751 - DNA, 1203 bp, Kineococcus radiotolerans SRS30216
  CDS (1)..(1203): transl_table=11
gtgcaggtagcgcaaacccggccagcggaacccggagcagcacgctcaccacggatcaacgcgcgtcaccggtacgacgaccttcctcgccgtgggctgaggaaagccctgccgcctgcggaagcaccatccatctcgagagacgagcccatggccccccacgacatccaacccctgcgctaccagctgcctgaccgtaacctcggcctggacctgatgcgtgccaccgaggccgcggcgatggcggcgggacagtgggccggacggggagagaagaacagcggcgacgccgcagcggtcgacgccatgcgggaggtgctcgccggggtgtccatgcgcgggcgcatcgtcatcggggagggggagaaggacgaagcgccgatgctgcacaacggtgagctcgtcggggacggcagcggcccgcagatcgacatcgccgtcgaccccgtcgacggcaccaccctgctggccagcggcatgcccaacgccatcgccgtcatcgccgcctccgaccgcggcagcatgtacgacccccgtgacgtcttctacatgcacaagctcgtcgtcggccccgcagcagccggccgcgtcgacatcgacgcccccgtggccgacaccatcgccacggtggccaaggcgaaggcagtgggcggcgccgacatcaccgtcgccatcctggaccgcccgcgtcacgccgggttgatcagcgcggtacgtcaggccggagcgcgcatcaagctcttctccgacggcgacgtcgccgcctccatcgccgcggcgagccccggctcctcgatcgacatcctgctggggatcggcggtactcccgaaggcatcatcaccgcgtgcgccatgaaggccatgggtggacagatccaagctcgcctgcacgccggtgacgacgatgcccgccgccgcgcattggaggccggacacgacctccatcggattttgcacaccgacgacctcgtggctggcgacaacaccttcttcgtcgctaccggcatcaccgacggggacctgctggccggggtccactacgtcccggggggtgcgcggaccagatcgctggtgatgcgctcacgcagcggcaccgtccgctccgtcaccagcgatcactgcctgagcaaggtggagcgctacagcggcggcgcggacctgggcgcggacctgggcgcagatcggggtgcggacccgctgtag

SEQ ID NO: 125752 - protein, 400 aa, Kineococcus radiotolerans SRS30216
MQVAQTRPAEPGAARSPRINARHRYDDLPRRGLRKALPPAEAPSISRDEPMAPHDIQPLRYQLPDRNLGLDLMRATEAAAMAAGQWAGRGEKNSGDAAAVDAMREVLAGVSMRGRIVIGEGEKDEAPMLHNGELVGDGSGPQIDIAVDPVDGTTLLASGMPNAIAVIAASDRGSMYDPRDVFYMHKLVVGPAAAGRVDIDAPVADTIATVAKAKAVGGADITVAILDRPRHAGLISAVRQAGARIKLFSDGDVAASIAAASPGSSIDILLGIGGTPEGIITACAMKAMGGQIQARLHAGDDDARRRALEAGHDLHRILHTDDLVAGDNTFFVATGITDGDLLAGVHYVPGGARTRSLVMRSRSGTVRSVTSDHCLSKVERYSGGADLGADLGADRGADPL

SEQ ID NO: 125753 - DNA, 1041 bp, Kineococcus radiotolerans SRS30216
  CDS (1)..(1041): transl_table=11
ttgtcccagaacacctcgcccttgctcccccccgccctggccgtcggcaccgaggcccccgaccgcaacctcgccatggagctggtccgggtcaccgaggccgccgccatggccgggggccgctgggtggggcgcggtgacaagaacaaggccgacggcgccgccgtcaacgccatgcgcaccctcatcgggaccgtctccatgaacggcaccgtcgtcatcggcgagggcgagaaggacaacgcgcccatgctcttcaacggcgagcgcgtcggcgacggcaccggcgcggagtgcgacgtcgcggtggaccccatcgacgggacgacgctgaccgcgcgcggcatgcccaacgccgtggccgtcctcgccgtcgccgagcgcggcaccatgtacgacccgtccgcggtgttctacatggacaagctcgccgtgggtcccgaggccgccgacgtcgtcgacatccgcctgcccgtgcgggagaacatccgccgcctggccaaggcgaagaaccgctgggtggaggacatcaccgtctgcatcctcgaccgcccccgccacgcgaagctggccgacgaggtccgcgacgccggtgcgcgcatcaagttcatctccgacggcgacgtcgccggggcggtcatggccgcccgcgagggcaccggcgtggacctgctgctgggcatcggcggcacccccgagggcatcatcaccgcctgcgccatgcactgcctgggcggggcgatccaggggcgcctggccccgcgcgacgacgacgagaagcagaaggccctcgacgccggccacgacctcgacgccgtcctcgacaccaaggccctggtggccagcgacaacgtctacttcgtcgtcaccggcatcaccgacggcgagctcgtcgacggcgtccgctaccgcggcgacgtcatcacgacctcgagcatcgtcatgcgctccaagtccggcacgatccgcaaggtcgacagcgagcaccagctctcgaagctgcgcgcctactccgcggtcgacttcaccggcccgcgctga

SEQ ID NO: 125754 - protein, 346 aa, Kineococcus radiotolerans SRS30216
MSQNTSPLLPPALAVGTEAPDRNLAMELVRVTEAAAMAGGRWVGRGDKNKADGAAVNAMRTLIGTVSMNGTVVIGEGEKDNAPMLFNGERVGDGTGAECDVAVDPIDGTTLTARGMPNAVAVLAVAERGTMYDPSAVFYMDKLAVGPEAADVVDIRLPVRENIRRLAKAKNRWVEDITVCILDRPRHAKLADEVRDAGARIKFISDGDVAGAVMAAREGTGVDLLLGIGGTPEGIITACAMHCLGGAIQGRLAPRDDDEKQKALDAGHDLDAVLDTKALVASDNVYFVVTGITDGELVDGVRYRGDVITTSSIVMRSKSGTIRKVDSEHQLSKLRAYSAVDFTGPR

SEQ ID NO: 125755 - DNA, 966 bp, Roseovarius nubinhibens ISM
  CDS (1)..(966): transl_table=11
atgtccgccgccaccaccgattttgacgaccgtatgctgtcgctgggtcttgcccgcgtttccgaacaggcggcgcttgcctgcgcgcatctgatcgggcgcggcgatgaaaaggccgccgatcaggccgccgtcaacgccatgcgcgaagagcttggcaagctggccatcgccggtgtcgtggtcatcggcgaaggtgaacgcgacgaggcgccgatgctctatatcggcgaagaggtcggcaccggtgaaggcccgggcgtcgatattgcgctcgacccgctcgaaggcaccacgctgaccgccaaggccatgcccaacgcgctgaccgtgatcgccatggcaccgcgcggcagcctgctgcacgcgcccgacgtctatatggaaaaactggccatcgggccgggctatgacaaggatgtggtgagcctcgagatgagcccgcgcgagcgtgtcgaagcgctggccaaggccaagggcgtcaagccctccgagatcaccgtttgtattctcgaacgcccccgccacgaagacatgatcgccgaagtgcgcgaaaccggcgcggccgtgttcctcatccccgatggggatgtggccggtgtcatccactgcgccgaagcccgcctgaccggcatcgacatgtatatgggcaccggcggcgcccccgaaggcgtgctcgcagcctcggcgctcaaatgcatgggcggtcagatctggggccgtctgctgttccgcaacgacgacgaaaaaggccgcgcgaccaaggccgggatcaccgatttcgaccgtgtctattcgcgcgatgaaatggtcaccggcgatgtaatctttgccgcgacaggcgtcaccgacggttcgctcgcctcaggcatcaaatcgcgccccggctatgtggaaaccgaaaccgtgctgatgcgctcgaaatccggctcgctgcgccgcatggtctatcgcaagccggtgtga

SEQ ID NO: 125756 - protein, 321 aa, Roseovarius nubinhibens ISM
MSAATTDFDDRMLSLGLARVSEQAALACAHLIGRGDEKAADQAAVNAMREELGKLAIAGVVVIGEGERDEAPMLYIGEEVGTGEGPGVDIALDPLEGTTLTAKAMPNALTVIAMAPRGSLLHAPDVYMEKLAIGPGYDKDVVSLEMSPRERVEALAKAKGVKPSEITVCILERPRHEDMIAEVRETGAAVFLIPDGDVAGVIHCAEARLTGIDMYMGTGGAPEGVLAASALKCMGGQIWGRLLFRNDDEKGRATKAGITDFDRVYSRDEMVTGDVIFAATGVTDGSLASGIKSRPGYVETETVLMRSKSGSLRRMVYRKPV

SEQ ID NO: 125757 - DNA, 1005 bp, Prochlorococcus marinus str. MIT 9211
  CDS (1)..(1005): transl_table=11
gtggatcgcacattaattcaagaaattctcgaggttgttgaacaggcagccatagcatctgctcggcttaccggcttgggtcaaaaggacgaggcagatgcagcagctgtcgaagcaatgcgcaaccgcatgggacaaatccaaatgcaaggtcgaattgttattggagagggcgaaagggacgaagcccccatgctttatataggagaagaagtcgggagtggaagtggccctggagttgattttgctgttgacccttgtgaaggaactaatctatgtgcaaataatcagagaggctcaatggctgtattggctgcctcagatagaggaggactctttaatgctccagacttttatatgaagaaacttgctgctcctccagcggcaagaggaaaggttgatatcaggaattctgcgacagaaaacatcaaaatactctctgaatgccttggtttgaaagctgaagaattaacaattgttgtaatggatcgtgcaagacataaggaacttatctctgaaatacgttcaactggtgcaagagttcagcccatttctgatggtgatgttcaggctgcaatcgcttgtggattcgctggtacaggtactcattgccttatgggtataggagctgcaccagagggtgtaatctcagctgctgccatgagagcacttggagggcatttccaaggacaacttgtatatgatccagctatagctatgacaagtgaatgggcagactatacaaaagaaggcaatattgaacgtttaaatgagatgggtataaccgatatagacaaaatttatgaagcaaacgaattggcttcaggtgaaaatgttgtttttgctggaagtggaattactgacggtttgctttttcatggcgttaagtttgaaaatgattgcactcgaactagtagccttgtaataagtacccttgataatactgccagatttacaaactcagtattcatcaaagatggtgctaaaagcattgctttgaactga

SEQ ID NO: 125758 - protein, 334 aa, Prochlorococcus marinus str. MIT 9211
MDRTLIQEILEVVEQAAIASARLTGLGQKDEADAAAVEAMRNRMGQIQMQGRIVIGEGERDEAPMLYIGEEVGSGSGPGVDFAVDPCEGTNLCANNQRGSMAVLAASDRGGLFNAPDFYMKKLAAPPAARGKVDIRNSATENIKILSECLGLKAEELTIVVMDRARHKELISEIRSTGARVQPISDGDVQAAIACGFAGTGTHCLMGIGAAPEGVISAAAMRALGGHFQGQLVYDPAIAMTSEWADYTKEGNIERLNEMGITDIDKIYEANELASGENVVFAGSGITDGLLFHGVKFENDCTRTSSLVISTLDNTARFTNSVFIKDGAKSIALN

SEQ ID NO: 125759 - DNA, 1041 bp, Erythrobacter sp. NAP1
  CDS (1)..(1041): transl_table=11
atgaacacccctactgacacagatgtgctggcggcaaaagagcctgaagattcaaacgcgatcgaccgtgttttggtcctggagatggttcgcgtgaccgaggccgctgcggtcgccgcagcgcagctgatcggacgcggggacgagaaggccgctgatgccgctgcggtagaagcgatgcgccgcgctttcgacacgctttacatggatggcaccgtcgtaatcggcgaaggcgaacgcgacgaagcgccgatgctctatatcggcgagaaggtcggcatgggcgcagatggcggcaaggctccgaagatcgacatcgcgctcgacccgctcgaaggcaccactatcaccgccaaggctggccccaacgcgcttgccgttctggcagcagcggagaagggcgaccttctcaatgcgcccgacgtctacatggacaagctcgcggttggccccggccttcctgccgacgtgatcgaccttgcgaagtctccgaccgagaacgtgcaagcagttgcggcagccaagggcgtcgagccaagcgcgatcaatgtctgcgtcctcgaccgcccgcgccatgccgacctcatcgcagagctacgcgcgctcggttgcggcgtttacctgatcggcgatggcgacgttgcaggcgtgatcgccgtgaccgatcaggacaccgggatcgacatgtatatgggtcagggcggagcacccgaaggcgtgttggccgctgccgcgcttcgctgtgtcggcggacagttcaatggccgcctcgtcttccgcaacgacgatgaaaaggcgcgcgcgaagaagtggggcatcgaggacctgggtcgcatctacaagctcgacgatcttgcgaaaggcgattgcatctttgcagccaccggcgtgaccgacggctcactgctggacggcgtgaagaagcgccgcaagtcaacgggcgcaacgatcatgaccaccgaaagcgtcgtgatgcgcgcatcctcaggcacggtaaggtggatcaagggcgagcaccgcatcactccgcaccggagttga

SEQ ID NO: 125760 - protein, 346 aa, Erythrobacter sp. NAP1
MNTPTDTDVLAAKEPEDSNAIDRVLVLEMVRVTEAAAVAAAQLIGRGDEKAADAAAVEAMRRAFDTLYMDGTVVIGEGERDEAPMLYIGEKVGMGADGGKAPKIDIALDPLEGTTITAKAGPNALAVLAAAEKGDLLNAPDVYMDKLAVGPGLPADVIDLAKSPTENVQAVAAAKGVEPSAINVCVLDRPRHADLIAELRALGCGVYLIGDGDVAGVIAVTDQDTGIDMYMGQGGAPEGVLAAAALRCVGGQFNGRLVFRNDDEKARAKKWGIEDLGRIYKLDDLAKGDCIFAATGVTDGSLLDGVKKRRKSTGATIMTTESVVMRASSGTVRWIKGEHRITPHRS

SEQ ID NO: 125761 - DNA, 1005 bp, Synechococcus sp. RS9917
  CDS (1)..(1005): transl_table=11
gtggatcgcactctcatccaggaaatactcgaggtcgtggagcaggcggccatcgcctccgctcgcctcaccggtctcggcaagaaggatgaagccgatgccgctgctgtggaggccatgcggcagcgcatgggccagatccagatgcagggccggatcgtgatcggggaaggcgagcgtgacgaagcgccgatgctctacatcggtgaagaagtgggcagcggaacgggccccggtgtcgacttcgccgttgacccctgcgaaggcaccaacctctgcgccaacaaccagcgcggttcgatggccgtgctcgcggcttccgatcgcggtggtctgttcaatgctcccgacttctatatgaagaagctggctgctcctccggccgccaagggcaaggtggacatccgcaagtcggccaccgaaaacatcaagatcctcagcgagtgcctcggcctggcggtgagcgagctcacgatcgtggtgatggatcgggcccgccacaaggatctgatcgctgagatccgcgccaccggcgcccgtgtgcagcccatctccgatggtgatgtgcaagcggccatcgcctgtggcttcgccggcactggcacccactgcctgatgggcatcggcgccgcccccgagggggtgatctccgcggctgccatgcgcgccctcggcggtcactttcagggccagctcgtctacgaccccgccgtcgcccaaaccaaggagtgggccgatctcaccaaggagggcaacctggcccgcctggccgagatgggcatcagcgaccccgacaagatctatgaagccgaggagctcgcctccggtgagcatgtggtgttcgccggcagcggcatcaccgacggcctcctgttccacggcgttaagttcgagaaggactgcacccgcaccagcagcctggtgatcagcaatctcgacaacacctgccgcttcaccaacacggtgcacatcaaggacggcgcccagagcatcgctctgagctga

SEQ ID NO: 125762 - protein, 334 aa, Synechococcus sp. RS9917
MDRTLIQEILEVVEQAAIASARLTGLGKKDEADAAAVEAMRQRMGQIQMQGRIVIGEGERDEAPMLYIGEEVGSGTGPGVDFAVDPCEGTNLCANNQRGSMAVLAASDRGGLFNAPDFYMKKLAAPPAAKGKVDIRKSATENIKILSECLGLAVSELTIVVMDRARHKDLIAEIRATGARVQPISDGDVQAAIACGFAGTGTHCLMGIGAAPEGVISAAAMRALGGHFQGQLVYDPAVAQTKEWADLTKEGNLARLAEMGISDPDKIYEAEELASGEHVVFAGSGITDGLLFHGVKFEKDCTRTSSLVISNLDNTCRFTNTVHIKDGAQSIALS

SEQ ID NO: 125763 - DNA, 1005 bp, Synechococcus sp. WH 5701
  CDS (1)..(1005): transl_table=11
gtggatcgcaccctcattcaggaactgctcgaagtcgtcgagcaggccgccatcgcctccgcccacctcaccgggctcggcaagaaagatgaggccgatgccgccgccgttgaagcgatgcgcacccgcatgggctccatcgccatgcagggccggatcgtgatcggcgagggcgagcgggatgaggcccccatgctctacatcggtgaggaagtgggcagcggcactggccccggcgtcgatttcgccgtggatccctgcgagggcaccaatctctgcgccaacgcccaggacggctcgatggcggtgctggccgcctccgaccgcggcggactgttcaacgcccccgacttctacatgaagaagctggctgcacccccggccgccaagggcaaggtggacatccgcaagagcgccaccgagaacatcgccatcctgagcgaatgcctgggcatgcccgccagcgatctgacgatcgtggtgatggaccgcgcccgccacaaggacctgatcgcggagatccgcgccaccggcgcccgggtgaagccgatcagcgacggtgacgttcaagccgcgattgcctgcggtttcgccggcaccggcacccactgcctgatgggcatcggcgccgcaccagaaggcgtgatctccgctgctgccctgcgctgcctcggcgcccatttccagggccagctggtgtatgaccccgccattgcccagaccagcgagtgggccgactacaccaaggaaggcaacatcgagcggctcaactcgatgggcatcaccgacatcgacaaggtctatgaggccgaagagctggcttccggtgagaacgttgtgtttgccggcagtggcatcacccccggcctgctgttcaaaggggtggtgttcgagcgcgactgcacccgcaccagcagcctgatcatcagctcgctcgactcctcggcccgcttcaccgatacggtgcacatcaagcccggcgcccagagcgtcgccctgcgctga

SEQ ID NO: 125764 - protein, 334 aa, Synechococcus sp. WH 5701
MDRTLIQELLEVVEQAAIASAHLTGLGKKDEADAAAVEAMRTRMGSIAMQGRIVIGEGERDEAPMLYIGEEVGSGTGPGVDFAVDPCEGTNLCANAQDGSMAVLAASDRGGLFNAPDFYMKKLAAPPAAKGKVDIRKSATENIAILSECLGMPASDLTIVVMDRARHKDLIAEIRATGARVKPISDGDVQAAIACGFAGTGTHCLMGIGAAPEGVISAAALRCLGAHFQGQLVYDPAIAQTSEWADYTKEGNIERLNSMGITDIDKVYEAEELASGENVVFAGSGITPGLLFKGVVFERDCTRTSSLIISSLDSSARFTDTVHIKPGAQSVALR

SEQ ID NO: 125765 - DNA, 1005 bp, Synechococcus sp. WH 7805
  CDS (1)..(1005): transl_table=11
gtggatcgcactctcatccaggaaattctcgaggtcgttgagcaggcggctatcgcctccgcccgcctcactggtctcggcaaaaaggatgaagccgatgctgctgccgttgaggccatgcgacagcgcatgggaacaatccaaatgcagggccgcatcgtgatcggtgagggcgagcgtgatgaggctcccatgctctacatcggcgaagaggtcggcagcggcactggtcctggtgtcgacttcgctgttgacccctgtgaaggtacgaatctgtgcgccaacaatcagaggggctcgatggccgtcctggctgcttctgatcgtggtggccttttcaacgctccagacttctatatgaagaagctcgctgcacctccggctgcgaaaggcaaggtggatatccgcaaatcggccactgaaaacatcaaaatcctcagcgaatgcctggggatggcggccagtgagctcaccatcgtggtgatggatcgtgctcgccacaaagatctgattgctgagatccgcgccaccggcgcccgtgttcagcccatttcagacggtgatgttcaggctgcgatcgcctgtggatttgctggcacaggaacccattgcctgatgggcatcggtgctgctcctgagggcgtgatttctgcggcggccatgcgcgcccttggcggccacttccagggtcagctcgtttacgaccccgcggttgctcagaccaaggagtgggcggatctcaccaaggaaggcaacctcgcccgcttggctgaaatgggcatcgccgatcccgataaaatttatgaggctgaggaattggcctctggtgagcatgtggtgtttgccggcagtggcatcactgatggcctcctattccatggcgttaagttcgagtcggactgcacccgaacgagcagcttggtgatcagcaacctggacaacacctgccgcttcaccaacacggtgcacatcaaggacggcgcccagagcatcgcgctgagctga

SEQ ID NO: 125766 - protein, 334 aa, Synechococcus sp. WH 7805
MDRTLIQEILEVVEQAAIASARLTGLGKKDEADAAAVEAMRQRMGTIQMQGRIVIGEGERDEAPMLYIGEEVGSGTGPGVDFAVDPCEGTNLCANNQRGSMAVLAASDRGGLFNAPDFYMKKLAAPPAAKGKVDIRKSATENIKILSECLGMAASELTIVVMDRARHKDLIAEIRATGARVQPISDGDVQAAIACGFAGTGTHCLMGIGAAPEGVISAAAMRALGGHFQGQLVYDPAVAQTKEWADLTKEGNLARLAEMGIADPDKIYEAEELASGEHVVFAGSGITDGLLFHGVKFESDCTRTSSLVISNLDNTCRFTNTVHIKDGAQSIALS

SEQ ID NO: 125767 - DNA, 1008 bp, Photobacterium sp. SKA34
  CDS (1)..(1008): transl_table=11
atgaaacgcgatttagcaatggcattctcacgggttacagaaggggctgcactggcaggctataaatggcttggtcgtggcgataaaaatgctgctgataatgctgcggtagaagtgatgcgcattctacttaatcaaactgaaatcaatggtgaaatcgtaattggtgaaggcgaaattgatgaagcgccaatgctctacatcggtgaaaaagtgggttgtggtggcgatgctattgatattgcagtagatcccattgaaggaacacgcatgacagcgatgggacaaaataatgcccttgctgtattagctgctggtgagaaagggagctttctaaaggcacctgatatgtacatggaaaaactggtggttggccctgctgcaaaaggtgtgattgatcttgataaaccactcgttaataacttaacggctattgctgatgctctgggtaaatcattacaagatttagtcgtgatcacccttgccaagcctcgtcatgatgaaacgattaagcaaatgcaagcgatcggtgttcgtgtctttgccgtgcctgatggcgatgtagcggcatctattctaacttgcatgccagatagtgaagttgacgtaatgtactgtattggtggtgcgccagaaggtgttgtttccgccgccgcgatccgtgcattaggcggtgacatgcaggcgcgtttacttcctcgtcatgaggtcaaaggagatactacagaaaaccgcgaactcggtgagattgaaattcgccgttgttgcgaaatgggtattaaaaccaacacattattacgtattgaagatatggcaaaaagcgataacgtgatttttgcagggacaggtataaccaaaggtgacttactagaaggcattcatcgtcaaggaaatatcgcgacaactgaaaccttattgatccgtggtcagtgccgtacgattcgtcgtattaaatcaacccattaccttgatcgtaaagatgacatcgtaaaatcgcacattatctag

SEQ ID NO: 125768 - protein, 335 aa, Photobacterium sp. SKA34
MKRDLAMAFSRVTEGAALAGYKWLGRGDKNAADNAAVEVMRILLNQTEINGEIVIGEGEIDEAPMLYIGEKVGCGGDAIDIAVDPIEGTRMTAMGQNNALAVLAAGEKGSFLKAPDMYMEKLVVGPAAKGVIDLDKPLVNNLTAIADALGKSLQDLVVITLAKPRHDETIKQMQAIGVRVFAVPDGDVAASILTCMPDSEVDVMYCIGGAPEGVVSAAAIRALGGDMQARLLPRHEVKGDTTENRELGEIEIRRCCEMGIKTNTLLRIEDMAKSDNVIFAGTGITKGDLLEGIHRQGNIATTETLLIRGQCRTIRRIKSTHYLDRKDDIVKSHII

SEQ ID NO: 125769 - DNA, 990 bp, Xanthobacter autotrophicus Py2
  CDS (1)..(990): transl_table=11
atgcgcgttgcccggatgccccaggtcctcgaccgtcgcctgtccctggacatggctcaggtgaccgaacgctgcgcggtggccgccgcccggctgcgcggccgcggcgacgagcaggccgccgaccttgccgccatggcggcctgccaccgggagctcagcctcattccggtctccggcaccgtggtgatcggcgagggcatcgaggacgaatgcgagcagctcttcgtcggcgaaaagctgggcgccggcggtgccgaggtggacctcgccgttgacgcgctggaaggctccacgctctgcgccaagaacatggaaggctcgctctgcgtgctggtgatcgccgagcgcggctccctgctgaaggtgcccgacgcctacatggagaagctggcgatcggccccggctatccggaaggcatcgtctccctcgcccagaccccgcaggagaacattcaggcgctggcggacgccaagggcgtgccgacctccgagatcaccgccctcatcctcgatcgtccgcgccatgcgccgctggtggaggctgtgcgcaagaccggcgccgccatcaagctcatcaccgacggcgacgtggcgggagtgatccacaccaccaatccgcacgagagtggcatcgacatctatctcggcctcggcggcgcggccgagggcatcctggcggcggcggccctgcgctgcatcggcggccagatggaaggccgcctggtgctcgacaccgagaagaagcgagcccaggccaagaccctcggcatccgcgacggcgccaagatctacaagctggaagaaatggtgcgcggcgactgcctggtggccgccaccggcgtcaccgacggcgcgctcctgaagggcgtgcgcttcagccgcgaggtgatcgaaaccgacaccatcgtgctgcgcgcggccaccggcacggtgcgccggataaccaccgagcaccgcgacttccgcaaattccgtatggaaagctga

SEQ ID NO: 125770 - protein, 329 aa, Xanthobacter autotrophicus Py2
MRVARMPQVLDRRLSLDMAQVTERCAVAAARLRGRGDEQAADLAAMAACHRELSLIPVSGTVVIGEGIEDECEQLFVGEKLGAGGAEVDLAVDALEGSTLCAKNMEGSLCVLVIAERGSLLKVPDAYMEKLAIGPGYPEGIVSLAQTPQENIQALADAKGVPTSEITALILDRPRHAPLVEAVRKTGAAIKLITDGDVAGVIHTTNPHESGIDIYLGLGGAAEGILAAAALRCIGGQMEGRLVLDTEKKRAQAKTLGIRDGAKIYKLEEMVRGDCLVAATGVTDGALLKGVRFSREVIETDTIVLRAATGTVRRITTEHRDFRKFRMES

SEQ ID NO: 125771 - DNA, 993 bp, Desulfitobacterium hafniense DCB-2
  CDS (1)..(993): transl_table=11
atgaataatgaaatggccatggaaagggaactcaccatggagtttgcccgggttacagaggcagcagcgctggcttcggcccgctgggttggccgcgggaataaagaagccgcagatgatgcggcagtacaagccatgcgctccgtctttgacaccattcgtatgcagggaacggtggtcattggcgaaggggaaatggatgaagcccccatgctctatatcggtgaaaaagtgggaagcggcgaagctccggaattggatgtggccgtggatcccctggaaggaacgaatagtgtcgccaagggcttagccggtgctattgctgtggttgctattgccagaaaaggcggtctcctgcatgccccggatatgtatatggacaaaatcgccgtcggccccctggccaaaggcaaaatacacttggatgcccctgtccaggagaatttggccaatgtagcccgggctctgggcaagagtatggatgaccttaccgtagttattctggaccgtccccgtcatgagaagatcattcatgacgtccgggaggcgggcgcccggattcgcctgatcacggatggtgatgtatctccggcggtggcttgtgctattgaaggaaccggggtcgatgtgatgatgggaatcggaggagccccggaaggggtactggctgcagctgcgctgcggtgtctgggcggagagatgcagggaaggctttggccggagaatgaagaggatgttctgcgggcccagaagctgggcgtcagtgatgtcgctaaattgttaacgatggatgatctggtctgctctgatgatgtcttctttgcagccaccggtatcaccgaaggcccgctgctcaaaggggtgcattttacttcccagggagctctgacccatactgtggtgatgcgtggaaaaacggggacagtgcgctttattgaggcgcggcatcgttttgacaaaaagcccgcctatgccatgaagggtgctgtgtag

SEQ ID NO: 125772 - protein, 330 aa, Desulfitobacterium hafniense DCB-2
MNNEMAMERELTMEFARVTEAAALASARWVGRGNKEAADDAAVQAMRSVFDTIRMQGTVVIGEGEMDEAPMLYIGEKVGSGEAPELDVAVDPLEGTNSVAKGLAGAIAVVAIARKGGLLHAPDMYMDKIAVGPLAKGKIHLDAPVQENLANVARALGKSMDDLTVVILDRPRHEKIIHDVREAGARIRLITDGDVSPAVACAIEGTGVDVMMGIGGAPEGVLAAAALRCLGGEMQGRLWPENEEDVLRAQKLGVSDVAKLLTMDDLVCSDDVFFAATGITEGPLLKGVHFTSQGALTHTVVMRGKTGTVRFIEARHRFDKKPAYAMKGAV

SEQ ID NO: 125773 - DNA, 1005 bp, Synechococcus sp. RS9916
  CDS (1)..(1005): transl_table=11
gtggatcagaccctcattcaggaaattctcgagatcgtcgagcaggccgccatcgcttccgcttcgctctccggcaaaggcctgaaagatgaagcggatgcattggctgtcgatgccatgcgcaagcgcatgaatcaaattcagatgcagggccgcatcgtgatcggtgagggggaacgtgacgaagcccccatgctttacatcggagaagaggtcggcactggcactggccctggcgttgatttcgccgttgacccttgcgaaggcaccaacctctgcgcgttcaaccagcgcggctccatggctgtcctcgccgcttccgaccgtggtggtctgttcaacgcccccgacttctacatgaagaagctggctgctcctccggccgccaagggcaaggtggacatccgcaagtcggccactgagaacatcaagatcctcagcgagtgcctgggtcttcccgtcgacgagctgaacatcgttgtgatggaccgtgctcgtcacaaggatctgatcgctgaaatccgtgccaccggtgctcgcatccagcccatctccgatggtgatgtgcaggccgccatcgcctgcggtttcgccggcaccggaacccactgcctgatgggcatcggcgccgctcctgagggtgtgatctccgctgcggccatgcgtgctcttggcggccacttccaaggtcagctggtctacgaccctgccattgctcagacctccgaatgggctgacatgaccaaagagggcaacctggcgcgtcttgctgagatgggcatcgccgatcccgacaaggtctatgaagctgaggagctggcctgcggcgagcatgtttgtttcgctggcagcggcatcaccgatggcctgctcttcaacggcgttaagttcgaaaaggactgcacccgcacgagcagcctggtgatcagcaacctcgacaacacctgccgcttcaccaacaccgtgcacatcaaggacggcgcccagagcatcgctctgagctga

SEQ ID NO: 125774 - protein, 334 aa, Synechococcus sp. RS9916
MDQTLIQEILEIVEQAAIASASLSGKGLKDEADALAVDAMRKRMNQIQMQGRIVIGEGERDEAPMLYIGEEVGTGTGPGVDFAVDPCEGTNLCAFNQRGSMAVLAASDRGGLFNAPDFYMKKLAAPPAAKGKVDIRKSATENIKILSECLGLPVDELNIVVMDRARHKDLIAEIRATGARIQPISDGDVQAAIACGFAGTGTHCLMGIGAAPEGVISAAAMRALGGHFQGQLVYDPAIAQTSEWADMTKEGNLARLAEMGIADPDKVYEAEELACGEHVCFAGSGITDGLLFNGVKFEKDCTRTSSLVISNLDNTCRFTNTVHIKDGAQSIALS

SEQ ID NO: 125775 - DNA, 1008 bp, Vibrio sp. Ex25
  CDS (1)..(1008): transl_table=11
atgaaacgcgatttagcaatggcattttcccgtgtgactgaaggtgcagctttggctggttacaaatggcttggccgtggcgataaaaatgcagccgatggcgcagctgttgaagttatgcgcaccctactgaacaaaacagatatcagtggtgaaattgtcattggtgagggtgaaatcgatgatgcgccaatgctatacattggtgagcaagtgggtattggtggtgatgaagtggatatcgctgtcgacccgattgaagggacgcgcatgacggcaatggggcaatcaaacgcactagccgtacttgccgcaggtgagaaaggcagctttcttaaagcgccagatatgtacatggaaaaactggttgttggccctggtgcaaaaggcgtaattgatttagaaaagccgttaaaagagaacctagagaacgtagcaaaagccctgaacaaaccacttgataccctagtcgttattacccttgcaaaacctcgccacgatgacgttattgcagaaatgcaagcaatgggcgtacgtgtctttgcggtgcctgatggtgacgtggctgcctctattctgacttgtatgccagacagtgaagtggacatgatgtactgtattggcggcgcgccagaaggggtcgtctcagccgcggtgattcgagcgctagatggtgacatgcacggtcgcctgctccctcgtcatgaagtaaaaggcgatactgaagaaaaccgcatttacggcgcagacgaactaaaacgctgtgatgaaatgggtgtaaaagcgaatgttgtcctcaaaatggaagacatggcacgcagcgacaacgtggtattctcagcaacaggcatcactaaaggtgacttactagaaggcatctctcgccaaggcaatatcgcaaccacagaaacgctgctcgtgcgtggtcgatgccgtactattcgtcgcattaagtcgactcactacctagatcgtaaagatccagaagtgcgtgatattattctttaa

SEQ ID NO: 125776 - protein, 335 aa, Vibrio sp. Ex25
MKRDLAMAFSRVTEGAALAGYKWLGRGDKNAADGAAVEVMRTLLNKTDISGEIVIGEGEIDDAPMLYIGEQVGIGGDEVDIAVDPIEGTRMTAMGQSNALAVLAAGEKGSFLKAPDMYMEKLVVGPGAKGVIDLEKPLKENLENVAKALNKPLDTLVVITLAKPRHDDVIAEMQAMGVRVFAVPDGDVAASILTCMPDSEVDMMYCIGGAPEGVVSAAVIRALDGDMHGRLLPRHEVKGDTEENRIYGADELKRCDEMGVKANVVLKMEDMARSDNVVFSATGITKGDLLEGISRQGNIATTETLLVRGRCRTIRRIKSTHYLDRKDPEVRDIIL

SEQ ID NO: 125777 - DNA, 984 bp, Heliobacillus mobilis
  CDS (1)..(984): transl_table=11
atgtacagagaactggcgctcgaatttgcccgtgtcaccgaagcggccgccctggcttcggcccgctggatgggccgaggcgacaaaaacgctgccgatgatgcggcgaccgaagccatgcgtgccatgttcgatacgatcaacatccggggcaccgtcgtcatcggcgagggtgaaatggatgaagcgccgatgctctacatcggtgagaaagtcggtttagggaacggcggaatcgagctggatatcgctgtcgatccgctggaaggaacgaacatcgtcgccaaagggttaagtggggctatcgccgtgctggcggccgctcataaaggctgcctgctccatgccccggacatgtatatgaataagatcgtcgtcggtcccgaagcggccggatgcatccacatcgacgctccggtcgaggaaaacctcaataatgtggctaaggcgctcggaaaagaagtggaacaactcagcgtcgtcatcctggatcgtccccgccatcatgacctgatcagccgctgtcgaacagccggagctcggattcaactgatcaccgacggcgacgtcgctcccgctgtggctaccgcttttcccgattccggggtggacatcatgatgggaatcggcggcgctccggaaggggttatcgctgcggctgctattcgctgcctcggtggggagatgcaaggacgcctcgttccggagacggaggaagaagaagcgcgctgccgggccatgggtttagaagatccccgcaagatccttttgctcgatgatatggttcggggagacggagtcatcttcgcggcgacgggcatcaccgacgggagcctgctcaaaggggttaagttcacctcccaaggcgcccggacccataccgtcgtcattcgcggacgaaccggaacgattcgatttatcgatgcgctgcatagactggataaaaagccgaacttcggaagaggtcgatgcagtcaaaaatag

SEQ ID NO: 125778 - protein, 327 aa, Heliobacillus mobilis
MYRELALEFARVTEAAALASARWMGRGDKNAADDAATEAMRAMFDTINIRGTVVIGEGEMDEAPMLYIGEKVGLGNGGIELDIAVDPLEGTNIVAKGLSGAIAVLAAAHKGCLLHAPDMYMNKIVVGPEAAGCIHIDAPVEENLNNVAKALGKEVEQLSVVILDRPRHHDLISRCRTAGARIQLITDGDVAPAVATAFPDSGVDIMMGIGGAPEGVIAAAAIRCLGGEMQGRLVPETEEEEARCRAMGLEDPRKILLLDDMVRGDGVIFAATGITDGSLLKGVKFTSQGARTHTVVIRGRTGTIRFIDALHRLDKKPNFGRGRCSQK

SEQ ID NO: 125779 - DNA, 1068 bp, Mycobacterium leprae
  CDS (1)..(1068): transl_table=11
atgacagctgagggcgacggctcgttcaaacccggtccgccgacggagcggcgtggtgaagcgccagaccgcaacctggccatggaacttgtccgggttaccgaagccggtgccatggccgccggccggtgggtgggccgcggcaacaaggagggcggtgacggcgcggccgtcgatacgatacgggaactggtgaacacagtctcgatgcgcggtgtcgttgtcatcggcgaaggcgagaaagaccatgcgccgatgctgtacaacggcgaggaagtcggcaacggtgacggcccagactgcgactttgcagtcgatccgattgacggcaccacgctgatgagcaaaggcatgcccaacgccatctcggtgctggcggtcgccgatcggggcgcgatgttcgacccttcggcagtgttttacatgaacaagatcaccgttggtcctgacgccgcgcacgtcctagacatcaccgcgccgatcggcgagaacatccgggcggtcgccaaggtcaaagacttatcagtgcgggacatgaccgtgtgcatactggatcggccacgacacgcccagttgatcgacgacgtccgcgccaccggcgccaggatccggctaatcaccgacggcgacgtcgccggcgcaatctccgcgtgccgcccccaatcgggcaccgacatgttggctggtatcggcggcaccccggaaggcatcatcgcagccgcggcgatccggtgcatgggcggggcgatccaagctcaactagcgccacgcgatgacgtcgaacgccgcaaggctctcgacgccggctacaacctagaccggattttgactaccgaagatctggtttccggagaaaacgtcttcttctgcgccactggggtcaccgacggcgatctgctcaagggggtgcgctactacgctggcggctgcaccacccagtcaatcgtgatgcgttcgaagtcgggcaccgttcggatgatcgaggcctaccaccggctctctaaactcaacgaatactccgccatcgacttcaccggcgataacaacgccgcctaccccctgccgtaa

SEQ ID NO: 125780 - protein, 355 aa, Mycobacterium leprae
MTAEGDGSFKPGPPTERRGEAPDRNLAMELVRVTEAGAMAAGRWVGRGNKEGGDGAAVDTIRELVNTVSMRGVVVIGEGEKDHAPMLYNGEEVGNGDGPDCDFAVDPIDGTTLMSKGMPNAISVLAVADRGAMFDPSAVFYMNKITVGPDAAHVLDITAPIGENIRAVAKVKDLSVRDMTVCILDRPRHAQLIDDVRATGARIRLITDGDVAGAISACRPQSGTDMLAGIGGTPEGIIAAAAIRCMGGAIQAQLAPRDDVERRKALDAGYNLDRILTTEDLVSGENVFFCATGVTDGDLLKGVRYYAGGCTTQSIVMRSKSGTVRMIEAYHRLSKLNEYSAIDFTGDNNAAYPLP

SEQ ID NO: 125781 - DNA, 966 bp, Escherichia coli
  CDS (1)..(966): transl_table=11
atgatgtccctggcgtggccattatttcgcgttacggaacaggcagcgttggctgcctggccgcaaaccggatgtggcgacaaaaataaaattgatggcctggcggtcaccgcgatgcgccaggcattaaacgacgtcgcttttcgtggacgagtggttatcggcgaaggagaaattgaccatgcgccgatgctgtggattggcgaagaggtgggcaaaggcgatgggccagaagtcgatatcgcggttgatcccattgaaggcacgcggatggtggcgatggggcagagcaatgcgctggcggtcatggctttcgcccctcgagatagcctgttacatgcgcccgatatgtatatgaaaaagctggttgttaatcggctggcggcgggcgcgattgatctgtctttgcctctgacggacaacctgcgcaacgtggcgaaagcgttaggcaaaccgctggataagctgcgcatggttacgctggataaaccgcgcctgagtgccgcgattgaggaagcaacacagctgggcgtgaaggtttttgccctgccggatggcgatgtcgccgccagcgtgctgacctgctggcaggataatccttacgatgtgatgtacaccatcggcggtgcgccagaaggcgtgatttctgcctgtgccgttaaagcattaggcggggatatgcaggccgagctgattgacttttgccaggctaaaggggattacacggaaaatcggcagattgcagagcaggagcgcaagcgttgcaaggcaatgggcgttgacgttaaccgtgtgtactcgctcgatgaactggtgagggggaacgatatcctctttagcgctacgggcgtgacgggcggtgagctggtgaacggtatccaacagacggcgaatggggtgcggacgcagacattactgatcggcggcgcggaccaaacgtgtaatataatagactccctgcattga

SEQ ID NO: 125782 - protein, 321 aa, Escherichia coli
MMSLAWPLFRVTEQAALAAWPQTGCGDKNKIDGLAVTAMRQALNDVAFRGRVVIGEGEIDHAPMLWIGEEVGKGDGPEVDIAVDPIEGTRMVAMGQSNALAVMAFAPRDSLLHAPDMYMKKLVVNRLAAGAIDLSLPLTDNLRNVAKALGKPLDKLRMVTLDKPRLSAAIEEATQLGVKVFALPDGDVAASVLTCWQDNPYDVMYTIGGAPEGVISACAVKALGGDMQAELIDFCQAKGDYTENRQIAEQERKRCKAMGVDVNRVYSLDELVRGNDILFSATGVTGGELVNGIQQTANGVRTQTLLIGGADQTCNIIDSLH

SEQ ID NO: 125783 - DNA, 966 bp, Bacillus subtilis
  CDS (1)..(966): transl_table=11
atggaaagaagtttatcaatggaattggtacgtgtgacagaagctgcggcattggcatcagcaagatggatgggccggggaaaaaaagatgaggctgatgaagcggcaacaagtgcaatgagagacgtttttgatacagtgccgatgaaagggaccgttgtaatcggtgaaggggaaatggacgaagcgccaatgctgtatatcggggaaaaactcggaaacgggtacggccctcgcgttgatgtcgcagttgaccctcttgaaggcacaaacatcttagcaagcggcggctggaacgcgctgacggttatcgcggtcgcagaccatggcacgcttctgaatgctcctgacatgtatatgcaaaaaatcgcagtcggtccggaagcggtgggctgcattgacatcgaagcacctgtcattgacaaccttaaagcggtggcaaaagcgaaaaacaaggacgttgaggacgtcgttgccacaattttaaaccgtgaaagacacgcaaaaatcatttccgagcttcgtgaggccggcgccagaatcaaattgatcaatgacggcgatgtcgcaggcgccatcaacacggctttcgaccacacgggcgttgatatcctgttcggatcaggcggcgctcctgagggtgtgctttccgctgttgcgctaaaagcactcggcggagaaatcattggtaaacttcttccgcaaagcgaagaagaaatcactcgctgtcacaaaatgggccttgatttaagcaaagtgcttcgcatggaagaccttgtgaagggtgatgacgcgatttttgcagctacaggggttactgacggcgagctgttaaaaggagttcaattcaaaggctctgtcggtacaactgaaagcttagttatccgtgcaaaatcgggcactgttcgtttcgttgacggcagacacagcttgaaaaagaaaccaaatcttgtaatccgtccataa

SEQ ID NO: 125784 - protein, 321 aa, Bacillus subtilis
MERSLSMELVRVTEAAALASARWMGRGKKDEADEAATSAMRDVFDTVPMKGTVVIGEGEMDEAPMLYIGEKLGNGYGPRVDVAVDPLEGTNILASGGWNALTVIAVADHGTLLNAPDMYMQKIAVGPEAVGCIDIEAPVIDNLKAVAKAKNKDVEDVVATILNRERHAKIISELREAGARIKLINDGDVAGAINTAFDHTGVDILFGSGGAPEGVLSAVALKALGGEIIGKLLPQSEEEITRCHKMGLDLSKVLRMEDLVKGDDAIFAATGVTDGELLKGVQFKGSVGTTESLVIRAKSGTVRFVDGRHSLKKKPNLVIRP

SEQ ID NO: 125785 - DNA, 23 bp, Artificial sequence
  primer
atgagacgagaacttgccatcga

SEQ ID NO: 125786 - DNA, 25 bp, Artificial sequence
  primer
ttagaggatgtgcacctgcatttcc

SEQ ID NO: 125787 - protein, 344 aa, Artificial sequence
  consensus sequence
  Variant (2)..(2): Xaa in position 2 is any amino acid
  Variant (4)..(4): Xaa in position 4 is any amino acid
  Variant (7)..(7): Xaa in position 7 is any amino acid
  Variant (9)..(13): Xaa in position 9 to 13 is any amino acid
  Variant (15)..(15): Xaa in position 15 is any amino acid
  Variant (17)..(20): Xaa in position 17 to 20 is any amino acid
  Variant (23)..(24): Xaa in position 23 to 24 is any amino acid
  Variant (27)..(27): Xaa in position 27 is any amino acid
  Variant (31)..(39): Xaa in position 31 to 39 is any amino acid
  Variant (41)..(42): Xaa in position 41 to 42 is any amino acid
  Variant (49)..(49): Xaa in position 49 is any amino acid
  Variant (51)..(51): Xaa in position 51 is any amino acid
  Variant (57)..(57): Xaa in position 57 is any amino acid
  Variant (60)..(60): Xaa in position 60 is any amino acid
  Variant (63)..(68): Xaa in position 63 to 68 is any amino acid
  Variant (69)..(81): Xaa in position 69 to 81 is any or no amino acid
  Variant (83)..(83): Xaa in position 83 is any amino acid
  Variant (88)..(89): Xaa in position 88 to 89 is any amino acid
  Variant (92)..(94): Xaa in position 92 to 94 is any amino acid
  Variant (96)..(103): Xaa in position 96 to 103 is any amino acid
  Variant (105)..(105): Xaa in position 105 is any amino acid
  Variant (107)..(110): Xaa in position 107 to 110 is any amino acid
  Variant (112)..(119): Xaa in position 112 to 119 is any amino acid
  Variant (120)..(120): Xaa in position 120 is any or no amino acid
  Variant (123)..(123): Xaa in position 123 is any amino acid
  Variant (125)..(128): Xaa in position 125 to 128 is any amino acid
  Variant (130)..(141): Xaa in position 130 to 141 is any amino acid
  Variant (142)..(151): Xaa in position 142 to 151 is any or no amino acid
  Variant (153)..(173): Xaa in position 153 to 173 is any amino acid
  Variant (174)..(174): Xaa in position 174 is any or no amino acid
  Variant (176)..(176): Xaa in position 176 is any amino acid
  Variant (179)..(181): Xaa in position 179 to 181 is any amino acid
  Variant (183)..(185): Xaa in position 183 to 185 is any amino acid
  Variant (187)..(188): Xaa in position 187 to 188 is any amino acid
  Variant (191)..(196): Xaa in position 191 to 196 is any amino acid
  Variant (201)..(215): Xaa in position 201 to 215 is any amino acid
  Variant (216)..(218): Xaa in position 216 to 218 is any or no amino acid
  Variant (220)..(220): Xaa in position 220 is any amino acid
  Variant (222)..(223): Xaa in position 222 to 223 is any amino acid
  Variant (228)..(229): Xaa in position 228 to 229 is any amino acid
  Variant (231)..(231): Xaa in position 231 is any amino acid
  Variant (233)..(236): Xaa in position 233 to 236 is any amino acid
  Variant (239)..(243): Xaa in position 239 to 243 is any amino acid
  Variant (245)..(253): Xaa in position 245 to 253 is any amino acid
  Variant (254)..(267): Xaa in position 254 to 267 is any or no amino acid
  Variant (269)..(272): Xaa in position 269 to 272 is any amino acid
  Variant (274)..(292): Xaa in position 274 to 292 is any amino acid
  Variant (293)..(295): Xaa in position 293 to 295 is any or no amino acid
  Variant (297)..(297): Xaa in position 297 is any amino acid
  Variant (299)..(299): Xaa in position 299 is any amino acid
  Variant (301)..(301): Xaa in position 301 is any amino acid
  Variant (303)..(303): Xaa in position 303 is any amino acid
  Variant (305)..(305): Xaa in position 305 is any amino acid
  Variant (307)..(308): Xaa in position 307 to 308 is any amino acid
  Variant (310)..(315): Xaa in position 310 to 315 is any amino acid
  Variant (316)..(323): Xaa in position 316 to 323 is any or no amino acid
  Variant (325)..(333): Xaa in position 325 to 333 is any amino acid
  Variant (334)..(335): Xaa in position 334 to 335 is any or no amino acid
  Variant (337)..(337): Xaa in position 337 is any amino acid
  Variant (339)..(343): Xaa in position 339 to 343 is any amino acid
VXEXAAXAXXXXXGXGXXXXADXXAVXAMRXXXXXXXXXGXXVIGEGEXDXAPMLYXGEXVGXXXXXXXXXXXXXXXXXXXDXAVDPXXGTXXXAXXXXXXXXVXAXXXXGXXXXXXXXXYMXKXXXXPXXXXXXXXXXXXXXXXXXXXXXNXXXXXXXXXXXXXXXXXXXXXXRXRHXXXIXXXRXXGAXXXXXXDGDVXXXXXXXXXXXXXXXXXXGXGXXPEGVXXAXAXXXXGGXXXXXLXXXXXXXXXXXXXXXXXXXXXXXRXXXXGXXXXXXXXXXXXXXXXXXXXXXFXAXGXTXGXLXXGXXXXXXXXXXXXXXTXXXXXXXXXXXTXRXXXXXH

SEQ ID NO: 125788 - protein, 37 aa, Artificial sequence
  protein pattern
  Variant (2)..(2): Xaa in position 2 is any amino acid
  Variant (4)..(4): Xaa in position 4 is any amino acid
  Variant (5)..(5): Xaa in position 5 is any or no amino acid
  Variant (7)..(7): Xaa in position 7 is any amino acid
  Variant (8)..(8): Xaa in position 8 is any or no amino acid
  Variant (10)..(10): Xaa in position 10 is any or no amino acid
  Variant (12)..(13): Xaa in position 12 to 13 is any amino acid
  Variant (14)..(14): Xaa in position 14 is Ala, Gly or Ser
  Variant (15)..(15): Xaa in position 15 is Thr or Val
  Variant (16)..(16): Xaa in position 16 is any amino acid
  Variant (17)..(17): Xaa in position 17 is Ala, Gly, Ser, Thr or Val
  Variant (19)..(19): Xaa in position 19 is Glu, Gln or Arg
  Variant (20)..(21): Xaa in position 20 to 21 is any amino acid
  Variant (22)..(22): Xaa in position 22 is Phe, Ile, Leu, Met or Val
  Variant (23)..(28): Xaa in position 23 to 28 is any amino acid
  Variant (29)..(29): Xaa in position 29 is Ala, Gly or Thr
  Variant (30)..(30): Xaa in position 30 is any amino acid
  Variant (31)..(31): Xaa in position 31 is Ile, Met or Val
  Variant (32)..(32): Xaa in position 32 is any amino acid
  Variant (37)..(37): Xaa in position 37 is Glu or Pro
GXGXXKXXAXDXXXXXXMXXXXXXXXXXXXXXIGEGX

SEQ ID NO: 125789 - protein, 25 aa, Artificial sequence
  protein pattern
  Variant (2)..(2): Xaa in position 2 is any amino acid
  Variant (4)..(4): Xaa in position 4 is Ala or Gly
  Variant (5)..(5): Xaa in position 5 is Ala or Thr
  Variant (9)..(9): Xaa in position 9 is Ile or Val
  Variant (10)..(10): Xaa in position 10 is Ala, Ile, Leu or Val
  Variant (11)..(11): Xaa in position 11 is Ala, Ser or Thr
  Variant (13)..(13): Xaa in position 13 is any or no amino acid
  Variant (15)..(19): Xaa in position 15 to 19 is any amino acid
  Variant (20)..(20): Xaa in position 20 is any or no amino acid
  Variant (22)..(24): Xaa in position 22 to 24 is any amino acid
  Variant (25)..(25): Xaa in position 25 is Ala, Gly or Gln
GXGXXPEGXXXAXAXXXXXXGXXXX

SEQ ID NO: 125790 - protein, 13 aa, Artificial sequence
  protein pattern
  Variant (2)..(2): Xaa in position 2 is any amino acid
  Variant (8)..(8): Xaa in position 8 is any amino acid
  Variant (10)..(10): Xaa in position 10 is Glu or Gln
  Variant (11)..(11): Xaa in position 11 is any amino acid
  Variant (12)..(12): Xaa in position 12 is Ile, Leu or Val
DXAPMLYXGXXXG

SEQ ID NO: 125791 - protein, 11 aa, Artificial sequence
  protein pattern
  Variant (3)..(3): Xaa in position 3 is any amino acid
  Variant (6)..(6): Xaa in position 6 is any amino acid
  Variant (8)..(8): Xaa in position 8 is Ile or Leu
  Variant (9)..(10): Xaa in position 9 to 10 is any amino acid
  Variant (11)..(11): Xaa in position 11 is Asp, Gly, Asn, Pro or Ser
PDXYMXKXXXX

SEQ ID NO: 125792 - protein, 36 aa, Artificial sequence
  protein pattern
  Variant (2)..(10): Xaa in position 2 to 10 is any amino acid
  Variant (11)..(12): Xaa in position 11 to 12 is any or no amino acid
  Variant (14)..(19): Xaa in position 14 to 19 is any amino acid
  Variant (20)..(20): Xaa in position 20 is any or no amino acid
  Variant (22)..(22): Xaa in position 22 is Ala or Val
  Variant (23)..(23): Xaa in position 23 is any amino acid
  Variant (24)..(24): Xaa in position 24 is Ile or Val
  Variant (25)..(25): Xaa in position 25 is any amino acid
  Variant (26)..(26): Xaa in position 26 is Ala, Leu or Pro
  Variant (27)..(28): Xaa in position 27 to 28 is any amino acid
  Variant (32)..(32): Xaa in position 32 is Ile, Leu or Val
  Variant (33)..(33): Xaa in position 33 is any amino acid
  Variant (34)..(34): Xaa in position 34 is Ala, Gly or Pro
  Variant (35)..(35): Xaa in position 35 is Ala, Gly, Ser or Val
  Variant (36)..(36): Xaa in position 36 is Ile, Leu, Met or Val
VXXXXXXXXXXXIXXXXXXXGXXXXXXXDGDXXXXX

SEQ ID NO: 125793 - protein, 16 aa, Artificial sequence
  protein pattern
  Variant (2)..(2): Xaa in position 2 is any amino acid
  Variant (3)..(3): Xaa in position 3 is Ala, Gly or Val
  Variant (4)..(4): Xaa in position 4 is Cys, Ser or Thr
  Variant (6)..(6): Xaa in position 6 is Ile, Leu or Val
  Variant (8)..(8): Xaa in position 8 is any amino acid
  Variant (10)..(10): Xaa in position 10 is any amino acid
  Variant (11)..(11): Xaa in position 11 is any or no amino acid
  Variant (13)..(13): Xaa in position 13 is any amino acid
  Variant (14)..(14): Xaa in position 14 is any or no amino acid
  Variant (16)..(16): Xaa in position 16 is Ala, Ile or Val
FXXXGXTXGXXLXXGX

SEQ ID NO: 125794 - protein, 14 aa, Artificial sequence
  protein pattern
  Variant (2)..(2): Xaa in position 2 is Phe, Ile or Val
  Variant (4)..(4): Xaa in position 4 is Leu or Val
  Variant (7)..(7): Xaa in position 7 is any amino acid
  Variant (8)..(8): Xaa in position 8 is Asp or Glu
  Variant (11)..(11): Xaa in position 11 is any amino acid
  Variant (12)..(12): Xaa in position 12 is Ile, Leu or Met
  Variant (13)..(13): Xaa in position 13 is any amino acid
DXAXDPXXGTXXXA

SEQ ID NO: 125795 - DNA, 1161 bp, Escherichia coli; identical to SEQ ID NO: 14114
  CDS (1)..(1161): transl_table=11

SEQ ID NO: 125796 - protein, 386 aa, Escherichia coli; identical to SEQ ID NO: 14115

SEQ ID NO: 125797 - DNA, 1167 bp, Photobacterium profundum
  CDS (1)..(1167): transl_table=11
atgagtgacaagcaacttgccaccatcgctgtgcgcacaggtatcgaatcagacagtcaacacaatgctgttgtaccacctatctatttgacatcgacttatagtttcccaaagctcggtgagttaccgcagtacgattattctcgatcaggcaatcctacgcgtaatatgctagcagatgccttatctgatcttgaaggtggtgcgagtggcgttgtgacgagctgtggaaccgctgcaattaacttgctcgtatcggccttgcttagccctgatgatttaattattgccccgcatgattgttatggtggtacttaccgcctgtttaatacgcgtgctaataaaggcgattttaacgttttatttatcgaccagtcagatcccgtagcgcttactcaagcgctggcgaaaaaacctaaaattgtttgggttgaaacgccatcaaacccgttattacgtgtgattgatgtggaagcattgtgtcaacaagcgaaagcggttggcgcacaggttgccgttgataacacctttctttctccgcttttacagcaacctattaaattaggggctgattttgtggttcactcgacaacaaaatacatcaatggtcattcggatgttgttggtggcgttttaatttcaaaagatgctgaacaagcagaaaacattgcttggtgggcaaattgtattggtgcaacgggtgcaccgtttgatgcttatctaacgttacgtggtttacgtaccttaggtgcaagaatgcggatgcatgaagaaaatggtgccgagatccttaagtatctacaaacaaatgcactggttggtcaaatttatcaccctagtttgcctgagcacccaggtcatgacattgcagcacgtcagcaaaaaggatttggttctatgcttagctttgagctagctggcacctaccgtcaacttgaagtctttgttgaagcgttaacattattctcattggctgaatcattaggtggaaccgaaagtttaattgcgcatccatcaagcatgacacaccgtgctatgtctgatgaagcacaagcagaagccggtattaaaacgtcactgttacgcctttctgttggtttggaagatcctcaagatttaatcaacgatcttgaacaagcatttactctggctgcggaggcggtgtaa

SEQ ID NO: 125798 - protein, 388 aa, Photobacterium profundum
MSDKQLATIAVRTGIESDSQHNAVVPPIYLTSTYSFPKLGELPQYDYSRSGNPTRNMLADALSDLEGGASGVVTSCGTAAINLLVSALLSPDDLIIAPHDCYGGTYRLFNTRANKGDFNVLFIDQSDPVALTQALAKKPKIVWVETPSNPLLRVIDVEALCQQAKAVGAQVAVDNTFLSPLLQQPIKLGADFVVHSTTKYINGHSDVVGGVLISKDAEQAENIAWWANCIGATGAPFDAYLTLRGLRTLGARMRMHEENGAEILKYLQTNALVGQIYHPSLPEHPGHDIAARQQKGFGSMLSFELAGTYRQLEVFVEALTLFSLAESLGGTESLIAHPSSMTHRAMSDEAQAEAGIKTSLLRLSVGLEDPQDLINDLEQAFTLAAEAV

SEQ ID NO: 125799 - DNA, 1182 bp, Bombyx mori; identical to SEQ ID NO: 13390
  CDS (1)..(1182)

SEQ ID NO: 125800 - protein, 393 aa, Bombyx mori; identical to SEQ ID NO: 13391

SEQ ID NO: 125801 - DNA, 1428 bp, Oryza sativa (japonica cultivar-group); identical to SEQ ID NO: 14144
  CDS (1)..(1428)

SEQ ID NO: 125802 - protein, 475 aa, Oryza sativa (japonica cultivar-group); identical to SEQ ID NO: 14145

SEQ ID NO: 125803 - DNA, 1419 bp, Oryza sativa (japonica cultivar-group); identical to SEQ ID NO: 14150
  CDS (1)..(1419)

SEQ ID NO: 125804 - protein, 472 aa, Oryza sativa (japonica cultivar-group); identical to SEQ ID NO: 14151

SEQ ID NO: 125805 - DNA, 1461 bp, Oryza sativa (japonica cultivar-group); identical to SEQ ID NO: 14152
  CDS (1)..(1461)

SEQ ID NO: 125806 - protein, 486 aa, Oryza sativa (japonica cultivar-group); identical to SEQ ID NO: 14153

SEQ ID NO: 125807 - DNA, 1395 bp, Oryza sativa (japonica cultivar-group); identical to SEQ ID NO: 14154
  CDS (1)..(1395)

SEQ ID NO: 125808 - protein, 464 aa, Oryza sativa (japonica cultivar-group); identical to SEQ ID NO: 14155

SEQ ID NO: 125809 - DNA, 1185 bp, Mesorhizobium loti MAFF303099; identical to SEQ ID NO: 13392
  CDS (1)..(1185): transl_table=11

SEQ ID NO: 125810 - protein, 394 aa, Mesorhizobium loti MAFF303099; identical to SEQ ID NO: 13393

SEQ ID NO: 125811 - DNA, 1170 bp, Thermoplasma volcanium GSS1; identical to SEQ ID NO: 13396
  CDS (1)..(1170): transl_table=11

SEQ ID NO: 125812 - protein, 389 aa, Thermoplasma volcanium GSS1; identical to SEQ ID NO: 13397

SEQ ID NO: 125813 - DNA, 1182 bp, Pyrococcus abyssi GE5; identical to SEQ ID NO: 13398
  CDS (1)..(1182): transl_table=11

SEQ ID NO: 125814 - protein, 393 aa, Pyrococcus abyssi GE5; identical to SEQ ID NO: 13399

SEQ ID NO: 125815 - DNA, 1155 bp, Aeropyrum pernix K1; identical to SEQ ID NO: 13400
  CDS (1)..(1155): transl_table=11

SEQ ID NO: 125816 - protein, 384 aa, Aeropyrum pernix K1; identical to SEQ ID NO: 13401

SEQ ID NO: 125817 - DNA, 1239 bp, Arabidopsis thaliana; identical to SEQ ID NO: 13402
  CDS (1)..(1239)

SEQ ID NO: 125818 - protein, 412 aa, Arabidopsis thaliana; identical to SEQ ID NO: 13403

SEQ ID NO: 125819 - DNA, 1326 bp, Arabidopsis thaliana; identical to SEQ ID NO: 13404
  CDS (1)..(1326)

SEQ ID NO: 125820 - protein, 441 aa, Arabidopsis thaliana; identical to SEQ ID NO: 13405

SEQ ID NO: 125821 - DNA, 1293 bp, Thermotoga maritima MSB8; identical to SEQ ID NO: 13406
  CDS (1)..(1293): transl_table=11

SEQ ID NO: 125822 - protein, 430 aa, Thermotoga maritima MSB8; identical to SEQ ID NO: 13407

SEQ ID NO: 125823 - DNA, 1173 bp, Bacillus halodurans C-125; identical to SEQ ID NO: 13410
  CDS (1)..(1173): transl_table=11

SEQ ID NO: 125824 - protein, 390 aa, Bacillus halodurans C-125; identical to SEQ ID NO: 13411

SEQ ID NO: 125825 - DNA, 1110 bp, Pasteurella multocida subsp. multocida str. Pm70; identical to SEQ ID NO: 13412
  CDS (1)..(1110): transl_table=11

SEQ ID NO: 125826 - protein, 369 aa, Pasteurella multocida subsp. multocida str. Pm70; identical to SEQ ID NO: 13413

SEQ ID NO: 125827 - DNA, 1185 bp, Pseudomonas aeruginosa PAO1; identical to SEQ ID NO: 13414
  CDS (1)..(1185): transl_table=11

SEQ ID NO: 125828 - protein, 394 aa, Pseudomonas aeruginosa PAO1; identical to SEQ ID NO: 13415

SEQ ID NO: 125829 - DNA, 1158 bp, Neisseria meningitidis MC58; identical to SEQ ID NO: 13420
  CDS (1)..(1158): transl_table=11

SEQ ID NO: 125830 - protein, 385 aa, Neisseria meningitidis MC58; identical to SEQ ID NO: 13421

SEQ ID NO: 125831 - DNA, 1218 bp, Halobacterium sp. NRC-1
  CDS (1)..(1218): transl_table=11
atggacgacacacctgcgttcgaaaccctcgccgtcagccacggcgaatcaccgcgcgagacgcgccacggcgatgtcgtctcgcccatccacctcgcctcgacgtacgccgtccaggagttggacaccgacctcagcctggagggcgtcgaccccgacgacgggcagttcctgtactcgcgcctcaacaatccgaccagacacgccctcgaacggcgcctcgcagccctcgaaggcggcgaccacggcttcgcgtttggctccggcaccgccgccatcgccaccgccgccttcgccgccgtcgaacccggcgatcacgtcgtcgccttcgacgacctctacgccggcacacggcgcatgctcgaaaccctcttcgaggggaacctcggtgtcgccgtctcgttcgtggacgccaccgacccggacgccgtcgccgacgcgatccgtcccgaaaccgccttcgtctggatggagactcccacaaacccacgcatcaagctctgtgacatcgccgccatcgccgacatcactgacgacgccggcgtcctgttcggtgtcgacaacaccttcctcagcccctacttccaacagcccctggcgctcggcgcggacgtcgttgcccactccacgacgaaatacctcaacggccacagcgacgccgtcggcggcgcactcgtcaccaacaacgacgcgctcgccgacagcgtcgagttcctccagcaggtcggcctcgggaacatgctcgcgccgttcgacgcctacctcgtgttgcgcggcatcaaaaccctcgccccgcggatgcgcgaccacgaggccaacgccctcgccatcgccgaatacctcgccgaccacgaccgcgtgaccgcggttcactaccccggcctcgactcccacccgcaacacgacctcgcggacgcccagcagtccggctacggtggcatcctctcgttcgaactcgacggcgacctcgccgacgccaagcgcttcctcgacgcgctcgacgagttcaacctcgcggtcagcgtcggcggcgtcgaatcactggtggaactccccgccggcatgacccacgaacccatcccgaagcccgaccgcgaagccatgggcatcacggactcgctgatccgcgtgtccgtcggcatcgaagccatcgaggacctcatcgcggatctcgaccgcggcttcgaggcggtccgatcgaccaccccgacagcctaa

SEQ ID NO: 125832 - protein, 405 aa, Halobacterium sp. NRC-1
MDDTPAFETLAVSHGESPRETRHGDVVSPIHLASTYAVQELDTDLSLEGVDPDDGQFLYSRLNNPTRHALERRLAALEGGDHGFAFGSGTAAIATAAFAAVEPGDHVVAFDDLYAGTRRMLETLFEGNLGVAVSFVDATDPDAVADAIRPETAFVWMETPTNPRIKLCDIAAIADITDDAGVLFGVDNTFLSPYFQQPLALGADVVAHSTTKYLNGHSDAVGGALVTNNDALADSVEFLQQVGLGNMLAPFDAYLVLRGIKTLAPRMRDHEANALAIAEYLADHDRVTAVHYPGLDSHPQHDLADAQQSGYGGILSFELDGDLADAKRFLDALDEFNLAVSVGGVESLVELPAGMTHEPIPKPDREAMGITDSLIRVSVGIEAIEDLIADLDRGFEAVRSTTPTA

SEQ ID NO: 125833 - DNA, 1158 bp, Neisseria meningitidis Z2491; identical to SEQ ID NO: 13424
  CDS (1)..(1158): transl_table=11

SEQ ID NO: 125834 - protein, 385 aa, Neisseria meningitidis Z2491; identical to SEQ ID NO: 13425

SEQ ID NO: 125835 - DNA, 1188 bp, Escherichia coli O157:H7 EDL933; identical to SEQ ID NO: 13426
  CDS (1)..(1188): transl_table=11
  misc_feature (47)..(47): s is g or c

SEQ ID NO: 125836 - protein, 395 aa, Escherichia coli O157:H7 EDL933; identical to SEQ ID NO: 13427
  misc_feature (16)..(16): The Xaa at location 16 stands for Ser, or Thr.

SEQ ID NO: 125837 - DNA, 1161 bp, Escherichia coli O157:H7 EDL933; identical to SEQ ID NO: 13428
  CDS (1)..(1161): transl_table=11

SEQ ID NO: 125838 - protein, 386 aa, Escherichia coli O157:H7 EDL933; identical to SEQ ID NO: 13429

SEQ ID NO: 125839 - DNA, 1179 bp, Deinococcus radiodurans R1; identical to SEQ ID NO: 13432
  CDS (1)..(1179): transl_table=11

SEQ ID NO: 125840 - protein, 392 aa, Deinococcus radiodurans R1; identical to SEQ ID NO: 13433

SEQ ID NO: 125841 - DNA, 1131 bp, Sulfolobus solfataricus P2
  CDS (1)..(1131): transl_table=11
ttgaaggacgcgactagagcagtaagggaagacatagatgacttaactggtgctataactactcctatatatcagacttctgcctatcattatcccgagggagaaaaatatagatattctagggaatcaaatcctactgttctagagctagctaagaaaatagtagaacttgagaacgctgagatgggtattgcgttttcttctgggatgggagctatctccactactgccctagcactgctaaagcctggaaatagtgttttggttcatcgtgacatgttcgggaggtcctatcgtttctttacagactaccttaaaaactggggtgttaatgtagaggcatcatatcctgggaacaataatattatagagaaagcaaagtctaagaggtatgatgtaatatttgtggagaatatcacaaatccactattaagggttatagatgtcgctgaattatccaaggtagcaaaggagcaaggaagcatattgattgtagatgcgactttttctaccccaataaatcaaaagccattggagttaggagctgacatagtagtgcacagtgcgtcgaagtttttggctggacataatgacgtaatagcgggattagctgctggttacagtaagtacttaaatgttatagatcaaatgagaaggactttaggaacttctttagatcctcatgcagcatatctaactttgaggggtattaagactcttaaaataaggatggatgttatcaataggaatgcggagcaaatcgctgaatttttagaaggacatcctaaagtcgtaaaagtatattatcctggtcttaagtctcatgtggattacgatatagcgagaaaggttcttaaaggattcggaggcgttttaagttttgaagtaaatggaggtcaagaaagtgcgttaaaagtaatgaaatcacttaagttgataatccctgcacaaacgcttggtggggttaattctgttatatcacatccggccactatgtcacataggacacttagtttagaagaaagaaagatagttgggataactgatagcctcctcagactttccgttggaatagaagatgtaaatgacttgatagaggatctagatagggcattgagcactttatactag

SEQ ID NO: 125842 - protein, 376 aa, Sulfolobus solfataricus P2
MKDATRAVREDIDDLTGAITTPIYQTSAYHYPEGEKYRYSRESNPTVLELAKKIVELENAEMGIAFSSGMGAISTTALALLKPGNSVLVHRDMFGRSYRFFTDYLKNWGVNVEASYPGNNNIIEKAKSKRYDVIFVENITNPLLRVIDVAELSKVAKEQGSILIVDATFSTPINQKPLELGADIVVHSASKFLAGHNDVIAGLAAGYSKYLNVIDQMRRTLGTSLDPHAAYLTLRGIKTLKIRMDVINRNAEQIAEFLEGHPKVVKVYYPGLKSHVDYDIARKVLKGFGGVLSFEVNGGQESALKVMKSLKLIIPAQTLGGVNSVISHPATMSHRTLSLEERKIVGITDSLLRLSVGIEDVNDLIEDLDRALSTLY

SEQ ID NO: 125843 - DNA, 1155 bp, Clostridium acetobutylicum ATCC 824; identical to SEQ ID NO: 13436
  CDS (1)..(1155): transl_table=11

SEQ ID NO: 125844 - protein, 384 aa, Clostridium acetobutylicum ATCC 824; identical to SEQ ID NO: 13437

SEQ ID NO: 125845 - DNA, 1185 bp, Agrobacterium tumefaciens str. C58; identical to SEQ ID NO: 13460
  CDS (1)..(1185): transl_table=11

SEQ ID NO: 125846 - protein, 394 aa, Agrobacterium tumefaciens str. C58; identical to SEQ ID NO: 13461

SEQ ID NO: 125847 - DNA, 1284 bp, Agrobacterium tumefaciens str. C58; identical to SEQ ID NO: 13462
  CDS (1)..(1284): transl_table=11

SEQ ID NO: 125848 - protein, 427 aa, Agrobacterium tumefaciens str. C58; identical to SEQ ID NO: 13463

SEQ ID NO: 125849 - DNA, 1188 bp, Agrobacterium tumefaciens str. C58; identical to SEQ ID NO: 13464
  CDS (1)..(1188): transl_table=11

SEQ ID NO: 125850 - protein, 395 aa, Agrobacterium tumefaciens str. C58; identical to SEQ ID NO: 13465

SEQ ID NO: 125851 - DNA, 1284 bp, Agrobacterium tumefaciens str. C58; identical to SEQ ID NO: 13438
  CDS (1)..(1284): transl_table=11

SEQ ID NO: 125852 - protein, 427 aa, Agrobacterium tumefaciens str. C58; identical to SEQ ID NO: 13439

SEQ ID NO: 125853 - DNA, 1173 bp, Agrobacterium tumefaciens str. C58; identical to SEQ ID NO: 13440
  CDS (1)..(1173): transl_table=11

SEQ ID NO: 125854 - protein, 390 aa, Agrobacterium tumefaciens str. C58; identical to SEQ ID NO: 13441

SEQ ID NO: 125855 - DNA, 1227 bp, Sinorhizobium meliloti 1021; identical to SEQ ID NO: 13442
  CDS (1)..(1227): transl_table=11

SEQ ID NO: 125856 - protein, 408 aa, Sinorhizobium meliloti 1021; identical to SEQ ID NO: 13443

SEQ ID NO: 125857 - DNA, 1155 bp, Thermoplasma acidophilum DSM 1728; identical to SEQ ID NO: 13446
  CDS (1)..(1155): transl_table=11

SEQ ID NO: 125858 - protein, 384 aa, Thermoplasma acidophilum DSM 1728; identical to SEQ ID NO: 13447

SEQ ID NO: 125859 - DNA, 1206 bp, Caulobacter crescentus CB15; identical to SEQ ID NO: 13448
  CDS (1)..(1206): transl_table=11

SEQ ID NO: 125860 - protein, 401 aa, Caulobacter crescentus CB15; identical to SEQ ID NO: 13449

SEQ ID NO: 125861 - DNA, 1146 bp, Haemophilus influenzae Rd KW20; identical to SEQ ID NO: 13450
  CDS (1)..(1146): transl_table=11

SEQ ID NO: 125862 - protein, 381 aa, Haemophilus influenzae Rd KW20; identical to SEQ ID NO: 13451

SEQ ID NO: 125863 - DNA, 1173 bp, Listeria monocytogenes EGD-e; identical to SEQ ID NO: 13456
  CDS (1)..(1173): transl_table=11

SEQ ID NO: 125864 - protein, 390 aa, Listeria monocytogenes EGD-e; identical to SEQ ID NO: 13457

SEQ ID NO: 125865 - DNA, 1173 bp, Listeria innocua Clip11262; identical to SEQ ID NO: 13458
  CDS (1)..(1173): transl_table=11

SEQ ID NO: 125866 - protein, 390 aa, Listeria innocua Clip11262; identical to SEQ ID NO: 13459

SEQ ID NO: 125867 - DNA, 1284 bp, Brucella melitensis 16M
  CDS (1)..(1284): transl_table=11
atgactgcgccgcgcccatcgaagatccgtttgggcaatcatcttcttcatccagaaacgcagatgctgaattatggctacgactcggagctttccgagggcgcggtcaagccgcctgtgtttctcacatcgaccttcgttttcaagacagcggaagacggacgcgatttcttcgatttcgtttcggggcgcaaggagccgccggccggtgtcggggcggggcttgtctattcacgcttcaaccacccgaacagcgagattgtggaggaccgtctggcggtctatgagggggcggaaagtgcagcccttttctcgtccggcatgtccgccattgccaccacgcttttcgcttttgtgcgcccgggcgatgtcatcctgcattcgcagccactttatggcggcacggaaacgcttctggcgaagaccttcttcaattttggcgtggaggctgtcgcttttgcggatggtgttcacgaggccaccatcgagaaagcagccgaagaggcgctggcgaaaggtcgtgtttcggtcattttgatcgaaaccccggccaatccgaccaatagtattgtcgatgtcgcagcggttcgccgcgtggcggagaagattgaagcgcggcagggcagccgcccggtcatcgcctgcgacaataccctgctcgggccggtgttccagaagcctcttgatcacggggccgatctctcggtctattcgctgaccaaatatgtcggcggtcattccgatcttattgcaggggcggtgctgggcgcaaaatccgttgtgcgccaggtaaaggccctgcgcggagcaatcggtacacagctcgatccacattcatgctggatgcttggccgctccctggaaacgctgggcctgcgcatggagcgggctgacagcaatgcccgcgccattgctgaattcctgcgtaatcaccccaaggtggaaaagctgcattatctgccctttgccgatgagcgttccgatatcgcagccttgttcaagcgccaatgtaccggcgctggctcgaccttttccttcgatataaagggcgggcaggctgctgctttccgtttcctgaatgcgctgcaaatcctgaaactcgcggtaagcctcggtggcaccgaatcgcttgcgagccatcccgcggcgatgacgcattcaggtgttccggtcgatgtgcgtgagcggatcggcgtgctggaatcgaccatccgcctttccataggtatcgagcatcccgacgacctgatcgccgatctggcacaggctttggatgcggcctga

SEQ ID NO: 125868 - protein, 427 aa, Brucella melitensis 16M
MTAPRPSKIRLGNHLLHPETQMLNYGYDSELSEGAVKPPVFLTSTFVFKTAEDGRDFFDFVSGRKEPPAGVGAGLVYSRFNHPNSEIVEDRLAVYEGAESAALFSSGMSAIATTLFAFVRPGDVILHSQPLYGGTETLLAKTFFNFGVEAVAFADGVHEATIEKAAEEALAKGRVSVILIETPANPTNSIVDVAAVRRVAEKIEARQGSRPVIACDNTLLGPVFQKPLDHGADLSVYSLTKYVGGHSDLIAGAVLGAKSVVRQVKALRGAIGTQLDPHSCWMLGRSLETLGLRMERADSNARAIAEFLRNHPKVEKLHYLPFADERSDIAALFKRQCTGAGSTFSFDIKGGQAAAFRFLNALQILKLAVSLGGTESLASHPAAMTHSGVPVDVRERIGVLESTIRLSIGIEHPDDLIADLAQALDAA

SEQ ID NO: 125869 - DNA, 1152 bp, Pyrobaculum aerophilum str. IM2; identical to SEQ ID NO: 13468
  CDS (1)..(1152): transl_table=11

SEQ ID NO: 125870 - protein, 383 aa, Pyrobaculum aerophilum str. IM2; identical to SEQ ID NO: 13469

SEQ ID NO: 125871 - DNA, 1101 bp, Pyrococcus furiosus DSM 3638
  CDS (1)..(1101): transl_table=11
atggagcctcttcattatcctatctatttgactgcagtattcaagcagataggggatgcctatcttactgaaagaggtacagagctaaagtattcaagggaagaaaatccaacagtaagaaatttggaagataagcttgctaagctagagaatgctgagaatgccctggcatttaacagtggaatgggggctatctcgactttgttcctatccttgcttaaagctggagacgaaattgttatgtcaatggaggggtatggaaccacaattgaggtaccaaagcttttagaaaaatttggagttagagtaaggcttgcctatccctcagcagaaaaaatttgtgaaactataacgtccaatacaactcttgttttcattgaaacaatgactaacccaactttaaaggtaatcgacgttagggaagttgctaaaaaatgcagagaggaagaaatcactttaatagttgacaacacatttgttacccccatcctctacaggccccttgaagatggagttaatttcgtcgttcatagcttgacaaagtacattgcgggacacaacgatgttactggtggtgtaattctttggaatggaaaattcttaaatgatttatgggactggaggagaagattgggaacgataatccaaccatttgacgcctggatggttgaaagaggcatgagaaccctaaatgttaggtttgaaaagcagagtaaaaatgccttagcaatagcagaattcctgcaggatcatccaaaggttaggaaagtacactacccaggactacctagtgatccttatcatggcatagctaggagattatttaggaaggatctttatgggggagtagtttcttttgacctgggaagtgaaaaaagcgcacttgcattccttagaagcctaaagaaaatatttccctctccctctcttggaggtgtggaaagtcttgcaacttatcctgtaaaaagcgccgtaaagaacatggaaaaagaaactagagaccttcttggaataacggatggtctaattaggctttctgtgggaatagaagaggttgatgagctaatagaggacttagatagggcccttaaggggtgttag

SEQ ID NO: 125872 - protein, 366 aa, Pyrococcus furiosus DSM 3638
MEPLHYPIYLTAVFKQIGDAYLTERGTELKYSREENPTVRNLEDKLAKLENAENALAFNSGMGAISTLFLSLLKAGDEIVMSMEGYGTTIEVPKLLEKFGVRVRLAYPSAEKICETITSNTTLVFIETMTNPTLKVIDVREVAKKCREEEITLIVDNTFVTPILYRPLEDGVNFVVHSLTKYIAGHNDVTGGVILWNGKFLNDLWDWRRRLGTIIQPFDAWMVERGMRTLNVRFEKQSKNALAIAEFLQDHPKVRKVHYPGLPSDPYHGIARRLFRKDLYGGVVSFDLGSEKSALAFLRSLKKIFPSPSLGGVESLATYPVKSAVKNMEKETRDLLGITDGLIRLSVGIEEVDELIEDLDRALKGC

SEQ ID NO: 125873 - DNA, 1173 bp, Schizosaccharomyces pombe 972h-; identical to SEQ ID NO: 13472
  CDS (1)..(1173)

SEQ ID NO: 125874 - protein, 390 aa, Schizosaccharomyces pombe 972h-; identical to SEQ ID NO: 13473

SEQ ID NO: 125875 - DNA, 1314 bp, Corynebacterium glutamicum ATCC 13032; identical to SEQ ID NO: 13474
  CDS (1)..(1314): transl_table=11

SEQ ID NO: 125876 - protein, 437 aa, Corynebacterium glutamicum ATCC 13032; identical to SEQ ID NO: 13475

SEQ ID NO: 125877 - DNA, 1161 bp, Corynebacterium glutamicum ATCC 13032; identical to SEQ ID NO: 13476
  CDS (1)..(1161): transl_table=11

SEQ ID NO: 125878 - protein, 386 aa, Corynebacterium glutamicum ATCC 13032; identical to SEQ ID NO: 13477

SEQ ID NO: 125879 - DNA, 1149 bp, Corynebacterium glutamicum ATCC 13032; identical to SEQ ID NO: 13478
  CDS (1)..(1149): transl_table=11

SEQ ID NO: 125880 - protein, 382 aa, Corynebacterium glutamicum ATCC 13032; identical to SEQ ID NO: 13479

SEQ ID NO: 125881 - DNA, 1182 bp, Drosophila melanogaster; identical to SEQ ID NO: 13484
  CDS (1)..(1182)

SEQ ID NO: 125882 - protein, 393 aa, Drosophila melanogaster; identical to SEQ ID NO: 13485

SEQ ID NO: 125883 - DNA, 1185 bp, Thermoanaerobacter tengcongensis MB4; identical to SEQ ID NO: 13490
  CDS (1)..(1185): transl_table=11

SEQ ID NO: 125884 - protein, 394 aa, Thermoanaerobacter tengcongensis MB4; identical to SEQ ID NO: 13491

SEQ ID NO: 125885 - DNA, 1224 bp, Streptomyces coelicolor A3(2); identical to SEQ ID NO: 13494
  CDS (1)..(1224): transl_table=11

SEQ ID NO: 125886 - protein, 407 aa, Streptomyces coelicolor A3(2); identical to SEQ ID NO: 13495

SEQ ID NO: 125887 - DNA, 1161 bp, Streptomyces coelicolor A3(2); identical to SEQ ID NO: 13496
  CDS (1)..(1161): transl_table=11

SEQ ID NO: 125888 - protein, 386 aa, Streptomyces coelicolor A3(2); identical to SEQ ID NO: 13497

SEQ ID NO: 125889 - DNA, 1185 bp, Methanosarcina mazei Go1
  CDS (1)..(1185): transl_table=11
atggaaaggaaatttaagttcgcaacccaatgcgttcatgcgggagaaaaaccggatccggtattcggagctcatacaactccaatatttcaaacttcaactttcatttttgatagtgttgaacagggagcttcaagatttgcagaagaggaagacgggtatgtctatacgcgcattcccccgaacacgcccacacacgccgtcctgtcagaaaagttcgctgcactcgaaggaggggaagcagggcagacctttgcttcaggaatggcagcaatcactgcagttgctctgacagccctcaaaaagggagaccacctggtctcaactgatgtggtctacggatgcacctacagccttttttcagaaattcttcccgggctcgggatagatgttactttcgtagacacaacagatgcggaaaacgtgagaaaagttctcaggccggagactaaaatggtttttctggaaactcctgccaaccctaccctgaatgtatgtgatatcagaatgatttccgggcttgcaaaagcacagggagccatctgtgttgtggataacacattttccacgccttatttccagaaacctcttcttcttggggcagatatttccctcagcagctgtacaaaatatataggcgggcatgcagatctgcttggcggaatcattgtatgcgacaaagcttttctaaaaaatctggcaaaggttgccggatatacgggcggaacaatgggcttgcacgaagcctggctctgcataagagggctgaaaaccctccatatcaggatggaaagacacgccgagaacgcgctgaaggttgctaacttccttgagtctcatcccgcagttgaatgggtaagataccccgggctttcatcccatccgcagcacgaaatcgcaaaaaaacagatgagcgggtacggagggatgctttctttcggagtaaaggacgggattgatgccggaagcaagctcatgaacagcgtcaggctctgttctctcgcagtaagcctcggggcaactgataccctgattcagcatcctgcttccatgacgcatgcctgcgtcccgaaagaagtaagaggaaaagtgggtattactgatgggcttgtcaggctttccataggaatcgaagaccctgaggacataattgcagacctcaaacaggcgcttgagaaaatttga

SEQ ID NO: 125890 - protein, 394 aa, Methanosarcina mazei Go1
MERKFKFATQCVHAGEKPDPVFGAHTTPIFQTSTFIFDSVEQGASRFAEEEDGYVYTRIPPNTPTHAVLSEKFAALEGGEAGQTFASGMAAITAVALTALKKGDHLVSTDVVYGCTYSLFSEILPGLGIDVTFVDTTDAENVRKVLRPETKMVFLETPANPTLNVCDIRMISGLAKAQGAICVVDNTFSTPYFQKPLLLGADISLSSCTKYIGGHADLLGGIIVCDKAFLKNLAKVAGYTGGTMGLHEAWLCIRGLKTLHIRMERHAENALKVANFLESHPAVEWVRYPGLSSHPQHEIAKKQMSGYGGMLSFGVKDGIDAGSKLMNSVRLCSLAVSLGATDTLIQHPASMTHACVPKEVRGKVGITDGLVRLSIGIEDPEDIIADLKQALEKI

SEQ ID NO: 125891 - DNA, 1218 bp, Xanthomonas campestris pv. campestris str. ATCC 33913; identical to SEQ ID NO: 13500
  CDS (1)..(1218): transl_table=11

SEQ ID NO: 125892 - protein, 405 aa, Xanthomonas campestris pv. campestris str. ATCC 33913; identical to SEQ ID NO: 13501

SEQ ID NO: 125893 - DNA, 1218 bp, Xanthomonas axonopodis pv. citri str. 306; identical to SEQ ID NO: 13502
  CDS (1)..(1218): transl_table=11

SEQ ID NO: 125894 - protein, 405 aa, Xanthomonas axonopodis pv. citri str. 306; identical to SEQ ID NO: 13503

SEQ ID NO: 125895 - DNA, 1143 bp, Staphylococcus aureus subsp. aureus MW2; identical to SEQ ID NO: 13724
  CDS (1)..(1143): transl_table=11

SEQ ID NO: 125896 - protein, 380 aa, Staphylococcus aureus subsp. aureus MW2; identical to SEQ ID NO: 13725

SEQ ID NO: 125897 - DNA, 1143 bp, Chlorobium tepidum TLS; identical to SEQ ID NO: 13506
  CDS (1)..(1143): transl_table=11

SEQ ID NO: 125898 - protein, 380 aa, Chlorobium tepidum TLS; identical to SEQ ID NO: 13507

SEQ ID NO: 125899 - DNA, 1134 bp, Oceanobacillus iheyensis HTE831; identical to SEQ ID NO: 13508
  CDS (1)..(1134): transl_table=11

SEQ ID NO: 125900 - protein, 377 aa, Oceanobacillus iheyensis HTE831; identical to SEQ ID NO: 13509

SEQ ID NO: 125901 - DNA, 1284 bp, Brucella suis 1330
  CDS (1)..(1284): transl_table=11
atgactgcgccgcgcccatcgaagatccgtttgggcaatcatcttcttcatccagaaacgcagatgctgaattatggctacgacccggagctttccgagggcgcggtcaagccgcctgtgtttctcacatcgaccttcgttttcaagacagcggaagacggacgcgatttcttcgatttcgtttcggggcgcaaggagccgccggccggtgtcggggcggggcttgtctattcacgcttcaaccacccgaacagcgagattgtggaggaccgtctggcggtctatgagggggcggaaagtgcagcccttttctcgtccggcatgtccgccattgccaccacgcttttcgcttttgtgcgcccgggcgatgtcatcctgcattcgcagccactttatggcggcacggaaacgcttctggcgaagaccttcttcaattttggcgtggaggctgtcgcttttgcggatggtgttcacgaggccaccatcgagaaagcagccgaagaggcgctggcgaaaggtcgtgtttcggtcattttgatcgaaaccccggccaatccgaccaatagtattgtcgatgtcgcagcggttcgccgcgtggcggagaagattgaagcgcggcagggcagccgcccggtcatcgcctgcgacaataccctgctcgggccggtgttccagaagcctcttgatcacggggccgatctctcggtctattcgctgaccaaatatgtcggcggtcattccgatcttattgcaggggcggtgctgggcgcaaaatccgttgtgcgccaggtaaaggccctgcgcggagcaatcggtacacagctcgatccgcattcatgctggatgcttggccgctccctggaaacgctgggcctgcgcatggagcgggctgacagcaatgcccgcgccattgctgaattcctgcgtaatcaccccaaggtggaaaagctgcattatctgccttttgccgatgagcgttccgatatcgcagccttgttcaagcgccaatgtaccggcgctggctcgaccttttccttcgatataaagggcgggcaggctgctgctttccgtttcctgaatgcgctgcaaatcctgaaactcgcggtaagcctcggtggcaccgaatcgcttgcgagccatcccgcggcgatgacgcattcaggtgttccggtcgatgtgcgtgagcggatcggcgtgctggaatcgaccatccgcctttccataggtatcgagcatcccggcgacctgatcgccgatctggcacaggctttggatgcggcctga

SEQ ID NO: 125902 - protein, 427 aa, Brucella suis 1330
MTAPRPSKIRLGNHLLHPETQMLNYGYDPELSEGAVKPPVFLTSTFVFKTAEDGRDFFDFVSGRKEPPAGVGAGLVYSRFNHPNSEIVEDRLAVYEGAESAALFSSGMSAIATTLFAFVRPGDVILHSQPLYGGTETLLAKTFFNFGVEAVAFADGVHEATIEKAAEEALAKGRVSVILIETPANPTNSIVDVAAVRRVAEKIEARQGSRPVIACDNTLLGPVFQKPLDHGADLSVYSLTKYVGGHSDLIAGAVLGAKSVVRQVKALRGAIGTQLDPHSCWMLGRSLETLGLRMERADSNARAIAEFLRNHPKVEKLHYLPFADERSDIAALFKRQCTGAGSTFSFDIKGGQAAAFRFLNALQILKLAVSLGGTESLASHPAAMTHSGVPVDVRERIGVLESTIRLSIGIEHPGDLIADLAQALDAA

SEQ ID NO: 125903 - DNA, 1161 bp, Shigella flexneri 2a str. 301
  CDS (1)..(1161): transl_table=11
atgacgcgtaaacaggccaccatcgcagtgcgtagcgggttaaatgacgacgaacagtatggttgcgttgtccctcccatccatctttccagcacctataactttaccggatttaatgaaccgcgcgcgcatgattactcgcgtcgcggcaacccaacgcgcgatgtggttcagcgtgcgctggcagaactggaaggcggtgctggcgcagtacttactaataccggcatgtccgcgattcacctggtaacgaccgtctttttgaaacctggcgatctgctggttgcgccgcacgactgctacggcggtagctatcgcctgttcgacagtctggcgaaacgcggttgctatcgcgtgttgtttgttgatcaaggcgatgaacaggcattacgggcagcgctggcagaaaaacccaaactggtactggtagaaagcccaagtaatccattgttacgcgtcgtggatattgcgaaaatctgccatctggcaagggaagtcggggcggtgagcgtggtggataacaccttcttaagcccggcattacaaaatccgctggcattgggtgccgatctggtgttgcattcatgtacgaaatatctgaacggtcactctgacgtggtggctggcgtggtgattgctaaagacccggacgttgtcactgaacttgcctggtgggcaaacaatattggcgtgacgggcggcgcgtttgacagctatctgctgctacgcgggttgcgaacgctggtgccgcgtatggagctggcgcagcgcaacgcgcaggcgattgtgaaatatctgcaaacccagccgttggtgaaaaaactgtatcacccgtcgctgccggaaaatcaggggcatgaaattgccgcgcgtcagcaaaaaggctttggcgcaatgttgagttttgaactggatggcgatgagcagacgctgtgtcgtttcctgggcgggctgtcgttgtttacgctggcggaatcattagggggagtggaaagtttaatctctcacgccgcaaccatgacacatgcaggcatggcaccagaagcgcgtgctgccgccgggatctccgagacgctgctgcgtatctccaccggtattgaagatggcgaagatttaattgccgacctggaaaatggcttccgggctgcaaacaaggggtaa

SEQ ID NO: 125904 - protein, 386 aa, Shigella flexneri 2a str. 301
MTRKQATIAVRSGLNDDEQYGCVVPPIHLSSTYNFTGFNEPRAHDYSRRGNPTRDVVQRALAELEGGAGAVLTNTGMSAIHLVTTVFLKPGDLLVAPHDCYGGSYRLFDSLAKRGCYRVLFVDQGDEQALRAALAEKPKLVLVESPSNPLLRVVDIAKICHLAREVGAVSVVDNTFLSPALQNPLALGADLVLHSCTKYLNGHSDVVAGVVIAKDPDVVTELAWWANNIGVTGGAFDSYLLLRGLRTLVPRMELAQRNAQAIVKYLQTQPLVKKLYHPSLPENQGHEIAARQQKGFGAMLSFELDGDEQTLCRFLGGLSLFTLAESLGGVESLISHAATMTHAGMAPEARAAAGISETLLRISTGIEDGEDLIADLENGFRAANKG

SEQ ID NO: 125905 - DNA, 1182 bp, Shewanella oneidensis MR-1
  CDS (1)..(1182): transl_table=11
atgaccgaaggaaaattagtgactgagcgtcaattagccacattggcagtgcgtcagggtatcgaaagcgatactcaatatggcgccgtggtgccgccaatttacctgtcgacgaattacgctttcgatggtcataaaaatccgcgcgaatttgactacagtcgctccggcaatccgactcgcagtattttaggcgatgccttagccaagttggaaaagggcgcaacgggtgtggtgacttgtactggtatggcagccattaccttagtgaccactttactgggccccgatgatttactggtggtgccccatgattgttacggtggctcttaccgtttattcactaacttggcgaaaaaaggccaatttaaattgctggtggtggatcaaaccgacaaccaagcgcttgcgcaagccatcgcccagcagcctaaaatggtgtggattgaaaccccctctaaccctttgctgcgagtcgtcgatattgaggctatcgcgaaggcgagccatggtgtgggcgcgttagtggtagtggacaacactttcctgtcgccgattttgcagcaaccgctattgctcggcgccgatatcgttatccactccaccacgaaatacattaatggccatagcgatgtggtgggcggcgcggtgatcgccaaagacccccaaattggtgagaccttacattggtggtcaaataccttaggcttaaccggtagcgcgtttgatagttatcaaaccctgcgtggcctgcgtactttggccgtgcgcattcgcgagcaccaacgcaatgctcagcgtattgtggagttactgagtaacagccctgtggtcagtaaagtgtattacccaggtcttgcggatcatcctggccatgccattgccgccaagcaacaaaaaggctttggcgctatgctgagttttgagcttaagggcggtgaggctgaagtggtcgcctttttagatgcgttaagtttatttagcgttgccgagagtttaggtggcgttgagagtttagtggccgtgcctgcgaccatgacccacagggcgatggagccgcaggcgcgttttgaagctggcattaaagacaccctattacgtttgtcggttggtattgaagatgccgacgacttagttgcagatattcaagcaggattggccgccgtagcggcttgtcagtag

SEQ ID NO: 125906 - protein, 393 aa, Shewanella oneidensis MR-1
MTEGKLVTERQLATLAVRQGIESDTQYGAVVPPIYLSTNYAFDGHKNPREFDYSRSGNPTRSILGDALAKLEKGATGVVTCTGMAAITLVTTLLGPDDLLVVPHDCYGGSYRLFTNLAKKGQFKLLVVDQTDNQALAQAIAQQPKMVWIETPSNPLLRVVDIEAIAKASHGVGALVVVDNTFLSPILQQPLLLGADIVIHSTTKYINGHSDVVGGAVIAKDPQIGETLHWWSNTLGLTGSAFDSYQTLRGLRTLAVRIREHQRNAQRIVELLSNSPVVSKVYYPGLADHPGHAIAAKQQKGFGAMLSFELKGGEAEVVAFLDALSLFSVAESLGGVESLVAVPATMTHRAMEPQARFEAGIKDTLLRLSVGIEDADDLVADIQAGLAAVAACQ

SEQ ID NO: 125907 - DNA, 1095 bp, Streptococcus mutans UA159; identical to SEQ ID NO: 13520
  CDS (1)..(1095): transl_table=11

SEQ ID NO: 125908 - protein, 364 aa, Streptococcus mutans UA159; identical to SEQ ID NO: 13521

SEQ ID NO: 125909 - DNA, 1230 bp, Corynebacterium efficiens YS-314; identical to SEQ ID NO: 13522
  CDS (1)..(1230): transl_table=11

SEQ ID NO: 125910 - protein, 409 aa, Corynebacterium efficiens YS-314; identical to SEQ ID NO: 13523

SEQ ID NO: 125911 - DNA, 1272 bp, Pseudomonas putida KT2440; identical to SEQ ID NO: 13524
  CDS (1)..(1272): transl_table=11

SEQ ID NO: 125912 - protein, 423 aa, Pseudomonas putida KT2440; identical to SEQ ID NO: 13525

SEQ ID NO: 125913 - DNA, 1197 bp, Pseudomonas putida KT2440; identical to SEQ ID NO: 13526
  CDS (1)..(1197): transl_table=11

SEQ ID NO: 125914 - protein, 398 aa, Pseudomonas putida KT2440; identical to SEQ ID NO: 13527

SEQ ID NO: 125915 - DNA, 1212 bp, Pseudomonas putida KT2440; identical to SEQ ID NO: 13528
  CDS (1)..(1212): transl_table=11

SEQ ID NO: 125916 - protein, 403 aa, Pseudomonas putida KT2440; identical to SEQ ID NO: 13529

SEQ ID NO: 125917 - DNA, 1278 bp, Pseudomonas putida KT2440; identical to SEQ ID NO: 13530
  CDS (1)..(1278): transl_table=11

SEQ ID NO: 125918 - protein, 425 aa, Pseudomonas putida KT2440; identical to SEQ ID NO: 13531

SEQ ID NO: 125919 - DNA, 1182 bp, Pseudomonas putida KT2440; identical to SEQ ID NO: 13532
  CDS (1)..(1182): transl_table=11

SEQ ID NO: 125920 - protein, 393 aa, Pseudomonas putida KT2440; identical to SEQ ID NO: 13533

SEQ ID NO: 125921 - DNA, 1167 bp, Vibrio vulnificus CMCP6
  CDS (1)..(1167): transl_table=11
atgagtcaccgcaagccagccacgattgccgttagaacgggcatcgaatccgatactcaataccgtgccgttgtgccaccgatctatttgtcgacgaactatggtttctctgcctttggcgaagtgcctaaatacgactatacccgctcaggcaacccaaatcgtggtctactagagcaagcgttgtttgagctcgaatctggtaaaggtgcggtggtcacaaactgcgggacatcagcacttaacttgtgggtgtctgcttttttaagccctgacgatcttattgtggcacctcatgattgttatggaggtacctaccgtcttttcaatactcgagcgaagaaaggggattttaaagtccgctttgtcgaccaatccgacagtgctgcactggatgcggcgttggcgcttaaccccaaactggtgttgcttgaaacgccttccaacccgctcgtgcgtgtggtggacatcgcggaagtgtgtgagaaagcccataaagtgggcgcgttggtggcggtcgataacacctttttgacaccggtgtaccaaaagcctttggagctgggggcagactttgtgattcactcgacaaccaagtatatcaatgggcattctgatgtgattggcggtgtggtgatcactaaaaccgaagagcacgcaacagaactatcgtggtgggggaactgccttggcgcaaccggtacgccatttgatagctatatgacgctacgtggtatccgtacattgggggcacgtatgcgcgtgcatgaagaaagttcgcaacaaattctctcttatctgcaaactcaagagttagtcggtaccatttatcacccgagtttgccagcgcatcccggtcatgagatcgccaaaaagcagcaatcgggctttggatcgatgttgagctttgaatttgctggcagctttgagcaattgaaagtgtttgtgaaagcgctagatttgttttcattagcggagtcacttggtggtgtcgaaagcttggtttgtcatccggcatctatgactcatcgtgcgatgggagaggaagcactcgcagaagctggcgtgacgcaacagttattgcgtttatcggtggggctggaagatgcgcaagatctgattgccgacctcaagcaggcctttcaacaagcgaaggagagctgttaa

SEQ ID NO: 125922 - protein, 388 aa, Vibrio vulnificus CMCP6
MSHRKPATIAVRTGIESDTQYRAVVPPIYLSTNYGFSAFGEVPKYDYTRSGNPNRGLLEQALFELESGKGAVVTNCGTSALNLWVSAFLSPDDLIVAPHDCYGGTYRLFNTRAKKGDFKVRFVDQSDSAALDAALALNPKLVLLETPSNPLVRVVDIAEVCEKAHKVGALVAVDNTFLTPVYQKPLELGADFVIHSTTKYINGHSDVIGGVVITKTEEHATELSWWGNCLGATGTPFDSYMTLRGIRTLGARMRVHEESSQQILSYLQTQELVGTIYHPSLPAHPGHEIAKKQQSGFGSMLSFEFAGSFEQLKVFVKALDLFSLAESLGGVESLVCHPASMTHRAMGEEALAEAGVTQQLLRLSVGLEDAQDLIADLKQAFQQAKESC

SEQ ID NO: 125923 - DNA, 1284 bp, Bradyrhizobium japonicum USDA 110; identical to SEQ ID NO: 13536
  CDS (1)..(1284): transl_table=11

SEQ ID NO: 125924 - protein, 427 aa, Bradyrhizobium japonicum USDA 110; identical to SEQ ID NO: 13537

SEQ ID NO: 125925 - DNA, 1161 bp, Vibrio parahaemolyticus RIMD 2210633
  CDS (1)..(1161): transl_table=11
atgagcacccgcaagcctgcgaccattgctgtacgcactggtatcgaatcagacagccaataccacgctgttgttccaccaatctacctttcaaccaactatggtttccctgcttttggtgaagtccctaaatacgattacacgcgttcaggtaacccaaaccgtggtttgctagagagtgcgttatcagagttagagtctggcaaaggcgcagtggtgactaactgcggtacttccgcacttaacttgtgggtatcggcttttcttgggccagatgatctgattgttgcaccgcatgattgctatggtggcacataccgtttgttcaatacacgagctaacaaaggcgacttcaaagtgcagttcgttgatcaatcggatgagcaagctctagaggctgcactagcgaaaaagccaaagcttattttgttagaaactccatcgaaccctttggttcgtgtggttgatattgcagcggtatgcgaaaaagccaaacaagtgggcgctttggtggcggtagacaatacctttttgacaccggtgtaccaaaagcctttggagctcggtgctgattttgttatccactcaactacaaaatacattaacggtcactcggacgtgattggtggtgtggtgatcaccaaaacagaagcgcacgcagaagagcttgcatggtggggaaactgtattggcgccacgggtacgcctttcgatagttacatgacgttgcgtgggatccgcactttaggcgcccgtatgcgagtgcacgaagaaagctctcaacacgtactcaactacctacaacagcaggctttggtcgcgaagatttaccatccgagcttgccagatcaccctggtcacgaaatcgcgaaaaagcagcagtcgggttttggttctatgctgagctttgaatttgcaggctcatttgagcaacttaaagtgtttgttaaagagctcgaactgttttctcttgcagagtcgcttggtggcgtggagagtttgatttgtcacccagcatctatgacgcatcgagccatgggggaagaagcattagcggaagcaggcgtgtcgcatcagctgcttcgtctgtctgtgggtttagaggatgcacaagacctgattgccgatctcgatcaagcctttgtaaaagctgctcagtaa

SEQ ID NO: 125926 - protein, 386 aa, Vibrio parahaemolyticus RIMD 2210633
MSTRKPATIAVRTGIESDSQYHAVVPPIYLSTNYGFPAFGEVPKYDYTRSGNPNRGLLESALSELESGKGAVVTNCGTSALNLWVSAFLGPDDLIVAPHDCYGGTYRLFNTRANKGDFKVQFVDQSDEQALEAALAKKPKLILLETPSNPLVRVVDIAAVCEKAKQVGALVAVDNTFLTPVYQKPLELGADFVIHSTTKYINGHSDVIGGVVITKTEAHAEELAWWGNCIGATGTPFDSYMTLRGIRTLGARMRVHEESSQHVLNYLQQQALVAKIYHPSLPDHPGHEIAKKQQSGFGSMLSFEFAGSFEQLKVFVKELELFSLAESLGGVESLICHPASMTHRAMGEEALAEAGVSHQLLRLSVGLEDAQDLIADLDQAFVKAAQ

SEQ ID NO: 125927 - DNA, 1161 bp, Salmonella enterica subsp. enterica serovar Typhi Ty2; identical to SEQ ID NO: 13452
  CDS (1)..(1161): transl_table=11

SEQ ID NO: 125928 - protein, 386 aa, Salmonella enterica subsp. enterica serovar Typhi Ty2; identical to SEQ ID NO: 13453

SEQ ID NO: 125929 - DNA, 1281 bp, Bacteroides thetaiotaomicron VPI-5482
  CDS (1)..(1281): transl_table=11
atggcaaaacaattcaaacccgaaaccctgtgcgtacaggccggatggacgcctaaaaagggtgagccgcgtgtgctgcccatctatcagagtacaactttcaaatacgataccagcgaacaaatggcacgccttttcgatttggaagacagtggttatttttatacccgcctgcaaaacccgactaatgacgcggttgccgccaagattgccgcccttgaaggtggtgtagctgctatgcttacatccagcggccaggcagccaacttttatgccattttcaatatctgccaggcaggagatcatttcgtttgttcatccgccatctacggaggaacattcaacttgttcggtgtcaccatgaagaaactcggcatcgacgttacattcgttaatccggatgccagcgaagaagaaatctcggcagctttccagcctaatacaaaagcactgttcggagaaacaatctccaatccttctctcgaagtgctggatatcgaaaagtttgcccgtatcgcacacagtcacggagtacctttgattgtagacaatacattcccgactcctatcaactgccgtcctttcgaatggggagcagacatcatcgttcattctactaccaagtacatggatggacacgcaacaagcgtaggtggctgtatcgtcgacagcggcaacttcgactgggatgcccatgcagacaaattccccggactctgtacaccggacgaatcttatcatggtctgacctatacaaaagcattcggcaaaggtgcttacatcaccaaagcaactgcacaactgatgcgtgacctcggcagtatccaaagcccgcaaaattctttcttactgaatcttggactcgaaacactgcacctgcgtatgcctcagcattgccgtaacgctcagaaagtagcagaatatctttctaagaacgagaaagtggcctgggttaactattgcggcctgccggataacaaatactatgcactggcacagaaatatatgccgaacggttcctgcggagtgatctccttcggactgaaaggcggacgtgatgtctctatcaagtttatggattcattagaatttatcgctattgtgactcacgtagctgatgcccgtagttgtgtgcttcaccccgccagccatactcaccgccagttgtcggatgagcagctgatggaagcaggtgtacgtcccgacttaatccgtttgtccgtaggtatcgagaatgcggatgatatcattgcggatattgagcaagcgttgaatgcgtaa

SEQ ID NO: 125930 - protein, 426 aa, Bacteroides thetaiotaomicron VPI-5482
MAKQFKPETLCVQAGWTPKKGEPRVLPIYQSTTFKYDTSEQMARLFDLEDSGYFYTRLQNPTNDAVAAKIAALEGGVAAMLTSSGQAANFYAIFNICQAGDHFVCSSAIYGGTFNLFGVTMKKLGIDVTFVNPDASEEEISAAFQPNTKALFGETISNPSLEVLDIEKFARIAHSHGVPLIVDNTFPTPINCRPFEWGADIIVHSTTKYMDGHATSVGGCIVDSGNFDWDAHADKFPGLCTPDESYHGLTYTKAFGKGAYITKATAQLMRDLGSIQSPQNSFLLNLGLETLHLRMPQHCRNAQKVAEYLSKNEKVAWVNYCGLPDNKYYALAQKYMPNGSCGVISFGLKGGRDVSIKFMDSLEFIAIVTHVADARSCVLHPASHTHRQLSDEQLMEAGVRPDLIRLSVGIENADDIIADIEQALNA

SEQ ID NO: 125931 - DNA, 1137 bp, Enterococcus faecalis V583; identical to SEQ ID NO: 13552
  CDS (1)..(1137): transl_table=11

SEQ ID NO: 125932 - protein, 378 aa, Enterococcus faecalis V583; identical to SEQ ID NO: 13553

SEQ ID NO: 125933 - DNA, 1164 bp, Coxiella burnetii RSA 493; identical to SEQ ID NO: 13554
  CDS (1)..(1164): transl_table=11

SEQ ID NO: 125934 - protein, 387 aa, Coxiella burnetii RSA 493; identical to SEQ ID NO: 13555

SEQ ID NO: 125935 - DNA, 1155 bp, Streptomyces avermitilis MA-4680; identical to SEQ ID NO: 13556
  CDS (1)..(1155): transl_table=11

SEQ ID NO: 125936 - protein, 384 aa, Streptomyces avermitilis MA-4680; identical to SEQ ID NO: 13557

SEQ ID NO: 125937 - DNA, 1176 bp, Nitrosomonas europaea ATCC 19718; identical to SEQ ID NO: 13564
  CDS (1)..(1176): transl_table=11

SEQ ID NO: 125938 - protein, 391 aa, Nitrosomonas europaea ATCC 19718; identical to SEQ ID NO: 13565

SEQ ID NO: 125939 - DNA, 1350 bp, Arabidopsis thaliana; identical to SEQ ID NO: 13566
  CDS (1)..(1350)

SEQ ID NO: 125940 - protein, 449 aa, Arabidopsis thaliana; identical to SEQ ID NO: 13567

SEQ ID NO: 125941 - DNA, 1194 bp, Rhodopirellula baltica SH 1; identical to SEQ ID NO: 13570
  CDS (1)..(1194): transl_table=11

SEQ ID NO: 125942 - protein, 397 aa, Rhodopirellula baltica SH 1; identical to SEQ ID NO: 13571

SEQ ID NO: 125943 - DNA, 1158 bp, Candidatus Blochmannia floridanus; identical to SEQ ID NO: 13574
  CDS (1)..(1158): transl_table=11

SEQ ID NO: 125944 - protein, 385 aa, Candidatus Blochmannia floridanus; identical to SEQ ID NO: 13575

SEQ ID NO: 125945 - DNA, 1152 bp, Bordetella pertussis Tohama I
  CDS (1)..(1152): transl_table=11
atgaagttcgatacgctgctgacccatggcggtcgcgacccgaaggcgcacaaggggatggtgaacacacctgtctaccgcacctcaaccgttgtattcgagtccatggccgagtacaaggcaacccgtggcgcgaagttcgaccacgtacgctacgggcggctcggcacgcacaccgtgaaggagctggagaacctggtggccgccatcgaaggcggccatcgggcggttctcacgccctcgggcgtttcggccatcgccacgaccctcaataccctggcccgtccgggctcgcacatcctggtgccagacaacgtctattacccctgtcgcgagttctgcgaaaaggtgctggcgccgcgcggcgtgcgcgtcgagtactacgccggttcggaggtcgagcgcctggtccgccccgatacctcggtcgtgtactgcgagagccctggttcgctgaccatggaaatgcaggatttcgcccgcatcgccgccgccgcgcatgcggtcggcgccaaggtggtggccgacaacacctgggcgacgccggtattcctgcagccgttcgagcacggcatcgacgtctccatccatgccgccaccaagtacctggtgggccattcggacgtgatgatggggacggtgacggcgcatgaccccgagctgtggctggccatccgcacggaagcggccgcgcagggcctgtccatcagccccgacgacgcctatctggccacgcgcggtatccgcacgctgggggtgcgcatggcggcgcactaccgcaacgcgctggacgtggcgcaatggctggccgggcatccacgggtggcgcaggtgctgtatccggcgctgccgcagcaccccgaccacgcgctgtggcgccgccagatgcgcggcgcctcgggcctgctgaccctcgaactggagccctgcagcctcgagcagcgcgacgccttcatcgaccggctgacgctgtttgccatcggcgcgagctggggcggctacgagagcctggtgctgccggccgataccgccggcaagcgcagcctggcgggcagggactatgccgggccgctggtgcggctgcatatcggattggaagatgtcgaagacttgaagcgcgacctggaccaggcgctgcgccgggaggattga

SEQ ID NO: 125946 - protein, 383 aa, Bordetella pertussis Tohama I
MKFDTLLTHGGRDPKAHKGMVNTPVYRTSTVVFESMAEYKATRGAKFDHVRYGRLGTHTVKELENLVAAIEGGHRAVLTPSGVSAIATTLNTLARPGSHILVPDNVYYPCREFCEKVLAPRGVRVEYYAGSEVERLVRPDTSVVYCESPGSLTMEMQDFARIAAAAHAVGAKVVADNTWATPVFLQPFEHGIDVSIHAATKYLVGHSDVMMGTVTAHDPELWLAIRTEAAAQGLSISPDDAYLATRGIRTLGVRMAAHYRNALDVAQWLAGHPRVAQVLYPALPQHPDHALWRRQMRGASGLLTLELEPCSLEQRDAFIDRLTLFAIGASWGGYESLVLPADTAGKRSLAGRDYAGPLVRLHIGLEDVEDLKRDLDQALRRED

SEQ ID NO: 125947 - DNA, 1296 bp, Bordetella bronchiseptica RB50
  CDS (1)..(1296): transl_table=11
atgagcgaaccgaagcaacccagctggcggctggagaccatcgccgtacatgggggctaccggcccgacccgaccacgcgcgcggtggcggtgccgatctaccagaccgtggcctatgcgttcgacgacacccagcatggcgcggacctgttcgacctgaaggtgccgggcaatatctacacccgcatcatgaaccccaccaccgacgtgctggagcagcgcgtggcggcgctggaaggcggcgtggccgcgctggcgctggcctccggccaggcggcggtgacctatgcgatcctgaccatcgccgaggcgggcgacaacatcgtgtcgtccagcacgctgtatggcggcacgtacaacctgttcgcccacacgctgccgcagtacggcatcacgacccgcttcgccgatccgcgcaacctggcttcgttcgaggcgctgatcgacgagcgcaccaaggccattttcgccgagtcggtgggcaatccgctgggcaacgtcaccgacatcgccgcgctggccgagatcgcgcaccgccatggcgtgccgctgatcgtcgacaacacggtgccgtcgccctacctgctgcgccccatcgagcacggcgccgacatcgtggtgcagtcgctcaccaagtacctgggcgggcacggcaccagcctgggcggggccatcatcgattcgggcaagtttccctgggccgagcacaaggcgcgcttcaagcgcctgaacgagcccgacgtgagctaccacggcgtggtctacaccgaggcgttcggcgcggcggcctatatcggccgcgcccgcgtggtgccgctgcgcaataccggcgcggccatttcgccgttcaacgccttccagatcctgcagggcatcgagacgctggcgctgcgcgtggaccgcatcgtcgagaactcggtcaaggtggccgggttcctgcgcgaccatcccaaggtcgaatgggtcaactatgccggcctgcccgaccatgccgaccatgcgctggtgcgcaagtacatgggcggcaaggcccccggcctgttcactttcggcgtgaagggcggccgcgaggccggcgcgcgcttccaggacgccttgcagctgttcacccgcctggtgaacatcggcgacgccaagtcgctggccacgcacccggcttccaccacgcaccgccagctcaaccccgaagagctcgaaaaggccggcgtgcgcgaggaaacggtgcgcctgtcgatcgggatcgagcatatcgacgacctgatcgccgacctggaacaggcgctggcgcaagtctga

SEQ ID NO: 125948 - protein, 431 aa, Bordetella bronchiseptica RB50
MSEPKQPSWRLETIAVHGGYRPDPTTRAVAVPIYQTVAYAFDDTQHGADLFDLKVPGNIYTRIMNPTTDVLEQRVAALEGGVAALALASGQAAVTYAILTIAEAGDNIVSSSTLYGGTYNLFAHTLPQYGITTRFADPRNLASFEALIDERTKAIFAESVGNPLGNVTDIAALAEIAHRHGVPLIVDNTVPSPYLLRPIEHGADIVVQSLTKYLGGHGTSLGGAIIDSGKFPWAEHKARFKRLNEPDVSYHGVVYTEAFGAAAYIGRARVVPLRNTGAAISPFNAFQILQGIETLALRVDRIVENSVKVAGFLRDHPKVEWVNYAGLPDHADHALVRKYMGGKAPGLFTFGVKGGREAGARFQDALQLFTRLVNIGDAKSLATHPASTTHRQLNPEELEKAGVREETVRLSIGIEHIDDLIADLEQALAQV

SEQ ID NO: 125949 - DNA, 1143 bp, Chromobacterium violaceum ATCC 12472; identical to SEQ ID NO: 13586
  CDS (1)..(1143): transl_table=11

SEQ ID NO: 125950 - protein, 380 aa, Chromobacterium violaceum ATCC 12472; identical to SEQ ID NO: 13587

SEQ ID NO: 125951 - DNA, 1182 bp, Porphyromonas gingivalis W83; identical to SEQ ID NO: 13590
  CDS (1)..(1182): transl_table=11

SEQ ID NO: 125952 - protein, 393 aa, Porphyromonas gingivalis W83; identical to SEQ ID NO: 13591

SEQ ID NO: 125953 - DNA, 1173 bp, Photorhabdus luminescens subsp. laumondii TTO1; identical to SEQ ID NO: 13594
  CDS (1)..(1173): transl_table=11

SEQ ID NO: 125954 - protein, 390 aa, Photorhabdus luminescens subsp. laumondii TTO1; identical to SEQ ID NO: 13595

SEQ ID NO: 125955 - DNA, 1185 bp, Rhodopseudomonas palustris CGA009; identical to SEQ ID NO: 13596
  CDS (1)..(1185): transl_table=11

SEQ ID NO: 125956 - protein, 394 aa, Rhodopseudomonas palustris CGA009; identical to SEQ ID NO: 13597

SEQ ID NO: 125957 - DNA, 1137 bp, Geobacter sulfurreducens PCA; identical to SEQ ID NO: 13602
  CDS (1)..(1137): transl_table=11

SEQ ID NO: 125958 - protein, 378 aa, Geobacter sulfurreducens PCA; identical to SEQ ID NO: 13603

SEQ ID NO: 125959 - DNA, 1164 bp, Bdellovibrio bacteriovorus HD100; identical to SEQ ID NO: 13606
  CDS (1)..(1164): transl_table=11

SEQ ID NO: 125960 - protein, 387 aa, Bdellovibrio bacteriovorus HD100; identical to SEQ ID NO: 13607

SEQ ID NO: 125961 - DNA, 1206 bp, Treponema denticola ATCC 35405; identical to SEQ ID NO: 13608
  CDS (1)..(1206): transl_table=11

SEQ ID NO: 125962 - protein, 401 aa, Treponema denticola ATCC 35405; identical to SEQ ID NO: 13609

SEQ ID NO: 125963 - DNA, 1242 bp, Yersinia pestis biovar Microtus str. 91001; identical to SEQ ID NO: 13614
  CDS (1)..(1242): transl_table=11

SEQ ID NO: 125964 - protein, 413 aa, Yersinia pestis biovar Microtus str. 91001; identical to SEQ ID NO: 13615

SEQ ID NO: 125965 - DNA, 1179 bp, Strongylocentrotus purpuratus
  CDS (1)..(1179)
atggcggaccaatcaaccacgcctaagcccagagtgtccaccacgttttctgttggtttggatgggaagctagacatgagacgaaactttcaagacacccgggattaccccgagggtgtgactaaggagaccctcgcagtgactgctcagacccagctcagaggtacagataccaacaaacccgtcgtaccgtcgatcagtatcgcaaccacgtttgaggttaaggatctggatgactacatgaagtatataagggatggctatgtgtatggtcgttgtaataatcattcctgtgatgtggttgctcatgcagtcaacaagatagaagggggtgttggtgcctgtgtgtatcccagtggcatgtcggccatcagcaacaatatcctggcggtcgtcaagactggtgaccatattattgcccctgacccagtttattcgggagtgtatgccttcctgaagcatgtcattggtaactacggagtggaagtgacctttgtaccatcaggagacctggatgcctacaggaaagccattaagcccaacacaaaggttttctatggagagacaccaaccaacccggtcatgtctttgctggacctgaaggcctttgctgacttggctaaatctgtacctggtgccatcagtatgtgtgattctacatttgccagtcctatcctacaggatactctgggacttggcatagatattgtcttccagagctgtaccaagtacatgggaggtcacagtgatttgatgggaggatccatgtgtacttccgatccagatctgtatttctatctcagtgagcatcagaagcttgtcggcaatatcatgatatccagagtgtactacccaggtttgccctcccaccctgatcatgaggtggctaagaaacagatgaaacagttcagtgggatggtggcttttgatatcaaggatggaatggaggctgctaagacgtttgtccagagttttaagatcattcttttggcggtgtccctgggaagcacagagagtttggtggaacatcctgctaccatgacgcatggtccttacttaatgacaaaggaagagagattggctggaggaataacagatggactcgttagaatcagtgttggaatagagaatattgatgacatcataaaggatcttgaacaagcattggcaaaggcttga

SEQ ID NO: 125966 - protein, 392 aa, Strongylocentrotus purpuratus
MADQSTTPKPRVSTTFSVGLDGKLDMRRNFQDTRDYPEGVTKETLAVTAQTQLRGTDTNKPVVPSISIATTFEVKDLDDYMKYIRDGYVYGRCNNHSCDVVAHAVNKIEGGVGACVYPSGMSAISNNILAVVKTGDHIIAPDPVYSGVYAFLKHVIGNYGVEVTFVPSGDLDAYRKAIKPNTKVFYGETPTNPVMSLLDLKAFADLAKSVPGAISMCDSTFASPILQDTLGLGIDIVFQSCTKYMGGHSDLMGGSMCTSDPDLYFYLSEHQKLVGNIMISRVYYPGLPSHPDHEVAKKQMKQFSGMVAFDIKDGMEAAKTFVQSFKIILLAVSLGSTESLVEHPATMTHGPYLMTKEERLAGGITDGLVRISVGIENIDDIIKDLEQALAKA

SEQ ID NO: 125967 - DNA, 1167 bp, Nasonia vitripennis; identical to SEQ ID NO: 13616
  CDS (1)..(1167)

SEQ ID NO: 125968 - protein, 388 aa, Nasonia vitripennis; identical to SEQ ID NO: 13617

SEQ ID NO: 125969 - DNA, 1167 bp, Nasonia vitripennis; identical to SEQ ID NO: 13618
  CDS (1)..(1167)

SEQ ID NO: 125970 - protein, 388 aa, Nasonia vitripennis; identical to SEQ ID NO: 13619

SEQ ID NO: 125971 - DNA, 1188 bp, Anopheles gambiae str. PEST; identical to SEQ ID NO: 13620
  CDS (1)..(1188)

SEQ ID NO: 125972 - protein, 395 aa, Anopheles gambiae str. PEST; identical to SEQ ID NO: 13621

SEQ ID NO: 125973 - DNA, 1302 bp, Magnaporthe grisea 70-15; identical to SEQ ID NO: 13622
  CDS (1)..(1302)

SEQ ID NO: 125974 - protein, 433 aa, Magnaporthe grisea 70-15; identical to SEQ ID NO: 13623

SEQ ID NO: 125975 - DNA, 1281 bp, Magnaporthe grisea 70-15; identical to SEQ ID NO: 13624
  CDS (1)..(1281)

SEQ ID NO: 125976 - protein, 426 aa, Magnaporthe grisea 70-15; identical to SEQ ID NO: 13625

SEQ ID NO: 125977 - DNA, 1365 bp, Magnaporthe grisea 70-15; identical to SEQ ID NO: 13626
  CDS (1)..(1365)

SEQ ID NO: 125978 - protein, 454 aa, Magnaporthe grisea 70-15; identical to SEQ ID NO: 13627

SEQ ID NO: 125979 - DNA, 1272 bp, Gibberella zeae PH-1; identical to SEQ ID NO: 13632
  CDS (1)..(1272)

SEQ ID NO: 125980 - protein, 423 aa, Gibberella zeae PH-1; identical to SEQ ID NO: 13633

SEQ ID NO: 125981 - DNA, 1311 bp, Gibberella zeae PH-1; identical to SEQ ID NO: 13636
  CDS (1)..(1311)

SEQ ID NO: 125982 - protein, 436 aa, Gibberella zeae PH-1; identical to SEQ ID NO: 13637

SEQ ID NO: 125983 - DNA, 1146 bp, Apis mellifera; identical to SEQ ID NO: 13638
  CDS (1)..(1146)

SEQ ID NO: 125984 - protein, 381 aa, Apis mellifera; identical to SEQ ID NO: 13639

SEQ ID NO: 125985 - DNA, 1176 bp, Candida glabrata CBS 138; identical to SEQ ID NO: 13642
  CDS (1)..(1176)

SEQ ID NO: 125986 - protein, 391 aa, Candida glabrata CBS 138; identical to SEQ ID NO: 13643

SEQ ID NO: 125987 - DNA, 1353 bp, Candida glabrata CBS 138; identical to SEQ ID NO: 13648
  CDS (1)..(1353)

SEQ ID NO: 125988 - protein, 450 aa, Candida glabrata CBS 138; identical to SEQ ID NO: 13649

SEQ ID NO: 125989 - DNA, 1383 bp, Kluyveromyces lactis NRRL Y-1140; identical to SEQ ID NO: 13650
  CDS (1)..(1383)

SEQ ID NO: 125990 - protein, 460 aa, Kluyveromyces lactis NRRL Y-1140; identical to SEQ ID NO: 13651

SEQ ID NO: 125991 - DNA, 1176 bp, Kluyveromyces lactis NRRL Y-1140; identical to SEQ ID NO: 13654
  CDS (1)..(1176)

SEQ ID NO: 125992 - protein, 391 aa, Kluyveromyces lactis NRRL Y-1140; identical to SEQ ID NO: 13655

SEQ ID NO: 125993 - DNA, 1125 bp, Debaryomyces hansenii CBS767; identical to SEQ ID NO: 13656
  CDS (1)..(1125)

SEQ ID NO: 125994 - protein, 374 aa, Debaryomyces hansenii CBS767; identical to SEQ ID NO: 13657

SEQ ID NO: 125995 - DNA, 1215 bp, Debaryomyces hansenii CBS767; identical to SEQ ID NO: 13660
  CDS (1)..(1215)

SEQ ID NO: 125996 - protein, 404 aa, Debaryomyces hansenii CBS767; identical to SEQ ID NO: 13661

SEQ ID NO: 125997 - DNA, 1203 bp, Debaryomyces hansenii CBS767; identical to SEQ ID NO: 13662
  CDS (1)..(1203)

SEQ ID NO: 125998 - protein, 400 aa, Debaryomyces hansenii CBS767; identical to SEQ ID NO: 13663

SEQ ID NO: 125999 - DNA, 1305 bp, Yarrowia lipolytica CLIB122; identical to SEQ ID NO: 13668
  CDS (1)..(1305)

SEQ ID NO: 126000 - protein, 434 aa, Yarrowia lipolytica CLIB122; identical to SEQ ID NO: 13669

SEQ ID NO: 126001 - DNA, 1185 bp, Yarrowia lipolytica CLIB122; identical to SEQ ID NO: 13672
  CDS (1)..(1185)

SEQ ID NO: 126002 - protein, 394 aa, Yarrowia lipolytica CLIB122; identical to SEQ ID NO: 13673

SEQ ID NO: 126003 - DNA, 1200 bp, Aspergillus nidulans FGSC A4; identical to SEQ ID NO: 13674
  CDS (1)..(1200)

SEQ ID NO: 126004 - protein, 399 aa, Aspergillus nidulans FGSC A4; identical to SEQ ID NO: 13675

SEQ ID NO: 126005 - DNA, 1233 bp, Aspergillus nidulans FGSC A4; identical to SEQ ID NO: 13676
  CDS (1)..(1233)

SEQ ID NO: 126006 - protein, 410 aa, Aspergillus nidulans FGSC A4; identical to SEQ ID NO: 13677

SEQ ID NO: 126007 - DNA, 1377 bp, Aspergillus nidulans FGSC A4; identical to SEQ ID NO: 13678
  CDS (1)..(1377)

SEQ ID NO: 126008 - protein, 458 aa, Aspergillus nidulans FGSC A4; identical to SEQ ID NO: 13679

SEQ ID NO: 126009 - DNA, 1200 bp, Candida albicans SC5314; identical to SEQ ID NO: 13680
  CDS (1)..(1200): transl_table=12

SEQ ID NO: 126010 - protein, 399 aa, Candida albicans SC5314; identical to SEQ ID NO: 13681

SEQ ID NO: 126011 - DNA, 1215 bp, Candida albicans SC5314; identical to SEQ ID NO: 13684
  CDS (1)..(1215): transl_table=12

SEQ ID NO: 126012 - protein, 404 aa, Candida albicans SC5314; identical to SEQ ID NO: 13685

SEQ ID NO: 126013 - DNA, 2400 bp, Ustilago maydis 521; identical to SEQ ID NO: 13686
  CDS (1)..(2400)

SEQ ID NO: 126014 - protein, 799 aa, Ustilago maydis 521; identical to SEQ ID NO: 13687

SEQ ID NO: 126015 - DNA, 2862 bp, Ustilago maydis 521
  CDS (1)..(2862)
atgtcggctcctcgtgacgcttacagcgtggcgtcttctcaggcgtccaccatcaccccattcagcaccgacgtcgcctcttccgtcgcctcgctcgactcttccatccctacctcccccgagccttccgacctcggcgatgatactgacatcaaaagcgccttcatctcgcacaaggaccgtcgcggccccaatggctaccgcttcgctactcagtgcgctactgtagacgaccccaaccacaaggatcagtacggttcctcgtcggctcccatctacatgtcggccaccttcaaaggtcttcccggcggcgaattcgactactcccgctcgggaaaccctactcgctccatgctccagcaccatctctgccagctgcagaactgcaagtatagctatgccgtctcgagtggtatggcttgtcttgacgtcattacccgcatcgtcaagactggcgagcgtatcattgccggagatgacctctacggcggctccaaccgcctcctcggctaccttgcctcccaccagaacatccactccgaccacgtcgacaccaccgacgcctccaaggtcgaagaaatgcttcagaagcgaagccaggaagccgctgccggcctttgcggcaaggtgagcatggttcttcttgagacgcccaccaacccgtgtctgaaaatttgcgatcttcagcgatgcgctgctgccgccaagaagtgggcgcccgatgctgttgttgtggtcgacaacacaatgatgtcgccctacctcatgcgtcccctcgagctcggagtggatattgtttatgattcgggtaccaagtatctctcgggtcaccacgatcttatggccggcgtcattgcttgcgaccgtgacgacctcggcaagcaaatcgccttcactatcaactcgattggaaacgctctcacacccatggactcgttcctcttgcttcgtggtatcaaaacgctcgcggtgcgcatggatcgacagcaagcttccgccattactgtggcccactaccttgactcgctcggattcaaggtcaactatcccggccttgcctcccacccttccaaggcggtgcacgacaaacaggccgccggtccgggatcggtgctcagctttgtcaccggcgacaaggcgctttcggaacgcattgtgggtgccacccgattgtggggcatttcagtgtcatttggctgtgtcaacagtctcatttcgatgccctgcctcatgtcgcacgcctccatcgacccgaaagttcgtgcggctcgaggcatgcctgaagacctcattcgtctctgtgtcggtatcgaagacgagcgcgacttgcttgacgacctcgaaaacgctttgctccaagctggcgccatccgacgaaagccctcggctcgaagctctgctctcgcatctaccaccgaaagctcgcgcgcagcatccccagatctcattgcctacgaacgcacgcctttgcatactgacgagcacactcagcaggacaagattggcagcttggtcgacgacatgaaccgtgcaaggctcgagacccgcggcggtgaaggggaacctcgctcggctcaggatcacccgccgccgtcgtcggtggttgtcagtgcgcctggcaaggtgatccttttcggtgagcacgcagtggtgcatggtattactgctgtcgccgcctcggtggcgctgcgatgctacgctaacgtatcgccacgagaggatggcaagatttcgctcgatttgcctgatctcggcgtgatccacacttggaacatcgccgatcttccttggtctgctgtgcctaaatccattcaaggtggtggcgccgtacctgactcgctcgacaagacgcttattggcgccatcgaaaaggtggtgggcgacacggtcaacgagagcgaaagaagccatgctgcttcgatcgcctttctggtgctttacatgtgcatcgccggtcaggctgatgcgcgcgctcaggcatttgtgctgcgttcggctctgcccatcggtgcaggactcggctcaagcgccgcgctcagctcgtgcctcgctgcggcgctcaccatcctctatggtcgcattcccgctccgggcagcgaactgtcagctgagcactcgacacacatcaacgaatgggcctttttgtctgaaaaggtaattcacggcaccccctcgggtgttgacaacacggtggctgttcatggcggagcgatcgctttcactcgtgctcacccaagcaacacgctcacagccaacaagatgaacaagctcaaaggcttctcttcgttccgtttcctcctcgtcgacagctgcgtcggccgcgagggcaagaagctgatcgctcacgttgcagctcagaaggaatccgagccgactcgtgtcaatgcggctctcgctcgaatccagacgatcgccgattcggcccagctcgtgctcactggcaactcgggtctctctcgctccgagcaagttgcacagcttcgcgaactgatcaagcagaaccatagcgaacttgttgggctcgaggtatcgcacgcttcgctggagttgatcaagaacaagaccgagtcgtttgcacccgatcagctggctactaagctcacaggtgccggaggaggaggatgtgcagttacactgctgccggacgactttgaggaggagaaggtgaaggagctgatgagcgagctggagaatgctggctttaagtgctacgagaccagagtgggaggtgacggcttcggcgtcaagcttctgcaggacgaacaggaggaggccgaggccaagctgcgattcaaggaagccaacgtgagcaacgagctggctgtgtgggctgatgagcttgctggttgggtatttgcctga

SEQ ID NO: 126016 - protein, 953 aa, Ustilago maydis 521
MSAPRDAYSVASSQASTITPFSTDVASSVASLDSSIPTSPEPSDLGDDTDIKSAFISHKDRRGPNGYRFATQCATVDDPNHKDQYGSSSAPIYMSATFKGLPGGEFDYSRSGNPTRSMLQHHLCQLQNCKYSYAVSSGMACLDVITRIVKTGERIIAGDDLYGGSNRLLGYLASHQNIHSDHVDTTDASKVEEMLQKRSQEAAAGLCGKVSMVLLETPTNPCLKICDLQRCAAAAKKWAPDAVVVVDNTMMSPYLMRPLELGVDIVYDSGTKYLSGHHDLMAGVIACDRDDLGKQIAFTINSIGNALTPMDSFLLLRGIKTLAVRMDRQQASAITVAHYLDSLGFKVNYPGLASHPSKAVHDKQAAGPGSVLSFVTGDKALSERIVGATRLWGISVSFGCVNSLISMPCLMSHASIDPKVRAARGMPEDLIRLCVGIEDERDLLDDLENALLQAGAIRRKPSARSSALASTTESSRAASPDLIAYERTPLHTDEHTQQDKIGSLVDDMNRARLETRGGEGEPRSAQDHPPPSSVVVSAPGKVILFGEHAVVHGITAVAASVALRCYANVSPREDGKISLDLPDLGVIHTWNIADLPWSAVPKSIQGGGAVPDSLDKTLIGAIEKVVGDTVNESERSHAASIAFLVLYMCIAGQADARAQAFVLRSALPIGAGLGSSAALSSCLAAALTILYGRIPAPGSELSAEHSTHINEWAFLSEKVIHGTPSGVDNTVAVHGGAIAFTRAHPSNTLTANKMNKLKGFSSFRFLLVDSCVGREGKKLIAHVAAQKESEPTRVNAALARIQTIADSAQLVLTGNSGLSRSEQVAQLRELIKQNHSELVGLEVSHASLELIKNKTESFAPDQLATKLTGAGGGGCAVTLLPDDFEEEKVKELMSELENAGFKCYETRVGGDGFGVKLLQDEQEEAEAKLRFKEANVSNELAVWADELAGWVFA

SEQ ID NO: 126017 - DNA, 1356 bp, Ustilago maydis 521; identical to SEQ ID NO: 13688
  CDS (1)..(1356)

SEQ ID NO: 126018 - protein, 451 aa, Ustilago maydis 521; identical to SEQ ID NO: 13689

SEQ ID NO: 126019 - DNA, 2703 bp, Cryptococcus neoformans var. neoformans B-3501A
  CDS (1)..(2703)
atgaccaccccttcaacaccgggcgaaagctcgctcgcgacatctgtctattctctcgccccaaagtctccagtggaagtacataaggaacgagtcgccaactggcgcttctccaccatctgcgctaatgtcgatggcaaggatcagtatggagctagctcaactcccatctaccagaccgccaccttcaagggtatggacgggcaatatgactacaccaggtctgggaaccccacaagaggcgctcttgaaaaccatcttgcaagattgtacggggccactcaaacatttgccttgtctactggtatgacttgtcttgacacgatcttgcgacttgttaggccaggagaaaccgttctggccggtgacgatttgtacggaggtaccaaccgacttttgacgtatcttggtacgcatggcggtgtcgatgtcaggcatgttgatactacagatgtggacaaggtaattcctcatcttggaccagggaataatgtcaagatggttcttctagaatcccctacgaaccctctgttgaaaattgccgacctgcaagaaatcgccgatgctgttcactctgctgcacctagcgctttgattgtggttgacaacactatgatgtctccttacctgcaacggccgcttgagattggtgccgatattgtttacgactctgctaccaaatatctctcaggtcatcacgaccttatggctggtatcattgcagcttctcgacccgatatctgcaaagacattgcattcattattaactctgttggatccggccttgctcctttcgactctttccttttgctccgtggtgtcaagaccatgtctctcaggatggacaggcagatggccactgcccaccttgtggctctttatcttgattcatttggcttcttggtccactaccctggtctcaagagccatcctaagagggatatccactacaaacaggcgtctggtgctggcgcggtgttaagttttgttactggcgacaaggcccttagcgaacggattgtcggcgggacaagactgtggggtatcagcgtgtctttcggggctgtcaacagcttgatcagtatgccatgtttaatgtctcacgcctccatttccgctgcagttcgtgctgaacgagggctcccagaaaaccttattcgactttgtgtcggtatcgaggaccctagagatctcattgatgacttggagcattcgcttctccaagcaggagctattgttcccaatctacaatatactcctctctcccagactaaggcggcggagttgtacgctagggacggtgaagcgtggatcctggaacgtgccaagggtttcaagcggccttctacccagtctattactgttgacaagctcgtcagcggcgtgaagcaaagtcttggtctctccacccctcccaaagagtacaagacgatcgaagaagacatcgcggtttctgcccccggcaaggttattcttttcggtgagcacgctgtcgtccacggcgtcactgccatcgcgtccagcgtcgacctccgatgcttttccgtcttgtctcctcgtcgtgacggaaaggttggattggaagtacccaatattggtgtggaactcgaatgggaaatcagcaagcttccttggaatctgcttccggtgcacgcaaatggcgggaggcacgttgccgacaaggagcttgacacggcgttgcttcaggctgtggagggtgctgtcaacactcatgttgaagtgggtaagactggtataggtgcctgtgtagccttcttatatctgtacatgatgatctcaggtgaagaaaccaatgctctttctgttacctttaccgcttcttcaaacctccctatctctgcgggtctcggatcatctgccgcatactccacttgtgttgcggcgtctttccttctcgctcgccagcacctcaccattccttcggccgatcgccttcccaaagaagacactgacttggtcgatggatgggctttcttggccgaaaaggttttacacggaaaccctagtggtatcgataacgccgtcgctgtcaggggtggagctgttgctttcaccagatctgttggcggaaagcaaggcggtatggatggtctttttgagttttcttctgtccgattactcttgaccaacactcttgtccccagagacaccaagacattggttgccggtgtttccgcgaagcgcctcgctgagcctcaggctgttaactcgattctcgattctatccaaaccatttcagatgaagcacgttccttgctcggcggtggcaagcctgtggaacgttctatccttgtcaagcgtctggaagcgctcatcaaggaaaaccatgagcacttggttgagctcggagtgtcgcacccttctttggaaatgatcgtggcagctaccgctcaggcacctttcgagttagccaccaagttgactggtgctggtggcggcggatgtgctcttactcttattccggatgatttccctgaatcttccctcaacgagctcatccaaaccctcgaaggccatggtttccaagcgcacctcaccacactgggcggccctggcttcggtgtcctcacgactccctttaagccgggcaatgtctctgaacaacttcgggatgctgtgaggacccacgacgagggttgggtcgatgggtatatgcttaaaatatgttatgggttgctttag

SEQ ID NO: 126020 - protein, 900 aa, Cryptococcus neoformans var. neoformans B-3501A
MTTPSTPGESSLATSVYSLAPKSPVEVHKERVANWRFSTICANVDGKDQYGASSTPIYQTATFKGMDGQYDYTRSGNPTRGALENHLARLYGATQTFALSTGMTCLDTILRLVRPGETVLAGDDLYGGTNRLLTYLGTHGGVDVRHVDTTDVDKVIPHLGPGNNVKMVLLESPTNPLLKIADLQEIADAVHSAAPSALIVVDNTMMSPYLQRPLEIGADIVYDSATKYLSGHHDLMAGIIAASRPDICKDIAFIINSVGSGLAPFDSFLLLRGVKTMSLRMDRQMATAHLVALYLDSFGFLVHYPGLKSHPKRDIHYKQASGAGAVLSFVTGDKALSERIVGGTRLWGISVSFGAVNSLISMPCLMSHASISAAVRAERGLPENLIRLCVGIEDPRDLIDDLEHSLLQAGAIVPNLQYTPLSQTKAAELYARDGEAWILERAKGFKRPSTQSITVDKLVSGVKQSLGLSTPPKEYKTIEEDIAVSAPGKVILFGEHAVVHGVTAIASSVDLRCFSVLSPRRDGKVGLEVPNIGVELEWEISKLPWNLLPVHANGGRHVADKELDTALLQAVEGAVNTHVEVGKTGIGACVAFLYLYMMISGEETNALSVTFTASSNLPISAGLGSSAAYSTCVAASFLLARQHLTIPSADRLPKEDTDLVDGWAFLAEKVLHGNPSGIDNAVAVRGGAVAFTRSVGGKQGGMDGLFEFSSVRLLLTNTLVPRDTKTLVAGVSAKRLAEPQAVNSILDSIQTISDEARSLLGGGKPVERSILVKRLEALIKENHEHLVELGVSHPSLEMIVAATAQAPFELATKLTGAGGGGCALTLIPDDFPESSLNELIQTLEGHGFQAHLTTLGGPGFGVLTTPFKPGNVSEQLRDAVRTHDEGWVDGYMLKICYGLL

SEQ ID NO: 126021 - DNA, 2757 bp, Cryptococcus neoformans var. neoformans B-3501A
  CDS (1)..(2757)
atgaccaccccttcaacaccgggcgaaagctcgctcgcgacatctgtctattctctcgccccaaagtctccagtggaagtacataaggaacgagtcgccaactggcgcttctccaccatctgcgctaatgtcgatggcaaggatcagtatggagctagctcaactcccatctaccagaccgccaccttcaagggtatggacgggcaatatgactacaccaggtctgggaaccccacaagaggcgctcttgaaaaccatcttgcaagattgtacggggccactcaaacatttgccttgtctactggtatgacttgtcttgacacgatcttgcgacttgttaggccaggagaaaccgttctggccggtgacgatttgtacggaggtaccaaccgacttttgacgtatcttggtacgcatggcggtgtcgatgtcaggcatgttgatactacagatgtggacaaggtaattcctcatcttggaccagggaataatgtcaagatggttcttctagaatcccctacgaaccctctgttgaaaattgccgacctgcaagaaatcgccgatgctgttcactctgctgcacctagcgctttgattgtggttgacaacactatgatgtctccttacctgcaacggccgcttgagattggtgccgatattgtttacgactctgctaccaaatatctctcaggtcatcacgaccttatggctggtatcattgcagcttctcgacccgatatctgcaaagacattgcattcattattaactctgttggatccggccttgctcctttcgactctttccttttgctccgtggtgtcaagaccatgtctctcaggatggacaggcagatggccactgcccaccttgtggctctttatcttgattcatttggcttcttggtccactaccctggtctcaagagccatcctaagagggatatccactacaaacaggcgtctggtgctggcgcggtgttaagttttgttactggcgacaaggcccttagcgaacggattgtcggcgggacaagactgtggggtatcagcgtgtctttcggggctgtcaacagcttgatcagtatgccatgtttaatgtctcacgcctccatttccgctgcagttcgtgctgaacgagggctcccagaaaaccttattcgactttgtgtcggtatcgaggaccctagagatctcattgatgacttggagcattcgcttctccaagcaggagctattgttcccaatctacaatatactcctctctcccagactaaggcggcggagttgtacgctagggacggtgaagcgtggatcctggaacgtgccaagggtttcaagcggccttctacccagtctattactgttgacaagctcgtcagcggcgtgaagcaaagtcttggtctctccacccctcccaaagagtacaagacgatcgaagaagacatcgcggtttctgcccccggcaaggttattcttttcggtgagcacgctgtcgtccacggcgtcactgccatcgcgtccagcgtcgacctccgatgcttttccgtcttgtctcctcgtcgtgacggaaaggttggattggaagtacccaatattggtgtggaactcgaatgggaaatcagcaagcttccttggaatctgcttccggtgcacgcaaatggcgggaggcacgttgccgacaaggagcttgacacggcgttgcttcaggctgtggagggtgctgtcaacactcatgttgaagtgggtaagactggtataggtgcctgtgtagccttcttatatctgtacatgatgatctcaggtgaagaaaccaatgctctttctgttacctttaccgcttcttcaaacctccctatctctgcgggtctcggatcatctgccgcatactccacttgtgttgcggcgtctttccttctcgctcgccagcacctcaccattccttcggccgatcgccttcccaaagaagacactgacttggtcgatggatgggctttcttggccgaaaaggttttacacggaaaccctagtggtatcgataacgccgtcgctgtcaggggtggagctgttgctttcaccagatctgttggcggaaagcaaggcggtatggatggtctttttgagttttcttctgtccgattactcttgaccaacactcttgtccccagagacaccaagacattggttgccggtgtttccgcgaagcgcctcgctgagcctcaggctgttaactcgattctcgattctatccaaaccatttcagatgaagcacgttccttgctcggcggtggcaagcctgtggaacgttctatccttgtcaagcgtctggaagcgctcatcaaggaaaaccatgagcacttggttgagctcggagtgtcgcacccttctttggaaatgatcgtggcagctaccgctcaggcacctttcgagttagccaccaagttgactggtgctggtggcggcggatgtgctcttactcttattccggatgatttccctgaatcttccctcaacgagctcatccaaaccctcgaaggccatggtttccaagcgcacctcaccacactgggcggccctggcttcggtgtcctcacgactccctttaagccgggcaatgtctctgaacaacttcgggatgctgtgaggacccacgacgagggtgagggcatggttgtgccgaagagagctggtcttagagaagctgataaggaaggtttgcacgcatgggcggaaaggttgggtcgatgggtatatgcttaa

SEQ ID NO: 126022 - protein, 918 aa, Cryptococcus neoformans var. neoformans B-3501A
MTTPSTPGESSLATSVYSLAPKSPVEVHKERVANWRFSTICANVDGKDQYGASSTPIYQTATFKGMDGQYDYTRSGNPTRGALENHLARLYGATQTFALSTGMTCLDTILRLVRPGETVLAGDDLYGGTNRLLTYLGTHGGVDVRHVDTTDVDKVIPHLGPGNNVKMVLLESPTNPLLKIADLQEIADAVHSAAPSALIVVDNTMMSPYLQRPLEIGADIVYDSATKYLSGHHDLMAGIIAASRPDICKDIAFIINSVGSGLAPFDSFLLLRGVKTMSLRMDRQMATAHLVALYLDSFGFLVHYPGLKSHPKRDIHYKQASGAGAVLSFVTGDKALSERIVGGTRLWGISVSFGAVNSLISMPCLMSHASISAAVRAERGLPENLIRLCVGIEDPRDLIDDLEHSLLQAGAIVPNLQYTPLSQTKAAELYARDGEAWILERAKGFKRPSTQSITVDKLVSGVKQSLGLSTPPKEYKTIEEDIAVSAPGKVILFGEHAVVHGVTAIASSVDLRCFSVLSPRRDGKVGLEVPNIGVELEWEISKLPWNLLPVHANGGRHVADKELDTALLQAVEGAVNTHVEVGKTGIGACVAFLYLYMMISGEETNALSVTFTASSNLPISAGLGSSAAYSTCVAASFLLARQHLTIPSADRLPKEDTDLVDGWAFLAEKVLHGNPSGIDNAVAVRGGAVAFTRSVGGKQGGMDGLFEFSSVRLLLTNTLVPRDTKTLVAGVSAKRLAEPQAVNSILDSIQTISDEARSLLGGGKPVERSILVKRLEALIKENHEHLVELGVSHPSLEMIVAATAQAPFELATKLTGAGGGGCALTLIPDDFPESSLNELIQTLEGHGFQAHLTTLGGPGFGVLTTPFKPGNVSEQLRDAVRTHDEGEGMVVPKRAGLREADKEGLHAWAERLGRWVYA

SEQ ID NO: 126023 - DNA, 1173 bp, Tribolium castaneum; identical to SEQ ID NO: 13690
  CDS (1)..(1173)

SEQ ID NO: 126024 - protein, 390 aa, Tribolium castaneum; identical to SEQ ID NO: 13691

SEQ ID NO: 126025 - DNA, 1170 bp, Prochlorococcus marinus str. MIT 9303; identical to SEQ ID NO: 13698
  CDS (1)..(1170): transl_table=11

SEQ ID NO: 126026 - protein, 389 aa, Prochlorococcus marinus str. MIT 9303; identical to SEQ ID NO: 13699

SEQ ID NO: 126027 - DNA, 1164 bp, Clostridium thermocellum ATCC 27405
  CDS (1)..(1164): transl_table=11
ttggcacattacaaacatattgaatcggcagtcatccatggtggcatttatggagatttccataccggttcggtaaatacccctatttatcaaacctccacctttgaacaggacggtttgggcaagccccgctcaaattgggaatattcccgaacgggaaatcccactcgggcagctttggaggctttgattgcagagttggagggtgggtcccggggatttgcattttcttccggtatggcagccattgatgcagttctgcatctcttccaatccggagacagcgtcattatttccgacaatgtatatggagggacttttcgaattctggataaaatcttcaagcagtatggcttaaactataaaattgtggacaccactgatttggcagcactcgaaagtgcatttacttcggatgttaaagctttgttgcttgaatccccggccaatccgctgctcaaagttacggatatcgcggcggcagctgagatagcaagatccaaaggagcgctgactgtagtggataacacctttatgaccccttatcttcaacggcctttagagcttggagcggatatcgtcgtgcattcggcaaccaaatatcttggcggacatagcgatgtcattgcaggacttgtcatcgttaaagacggtgaactggcagaaaagctgcatttcatacaaaatgcggtgggtgccgttgccgggccgtttgattctttcctgctcattcgaagtatcaagacgttggcagtgcgcatggaagcccatgtggccaacgcagaaaaactagcagaggctttaaaaagtaatccggcagttaaaaacgtctattatcccggcttaaaatccgctcaaggatatgagattcaaaagagacaggcaaaaaacggcggagccatgatttcctttgagttacataacaattatgacatcaacaggttttttgaaggtttggagttgattgcccttgcggaaagcttgggcggtgttgaaagtcttgtctgccatccttcaagcatgacccatgcatctgttccaaaggaaatacgcgaaaagatcggcatcacggatacattgatccgcttgtcggtaggtattgaaaattatgatgatttaaaaaacgatttattttctgctataaaaggagcgcgagtactatga

SEQ ID NO: 126028 - protein, 387 aa, Clostridium thermocellum ATCC 27405
MAHYKHIESAVIHGGIYGDFHTGSVNTPIYQTSTFEQDGLGKPRSNWEYSRTGNPTRAALEALIAELEGGSRGFAFSSGMAAIDAVLHLFQSGDSVIISDNVYGGTFRILDKIFKQYGLNYKIVDTTDLAALESAFTSDVKALLLESPANPLLKVTDIAAAAEIARSKGALTVVDNTFMTPYLQRPLELGADIVVHSATKYLGGHSDVIAGLVIVKDGELAEKLHFIQNAVGAVAGPFDSFLLIRSIKTLAVRMEAHVANAEKLAEALKSNPAVKNVYYPGLKSAQGYEIQKRQAKNGGAMISFELHNNYDINRFFEGLELIALAESLGGVESLVCHPSSMTHASVPKEIREKIGITDTLIRLSVGIENYDDLKNDLFSAIKGARVL

SEQ ID NO: 126029 - DNA, 1239 bp, Mycobacterium sp. JLS
  CDS (1)..(1239): transl_table=11
atgagctcagaggtgccctcgcgcactcaaggagcggacaagccctccgtccggcggcccgccgaactgcccgagggggtcggtcaggccaccatcggggtgcgcggcggtctgctgcggtccggtttcgaggagaccgccgaagccctgtacctcacgtcgggctatgtgtacgcgtcggcggccgaggcggagaaggcgttcaccggagagatcgaccggtacgtctattcgcggtacggcaacccgacgatctcgatgttcgaggagcggctgcggctgatcgagggggcgccggcctgtttcgcgacggcgaccggcatggccgcggtgttcacgtcgctgggcgcgctgctgggcgcgggggaccggttggtcgccgcgcgctcactgttcggttcgtgtttcgtggtctgcagcgagatcctgccgcgttggggtgtggagacggtgttcgtcgacggcgacgacctctcccagtgggaggaagccctctcggtgcccacgcaggcggtgttcttcgagacaccgtcgaaccccatgcagtcgctggtcgacatcgccgcggtgacggagctcgcgcatgcggcgggcgcgaaagtggtgttggacaacgtcttcgccacgccgctgctgcagcagggtttaccgctgggggtcgacgtggtggtctactccggcaccaagcacatcgacggtcagggccgggtgctcggcggcgcgatcctcggttcgcaggagtacatcgacggcccggtgcagaagttgatgcgtcacaccggcccggcgatcagcgcgttcaacgcgtggacgctgttgaagggtttggagacgctggcggtacgggtcgactactccaaccggtcggcggagcggatcgcggagttcctcgaggggcactcctccgtgagttgggtcaagtacccgttcctggagtcccacccgcagtatgacctggccaagcggcagatgcgcggcggcggcaccgtcgtcacgttcgaactcgccggcggtaaggaacgggccttcgaggtgctcgacaaactgcagatcatcgacatctcgaacaacctcggcgacgccaagtcgttgatcacccatcccgccaccacgacccaccgggcgatgggtccggagggtcgcgcggcgatcggtctgggcgacggtgtggtgcgggtgtcggtcgggctcgaggacaccgacgacctgatccgcgatctcgaccgggcgctgggctga

SEQ ID NO: 126030 - protein, 412 aa, Mycobacterium sp. JLS
MSSEVPSRTQGADKPSVRRPAELPEGVGQATIGVRGGLLRSGFEETAEALYLTSGYVYASAAEAEKAFTGEIDRYVYSRYGNPTISMFEERLRLIEGAPACFATATGMAAVFTSLGALLGAGDRLVAARSLFGSCFVVCSEILPRWGVETVFVDGDDLSQWEEALSVPTQAVFFETPSNPMQSLVDIAAVTELAHAAGAKVVLDNVFATPLLQQGLPLGVDVVVYSGTKHIDGQGRVLGGAILGSQEYIDGPVQKLMRHTGPAISAFNAWTLLKGLETLAVRVDYSNRSAERIAEFLEGHSSVSWVKYPFLESHPQYDLAKRQMRGGGTVVTFELAGGKERAFEVLDKLQIIDISNNLGDAKSLITHPATTTHRAMGPEGRAAIGLGDGVVRVSVGLEDTDDLIRDLDRALG

SEQ ID NO: 126031 - DNA, 1191 bp, Burkholderia vietnamiensis G4
  CDS (1)..(1191): transl_table=11
atggacgactccctcaacttcgacacgctcgccgtgcgcgcgggcacgcagcgcagcgaatacaacgagcactcggaagcgctgttcctcacgtcgagcttctgcttcaagagcgcagccgacgcagcggagcgcttcgcgaattcggaagactatttcacctattcgcgcttcacgaacccgacggtctccatgttccaggatcgtctcgcggcgctcgaaggcggcgaggcgtgcatcgcgacggcatccgggatggccgcgatcatgtcggtcgtgatgtcggcgctgcaggctggagatcacctcgtcagctcgcgcagcctgttcggttcgacgctcgggatgttctcgcagatcttcagcaagttcggcatcacgacgaccttcgtcgatccgaccgacctgaacgcatggcgcgaagcggtgcggcccgagacgaagatgttcttcctcgaaacgccgtcgaacccgctgaccgagctcgccgacatcgaagcgatcggcaagatcgcgaaggccgcgaacgcgctgttcgtcgtcgacaactgtttctgcagcccggtgctgcagcagccgctgaaactcggcgccgacgtcgtgatgcactcggcgaccaagttcctcgacggccagggccgcgtgctcggcggcgcgctggtcggctcgaaggaattcatcatgggcaaggtgttcccgttcgtgcgcagcgcgggcccgacgttgtcggcgttcaacgcatgggtgctgctgaaggggatggaaacgctgtcgctgcgcgtcgagaagcagtcggcgaatgcgctcgaaatcgcgcgctggctcgacgcccatccggccgtggcgcgcgtgttctatccggggctcgaatcgcatccgcagtacgagctcgcgaagcggcaacagaaggcgggcggtgcgatcgtgtcgttcgagctgaagggcgacacgcccgagcagcagcgcgcgaacgcatggcgcgtgatcgacggcacgcagctgatctcgatcaccggcaacctcggcgatacgcgcacgacgatcacgcatccggcgacgaccacgcacgcgcgcgtcacgccggaagcgcgcgcggccgccgggatcaccgaggggctgattcgcctcgcggtcggcctcgagtacgcgggcgatctgcgcaacgatctcgcgcgcggcctcggcggctga

SEQ ID NO: 126032 - protein, 396 aa, Burkholderia vietnamiensis G4
MDDSLNFDTLAVRAGTQRSEYNEHSEALFLTSSFCFKSAADAAERFANSEDYFTYSRFTNPTVSMFQDRLAALEGGEACIATASGMAAIMSVVMSALQAGDHLVSSRSLFGSTLGMFSQIFSKFGITTTFVDPTDLNAWREAVRPETKMFFLETPSNPLTELADIEAIGKIAKAANALFVVDNCFCSPVLQQPLKLGADVVMHSATKFLDGQGRVLGGALVGSKEFIMGKVFPFVRSAGPTLSAFNAWVLLKGMETLSLRVEKQSANALEIARWLDAHPAVARVFYPGLESHPQYELAKRQQKAGGAIVSFELKGDTPEQQRANAWRVIDGTQLISITGNLGDTRTTITHPATTTHARVTPEARAAAGITEGLIRLAVGLEYAGDLRNDLARGLGG

SEQ ID NO: 126033 - DNA, 1284 bp, Novosphingobium aromaticivorans DSM 12444; identical to SEQ ID NO: 13706
  CDS (1)..(1284): transl_table=11

SEQ ID NO: 126034 - protein, 427 aa, Novosphingobium aromaticivorans DSM 12444; identical to SEQ ID NO: 13707

SEQ ID NO: 126035 - DNA, 1305 bp, Leptospira interrogans serovar Copenhageni str. Fiocruz L1-130
  CDS (1)..(1305): transl_table=11
atgcctagaaattataagccagaaacaattgcgctgcacggaggtcaatctccagacccttctactttatctagggcagttccaatttatcaaactacatcttatgtgtttaaaaacactgaacacgccgctaaactttttggcctacaggaattcggaaatatctatacaaggattatgaatcctaccacagacgttcttgaacaaagaatcgccgctttagaaggcggagttgcagcgcttgctactgcttccggtcaagcggcggaaactctcgcattactaaacatagtagaagctggtcaagaaattgtggcctcttcttccctttacggcggaacttataacctccttcattatacgtttcctaaattaggaattaaggtacattttgtagatccctcggatcctgaaaattttcgcaaagcagtcaatgataaaaccagagcattttacgcagaaacattaggaaatcctaaattagatactttgaatctggaagcgattgcaaaagttgcacacgattcggaagtccctttgataatagacaataccttaccctctccctatttagtcaatccgatcgaacacggtgcagatattgtagttcattctctaactaaatttttaggagggcacggaacttcaatcggaggtattatagtcgattccggtaagtttaattggggaaacggaaagtttaaaaattttacagagccagacccaagttatcacggtttaaagttctgggaagtttttggtaagttcgaaccgttcggcggagtaaatatcgcttacatcatcaaagcaaaagtacaaggacttcgtgatatgggtgcctctatttctccttttaacgcctggcaaattctacaaggtgtggaaactcttcctcttagaatgcgtaaacattccgaaaacgctcttgcagtcgcagaatatcttaccaaacatactaaagtttcttgggtaaactacccaggtttaaaaatggataagaactattctcttgcaaagaaatatcataaaaaagatctttacggtgccattctaggttttgggattaaaggtggagctgtagaagcaaagaaattcatagacgggttagaattattttcccttttggcaaacgtaggagatgcaaaatctttggtgatccatccagcgtctacgactcaccagcagttaactccggaagaacaactttcagctggagttactcctgactttgttcgtctttccgtcggtttggaaaatatagaagatattttattcgatttagaggaagctctgaagaaagtttga

SEQ ID NO: 126036 - protein, 434 aa, Leptospira interrogans serovar Copenhageni str. Fiocruz L1-130
MPRNYKPETIALHGGQSPDPSTLSRAVPIYQTTSYVFKNTEHAAKLFGLQEFGNIYTRIMNPTTDVLEQRIAALEGGVAALATASGQAAETLALLNIVEAGQEIVASSSLYGGTYNLLHYTFPKLGIKVHFVDPSDPENFRKAVNDKTRAFYAETLGNPKLDTLNLEAIAKVAHDSEVPLIIDNTLPSPYLVNPIEHGADIVVHSLTKFLGGHGTSIGGIIVDSGKFNWGNGKFKNFTEPDPSYHGLKFWEVFGKFEPFGGVNIAYIIKAKVQGLRDMGASISPFNAWQILQGVETLPLRMRKHSENALAVAEYLTKHTKVSWVNYPGLKMDKNYSLAKKYHKKDLYGAILGFGIKGGAVEAKKFIDGLELFSLLANVGDAKSLVIHPASTTHQQLTPEEQLSAGVTPDFVRLSVGLENIEDILFDLEEALKKV

SEQ ID NO: 126037 - DNA, 1239 bp, Thermus thermophilus HB27
  CDS (1)..(1239): transl_table=11
atggagtacaccaccctcgcggtcctcgccgggcttcccgaagacccccatggggcggtggggcttcccatctacgccgtggccgcctacggcttcaaaaccctggaagagggccaggagcgcttcgccaccggggagggctacgtctacgcgcgccagaaggaccccacggccaaagccctggaggagaggctcaaggccctggagggggcgcttgaggccgtggtcctggcctcgggccaggcggccaccttcgccgccctcctcgccctcctccgcccgggggacgaggtggtggcggccaaggggcttttcggccagaccatcggccttttcggccaggtgctctccctcatgggggtaacggtgcgctacgtggaccccgagcccgaggccgtgcgggaggccctgagcgcaaagacccgcgcggtcttcgtggagaccgtggcgaaccccgcccttctcgtacccgacctcgaggccctggccaccctggccgaggaagcgggcgtggccctggtcgtggacaacaccttcggggcggcgggggcgctctgccggcctttggcctggggggcccacgtggtggtggagagcctcaccaagtgggcctcggggcacggctccgttttgggcggggcggtgctctcccgggaaaccgagctctggcggaactacccccagtttctgcagcccgacctcaagggccagatcccctgggaggcccttagggccaggtgcttccccgaaagggtccgcaccttggggctttccctctgcggcatggccctttcccccttcaacgcctacctcctcttccagggcctggagaccgtggccctgagggttgcgcggatgagcgagaccgcgcgcttcctcgccgagcgcctccagggccaccccaaggtgaaggccctccgctacccgggcctccccgaggaccccgcccacaggaacgcccggaagtacctggcctcgggcgggcccatcctcaccctggacctgggggacctggagagggcgagccgcttccttgaggccatccgcctcctcaaggcggcgaacctcggggacgcccggaccctcttggtgcacccctggaccaccacccacagccgcctcaaggaggaggcgaggctccaggccggggtgaccccggggctcgtgcgggtctccgtgggcctcgaggaccctctggacctcctcgccctctttgaggaggccctggaggcggtctag

SEQ ID NO: 126038 - protein, 412 aa, Thermus thermophilus HB27
MEYTTLAVLAGLPEDPHGAVGLPIYAVAAYGFKTLEEGQERFATGEGYVYARQKDPTAKALEERLKALEGALEAVVLASGQAATFAALLALLRPGDEVVAAKGLFGQTIGLFGQVLSLMGVTVRYVDPEPEAVREALSAKTRAVFVETVANPALLVPDLEALATLAEEAGVALVVDNTFGAAGALCRPLAWGAHVVVESLTKWASGHGSVLGGAVLSRETELWRNYPQFLQPDLKGQIPWEALRARCFPERVRTLGLSLCGMALSPFNAYLLFQGLETVALRVARMSETARFLAERLQGHPKVKALRYPGLPEDPAHRNARKYLASGGPILTLDLGDLERASRFLEAIRLLKAANLGDARTLLVHPWTTTHSRLKEEARLQAGVTPGLVRVSVGLEDPLDLLALFEEALEAV

SEQ ID NO: 126039 - DNA, 1158 bp, Picrophilus torridus DSM 9790; identical to SEQ ID NO: 13716
  CDS (1)..(1158): transl_table=11

SEQ ID NO: 126040 - protein, 385 aa, Picrophilus torridus DSM 9790; identical to SEQ ID NO: 13717

SEQ ID NO: 126041 - DNA, 1143 bp, Staphylococcus aureus subsp. aureus MRSA252; identical to SEQ ID NO: 13722
  CDS (1)..(1143): transl_table=11

SEQ ID NO: 126042 - protein, 380 aa, Staphylococcus aureus subsp. aureus MRSA252; identical to SEQ ID NO: 13723

SEQ ID NO: 126043 - DNA, 1191 bp, Acinetobacter sp. ADP1; identical to SEQ ID NO: 13726
  CDS (1)..(1191): transl_table=11

SEQ ID NO: 126044 - protein, 396 aa, Acinetobacter sp. ADP1; identical to SEQ ID NO: 13727

SEQ ID NO: 126045 - DNA, 1161 bp, Erwinia carotovora subsp. atroseptica SCRI1043; identical to SEQ ID NO: 13730
  CDS (1)..(1161): transl_table=11

SEQ ID NO: 126046 - protein, 386 aa, Erwinia carotovora subsp. atroseptica SCRI1043; identical to SEQ ID NO: 13731

SEQ ID NO: 126047 - DNA, 1155 bp, Leifsonia xyli subsp. xyli str. CTCB07
  CDS (1)..(1155): transl_table=11
atgacacacggtttctccacccgcgccatccacatcggccaggagcccgacccgacgacgggcgcgatcatcccgccgatccaccagacctcgaccttcgtccaggacggcatcggcggtctgcgcagcggctacgagtacggccgcgctgccaaccccacccgggattcgctgcagtcgctgctcgcctcgctggaaggcggcgtctccgcgctgtccttcgcttccggcctcgccgccgaagacgctctgctgcgcgccgtgctcagacccggcgaccatatcgtcctcggcaacgatgtctatggtggcacgcaccgtctgatcgaccgcatccacggcgcctgggacgtccgcaacaccacggtcgacctgaccgacctggacgcggtgggcgtcgccctcgcgaccggccgcacccgtctgctctggatcgagaccccgagcaacccgctgatgaagatcagcgacctggccgccttgacctccctcggccacggcgccggtgcgctcgtcgtcgtggacaacaccttcgcctcgcccgcgcttcagcagccgctgtcgttcggcgcggatgtcgtcgtccactcgaccaccaaatacctcggcggtcactccgacgtgatcggcggcgcgctcgtcttcggcggcgaggagctcgccgagaaggtgcggttcatccagttcgccgccggggccgtctccgtgccgatggatgcctggctcaccgtccgtggcatcaagaccctcgccgtccgcatgcagcgccacaccgagaacgcgcaggcgatcgcagacgccctcctcggacgccccggcgtccaggcggtctattaccccggactgccgacgcatccgggccgcgccctcgccgtccgccagatgagcggcttcggcgggatgctctctgtcgccctcgccggcggagccgcggtggcgcgccggttcgccgagtccaccgaagtcttccagctcgcggagtcgctcggcggcgtcgagtccctcatcggctatccggccgagatgacccacgcctccgtgcgcggcacggaactcgacgtgcccggtaacgtgatccgcctgtcggtcggaatcgaggacatcgccgacctgctggcggatgtcgagcaggcgctggggcgggcgtcgctctag

SEQ ID NO: 126048 - protein, 384 aa, Leifsonia xyli subsp. xyli str. CTCB07
MTHGFSTRAIHIGQEPDPTTGAIIPPIHQTSTFVQDGIGGLRSGYEYGRAANPTRDSLQSLLASLEGGVSALSFASGLAAEDALLRAVLRPGDHIVLGNDVYGGTHRLIDRIHGAWDVRNTTVDLTDLDAVGVALATGRTRLLWIETPSNPLMKISDLAALTSLGHGAGALVVVDNTFASPALQQPLSFGADVVVHSTTKYLGGHSDVIGGALVFGGEELAEKVRFIQFAAGAVSVPMDAWLTVRGIKTLAVRMQRHTENAQAIADALLGRPGVQAVYYPGLPTHPGRALAVRQMSGFGGMLSVALAGGAAVARRFAESTEVFQLAESLGGVESLIGYPAEMTHASVRGTELDVPGNVIRLSVGIEDIADLLADVEQALGRASL

SEQ ID NO: 126049 - DNA, 1161 bp, Yersinia pseudotuberculosis IP 32953
  CDS (1)..(1161): transl_table=11
atgacgcgtaaacaggcaacaatagcagtccgtagcgggttgaatgatgacgagcaatacggctgcgttgtccccccgattcacctttccagtacttacaattttattgattttaatcagccgcgcacgcatgactattcacgtcgtggtaatccaacgcgtgatgttgtccaacgggcgctggcggaattggaagggggggccggtgccgtcatgaccagcagcgggatgtcggcgattcatttggtttgcactacattcttacagccgggcgatctgttggtcgctccgcatgactgttacggtggcagttaccgtttatttgacagcttgagcaagcgtggtgcgtatcgggtgttatttgttgatcagggcgatgaagcggcactaaaccgcgcattggcggagaaaccgaagttggtcttgattgaaacaccgagtaatccattgctacgggttgttgatattgccgccatctgccaagccgcccgtgctgcgggcgcactgacggtttgtgataacaccttcctcagccccgccttacagcagcctctctctctcggggccgatttagtggtgcactcctgtaccaaatatctcaatggtcactctgatgtggtggctggtgctgttattgcgaaagatccagaactggttgttgagctggcatggtgggcaaataatattggtgtaaccggtgctgcgtttgacagctatctactccttcgtggtttacgcacgttatcaccacgcatggctcaacagcagcgtaacgcggatgacattgtgcgttatttacagcaacagcctttagtgaaaaagctgtatcatccttccctgccacaacatcccggccacgaaatagcctgccgtcagcaatcaggttttggtgcaatgctcagttttgagctggatggtgatgagcaggtcatgcgccgtttcctttctgcccttgagctatttaccttggcagagtctttggggggggtagaaagcctgatctcccatgcagcgaccatgacccacgcgggtatggcggcagaggcgcgtattgccgcaggcattactgatagtttgttgcgtatttccgtgggtattgaagacagtgaagatttgattgctgatttggaccacgcgttccaattggcagtaacgaggtaa

SEQ ID NO: 126050 - protein, 386 aa, Yersinia pseudotuberculosis IP 32953
MTRKQATIAVRSGLNDDEQYGCVVPPIHLSSTYNFIDFNQPRTHDYSRRGNPTRDVVQRALAELEGGAGAVMTSSGMSAIHLVCTTFLQPGDLLVAPHDCYGGSYRLFDSLSKRGAYRVLFVDQGDEAALNRALAEKPKLVLIETPSNPLLRVVDIAAICQAARAAGALTVCDNTFLSPALQQPLSLGADLVVHSCTKYLNGHSDVVAGAVIAKDPELVVELAWWANNIGVTGAAFDSYLLLRGLRTLSPRMAQQQRNADDIVRYLQQQPLVKKLYHPSLPQHPGHEIACRQQSGFGAMLSFELDGDEQVMRRFLSALELFTLAESLGGVESLISHAATMTHAGMAAEARIAAGITDSLLRISVGIEDSEDLIADLDHAFQLAVTR

SEQ ID NO: 126051 - DNA, 1080 bp, Symbiobacterium thermophilum IAM 14863
  CDS (1)..(1080): transl_table=11
atgaaactggacacggtgctcgtccacgcaggggtcaggcgtgacccggcctatggcgccgtctcggtgccggtctaccaatcggcgacctttcagcatccggccctgggcgagtcgacgggctacgattacagccgcagcggcaacccgacccgggcggccctggaggaagcgcttgcccgggcggaggggggcgcccgggcgctcgcctttgcctcgggcatggcggcactgacctgtgcactggggctcttcgggcccggcgaccacctggtcgtcaccgaggacttgtacggcggcacctaccggctgttggagcaggtgctggccctgccgcacacctacgcggacacggcggatctggacgcggtgcgggcggcgatccggcccgacacccgggcggtcctcgtcgagtccctcaccaacccgcgcatgaagcgggcggatgtcgccgccctggccggtctctgccgggcgcacggcctgctgctgatcgtcgacaacaccttcctcacgccctggctctgccgcccgctggagctgggcgcggacatcgtcgtccacagcgccaccaagtacctggccggccacaacgacgtggtggccggggcgctgatcacccgggacaccgccctgggggaccggctctcctttctccagaacgcggtgggctcggtgctggggccgcaggacagctggctggtgctgcgcgggctgaagaccctcgccctgcggatggagcgccaccagcagaacgcggcgcgcatcgccgcctggctccgggagcacccgcgggtcgaagaggtgctctacccgggcgtgggcgggatgctctccttcaccgtgacggagccctctctggtgccgcaggtgctgcgccgggtgaagctgatcctgttcgccgagtcgctggggggcgtggagagcctgatcaccttcccctggacccagacccacgccgacatgccggaggaggtgcggcggcggctgggcatcacggaccggctgctgcggctctcggtgggcatcgaggacgccgacgacctgatcgccgatcttgctcaggcgctggagggatag

SEQ ID NO: 126052 - protein, 359 aa, Symbiobacterium thermophilum IAM 14863
MKLDTVLVHAGVRRDPAYGAVSVPVYQSATFQHPALGESTGYDYSRSGNPTRAALEEALARAEGGARALAFASGMAALTCALGLFGPGDHLVVTEDLYGGTYRLLEQVLALPHTYADTADLDAVRAAIRPDTRAVLVESLTNPRMKRADVAALAGLCRAHGLLLIVDNTFLTPWLCRPLELGADIVVHSATKYLAGHNDVVAGALITRDTALGDRLSFLQNAVGSVLGPQDSWLVLRGLKTLALRMERHQQNAARIAAWLREHPRVEEVLYPGVGGMLSFTVTEPSLVPQVLRRVKLILFAESLGGVESLITFPWTQTHADMPEEVRRRLGITDRLLRLSVGIEDADDLIADLAQALEG

SEQ ID NO: 126053 - DNA, 1134 bp, Bacillus cereus E33L
  CDS (1)..(1134): transl_table=11
atgagagcaaagacaaagttaattcatggtattcgcataggagaaccttcaactggatctgtaaatgtaccgatttatcaaacgagtacgtacaaacaagaagcagttggtaagcatcaaggatatgaatattcacgtacaggaaacccaacacgtgcagctttagaagaaatgattgctgtattagaaaacggtcatgctggttttgcatttggctcaggaatggcggctattacagctacgattatgttgttctcaaaaggtgaccacgttattttaacagatgatgtgtatggtggaacgtaccgcgtgattacgaaagtattaaaccgcttcggtattgagcatacatttgtagatacaacaaacttagaagaagttgaagaagcgattcgtccaaatacgaaagcgatttatgtagaaacaccaacgaatccactactaaaaattactgatattaaaaaaatatctactcttgctaaagagaaagatttattaacaattattgataacacattcatgacgccatattggcagtcgccgatttctttaggggcagatattgtacttcatagtgcaacaaaatatttaggaggtcatagtgacgtagttgcaggtttagtagttgtaaatagcccgcaattagcagaagaccttcactttgtacaaaactcaacaggaggcattcttggcccgcaagatagcttcttactacttcgtggtttaaaaacattaggaattcgaatggaagagcatgaaacgaattcacgcgcaattgctgagtttttaaataatcatccaaaagtaaataaagtatattacccaggtcttgcatcacatcaaaaccatgaattagcagcagaacaagcaaatggatttggtgcgattatctcatttgatgtagatagcgaagaaacattaaataaagtacttgagagattacaatactttacactggctgaaagtttaggagcagtagaaagtttaatttctatcccatctcaaatgacacatgcatcaatcccagcagatcgtcgcaaagaactaggaattacagatacattaattcgaatttctgtcggtattgaagacggagaagatttaattgaagatttagcacaagcgttagcatag

SEQ ID NO: 126054 - protein, 377 aa, Bacillus cereus E33L
MRAKTKLIHGIRIGEPSTGSVNVPIYQTSTYKQEAVGKHQGYEYSRTGNPTRAALEEMIAVLENGHAGFAFGSGMAAITATIMLFSKGDHVILTDDVYGGTYRVITKVLNRFGIEHTFVDTTNLEEVEEAIRPNTKAIYVETPTNPLLKITDIKKISTLAKEKDLLTIIDNTFMTPYWQSPISLGADIVLHSATKYLGGHSDVVAGLVVVNSPQLAEDLHFVQNSTGGILGPQDSFLLLRGLKTLGIRMEEHETNSRAIAEFLNNHPKVNKVYYPGLASHQNHELAAEQANGFGAIISFDVDSEETLNKVLERLQYFTLAESLGAVESLISIPSQMTHASIPADRRKELGITDTLIRISVGIEDGEDLIEDLAQALA

SEQ ID NO: 126055 - DNA, 1110 bp, Mannheimia succiniciproducens MBEL55E; identical to SEQ ID NO: 13734
  CDS (1)..(1110): transl_table=11

SEQ ID NO: 126056 - protein, 369 aa, Mannheimia succiniciproducens MBEL55E; identical to SEQ ID NO: 13735

SEQ ID NO: 126057 - DNA, 1143 bp, Bacillus licheniformis ATCC 14580; identical to SEQ ID NO: 13738
  CDS (1)..(1143): transl_table=11

SEQ ID NO: 126058 - protein, 380 aa, Bacillus licheniformis ATCC 14580; identical to SEQ ID NO: 13739

SEQ ID NO: 126059 - DNA, 1152 bp, Methylococcus capsulatus str. Bath; identical to SEQ ID NO: 13746
  CDS (1)..(1152): transl_table=11

SEQ ID NO: 126060 - protein, 383 aa, Methylococcus capsulatus str. Bath; identical to SEQ ID NO: 13747

SEQ ID NO: 126061 - DNA, 1170 bp, Azoarcus sp. EbN1; identical to SEQ ID NO: 13750
  CDS (1)..(1170): transl_table=11

SEQ ID NO: 126062 - protein, 389 aa, Azoarcus sp. EbN1; identical to SEQ ID NO: 13751

SEQ ID NO: 126063 - DNA, 1203 bp, Silicibacter pomeroyi DSS-3; identical to SEQ ID NO: 13752
  CDS (1)..(1203): transl_table=11

SEQ ID NO: 126064 - protein, 400 aa, Silicibacter pomeroyi DSS-3; identical to SEQ ID NO: 13753

SEQ ID NO: 126065 - DNA, 1137 bp, Bacillus clausii KSM-K16; identical to SEQ ID NO: 13754
  CDS (1)..(1137): transl_table=11

SEQ ID NO: 126066 - protein, 378 aa, Bacillus clausii KSM-K16; identical to SEQ ID NO: 13755

SEQ ID NO: 126067 - DNA, 1101 bp, Thermococcus kodakarensis KOD1; identical to SEQ ID NO: 13758
  CDS (1)..(1101): transl_table=11

SEQ ID NO: 126068 - protein, 366 aa, Thermococcus kodakarensis KOD1; identical to SEQ ID NO: 13759

SEQ ID NO: 126069 - DNA, 1146 bp, Staphylococcus epidermidis RP62A; identical to SEQ ID NO: 13760
  CDS (1)..(1146): transl_table=11

SEQ ID NO: 126070 - protein, 381 aa, Staphylococcus epidermidis RP62A; identical to SEQ ID NO: 13761

SEQ ID NO: 126071 - DNA, 1158 bp, Neisseria gonorrhoeae FA 1090
  CDS (1)..(1158): transl_table=11
atgaaattcccgacccgtaccatccattccggctacgattgcgacgaacacaaccgcgcgctgatgccgccgatttatcaaaacagtatgtttgcgctgcacgaaatcggcgaaaatgtgccttaccgttattcgcgcctgagcaacccgacccgtcagattttggaagacaccgttgccgatttggaacacggtgcggcaggttttgcgttttccagcggtatggcggggattgatgccgtgtggcgtaccttcctgcgcccgggcgataccatcgtcgcggtcgccgatatttacggcggcgcatatgacttattggtcgatgtttatcaaaaatggggggtgaacgttgtttttgccgatttgggcaatcccgataatttggacgaattgctcaaagcgcacaatgtcaaactggtttggctggaaatgccgtccaatccgcttttacgcttggtagacatcaaagcccttgcagcgaaagccaaagcagccgacgcgctggtcggcatcgacaacacctttgccacgccgtatctgcaacagcccttggatatgggttgcgattttgcattccattccgctaccaaatatttgtgcggccattccgacgtattgatgggcatcgtcgttgccaaaaccaaagagctggctcagcctttgcacgatatgatggtgcataccggcgcgattgcaggtccgacggactgctggctggtgttgcgcggcatcaaaacgcttgccctgcgtatggaggcacactgcaaaaacgcactcgaaattgcgcgccgtttggaagcccatcctgccattgaaaaagtgttccatcccggcctgccgtctcacgaacattacgcactcgcccaagcgcaaatgcccaaaggcatcggcggcgtggttacggtttatctcaaaaacgacacgcgcgaagcggcaaacagcgtgattaaaaacatgaaactggtcaaaatgacctccagcctcggcggcgtggaaagtctggtcaaccattgctattcccaatctcacagcggcgtgccgcataatgtgaaaatggaaatgggcatcagggtcggactcctgcgcttctccatcggtattgaagacgtagatgatatttggaacgatatttccgccgcactcgatacaactttgtaa

SEQ ID NO: 126072 - protein, 385 aa, Neisseria gonorrhoeae FA 1090
MKFPTRTIHSGYDCDEHNRALMPPIYQNSMFALHEIGENVPYRYSRLSNPTRQILEDTVADLEHGAAGFAFSSGMAGIDAVWRTFLRPGDTIVAVADIYGGAYDLLVDVYQKWGVNVVFADLGNPDNLDELLKAHNVKLVWLEMPSNPLLRLVDIKALAAKAKAADALVGIDNTFATPYLQQPLDMGCDFAFHSATKYLCGHSDVLMGIVVAKTKELAQPLHDMMVHTGAIAGPTDCWLVLRGIKTLALRMEAHCKNALEIARRLEAHPAIEKVFHPGLPSHEHYALAQAQMPKGIGGVVTVYLKNDTREAANSVIKNMKLVKMTSSLGGVESLVNHCYSQSHSGVPHNVKMEMGIRVGLLRFSIGIEDVDDIWNDISAALDTTL

SEQ ID NO: 126073 - DNA, 1275 bp, Psychrobacter arcticus 273-4; identical to SEQ ID NO: 13764
  CDS (1)..(1275): transl_table=11

SEQ ID NO: 126074 - protein, 424 aa, Psychrobacter arcticus 273-4; identical to SEQ ID NO: 13765

SEQ ID NO: 126075 - DNA, 1167 bp, Colwellia psychrerythraea 34H; identical to SEQ ID NO: 13766
  CDS (1)..(1167): transl_table=11

SEQ ID NO: 126076 - protein, 388 aa, Colwellia psychrerythraea 34H; identical to SEQ ID NO: 13767

SEQ ID NO: 126077 - DNA, 1182 bp, Dechloromonas aromatica RCB; identical to SEQ ID NO: 13772
  CDS (1)..(1182): transl_table=11

SEQ ID NO: 126078 - protein, 393 aa, Dechloromonas aromatica RCB; identical to SEQ ID NO: 13773

SEQ ID NO: 126079 - DNA, 1146 bp, Thermobifida fusca YX; identical to SEQ ID NO: 13774
  CDS (1)..(1146): transl_table=11

SEQ ID NO: 126080 - protein, 381 aa, Thermobifida fusca YX; identical to SEQ ID NO: 13775

SEQ ID NO: 126081 - DNA, 1413 bp, Ralstonia eutropha JMP134
  CDS (1)..(1413): transl_table=11
atggttctttcccccacatggcctgagccaccccgcgctgctaccatcccccaagcccgacgcatccgttcgccgcggctccatccggcatcttccgcacgcgtgccggtccagcacctctccaagaacaacccgaacatgagacttgaaacccttgccgtccacggcggctactcgcccgatccgaccacgcgtgccgtagcggtaccgatctatcaaaccgtcgcctactcgttcgacagcgcccagcatggcgccgacctgtttgacctgaaggtgccaggcaatatctacagccgcatcatgaacccgaccaacgacgtgctggagcagcgcctggccgcgctcgaaggcggcgtcggcgcacttgcgctggcttcgggcatggcggccatcacctacgcgatccagaccatcgcggaggccggcgacaacatcgtctcatcgagccagctttacggcggcacctataacctgctcgcgcatacgctgccacagtcgggcatcgaaacgcgctttgccgatggccgcaatccggcgagctttggcgacctgatcgacgaacgtaccaaggccgttttcgtggaatcggtcggcaatccgctcggcaacgtggtcgatatcgaagcgattgcgcgcgtggcgcacaaccatggcgtgcccctgatcgtcgacaacaccgtgccctctccgtatctgtgccggccgttcgagcatggcgcggatatcgtcgtgcattcgctgaccaagtacctgggcggccacggcaacagcgtgggcggcgcgatcgtggacagcgggaagttcccgtgggccaagcacaaggaccgcttcaagcgcctgaacgagcccgacgtgtcataccacggcgtggtctataccgaggcactgggcccagcggcctacatcggccgcgcgcgcgtggtgcccctgcgcaataccggcgcggcgctgtcgccgttcaacgcgttcctcatcctgcaaggcatcgagacgctggcgctgcgcctggaccgcatcaccgagaacgcgctggctatcgctcaccacctgcagaagcatccgaaggtggcatgggtcaacttcgcaggcctgccggagcacgctgatcacgcgctggtgcagaagtacctcggcggccgcggccccggcatcctgtcgttcggcctgaaggcgggcggacgtgaaggcggcgcgcgtttcctcgacgcgctgcagctgttcacgcgcctggtcaacattggcgatgccaagtcgctggctacgcacccggcctcgaccacgcaccgccagctcaatgccgacgagctcaaggccgccggcgtgagcgaagacatggtgcgcctgtcgatcggcatcgagcatatcgatgacctgatcgaagacctcgaccgcgccctcgaagccgcctga

SEQ ID NO: 126082 - protein, 470 aa, Ralstonia eutropha JMP134
MVLSPTWPEPPRAATIPQARRIRSPRLHPASSARVPVQHLSKNNPNMRLETLAVHGGYSPDPTTRAVAVPIYQTVAYSFDSAQHGADLFDLKVPGNIYSRIMNPTNDVLEQRLAALEGGVGALALASGMAAITYAIQTIAEAGDNIVSSSQLYGGTYNLLAHTLPQSGIETRFADGRNPASFGDLIDERTKAVFVESVGNPLGNVVDIEAIARVAHNHGVPLIVDNTVPSPYLCRPFEHGADIVVHSLTKYLGGHGNSVGGAIVDSGKFPWAKHKDRFKRLNEPDVSYHGVVYTEALGPAAYIGRARVVPLRNTGAALSPFNAFLILQGIETLALRLDRITENALAIAHHLQKHPKVAWVNFAGLPEHADHALVQKYLGGRGPGILSFGLKAGGREGGARFLDALQLFTRLVNIGDAKSLATHPASTTHRQLNADELKAAGVSEDMVRLSIGIEHIDDLIEDLDRALEAA

SEQ ID NO: 126083 - DNA, 1170 bp, Thiobacillus denitrificans ATCC 25259; identical to SEQ ID NO: 13780
  CDS (1)..(1170): transl_table=11

SEQ ID NO: 126084 - protein, 389 aa, Thiobacillus denitrificans ATCC 25259; identical to SEQ ID NO: 13781

SEQ ID NO: 126085 - DNA, 1137 bp, Anabaena variabilis ATCC 29413; identical to SEQ ID NO: 13782
  CDS (1)..(1137): transl_table=11

SEQ ID NO: 126086 - protein, 378 aa, Anabaena variabilis ATCC 29413; identical to SEQ ID NO: 13783

SEQ ID NO: 126087 - DNA, 1179 bp, Pseudomonas fluorescens PfO-1; identical to SEQ ID NO: 13786
  CDS (1)..(1179): transl_table=11

SEQ ID NO: 126088 - protein, 392 aa, Pseudomonas fluorescens PfO-1; identical to SEQ ID NO: 13787

SEQ ID NO: 126089 - DNA, 1215 bp, Rhodobacter sphaeroides 2.4.1; identical to SEQ ID NO: 13788
  CDS (1)..(1215): transl_table=11

SEQ ID NO: 126090 - protein, 404 aa, Rhodobacter sphaeroides 2.4.1; identical to SEQ ID NO: 13789

SEQ ID NO: 126091 - DNA, 1137 bp, Geobacter metallireducens GS-15
  CDS (1)..(1137): transl_table=11
atgaaattcggcacccgcatcatccacaccggccacgacatcgaccccaccaccggggcggtttccatccccatctaccagacctctacctttcgtcaggagtcggtggatcacttcggcaagtatgactatgcccgttccgacaatcccactcgggaggccctggaggagaccattgcccagctggagggaggaactcgcgggtttgcctacgcctcggggatggcggccatctcgtcggtgctgcttctcttctcgccgggggatcacctggtggtctgcgaggatgtgtacggggggacgttccgggtcctgacccagctcttcagccgcctcggcatcacctccaccttcgtggatgccaccgatctggacgccatcgccgctgcgttccggcccgagaccaaggggctcttcctggagagcccgtcgaacccgcttctcaagatcaccgacctggaaggcgcggcccgcatcgcccgggagcggggcgccataacgctggtggacaacaccttcatgactccctacctccagaggcccctggaggtggggtgcgacatcgtcctccacagcgggaccaagttcctgaacggccacagcgacgtcatctgcggctttgccgtggtgaaggaccccgagttggggaagcggatccgcttcattcagaatgccttcggcgccatcctcggcccccaggattcgtggctcgtgctccgggggctcaagacccttcgggtgcggatggaggagagccagcggagcgcgacccgcatcgcctcgtggctggcgggagagaagcgggtgacccgggtgctgtaccccggccttccgagccaccccggccatgcaatccatgcccgccagagctcgggtcccggcgcggttctctcctttgccctcgactccctggaggttacccgccggctcctggaggggatgaagctggccgccttcgccgtgagcctcggcggggtggagagcatcatctcctacccggccaggatgtcccatgcggccatgccccccgaggagcgggccgcccgcggcatcggcgacacgctcgtgcgcctctcggtggggctggaggaggccgacgacctcatcgcggagatggaccggctcatcaacggctga

SEQ ID NO: 126092 - protein, 378 aa, Geobacter metallireducens GS-15
MKFGTRIIHTGHDIDPTTGAVSIPIYQTSTFRQESVDHFGKYDYARSDNPTREALEETIAQLEGGTRGFAYASGMAAISSVLLLFSPGDHLVVCEDVYGGTFRVLTQLFSRLGITSTFVDATDLDAIAAAFRPETKGLFLESPSNPLLKITDLEGAARIARERGAITLVDNTFMTPYLQRPLEVGCDIVLHSGTKFLNGHSDVICGFAVVKDPELGKRIRFIQNAFGAILGPQDSWLVLRGLKTLRVRMEESQRSATRIASWLAGEKRVTRVLYPGLPSHPGHAIHARQSSGPGAVLSFALDSLEVTRRLLEGMKLAAFAVSLGGVESIISYPARMSHAAMPPEERAARGIGDTLVRLSVGLEEADDLIAEMDRLING

SEQ ID NO: 126093 - DNA, 1173 bp, Rhodospirillum rubrum ATCC 11170; identical to SEQ ID NO: 13800
  CDS (1)..(1173): transl_table=11

SEQ ID NO: 126094 - protein, 390 aa, Rhodospirillum rubrum ATCC 11170; identical to SEQ ID NO: 13801

SEQ ID NO: 126095 - DNA, 1137 bp, Moorella thermoacetica ATCC 39073; identical to SEQ ID NO: 13804
  CDS (1)..(1137): transl_table=11

SEQ ID NO: 126096 - protein, 378 aa, Moorella thermoacetica ATCC 39073; identical to SEQ ID NO: 13805

SEQ ID NO: 126097 - DNA, 1302 bp, Burkholderia thailandensis E264
  CDS (1)..(1302): transl_table=11
atgacgtattcgagctatcacaagaaggacatcgacggccgtccgctgcatccggaaacgcagatgatgtcgtacggattcgatccgtttttgtccgaaggcgcggtgaagcctccggtgttcctcacgtcgacgttcgcattccgctcggcggaggacggcgccgatttcttcgacgtcgtgtcgggccgcaagccgctcccgcaaggcgaggcggcgggcctcgtctacagtcgcttcaatcatccgaatctcgagatcgtcgaggatcgcctcgcgctgcttgacggctccgatgcggcggtcgtcacgtcgagcggaatgtcggcgatcagcgcgatctttctcgcattcctgcggcccggcgatcaactcgtgcaatcggtgccgctgtatggcggcacggaaacgctgatcgcgaaatatctgcgcgactggggcgtcggcgcgcatccgatcgacaacggactgtcgccgcagtcgatcggcgcggcgctcgaagccgccgcgcagcagggccccgtgcggctctgctatgtcgagacgccggcgaatccgacgaacgcgctgatcgatctcgacggcatgcgccgcgcgctcgacgcgttcgaagcgcgtcacggctatcgcccgatttcggtgtgcgacaacacgctgctcgggccgatcttccagaagccgagcgagcacggcgtcgacatgtcggtgtattcgctgaccaagtacgtgggcggccatagcgacctcgtcgcgggcggcgtcacggggcgccgggatctcgtcgcgaaggtccgcgcggtgcgcagcgcgttcggctcgcaactcgatccgcattcgtcgtggatgctgatccgctcgatggagacggtcgtgctgcggatgaagcaggcggcgcgcaccgcgtcggcggtcgcgaagtggctcgcggcgaatccgtatcagaaggtcgatgtataccacccggagctgatcgtcgacgatgcttatcaggccgtgtacaagcggcaatgcaccggcgccggctcgacgttcgcgttcgtgctgagtggcggtcgcgccgaagcattccggttcatcaatgcgctgcatctgttcaagtccgcggtgagcctcggcggcaccgaatcgttgatttgccatccggcgtcgaccacgcactccggcgtgcccgaggcggcgcgcaaggcggcgggcgtgtcggaagggttgattcgcgtgtcgatcgggctcgagcacgaggaggatctgatcgccgatctcgacaacgcgtttcgccggtccggcatcgcggcaggcggctga

SEQ ID NO: 126098 - protein, 433 aa, Burkholderia thailandensis E264
MTYSSYHKKDIDGRPLHPETQMMSYGFDPFLSEGAVKPPVFLTSTFAFRSAEDGADFFDVVSGRKPLPQGEAAGLVYSRFNHPNLEIVEDRLALLDGSDAAVVTSSGMSAISAIFLAFLRPGDQLVQSVPLYGGTETLIAKYLRDWGVGAHPIDNGLSPQSIGAALEAAAQQGPVRLCYVETPANPTNALIDLDGMRRALDAFEARHGYRPISVCDNTLLGPIFQKPSEHGVDMSVYSLTKYVGGHSDLVAGGVTGRRDLVAKVRAVRSAFGSQLDPHSSWMLIRSMETVVLRMKQAARTASAVAKWLAANPYQKVDVYHPELIVDDAYQAVYKRQCTGAGSTFAFVLSGGRAEAFRFINALHLFKSAVSLGGTESLICHPASTTHSGVPEAARKAAGVSEGLIRVSIGLEHEEDLIADLDNAFRRSGIAAGG

SEQ ID NO: 126099 - DNA, 1179 bp, Frankia sp. CcI3; identical to SEQ ID NO: 13812
  CDS (1)..(1179): transl_table=11

SEQ ID NO: 126100 - protein, 392 aa, Frankia sp. CcI3; identical to SEQ ID NO: 13813

SEQ ID NO: 126101 - DNA, 1143 bp, Staphylococcus aureus subsp. aureus NCTC 8325
  CDS (1)..(1143): transl_table=11
atgaacaagaaaactaaattaattcatggtgggcacacaacagacgattatacaggtgccgttacaacaccaatttatcaaacaagtacatatttacaagatgatattggtgatttacgtcaaggatatgaatattctcgtactgcgaatccaacaagaagttctgtagaaagcgttattgcgacattagaaaatggcaaacatggctttgcatttagttcaggtgttgcagcaatcagtgcagttgttatgctgttggacaaaggagatcatattattttaaattcagatgtatacggcggtacttatcgcgcattgacaaaagtatttacacgatttggcattgaagtggattttgtagatacaacgcatacagattcaattgtacaagcgatacgcccaacaacaaagatgttgtttattgaaacaccttctaatccattattacgtgttactgacattaaaaagtctgctgaaattgcgaaagaacacggtttgatttcagttgttgataacacatttatgacaccttattatcagaatccattagatttaggtatcgatattgtcttacattctgcaacgaaatatttaggtggacatagtgatgtcgttgctggtttagttgcaacatcggatgacaagcttgcagaacgtttagcatttatttcaaattcaacaggtggcattttaggacctcaagatagctatttacttgtgaggggtattaaaacattaggtttacgtatggaacaaattaatcgcagcgttattgaaattattaaaatgttacaagcacatccagctgtgcaacaagtgttccatccaagtattgaaagtcatttaaatcatgatgtccatatggctcaagcggatggccatacaggtgtgattgcatttgaagtgaaaaatacagaaagtgccaaacaattgattaaagcaacatcgtattacacattagctgaaagtttaggtgcagtggaaagtttaatttcagtacctgcattgatgacacatgcatccattccagcagatattcgagctaaagaaggtattacagacggacttgtaagaatttctgtaggtattgaagatactgaagatttagtcgatgatttaaaacaagcactagatactttataa

SEQ ID NO: 126102 - protein, 380 aa, Staphylococcus aureus subsp. aureus NCTC 8325
MNKKTKLIHGGHTTDDYTGAVTTPIYQTSTYLQDDIGDLRQGYEYSRTANPTRSSVESVIATLENGKHGFAFSSGVAAISAVVMLLDKGDHIILNSDVYGGTYRALTKVFTRFGIEVDFVDTTHTDSIVQAIRPTTKMLFIETPSNPLLRVTDIKKSAEIAKEHGLISVVDNTFMTPYYQNPLDLGIDIVLHSATKYLGGHSDVVAGLVATSDDKLAERLAFISNSTGGILGPQDSYLLVRGIKTLGLRMEQINRSVIEIIKMLQAHPAVQQVFHPSIESHLNHDVHMAQADGHTGVIAFEVKNTESAKQLIKATSYYTLAESLGAVESLISVPALMTHASIPADIRAKEGITDGLVRISVGIEDTEDLVDDLKQALDTL

SEQ ID NO: 126103 - DNA, 1179 bp, Methylobacillus flagellatus KT; identical to SEQ ID NO: 13818
  CDS (1)..(1179): transl_table=11

SEQ ID NO: 126104 - protein, 392 aa, Methylobacillus flagellatus KT; identical to SEQ ID NO: 13819

SEQ ID NO: 126105 - DNA, 1191 bp, Burkholderia xenovorans LB400; identical to SEQ ID NO: 13820
  CDS (1)..(1191): transl_table=11

SEQ ID NO: 126106 - protein, 396 aa, Burkholderia xenovorans LB400; identical to SEQ ID NO: 13821

SEQ ID NO: 126107 - DNA, 1296 bp, Methanococcoides burtonii DSM 6242
  CDS (1)..(1296): transl_table=11
atgactgacaaaacctatggattagatacaatagcattacacggaggtcatgagccagatgcaacaggatcaagagctgttcccatctaccagacagcagcatacgttttcaacgatgctgagcacgcagctaacctttttgccctgaaggcattcgggaacatctacacacgcctgatgaaccctaccaccgatgttcttgaaaagagggtagctgccattgagggtggtacaggtgcattaggtgtagcttcaggcatgtctgccatcactcttgcagcccttgcggtaacacagctcggggatgagatagtttctgcaaataatctctatggtggcacgtaccagcttttcaatcacactttccccaaacttggcaggaaagtaaatttcgtagattcaacaaaaccggacgatttcgaaaaggccattactgagaagacccgtgccatctatgtcgagataatcggaaacccaaagctggatatccctgatcttgaaaagatagctgagatcgctcacaatgctggtattcccctcattgtggacaacaccgtaggtgtgggcattgtcaaacctatcgattatggtgctgacatcgtggtcctgtccgctaccaagttcctcggtggccatggtacttccattggtggtataatagttgattccggaaatttcagctgggacaacggcaagttccctgagtttaccgaccccgaccccagctatcacggtctgaagttctgggaatcattcggcaatattcccggaatgggaaaccttgcttttatcctgagggtacgcacacaacttttgcgtgacctggggcctgcaatgagcccattcaatgcgttccagttcatacagggcgtggaaacactatctttacgtgtgaaaagacacggtgagaatgctctggcggttgcccgacaccttaactcacacccgcttgttgaatgggtgaactatccgggccttgaagaccatccctcccatgagcttgcacagaagtatcttaacggtagctatggtgctattcttgggttcggtgtgaaaggcggacttgaagcaggcaagaagttcattgagaacgttgagctactttcacatcttgcgaacatcggggatgcaaagacacttgtgatccatcctgcatcaaccacacaccagcagcttacaaaggaagagcgtgagcagaccggtgtaacagatgattttataaggatgtctgtcggattagaggatatagatgacatcatagctgatatcgatcaggcattggagaggtcgcagtaa

SEQ ID NO: 126108 - protein, 431 aa, Methanococcoides burtonii DSM 6242
MTDKTYGLDTIALHGGHEPDATGSRAVPIYQTAAYVFNDAEHAANLFALKAFGNIYTRLMNPTTDVLEKRVAAIEGGTGALGVASGMSAITLAALAVTQLGDEIVSANNLYGGTYQLFNHTFPKLGRKVNFVDSTKPDDFEKAITEKTRAIYVEIIGNPKLDIPDLEKIAEIAHNAGIPLIVDNTVGVGIVKPIDYGADIVVLSATKFLGGHGTSIGGIIVDSGNFSWDNGKFPEFTDPDPSYHGLKFWESFGNIPGMGNLAFILRVRTQLLRDLGPAMSPFNAFQFIQGVETLSLRVKRHGENALAVARHLNSHPLVEWVNYPGLEDHPSHELAQKYLNGSYGAILGFGVKGGLEAGKKFIENVELLSHLANIGDAKTLVIHPASTTHQQLTKEEREQTGVTDDFIRMSVGLEDIDDIIADIDQALERSQ

SEQ ID NO: 126109 - DNA, 1209 bp, Ralstonia metallidurans CH34
  CDS (1)..(1209): transl_table=11
atgagcgaaccgttcaaccccgacgcctacggcattgataccctcggcgtgcgcgccggcacgctgcgcactggcgaattcatggagcactccgaggcgatgtacctgacctcgagcttctgcttcaacagtgcagccgaagccgccgcacgcttcgccaactcggaagagggttacacctactcgcgcttcacgaatccgaccgtgtcgatgttccagtcgcgcctggccgcgctggaaggcgcggaggcctgcatggccacggcttcgggcatgagcgcgattctgtcggtggcgctcgccacgctgcaggccggcgatcacctggtcagctcgcgttcgatcttcggctcgacgatgacgctgttcaactcgatcctggccaagttcggtgtggagacgacctacgtcgacggcaccgatctggctgcctggcgtgccgctgtgaagccgaacacgaagctgttcttcctggagacgccgtcgaacccgctgaccgaggtgtccgatatcgcggcagttgccgatattgcgcacaatgccggcgcgctgttcgtggtcgacaactgcttctgctcaccggctttgcagcagccgatcaagttcggtgccgatgtggtggtgcattcggccaccaagcacatcgatggccagggccgcgtgcttggcggcgcggtggtcggcaagcacgatttcatcatgggcaaggtgttcccgttcgtgcgtacggcgggcccgacgctgtcggcgttcaacgcgtgggtgatgctcaagggcatggaaacgctggcgatccgcatggagcgtcactcgcagagcgcgttggcgattgccgagttcctcgagtcacatccggccgtgaatcgtgtgttccacccggcgctgaagtcgcatccgcagtacgagatcgcccaacgccagcagagcgggggcggcgcgatcgtgtcgttcgagttgaagggcgatagccccgaagccatgcgtgctgctgcgtggcgcgtgatcgacagcacgaagctgtgctcgatcaccggcaatctcggcgacacgcgcacgacgatcacccatccgtacaccaccacccacggtcgcgtggcgcctgaagccaaggccgccgccggcatcagcgaagggctgatccgactggccgttggcctggagtccgtggaggatctcaaggccgatctgctgcgcggcctgggccagtaa

SEQ ID NO: 126110 - protein, 402 aa, Ralstonia metallidurans CH34
MSEPFNPDAYGIDTLGVRAGTLRTGEFMEHSEAMYLTSSFCFNSAAEAAARFANSEEGYTYSRFTNPTVSMFQSRLAALEGAEACMATASGMSAILSVALATLQAGDHLVSSRSIFGSTMTLFNSILAKFGVETTYVDGTDLAAWRAAVKPNTKLFFLETPSNPLTEVSDIAAVADIAHNAGALFVVDNCFCSPALQQPIKFGADVVVHSATKHIDGQGRVLGGAVVGKHDFIMGKVFPFVRTAGPTLSAFNAWVMLKGMETLAIRMERHSQSALAIAEFLESHPAVNRVFHPALKSHPQYEIAQRQQSGGGAIVSFELKGDSPEAMRAAAWRVIDSTKLCSITGNLGDTRTTITHPYTTTHGRVAPEAKAAAGISEGLIRLAVGLESVEDLKADLLRGLGQ

SEQ ID NO: 126111 - DNA, 1158 bp, Acidobacteria bacterium Ellin345; identical to SEQ ID NO: 13828
  CDS (1)..(1158): transl_table=11

SEQ ID NO: 126112 - protein, 385 aa, Acidobacteria bacterium Ellin345; identical to SEQ ID NO: 13829

SEQ ID NO: 126113 - DNA, 1203 bp, Silicibacter sp. TM1040; identical to SEQ ID NO: 13830
  CDS (1)..(1203): transl_table=11

SEQ ID NO: 126114 - protein, 400 aa, Silicibacter sp. TM1040; identical to SEQ ID NO: 13831

SEQ ID NO: 126115 - DNA, 1146 bp, Myxococcus xanthus DK 1622; identical to SEQ ID NO: 13832
  CDS (1)..(1146): transl_table=11

SEQ ID NO: 126116 - protein, 381 aa, Myxococcus xanthus DK 1622; identical to SEQ ID NO: 13833

SEQ ID NO: 126117 - DNA, 1233 bp, Rubrobacter xylanophilus DSM 9941; identical to SEQ ID NO: 13836
  CDS (1)..(1233): transl_table=11

SEQ ID NO: 126118 - protein, 410 aa, Rubrobacter xylanophilus DSM 9941; identical to SEQ ID NO: 13837

SEQ ID NO: 126119 - DNA, 1176 bp, Cytophaga hutchinsonii ATCC 33406; identical to SEQ ID NO: 13840
  CDS (1)..(1176): transl_table=11

SEQ ID NO: 126120 - protein, 391 aa, Cytophaga hutchinsonii ATCC 33406; identical to SEQ ID NO: 13841

SEQ ID NO: 126121 - DNA, 1173 bp, Rhodococcus sp. RHA1; identical to SEQ ID NO: 13844
  CDS (1)..(1173): transl_table=11

SEQ ID NO: 126122 - protein, 390 aa, Rhodococcus sp. RHA1; identical to SEQ ID NO: 13845

SEQ ID NO: 126123 - DNA, 1182 bp, Shewanella sp. MR-4; identical to SEQ ID NO: 13852
  CDS (1)..(1182): transl_table=11

SEQ ID NO: 126124 - protein, 393 aa, Shewanella sp. MR-4; identical to SEQ ID NO: 13853

SEQ ID NO: 126125 - DNA, 1182 bp, Shewanella sp. MR-7; identical to SEQ ID NO: 13854
  CDS (1)..(1182): transl_table=11

SEQ ID NO: 126126 - protein, 393 aa, Shewanella sp. MR-7; identical to SEQ ID NO: 13855

SEQ ID NO: 126127 - DNA, 1182 bp, Alkalilimnicola ehrlichei MLHE-1; identical to SEQ ID NO: 13860
  CDS (1)..(1182): transl_table=11

SEQ ID NO: 126128 - protein, 393 aa, Alkalilimnicola ehrlichei MLHE-1; identical to SEQ ID NO: 13861

SEQ ID NO: 126129 - DNA, 1122 bp, Hyphomonas neptunium ATCC 15444
  CDS (1)..(1122): transl_table=11
ttggctgacgaactctcccccatctcgcgcctgctgcaccggcggggtgaaagcctgcaaaaaggtgatccggtcgccctgcccatcgtggcgtcgacgacgtttcatctgccgggcgacccgcaggcgagccatgtgtatggccgctatggcaacccgacggtggaggaagtggaggccgagatcggcctgctggaaggggccgaggcggtgctgtttccgtccggcatggcggcgattgcggcggtgttttacgcccatctgaaaccgggtgaccgggtgctggtgcatgcggacggctattacaatgcccgcgcgctgctggaggcgtattttgcgccgctgggcgtggatattgccacctgcccgacggcggacatggcggaagccgatctgacaggcgtgaagctggtgctggcggagacgccgtccaatccggggctggaggtgtgcgacctcgccaagctggcgcgcaatgcgaaggatgcaggcgcgctgctggcggtggacaacaccacggccacaccgctgtgccagcgaccgctggacctgggggccgactttgccatcatggccgatacaaaggcgatggcggggcattcggacattctggccggacatgtggcgagccgtgacccggcgctgatggcgccggtgaagacctggcggcgactgggcggggcgatctgcagcccgtttgatgcctatctgctgcaccgggggctcgccacgctggagctgcgcgtggcgcgggcgaatgccaatgcgctggcggttgccaatgcgctggcgggcatcgagggggtggcgggcctgcgctatccggggctggcgacggaccccgcgcatgacatcgcacgcaagcaaatgagcgggtacggaccaattgtgagcttttgcctgccgagccgggagctggctgaagcgttcatcgcgcgccaccccctgctgacgccgtccacgagctttggcggtgtgcattcggcggccgaatgccgggtgcgctggggggatcatgtggcgccggggttcatccgcatggcgtgcgggatagagcctgtggctgacctgaccggcgcaacgatccggacgctggattcccttaaccttcgcggtgcttag

SEQ ID NO: 126130 - protein, 373 aa, Hyphomonas neptunium ATCC 15444
MADELSPISRLLHRRGESLQKGDPVALPIVASTTFHLPGDPQASHVYGRYGNPTVEEVEAEIGLLEGAEAVLFPSGMAAIAAVFYAHLKPGDRVLVHADGYYNARALLEAYFAPLGVDIATCPTADMAEADLTGVKLVLAETPSNPGLEVCDLAKLARNAKDAGALLAVDNTTATPLCQRPLDLGADFAIMADTKAMAGHSDILAGHVASRDPALMAPVKTWRRLGGAICSPFDAYLLHRGLATLELRVARANANALAVANALAGIEGVAGLRYPGLATDPAHDIARKQMSGYGPIVSFCLPSRELAEAFIARHPLLTPSTSFGGVHSAAECRVRWGDHVAPGFIRMACGIEPVADLTGATIRTLDSLNLRGA

SEQ ID NO: 126131 - DNA, 1200 bp, Hyphomonas neptunium ATCC 15444; identical to SEQ ID NO: 13864
  CDS (1)..(1200): transl_table=11

SEQ ID NO: 126132 - protein, 399 aa, Hyphomonas neptunium ATCC 15444; identical to SEQ ID NO: 13865

SEQ ID NO: 126133 - DNA, 1290 bp, Hyphomonas neptunium ATCC 15444
  CDS (1)..(1290): transl_table=11
atgactgacggcgtatacaaagactttgccaccacccagatccatgccggctccgcgccagaccccgcaacgggcgcgcgccaggtgccgatctatcagaccacggcctatgtgttccgcgacgctgaccacgccgccgccctcttcggcctgcaggaagtcggctacatctattcccgcctcaccaacccgaccatcggcgcgcttcaggcccgccttgctgcgctggaaggcggcgccggcgcggtctgctgctcctccggccatgcggcccagatcatggcgctcttcccgctgatgggaccgggcaagaacatcgtcgcctccacgcgcctctatggcggcacgatcacccagttcacccagaccttcaaacgcttcggctggtcggcaaagctcatcgacaccgaagacctcgccgctgtcaaaggcgcgattgacgagaacacccgcgccatcttctgcgagaccattgccaatcccggcggctatatcagcgacttggacgcgctggcaaaaattgccgatgaggcgggcattcccctgatcgtcgacaacacaaccgccacgccctatctctgccgcccgatcgaacatggcgccacgctggtcgtccattcgctgaccaaatacatgaccggcaacggcaccgtcaccggcggggccatcatcgattctggcaagttcgactggtcggcatcggacaaattcccctccctctcggcgccagagcctgcctatcaaggcctcaacttccatgagaccttcgggcccgccgccttcaccttccacggcatcgccattggcctgcgcgacctcggcatgaccatgaacccgcaaggcgcccattacacgctgatgggcatcgaaaccctctccctacggatggaaaagcacgttgccaatgcgcagaagatcgccgcctggctggaaacccacccggcggtgaaatccgtcacctatccaggcctcgcctcctcgccgtataaagaccgcgccgtgcgcatcacgcccaaaggccccggcgccctcttcacggtccagctgaagggtggctatgacgcctgcatgaagttcgtcgccgcgctgaaactcttcagccatgtggcaaatctcggcgacgcgcgcagcctcgtcatccattcggcctccaccacccaccgtcagctgacggatgagcagcagatcgccgcaggcgccgcgccagacgtggtgcgcctctccatcggcatcgaaggcacagaagacctgatcgcagacctcgaccaggccctgaacgcggcaggctag

SEQ ID NO: 126134 - protein, 429 aa, Hyphomonas neptunium ATCC 15444
MTDGVYKDFATTQIHAGSAPDPATGARQVPIYQTTAYVFRDADHAAALFGLQEVGYIYSRLTNPTIGALQARLAALEGGAGAVCCSSGHAAQIMALFPLMGPGKNIVASTRLYGGTITQFTQTFKRFGWSAKLIDTEDLAAVKGAIDENTRAIFCETIANPGGYISDLDALAKIADEAGIPLIVDNTTATPYLCRPIEHGATLVVHSLTKYMTGNGTVTGGAIIDSGKFDWSASDKFPSLSAPEPAYQGLNFHETFGPAAFTFHGIAIGLRDLGMTMNPQGAHYTLMGIETLSLRMEKHVANAQKIAAWLETHPAVKSVTYPGLASSPYKDRAVRITPKGPGALFTVQLKGGYDACMKFVAALKLFSHVANLGDARSLVIHSASTTHRQLTDEQQIAAGAAPDVVRLSIGIEGTEDLIADLDQALNAAG

SEQ ID NO: 126135 - DNA, 1293 bp, Hyphomonas neptunium ATCC 15444; identical to SEQ ID NO: 13866
  CDS (1)..(1293): transl_table=11

SEQ ID NO: 126136 - protein, 430 aa, Hyphomonas neptunium ATCC 15444; identical to SEQ ID NO: 13867

SEQ ID NO: 126137 - DNA, 1284 bp, Rhizobium leguminosarum bv. viciae 3841; identical to SEQ ID NO: 13868
  CDS (1)..(1284): transl_table=11

SEQ ID NO: 126138 - protein, 427 aa, Rhizobium leguminosarum bv. viciae 3841; identical to SEQ ID NO: 13869

SEQ ID NO: 126139 - DNA, 1185 bp, Pseudomonas aeruginosa UCBPP-PA14; identical to SEQ ID NO: 13872
  CDS (1)..(1185): transl_table=11

SEQ ID NO: 126140 - protein, 394 aa, Pseudomonas aeruginosa UCBPP-PA14; identical to SEQ ID NO: 13873

SEQ ID NO: 126141 - DNA, 1140 bp, Oenococcus oeni PSU-1; identical to SEQ ID NO: 13876
  CDS (1)..(1140): transl_table=11

SEQ ID NO: 126142 - protein, 379 aa, Oenococcus oeni PSU-1; identical to SEQ ID NO: 13877

SEQ ID NO: 126143 - DNA, 1140 bp, Leuconostoc mesenteroides subsp. mesenteroides ATCC 8293; identical to SEQ ID NO: 13878
  CDS (1)..(1140): transl_table=11

SEQ ID NO: 126144 - protein, 379 aa, Leuconostoc mesenteroides subsp. mesenteroides ATCC 8293; identical to SEQ ID NO: 13879

SEQ ID NO: 126145 - DNA, 1125 bp, Solibacter usitatus Ellin6076; identical to SEQ ID NO: 13880
  CDS (1)..(1125): transl_table=11

SEQ ID NO: 126146 - protein, 374 aa, Solibacter usitatus Ellin6076; identical to SEQ ID NO: 13881

SEQ ID NO: 126147 - DNA, 1200 bp, Magnetococcus sp. MC-1; identical to SEQ ID NO: 13882
  CDS (1)..(1200): transl_table=11

SEQ ID NO: 126148 - protein, 399 aa, Magnetococcus sp. MC-1; identical to SEQ ID NO: 13883

SEQ ID NO: 126149 - DNA, 1182 bp, Shewanella sp. ANA-3
  CDS (1)..(1182): transl_table=11
atgaccgcaggcaaattagtgaccgaacgtcaattagccacattagcagtgcgtcagggtatcgaaagcgatactcagtatggcgctgtggtgccgccaatttacctgtcgacgaattacgccttcgatggtcataaaaatcctcgcgaatttgattacagccgttccggcaatcctacccgcagcatcctaggtgatgccctagctaagctggaaaagggcgcaactggtgtggtgacttgcactggtatggcggccattaccttagtgactacgttgcttggccctgatgacttgctggtggtgccccacgattgctacggcggttcgtaccgtttattcactaacttggctaaaaagggccaatttaaactgctggtggtcgatcaaaccgacgcccaagcgcttgagcaagccatcgcccagcaacctaagatggtgtggattgaaaccccctctaaccctctgctgcgagtcgtcgatatcgaagctatcgccaaggcgagccacgcagtgggcgctttagtggtggtggataacactttcctttcgcccattttgcagcaaccgctgttactcggtgccgatatcgttatccactccaccactaagtacatcaatggtcacagcgatgtggtgggcggcgcggtgatcgccaaagatcctcaactcggtgagaccttacattggtggtcgaacaccttaggtttaactgggtctgccttcgacagttatcaaaccctgcgcggtctgcgtaccttggccgtgcgcattcgcgagcaccaaagcaatgcccagcgtattgttgacgttctgacgagcagccctgtggtgagcaaagtgtattacccaggccttgcggatcaccccggccatgccattgccgccaagcagcaaaaaggctttggcgctatgctgagttttgagcttaagggcggcgaggccgaagtggtcgcctttttagatgccttaagtttattcagcgtggccgagagcttaggtggcgttgagagtcttgtggccgtgcccgcgactatgacccacagggcgatggagccccaagcgcgttttgaagctggtattaaagacaccctattacgtttgtcggttggtattgaagatgccgacgacttagttgcagatattcaagcaggattggccgccgtcgcggcttgtcagtag

SEQ ID NO: 126150 - protein, 393 aa, Shewanella sp. ANA-3
MTAGKLVTERQLATLAVRQGIESDTQYGAVVPPIYLSTNYAFDGHKNPREFDYSRSGNPTRSILGDALAKLEKGATGVVTCTGMAAITLVTTLLGPDDLLVVPHDCYGGSYRLFTNLAKKGQFKLLVVDQTDAQALEQAIAQQPKMVWIETPSNPLLRVVDIEAIAKASHAVGALVVVDNTFLSPILQQPLLLGADIVIHSTTKYINGHSDVVGGAVIAKDPQLGETLHWWSNTLGLTGSAFDSYQTLRGLRTLAVRIREHQSNAQRIVDVLTSSPVVSKVYYPGLADHPGHAIAAKQQKGFGAMLSFELKGGEAEVVAFLDALSLFSVAESLGGVESLVAVPATMTHRAMEPQARFEAGIKDTLLRLSVGIEDADDLVADIQAGLAAVAACQ

SEQ ID NO: 126151 - DNA, 1167 bp, Mycobacterium avium 104
  CDS (1)..(1167): transl_table=11
atgagcgacgacggcaacgcacaccccgagttcagcggactggccaccaaggcgattcacgccggctaccggccggacccggcgaccggagcggtcaacacgccgatctacgccagcagcaccttcgcccaggacggggtgggcgcgctgcgcggcgggtacgagtacgcccgcaccggcaacccgacccgggccgcgctggaggccacgctggccgcggtggaggccggcagccacgggcgggccttcgcctccggcatggccgccaccgactgcgcgctgcgggcggtgctgcggcccggcgaccacgtggtgatcccgaatgacgcctacggcggcacctttcggttgatcgacaaggtgttcacccgctggaacgtcgaatacacgccggtgccgttgcatcagctcgacgccgtggccgccgcgatcacgccgcgcacccggctgatctgggtggaaaccccgaccaacccgttgctgtcgatcgccgacatcgccgcgctggcccagctgggccaccagcactcggcaaaggtgttggtggacaacacctttgcctcgccggcgctgcagcagccgttgacgctgggcgccgacatcgtgctgcattccaccaccaagtacatcggcgggcactccgacgtggtgggcggtgcgctggtcaccaacgacgccgagctggacgacgcgttcgggttcttacagaacggggcgggcgcggtgcccggcccgttcgacgcctacctgaccatgcgcgggctgaagacgctggtgctgcggatgcagcggcacaccgaaaacgcctctgccgtagcgcaattcctcgccgggcaccccgcggtgagcgcggtgctctatcccggcctgcccggccatccgggccacgacgtcgccgcccggcagatgtcgggcttcggcggcatggtctcggtgcggatgcgcggcggccggcaggccgcccgaaagctgtgcgccaacacccgggtgttcatcctggccgagtcgctgggcggggtcgagtcgctgatcgagcaccccagcgcgatgacgcacgcgtcgacggcggggtcgcaactggaggtgcccgacgatctggtgcggctgtcggtcggcatcgaggacgtcgacgacctgctggccgacctcgatcgggcgctcagttga

SEQ ID NO: 126152 - protein, 388 aa, Mycobacterium avium 104; identical to SEQ ID NO: 13605

SEQ ID NO: 126153 - DNA, 1155 bp, Mycobacterium smegmatis str. MC2 155; identical to SEQ ID NO: 13886
  CDS (1)..(1155): transl_table=11

SEQ ID NO: 126154 - protein, 384 aa, Mycobacterium smegmatis str. MC2 155; identical to SEQ ID NO: 13887

SEQ ID NO: 126155 - DNA, 1164 bp, Nocardioides sp. JS614; identical to SEQ ID NO: 13888
  CDS (1)..(1164): transl_table=11

SEQ ID NO: 126156 - protein, 387 aa, Nocardioides sp. JS614; identical to SEQ ID NO: 13889

SEQ ID NO: 126157 - DNA, 1170 bp, Azoarcus sp. BH72; identical to SEQ ID NO: 13892
  CDS (1)..(1170): transl_table=11

SEQ ID NO: 126158 - protein, 389 aa, Azoarcus sp. BH72; identical to SEQ ID NO: 13893

SEQ ID NO: 126159 - DNA, 1179 bp, Mycobacterium sp. KMS; identical to SEQ ID NO: 13834
  CDS (1)..(1179): transl_table=11

SEQ ID NO: 126160 - protein, 392 aa, Mycobacterium sp. KMS; identical to SEQ ID NO: 13835

SEQ ID NO: 126161 - DNA, 1314 bp, Acidovorax sp. JS42
  CDS (1)..(1314): transl_table=11
atgcccggatattccgaccccggcttcgacacgctggccctgcacgccggcgcgcagccggaccccgccacaggtgcgcgcgccgtgccgatccacctgagcacctcgttcgtcttcgagtcgagcgatcatgcggcggccctgttcaacctggagcgcccgggccatgtgtacagccgcctgagcaaccccaccaacgcggtgctggagcagcgcgtggcagcgctggagggcggcgtgggggcgattgccgtggccagcgggcaggccgcgctgcacctggcgattgccacattgatgggcgcaggcagccacatcgtggccagcacggcgctgtatggcggcagccagaacctgctgcactacacgctgcgccgcttcggcattgacaccaccttcgtgaagcccggcgacatcgacggctggcgcgccgccatccgccccaacaccaagctgttctttggcgaaaccgtaggcaaccccgggctggaggtgttggacatccccacggtcgcggacattgcgcatgaagctggcgtgcccctgctggtggactccaccctcacctcgccgtggctcatcaagcccttcgagcatggcgcggacctggtgtaccactcggccaccaagttcctctctggccacggcacggtgatcggcggcatcgtggtcgatggcggcagcttcgactgggaaggctccggccgcttcccggagttgacccagccctacgacggctttcacaacatggtgttcaccgaggagagcaccgtgggcgccttcctgctgcgcgcgcgccgcgagggcctgcgcgacttcggcgcctgcatgagcccgcacaccgcctggctgatcctgcagggcatcgagaccctgccgctgcgcatggaacgccacatgcgcaataccgagaaggtggtgcagttcctggccagccacccgttcgtcgagcgcgtgggccacccgctgctcgcgtcccaccccagccaccagctcgcgcagcgcctgctgccgcgcggcgcgggctcggtgttcagcttcgacctcaagggcaaccgcgagcagggcaagacgttcatcgagacgctcaagctcttcagccacctggccaatgtgggtgactgccgcagcctggtgatccaccccgcctccaccacgcacttccgcatgagcgacgaagcgctcgccgcgggcggcatcagccagggcacgatccgcctgtcgatcgggctggaagatgccgacgacctgatcgacgacctcaagcgggcactcaaggctgcggagaagcaagcgggaaaggcaggtgcgtga

SEQ ID NO: 126162 - protein, 437 aa, Acidovorax sp. JS42
MPGYSDPGFDTLALHAGAQPDPATGARAVPIHLSTSFVFESSDHAAALFNLERPGHVYSRLSNPTNAVLEQRVAALEGGVGAIAVASGQAALHLAIATLMGAGSHIVASTALYGGSQNLLHYTLRRFGIDTTFVKPGDIDGWRAAIRPNTKLFFGETVGNPGLEVLDIPTVADIAHEAGVPLLVDSTLTSPWLIKPFEHGADLVYHSATKFLSGHGTVIGGIVVDGGSFDWEGSGRFPELTQPYDGFHNMVFTEESTVGAFLLRARREGLRDFGACMSPHTAWLILQGIETLPLRMERHMRNTEKVVQFLASHPFVERVGHPLLASHPSHQLAQRLLPRGAGSVFSFDLKGNREQGKTFIETLKLFSHLANVGDCRSLVIHPASTTHFRMSDEALAAGGISQGTIRLSIGLEDADDLIDDLKRALKAAEKQAGKAGA

SEQ ID NO: 126163 - DNA, 1185 bp, Bifidobacterium longum DJO10A; identical to SEQ ID NO: 13900
  CDS (1)..(1185): transl_table=11

SEQ ID NO: 126164 - protein, 394 aa, Bifidobacterium longum DJO10A; identical to SEQ ID NO: 13901

SEQ ID NO: 126165 - DNA, 1173 bp, Listeria monocytogenes str. 1/2a F6854; identical to SEQ ID NO: 13910
  CDS (1)..(1173): transl_table=11

SEQ ID NO: 126166 - protein, 390 aa, Listeria monocytogenes str. 1/2a F6854; identical to SEQ ID NO: 13911

SEQ ID NO: 126167 - DNA, 1167 bp, Exiguobacterium sibiricum 255-15; identical to SEQ ID NO: 13916
  CDS (1)..(1167): transl_table=11

SEQ ID NO: 126168 - protein, 388 aa, Exiguobacterium sibiricum 255-15; identical to SEQ ID NO: 13917

SEQ ID NO: 126169 - DNA, 1182 bp, Kineococcus radiotolerans SRS30216
  CDS (1)..(1182): transl_table=11
gtgaccgactcgcagctgccaggcttctccacccgagccatccacgccggccaggaggccgaccccgccaccggcgccgtggtgacgccgatctaccaggtctcgacctacaagcaggacggcgtcgggacgctgcgcaccggtctcggcaccggctacgagtactcccgctccggcaaccccacccgcacctccctggagtcccagctcgcctccctggagcagggcgacgccgggttcgccttcgcctccggcctcgccgccgaggacgcgatcctgcgggccctgctcaagcccggcgaccacgtcgtcgtccccgacgacgcctacggcggcacctaccgcctcgtgaagcgggtcgtggagccctggggcgtcgagcacacccccgtcgacctcgcctccgtcgacgccgtccgcgaggcgatccgccccgggaagacccgcctggtgtgggtggagacccccaccaacccgctgctgacgatcgccgacatcgcggccctcgccgaggtcacccacgccgccggggccctgctcgtcgtggacaacaccttcgcgaccccgtacctgcagacgcccctgaccctcggcgccgacctcgtcgtcagctcgacgacgaagtacgccggcggccactccgacgtcgtcggcggcgccgtcgtcgtgcgcgacggcgacgacgggcgcgggagctccctgaccgagcgcatcggcttccaccagaacgcgatgggcggggtccccgggcccttcgactcctggctggtccagcgcggcctgaagaccctcgcggtgcgcatggagcgccactgcgacaacgccgagcgcgtcgtggagttcctgcagtcccacccccggatcaccaagatcctctacccgggtctgcccgagcaccgcaaccacgacgtcgcggcccgccagatgaagcgcttcggcgggatgatcagcttccgcaccgcctccgtcgacgacgccctcgccgtctgcaaggcgacgcagctgttcaccctgggggagtccctcggcggcgtggagtccctcgtcgagcaccccggcaagatgacccacgccgcagtcgcggggtccctgctcgaggtccccgacgacctcatccggctctccgtcgggatcgaggacgcggacgacctcgtcgctgacctcgcgcaggcgctgggctga

SEQ ID NO: 126170 - protein, 393 aa, Kineococcus radiotolerans SRS30216
MTDSQLPGFSTRAIHAGQEADPATGAVVTPIYQVSTYKQDGVGTLRTGLGTGYEYSRSGNPTRTSLESQLASLEQGDAGFAFASGLAAEDAILRALLKPGDHVVVPDDAYGGTYRLVKRVVEPWGVEHTPVDLASVDAVREAIRPGKTRLVWVETPTNPLLTIADIAALAEVTHAAGALLVVDNTFATPYLQTPLTLGADLVVSSTTKYAGGHSDVVGGAVVVRDGDDGRGSSLTERIGFHQNAMGGVPGPFDSWLVQRGLKTLAVRMERHCDNAERVVEFLQSHPRITKILYPGLPEHRNHDVAARQMKRFGGMISFRTASVDDALAVCKATQLFTLGESLGGVESLVEHPGKMTHAAVAGSLLEVPDDLIRLSVGIEDADDLVADLAQALG

SEQ ID NO: 126171 - DNA, 1218 bp, Xylella fastidiosa Dixon; identical to SEQ ID NO: 13920
  CDS (1)..(1218): transl_table=11

SEQ ID NO: 126172 - protein, 405 aa, Xylella fastidiosa Dixon; identical to SEQ ID NO: 13921

SEQ ID NO: 126173 - DNA, 1092 bp, Streptococcus suis 89/1591; identical to SEQ ID NO: 13922
  CDS (1)..(1092): transl_table=11

SEQ ID NO: 126174 - protein, 363 aa, Streptococcus suis 89/1591; identical to SEQ ID NO: 13923

SEQ ID NO: 126175 - DNA, 1143 bp, Croceibacter atlanticus HTCC2559; identical to SEQ ID NO: 13924
  CDS (1)..(1143): transl_table=11

SEQ ID NO: 126176 - protein, 380 aa, Croceibacter atlanticus HTCC2559; identical to SEQ ID NO: 13925

SEQ ID NO: 126177 - DNA, 1149 bp, Sulfitobacter sp. EE-36; identical to SEQ ID NO: 13926
  CDS (1)..(1149): transl_table=11

SEQ ID NO: 126178 - protein, 382 aa, Sulfitobacter sp. EE-36; identical to SEQ ID NO: 13927

SEQ ID NO: 126179 - DNA, 1161 bp, Roseovarius nubinhibens ISM; identical to SEQ ID NO: 13928
  CDS (1)..(1161): transl_table=11

SEQ ID NO: 126180 - protein, 386 aa, Roseovarius nubinhibens ISM; identical to SEQ ID NO: 13929

SEQ ID NO: 126181 - DNA, 1179 bp, Oceanicola batsensis HTCC2597
  CDS (1)..(1179): transl_table=11
atgcgcaatcggagcaaacgcaccaccctgatccatggcgggatccgacggtcccagtatggcgaggtcagcgagggactcttcctgacgcagggctttgtctatgacagcgccgaggccgccgaggcccggttcaaggaactgggcgaggacgaattcatctatgcgcgctacggcaatccgacggtgcgcatgttcgagaaccgcctgtcggccgtggtcggctacgaggacggcttcgcctgcaccagcggcatggccgcggtgaccggtgcgctgacggcgctgctgaaggcgggcgacagggtcgtggcgtcgcgggcgctgttcgggtcatgtctctacgtgctcgaggacgtgctggcccggttcggtgtcgaggtggaactggtcgacggcacggacaacgccgcctggagccgggccctgacgcctgcgacgacgctcgtctttctcgaaagcatctcgaacccgatgctggaggtggtggacctggcccatgtggtcgaggccgcccatgcggtcggggcgctggtggtggtggacgatgcgatggcgacgccggtctattcctattccgcggcctgcggggcggatctctgcgtgatctccaccaccaagcatgtggacgggcagggccgcctgctgggcggcatgatctgcggctcgaaggagctgatccgcggtccgatcgaggcctacatgaaacataccggcggggcgatgaacccgttcacggcgtgggttcagctcaagtcgctcgatacgctcgacctgcgggtgcaggcacaggcgacgggggcgctgcggatcgcgcaggcgcttgaggggcatccccggctttccgcggtgcggtatccgctgctgcccagccacccgcagcacgaggtggcgatgcgccagggcggggcgggagggacggtcctggccttcgaggtcaagggcggcaaggcggagtgtttccggatgctcaacgcgttcgagctgttcacgatctcgaacaacttcgccgattccaagtccatcgtcacccatcccgcgaccacgacgcaccagcgcctgccgcaggaacagaaggatgtgctcggcatcagcgacggggcggtgcgcctgtcggtggggctggaggatccggaggacctgatcgcggatctgatgcaggcgctggatcggatctga

SEQ ID NO: 126182 - protein, 392 aa, Oceanicola batsensis HTCC2597
MRNRSKRTTLIHGGIRRSQYGEVSEGLFLTQGFVYDSAEAAEARFKELGEDEFIYARYGNPTVRMFENRLSAVVGYEDGFACTSGMAAVTGALTALLKAGDRVVASRALFGSCLYVLEDVLARFGVEVELVDGTDNAAWSRALTPATTLVFLESISNPMLEVVDLAHVVEAAHAVGALVVVDDAMATPVYSYSAACGADLCVISTTKHVDGQGRLLGGMICGSKELIRGPIEAYMKHTGGAMNPFTAWVQLKSLDTLDLRVQAQATGALRIAQALEGHPRLSAVRYPLLPSHPQHEVAMRQGGAGGTVLAFEVKGGKAECFRMLNAFELFTISNNFADSKSIVTHPATTTHQRLPQEQKDVLGISDGAVRLSVGLEDPEDLIADLMQALDRI

SEQ ID NO: 126183 - DNA, 1317 bp, Erythrobacter sp. NAP1; identical to SEQ ID NO: 13932
  CDS (1)..(1317): transl_table=11

SEQ ID NO: 126184 - protein, 438 aa, Erythrobacter sp. NAP1; identical to SEQ ID NO: 13933

SEQ ID NO: 126185 - DNA, 1158 bp, Synechococcus sp. WH 7805; identical to SEQ ID NO: 13936
  CDS (1)..(1158): transl_table=11

SEQ ID NO: 126186 - protein, 385 aa, Synechococcus sp. WH 7805; identical to SEQ ID NO: 13937

SEQ ID NO: 126187 - DNA, 1266 bp, Pseudoalteromonas tunicata D2; identical to SEQ ID NO: 13940
  CDS (1)..(1266): transl_table=11

SEQ ID NO: 126188 - protein, 421 aa, Pseudoalteromonas tunicata D2; identical to SEQ ID NO: 13941

SEQ ID NO: 126189 - DNA, 1167 bp, Photobacterium sp. SKA34; identical to SEQ ID NO: 13942
  CDS (1)..(1167): transl_table=11

SEQ ID NO: 126190 - protein, 388 aa, Photobacterium sp. SKA34; identical to SEQ ID NO: 13943

SEQ ID NO: 126191 - DNA, 1221 bp, Oceanospirillum sp. MED92; identical to SEQ ID NO: 13944
  CDS (1)..(1221): transl_table=11

SEQ ID NO: 126192 - protein, 406 aa, Oceanospirillum sp. MED92; identical to SEQ ID NO: 13945

SEQ ID NO: 126193 - DNA, 1161 bp, Flavobacteria bacterium BBFL7; identical to SEQ ID NO: 13946
  CDS (1)..(1161): transl_table=11

SEQ ID NO: 126194 - protein, 386 aa, Flavobacteria bacterium BBFL7; identical to SEQ ID NO: 13947

SEQ ID NO: 126195 - DNA, 1200 bp, gamma proteobacterium HTCC2207
  CDS (1)..(1200): transl_table=11
atgtccatcgaccaccataaaaaactctcattcgctactcgctcagtgcacgctggctatgattcctccgccaaccagggcgctctcaatccaccgatttatatgacttcaacctattcttttggcagtgtggctgacggtgctgggcgtttctcaggtgagcaaaaggggcatttctacagccgcatctcaaatcctacacaagagatacttgagacccgtctagcggatctggaagagggcgaggcagcattggcgactgcgtcaggtatgggtgccataactgcggcgctctggacactggtcggccccggcgatcaaatcctggttgacaaaaccctctatggctgcactttctcgtttatggagcacggcctaaagaaatttggtgtggaaatctgctatgccgattttactaaccatgccgaagtgcaagctcacctcagcgacaaaaccaaagtggtgtacttcgaaaccccagtcaatcccaatatgcgtgttattgacatagcagcagtcagtgccctggtcaaaggccacagcagcgccatcaaaataatggtcgataacacctactgcaccccggcactgcaacgccccctcagtctgggtgcggatcttgtagtccactcggcaaccaaatatcttggcggtcatggcgacttaattgccggtgctgtagtgggcgacgcagagaccattcagcagatccgcctgtttggcctaaaggacatgactggcgcagtgatttcacccatgaacgtatttttaattctgcgaggaatcaaaaccctgcagctgcgcatggagcgccactgccaaaatgcccaagccattgctgaaatgctcgagcagcatccagctgtcgatcaggtattttttcccggattgaaaagcgacccctggcacgccatcgcctcgaaacagatggacgattttggtggcatgatagccttagagctcaagggtggatatgaagccagtgtgcgcatgctcaacaagctcaaactggctaagttagcagtaagcctgggcgacgcagaaaccctaatccagcacccagccagcatgacccactccgtctacacccctgaggagcgtgccgaacatggaatcagtgaaggcttagtgcgtatttctgccggactagaagctgcagaagatatcattgccgacctacaacaagcgctcgcagattaa

SEQ ID NO: 126196 - protein, 399 aa, gamma proteobacterium HTCC2207
MSIDHHKKLSFATRSVHAGYDSSANQGALNPPIYMTSTYSFGSVADGAGRFSGEQKGHFYSRISNPTQEILETRLADLEEGEAALATASGMGAITAALWTLVGPGDQILVDKTLYGCTFSFMEHGLKKFGVEICYADFTNHAEVQAHLSDKTKVVYFETPVNPNMRVIDIAAVSALVKGHSSAIKIMVDNTYCTPALQRPLSLGADLVVHSATKYLGGHGDLIAGAVVGDAETIQQIRLFGLKDMTGAVISPMNVFLILRGIKTLQLRMERHCQNAQAIAEMLEQHPAVDQVFFPGLKSDPWHAIASKQMDDFGGMIALELKGGYEASVRMLNKLKLAKLAVSLGDAETLIQHPASMTHSVYTPEERAEHGISEGLVRISAGLEAAEDIIADLQQALAD

SEQ ID NO: 126197 - DNA, 1155 bp, Rickettsiella grylli; identical to SEQ ID NO: 13948
  CDS (1)..(1155): transl_table=11

SEQ ID NO: 126198 - protein, 384 aa, Rickettsiella grylli; identical to SEQ ID NO: 13949

SEQ ID NO: 126199 - DNA, 1203 bp, Oceanobacter sp. RED65; identical to SEQ ID NO: 13950
  CDS (1)..(1203): transl_table=11

SEQ ID NO: 126200 - protein, 400 aa, Oceanobacter sp. RED65; identical to SEQ ID NO: 13951

SEQ ID NO: 126201 - DNA, 1131 bp, Desulfitobacterium hafniense DCB-2; identical to SEQ ID NO: 13952
  CDS (1)..(1131): transl_table=11

SEQ ID NO: 126202 - protein, 376 aa, Desulfitobacterium hafniense DCB-2; identical to SEQ ID NO: 13953

SEQ ID NO: 126203 - DNA, 1164 bp, Vibrio sp. Ex25
  CDS (1)..(1164): transl_table=11
atgagctctcgcaaacctgcgaccattgcagtacgcactggtattgaatcagacagccaatatcacgctgtcgttccacctatttatctttccactaactatggttttcctgcttttggtgaagtacctaagtatgattacacgcgatctggaaatccaaaccgcggactgttggaaagtgcgttatctgaactcgagtctggaaaaggagcggttgtcacgaactgcggtacgtctgcattaaatttatgggtgtccgcttttcttggccctgatgatcttattattgctcctcacgattgttatggcggcacctatcgtctttttaatacccgagccaacaaaggtgattttaatgttcagtttgtcgatcaatcagacgagcaagctttggatgcagcattagcacaaaaaccaaaactcatcttgttagaaaccccatcaaaccctctggttcgcgtggtggatatttctgagacttgtgaaaaagcgaagcgagttggggcattggtcgcggtggacaatacctttttgacacccgtgtaccaaaagcctttagacttgggcgcagatttcgtcattcactccacaacgaagtatatcaacggtcattcagacgtgattggtggcgtgatcatcaccaaaacagaagcgcatgcagaagagcttgcatggtggggcaattgtattggcgcaacgggcacacctttcgatagttacatgacactgcgaggtattcgtacacttggtgctcgcatgcgagtgcatgaagagagttcacagcaggtactggcttatctccagaagcaagcgttagttaaaaccatttatcatccaagcctgccggagcacccaggtcatgacatcgctaaaaagcagcaaactggttttggctctatgctgagctttgagtttgccggttcgtttgagcagttaaaagtgttcgttaaagagctccaactgttttcattggctgagtcattaggtggagtagaaagcttgatttgtcatccggcatccatgacgcatcgcgctatgggagaggaagcactggcagaagcgggggtgtcacatcaactattgcgtttgtctgtcggcttggaagatgcacaagatctcatcacggatttagagcaagcattcgctaaagctgcccaacaatag

SEQ ID NO: 126204 - protein, 387 aa, Vibrio sp. Ex25
MSSRKPATIAVRTGIESDSQYHAVVPPIYLSTNYGFPAFGEVPKYDYTRSGNPNRGLLESALSELESGKGAVVTNCGTSALNLWVSAFLGPDDLIIAPHDCYGGTYRLFNTRANKGDFNVQFVDQSDEQALDAALAQKPKLILLETPSNPLVRVVDISETCEKAKRVGALVAVDNTFLTPVYQKPLDLGADFVIHSTTKYINGHSDVIGGVIITKTEAHAEELAWWGNCIGATGTPFDSYMTLRGIRTLGARMRVHEESSQQVLAYLQKQALVKTIYHPSLPEHPGHDIAKKQQTGFGSMLSFEFAGSFEQLKVFVKELQLFSLAESLGGVESLICHPASMTHRAMGEEALAEAGVSHQLLRLSVGLEDAQDLITDLEQAFAKAAQQ

SEQ ID NO: 126205 - DNA, 1230 bp, Alteromonadales bacterium TW-7; identical to SEQ ID NO: 13956
  CDS (1)..(1230): transl_table=11

SEQ ID NO: 126206 - protein, 409 aa, Alteromonadales bacterium TW-7; identical to SEQ ID NO: 13957

SEQ ID NO: 126207 - DNA, 1215 bp, marine gamma proteobacterium HTCC2080; identical to SEQ ID NO: 13962
  CDS (1)..(1215): transl_table=11

SEQ ID NO: 126208 - protein, 404 aa, marine gamma proteobacterium HTCC2080; identical to SEQ ID NO: 13963

SEQ ID NO: 126209 - DNA, 1179 bp, Candidatus Desulfococcus oleovorans Hxd3; identical to SEQ ID NO: 13964
  CDS (1)..(1179): transl_table=11

SEQ ID NO: 126210 - protein, 392 aa, Candidatus Desulfococcus oleovorans Hxd3; identical to SEQ ID NO: 13965

SEQ ID NO: 126211 - DNA, 1212 bp, Pseudomonas putida GB-1; identical to SEQ ID NO: 13966
  CDS (1)..(1212): transl_table=11

SEQ ID NO: 126212 - protein, 403 aa, Pseudomonas putida GB-1; identical to SEQ ID NO: 13967

SEQ ID NO: 126213 - DNA, 1203 bp, Pseudomonas putida GB-1; identical to SEQ ID NO: 13968
  CDS (1)..(1203): transl_table=11

SEQ ID NO: 126214 - protein, 400 aa, Pseudomonas putida GB-1; identical to SEQ ID NO: 13969

SEQ ID NO: 126215 - DNA, 1278 bp, Pseudomonas putida GB-1; identical to SEQ ID NO: 13970
  CDS (1)..(1278): transl_table=11

SEQ ID NO: 126216 - protein, 425 aa, Pseudomonas putida GB-1; identical to SEQ ID NO: 13971

SEQ ID NO: 126217 - DNA, 1197 bp, Pseudomonas putida GB-1; identical to SEQ ID NO: 13972
  CDS (1)..(1197): transl_table=11

SEQ ID NO: 126218 - protein, 398 aa, Pseudomonas putida GB-1; identical to SEQ ID NO: 13973

SEQ ID NO: 126219 - DNA, 1194 bp, Marinobacter sp. ELB17; identical to SEQ ID NO: 13976
  CDS (1)..(1194): transl_table=11

SEQ ID NO: 126220 - protein, 397 aa, Marinobacter sp. ELB17; identical to SEQ ID NO: 13977

SEQ ID NO: 126221 - DNA, 1137 bp, Sporosarcina halophila; identical to SEQ ID NO: 13984
  CDS (1)..(1137): transl_table=11

SEQ ID NO: 126222 - protein, 378 aa, Sporosarcina halophila; identical to SEQ ID NO: 13985

SEQ ID NO: 126223 - DNA, 1182 bp, Oryza sativa subsp
  CDS (1)..(1182)
atgtcggcgaggggtggtggtggctcgtgctcgtggcgaggcgagaggctgggcagaaggatcgccacagacgcgatcaccacgccagtagtgaacacctcggcctactggttcaacaactcgcaggagctcattgacttcaaggaggggaggcatgctagcttcgagtatgggaggtatggtaacccgaccactgaggcattggagaagaagatgagtgcactggagaaagccgagtccactgtctttgtggcatccgggatgtatgcaagtgtggctatgctcagcgcgcttgttccagcaggtgggcacgttgtgaccaccactgattgttaccgcaagacgagaatttacatggagactgaactacctaagaggggaattacgatgaccgttattagacctgctgacatggatgctctccaaaatgcactggataataataatgtatccctattcttcaccgagactcctactaatccatttctgagatgcatcgacattgatcttgtctcaaaaatgtgccatagcaagggagcattgctttgtattgatagtacctttgcatccccaatcaatcagaaggcactaactctaggtgctgacttagttatccattcagcaacaaagtacattgctgggcacaatgatgttattggaggctgcatcagtggcagagatgagctagtttccaaagtccgcatctatcaccatgtagttggtggtgttctaaatccgaatgctgcctacttgattcttcgaggcatgaagacactgcatctccgtgtacaatgtcagaataatactgcaatgcggatggcccaatttttagaggaacatccaaagattgcacgtgtctactatcctggtctgccaagtcacccagaacatcacattgccaagagtcagatgaccggctttggtggtgtcattagttttgaggttgctggagactttgatgctactaggagatttattgattctgttaagataccctatcatgccccatcatttgggggctgtgagagcattattgatcagcctgccatcatgtcttactgggattcaaaggagcagagagaaatctatggaatcaaggacaacttgatcaggttcagcattggagtggaggattttgaggatttgaagaatgacgttgttcaggcgcttgacaagatctaa

SEQ ID NO: 126224 - protein, 393 aa, Oryza sativa subsp
MSARGGGGSCSWRGERLGRRIATDAITTPVVNTSAYWFNNSQELIDFKEGRHASFEYGRYGNPTTEALEKKMSALEKAESTVFVASGMYASVAMLSALVPAGGHVVTTTDCYRKTRIYMETELPKRGITMTVIRPADMDALQNALDNNNVSLFFTETPTNPFLRCIDIDLVSKMCHSKGALLCIDSTFASPINQKALTLGADLVIHSATKYIAGHNDVIGGCISGRDELVSKVRIYHHVVGGVLNPNAAYLILRGMKTLHLRVQCQNNTAMRMAQFLEEHPKIARVYYPGLPSHPEHHIAKSQMTGFGGVISFEVAGDFDATRRFIDSVKIPYHAPSFGGCESIIDQPAIMSYWDSKEQREIYGIKDNLIRFSIGVEDFEDLKNDVVQALDKI

SEQ ID NO: 126225 - DNA, 1227 bp, Oryza sativa subsp
  CDS (1)..(1227)
atgagcgccgccgccgccgccgccgccgccgccgcaatccccacctctctcggccgcctcttccacctccgccccaccccgaacccctcccggaaccttagcggcagctcagcgcaacccctcctccgcctcagctaccacccgcgcctcacgctctctcgccgcatggaggcgccggcggcgatcgccgactcccacggcggcggcgacctgagcgcgtccgcggtcggcgcggaggcgctgggcgccgtcgccgctccggatttcgatgtggagatgaaggagcctagcgtggcgacgatactgacgagcttcgagaactcgttcgatgggttcgggtctatgagcacgccgctgtaccagacggccacgtttaagcagccttcagcaaccgataatggaccttatgattacactagaagtggtaaccctacacgtgatgttctccaaagccttatggctaagcttgagaaggcggatcaggcattctgcttcaccagtgggatggcagcactagctgcaacgaatgatacaaccaaaattagtgaggtaacttctgcaattgggcccttgactaaactagtatggcttgaaagtcccaccaatccccgtctacaaattactgatataaagaaaatagcagagatagctcattaccatggtgcacttgttttagtagacaacagcatcatgtctcctgtgctctcccgtcctctagaacttggagcagatattgttatgcactcagcaaccaaatttatagctggacatagcgatcttatggctggaattcttgcggtgaagggtgaaagagacggaccacccctatattattggcaggctaatgctcagaagattgctgaatttctagcttctcatccaagagtaaagaaagtgaactatgcaggacttcctgatcatcctggacgatctctacactattcccaggcaaagggagcgggttcagttctcagtttcctaactggttcattagctctctcaaaacatgttgttgagaccacaaagtacttcaatgtaacagttagctttggaagtgtgaaatcgctcattagcctgccatgcttcatgtcacacgccagcatcccttctgcggttcgcgaggagcgcggcctgacagacgatctagtcaggatatcggttggaattgaggatgccgacgacctcatagcggatcttgatcatgctctccggtctggtccagcttag

SEQ ID NO: 126226 - protein, 408 aa, Oryza sativa subsp
MSAAAAAAAAAAIPTSLGRLFHLRPTPNPSRNLSGSSAQPLLRLSYHPRLTLSRRMEAPAAIADSHGGGDLSASAVGAEALGAVAAPDFDVEMKEPSVATILTSFENSFDGFGSMSTPLYQTATFKQPSATDNGPYDYTRSGNPTRDVLQSLMAKLEKADQAFCFTSGMAALAATNDTTKISEVTSAIGPLTKLVWLESPTNPRLQITDIKKIAEIAHYHGALVLVDNSIMSPVLSRPLELGADIVMHSATKFIAGHSDLMAGILAVKGERDGPPLYYWQANAQKIAEFLASHPRVKKVNYAGLPDHPGRSLHYSQAKGAGSVLSFLTGSLALSKHVVETTKYFNVTVSFGSVKSLISLPCFMSHASIPSAVREERGLTDDLVRISVGIEDADDLIADLDHALRSGPA

SEQ ID NO: 126227 - DNA, 1422 bp, Oryza sativa subsp
  CDS (1)..(1422)
atggcttcgtcagtagcactcgtgctaatgaaggcttccctcccgcggcggcagcgcatggaccgacctcgccgttctcccgcggcggttcagcttgtcgccggcgttgatgcagccgacgacatgtttggctccctcgcaggttgtcctcctcggccgctggagtatcccgtggtgccagacttggacgactacgacgtcgatgacgctccggtggctggacgacccgcacccgcctcggacaagacgctggcggtgcacgccggggagaagctcgggagcggcgccgccgccgcggagacggactcgatcgcgacgccgatcgtgggcggcacgacgcactggttcagggactcggccgacctcatcgccttccgggaaggccggcggcggagcttcgagtacgggcggtacggcaacccgacggtgaaggtgctggaggagaagatcagcgcgctggagagggcggaggcgacgctggtgacctcctccggtatgaacgccatcgtcgccacgctgctcgccctcgtccctcccggcggccacgtcgtcgccaccgccgactgctacagcgaggcccgcgcattcatccgcgacaagctctccaacatgggcatcacgtcgacgttcgtggatcttgacgacgacatggaggcgctggaatccgttcttgatgagggcgaggtgacgatgttctacgccgactcgatgacgaaccctcacctgaaggtcgtcgacgtgacacgcgtcgcggagctgtgccaccggagaggcgcgctggtgtgcatcgacagcacgctggcgtcgcccatcaaccagaagccgctcgccctcggcgccgacgtcgtcctccactccgccaccaagtacatcgccggccaccacgacgtcatcgccggctgcgtcagcggctcggaggccctcgtctcgcggatccgcacgtggcaccacgacctcggcggcgccatcagtccgaatgcggcgtacatgatcattcggggattgaagacgttggcgctgcgggtgcaggcgcagaacaggacggcgctgcggatggcgcagctgctggagaagcaccccaagatcgagcgcgtctactaccctgggctggagagcagcccgtggcacggcgtagcgacgaggcagatggctggtgcaggcggcgtggtcggcttggaggtggcgtcggacatgcgcggcgcgatgaggttcgtggacgcgctggagttgccgctcatcgcgacgtcgctcggcggctgcgagagccttgtccagcagcccgcaatcatgtcctactggggtaagtgcgacgaggagaaggcaaagaatgggatcaaggacaactttgtgaggttcagttttgggatcgagaagtttgaggatctcagggatgacatactccaagccttagggaagatttaa

SEQ ID NO: 126228 - protein, 473 aa, Oryza sativa subsp
MASSVALVLMKASLPRRQRMDRPRRSPAAVQLVAGVDAADDMFGSLAGCPPRPLEYPVVPDLDDYDVDDAPVAGRPAPASDKTLAVHAGEKLGSGAAAAETDSIATPIVGGTTHWFRDSADLIAFREGRRRSFEYGRYGNPTVKVLEEKISALERAEATLVTSSGMNAIVATLLALVPPGGHVVATADCYSEARAFIRDKLSNMGITSTFVDLDDDMEALESVLDEGEVTMFYADSMTNPHLKVVDVTRVAELCHRRGALVCIDSTLASPINQKPLALGADVVLHSATKYIAGHHDVIAGCVSGSEALVSRIRTWHHDLGGAISPNAAYMIIRGLKTLALRVQAQNRTALRMAQLLEKHPKIERVYYPGLESSPWHGVATRQMAGAGGVVGLEVASDMRGAMRFVDALELPLIATSLGGCESLVQQPAIMSYWGKCDEEKAKNGIKDNFVRFSFGIEKFEDLRDDILQALGKI

SEQ ID NO: 126229 - DNA, 1356 bp, Oryza sativa subsp
  CDS (1)..(1356)
atggcgaagtcatcgtctctcgtgacgaaggtttcggtgcagcggcggcggcgcgttcaccgtcctcgccgttctcccaccaagccggagcgcgctgccgccgccgacacgttcggttccctcgcgggttgtccctcgtcgccggagtatccggtggtgccggacttggacgactgcgtcgtcgacaccgccgtggatgacgctcccgtggtggcggcggaggcggcgggccgacgcgcgtcggacgagacgctggcggtgcacgccggggagaagctcgggagcggcgccgctgagacggactcgatcgcgacgccgatcgtgagcagcacgacgcactggttcagggactcggcggacctcatcgccttccgggaaggctggcggcggagcttcgagtacgggcggtacggaaacccgacggtgaaggtgctggaggagaagatcagcgcgctggagagggcggaggcgacgctggtgacctcctccggcatgaacgccatcgtcgccacgctgctcgccctcgtcccccccggcggccacgtcgtcgtcaccgccgactgctacagcgaggcccgcgccttcatccacgacaagctatccaagatgggcatcacgtcgacgttcgtggatcttgacgacgacatggaggcgctggaatccgttcttgatgaggacgaggtgacgatgttctacgccgactcgatgacgaacccacacctgaaggtcgtcgacgtggcacgcgtggcggagctgtgccaccggaggggcgcgctggtgtgcatcgacagcacgctggcgtcgcccatcaaccagaagccgctcgccctcggagccgacgtggtcctccactccgccaccaagtacatcgccggccaccatgacgtcatcgccggctgtgtcagcggctcagaggccctcatctcgaggatacgcgcgtggcaccacgacctcggcggcgccatcagtccggacggcgctgcggatggcgcggctgctggagaagcacccccagatcgagcgcgtctacttaccctgggctgggagagcagcccgtggcacggcgtcgcgacgaggcagatggccggcgccggcggcgtggtcagcttcgaggtggcgtcggacatgcgcggcgtgatgaggttcgtggacgcgctggagttgccgctcatcgcgacgtcgctcggcggctgcgagagccttgtccagcagccggccgtcatgtcctactggggtaagagtgaggaggagaaggcgaagaatgggatcaaggacaactttgtgaggttcagttttgggatcgagaagtttgaggatctcagggatgatatactccaagccctagagaagatttaa

SEQ ID NO: 126230 - protein, 451 aa, Oryza sativa subsp
MAKSSSLVTKVSVQRRRRVHRPRRSPTKPERAAAADTFGSLAGCPSSPEYPVVPDLDDCVVDTAVDDAPVVAAEAAGRRASDETLAVHAGEKLGSGAAETDSIATPIVSSTTHWFRDSADLIAFREGWRRSFEYGRYGNPTVKVLEEKISALERAEATLVTSSGMNAIVATLLALVPPGGHVVVTADCYSEARAFIHDKLSKMGITSTFVDLDDDMEALESVLDEDEVTMFYADSMTNPHLKVVDVARVAELCHRRGALVCIDSTLASPINQKPLALGADVVLHSATKYIAGHHDVIAGCVSGSEALISRIRAWHHDLGGAISPDGAADGAAAGEAPPDRARLLTLGWESSPWHGVATRQMAGAGGVVSFEVASDMRGVMRFVDALELPLIATSLGGCESLVQQPAVMSYWGKSEEEKAKNGIKDNFVRFSFGIEKFEDLRDDILQALEKI

SEQ ID NO: 126231 - DNA, 1461 bp, Oryza sativa subsp
  CDS (1)..(1461)
atggcgaagtcatcgtccctcgtgacgaaggtttcggcgcagcggcggcggcgagtgcaccgtcctcgccgttctccgaccaagccggagcgcgctgccgccgccgtggcgctgagccacgagaagattcttctcgccggcgttgatgcagccgccgacatgttcggttccctcgcgggttgtccctcgtcgccggagtatccggtggtgccggacatggacgaccgcgacgtcgacggcgccgtggatgacgctccggcggcggcggcgggccgacgggcgtcggacgagacgctggcggtgcacgccggggagaagctcgggagcggcgccgctgagacggactcgatcgcgacgccgatcgtgagcggcacgacgcactggttcagggactcggcggacctcatcgcgttccgggaaggccggcggcggagcttcgagtacgggcggtacggcaacccgacggtgaaggtgctggaggagaagatcagcgcgctggagagggcggaggcgacgctggtgacctcctccggtatgaacgccatcgtcgccacgctgctcgccctcgtccctcccggcggccacgtcgtcgccaccgccgactgctacagcgaggcccgcgcattcatccgtgacaagctctccaacatgggcatcacgtcgacgttcgtcgatcttgacgacgacatggaggcgctggaatgtgttcttgatgagagcgaggtgacgatgttctacgccgactcgatgacgaaccctcacctgaaggtcgtcgacgtgacacgcgtggccgagctgtgccaccggagaggcgcgctggtgtgcatcgacagcacgctggcatcgcccatcaaccagaagccgctcgccctcggcgccgacgtcgtcctccactccgccaccaagtacatcgccggccaccacgacgtcctcgccggctgcgtcagcggctcggaggccctcatctcgcggatccgcgcgtggcaccacgacctcggcggcgccatcagtccgaacgcggcgtacatgatcattcggggattgaagacgattgcgctgcgggtggaggcgcagaacaggacggcgctgcggatggcgcggctgctggagaagcaccccaagatcgagcgcgtctactaccctgggctggagagcagcccgtggcacggcgtcgcgacgaggcagatggccggcgccggcggcgtggtcagcttcgatgtggcgtcggacttgcgcggcgtgatgaggttcgtggatgcgctggagttgcctctcatcgcaacgtcgctcggtggatgtgaaagccttgtgcagcaaccggccgtcatgtcctactggggtaagagtgaggaggagaaggcgaagaatgggatcaaggacaattttgtcaggttcagttttgggattgagaagtttgaggatctcagggacgacatactccaggccctagagaagatttag

SEQ ID NO: 126232 - protein, 486 aa, Oryza sativa subsp
MAKSSSLVTKVSAQRRRRVHRPRRSPTKPERAAAAVALSHEKILLAGVDAAADMFGSLAGCPSSPEYPVVPDMDDRDVDGAVDDAPAAAAGRRASDETLAVHAGEKLGSGAAETDSIATPIVSGTTHWFRDSADLIAFREGRRRSFEYGRYGNPTVKVLEEKISALERAEATLVTSSGMNAIVATLLALVPPGGHVVATADCYSEARAFIRDKLSNMGITSTFVDLDDDMEALECVLDESEVTMFYADSMTNPHLKVVDVTRVAELCHRRGALVCIDSTLASPINQKPLALGADVVLHSATKYIAGHHDVLAGCVSGSEALISRIRAWHHDLGGAISPNAAYMIIRGLKTIALRVEAQNRTALRMARLLEKHPKIERVYYPGLESSPWHGVATRQMAGAGGVVSFDVASDLRGVMRFVDALELPLIATSLGGCESLVQQPAVMSYWGKSEEEKAKNGIKDNFVRFSFGIEKFEDLRDDILQALEKI

SEQ ID NO: 126233 - DNA, 1410 bp, Oryza sativa subsp
  CDS (1)..(1410)
atggcccacgtcatggccgcctccgagctcgtcaccgccaccatcaagcgccccttccagaacgacgacgacaacagcagcaacggcaacggcaacgccgacgggaagcccaaggcgcggcgccgggaggccgacccggcggcggcgctggccgcggcgcgccacgagttcggcgagcacggcggggtgaacatgtccatcgaggcgtcggcgacgttcacggtgatggagccggacaccatgcgccgcctcttctccggggagctcggcccggagcgcggcgacctgtacatctacagccgccacttcaacccgacggtgctggcgctggggcggcagatggcggcgctggagggcaccgaggccgcgtactgcacggcgtccgggatgtccgccatctcctccgtgctgatgcagctcgtcggcgcgggggggcacgtggtggcgtcgcggtgcctgtacggcggcacgcacgcgctgctgtcccggttcctgccgcgcgcgtccggggtgcgcgcaacgttcgtggacgctgacgacgaggcggcggtgcgcgccgcggtgcgcccgggggagacgcgggtggtgtacgtggagacgatgtcgaacccgacgctggccgtggccgacatcccgatgctggcccgcgtcgcgcacgacgccggcgccaagctggtggtggacaacacgttcacgcccatggtcgtctcgccggcccgcctcggcgccgacgtcgtcgtccacagcgtctccaagttcatcagcggcggcgccgacatcatcgcaggggcgatctgtgggccggcgagcctggtgaacgcgatgatggacctgcaggagggggccctgatgctgctgggcccgacgatgaacgccaaggtggccttcgagctctcggagcgcctcccgcacctcccgctccggatgcaggagcactcgcggcgcgccgccgagtacgcgtcccggatgcgccgcctcggcctccgcgtcgcctacccgggcctccccgaccacccgcaccacgcccgcctcctcgccatcgccaacccgggctacggcgccggcggcatgctctgcgtcgacatgggcaccgaggaccgcgccaaccgcctcatgcaccacctccagaacaccacccgcttcggcctcatggccgtcagcctcggctactacgagaccctcatgtcgtgctccggcagcagcaccagcagcgagatgccgcccgaggaccgcgctcgcgccggcatctcccccggcctcgtccgcatgtccgtcgggtacaacggcacgctcgagcagcggtgggcgcagttcgagcgcgcgctctcgctcatgcagcagcagcagcagcagcatcccgaccgcgacgccgccgccaagtactgcaagatagttgaatggcacagctaa

SEQ ID NO: 126234 - protein, 469 aa, Oryza sativa subsp
MAHVMAASELVTATIKRPFQNDDDNSSNGNGNADGKPKARRREADPAAALAAARHEFGEHGGVNMSIEASATFTVMEPDTMRRLFSGELGPERGDLYIYSRHFNPTVLALGRQMAALEGTEAAYCTASGMSAISSVLMQLVGAGGHVVASRCLYGGTHALLSRFLPRASGVRATFVDADDEAAVRAAVRPGETRVVYVETMSNPTLAVADIPMLARVAHDAGAKLVVDNTFTPMVVSPARLGADVVVHSVSKFISGGADIIAGAICGPASLVNAMMDLQEGALMLLGPTMNAKVAFELSERLPHLPLRMQEHSRRAAEYASRMRRLGLRVAYPGLPDHPHHARLLAIANPGYGAGGMLCVDMGTEDRANRLMHHLQNTTRFGLMAVSLGYYETLMSCSGSSTSSEMPPEDRARAGISPGLVRMSVGYNGTLEQRWAQFERALSLMQQQQQQHPDRDAAAKYCKIVEWHS

SEQ ID NO: 126235 - DNA, 1143 bp, Lactobacillus reuteri; identical to SEQ ID NO: 13986
  CDS (1)..(1143): transl_table=11

SEQ ID NO: 126236 - protein, 380 aa, Lactobacillus reuteri; identical to SEQ ID NO: 13987

SEQ ID NO: 126237 - DNA, 1149 bp, Magnetospirillum gryphiswaldense; identical to SEQ ID NO: 13992
  CDS (1)..(1149): transl_table=11

SEQ ID NO: 126238 - protein, 382 aa, Magnetospirillum gryphiswaldense; identical to SEQ ID NO: 13993

SEQ ID NO: 126239 - DNA, 1725 bp, Zea mays
  CDS (1)..(1530)
atggccactgtctcgctcaccccgcaggctgtcttctccacggagtccggtggcgccctggcctctgctaccatcctccgctttccgccaaactttgtccgccagcttagcaccaaggcacgccgcaactgcagcaacatcggcgtcgcgcagatcgtcgccgccgcgtggtccgactgccccgccgctcgcccccacttaggcggcggcggccgccgcgcccgcggcgtggcctcctcccacgccgcggctgcatcggccgccgccgccgcctccgcggcggcggatgtcagcgcaattcctaacgctaaggttgcgcagccgtccgccgtcgtattggccgagcgtaacctgctcggctccgacgccagcctcgccgtccacgcgggggagaggctgggaagaaggatagccacggatgctatcaccacgccggtagtgaacacgtcggcctactggttcaacaactcgcaagagctaatcgactttaaggaggggaggcatgctagcttcgagtatgggaggtatgggaacccgaccacggaggcattagagaagaagatgagcgcactggagaaagcagagtccaccgtgtttgtggcgtcagggatgtatgcagctgtggctatgctcagcgcacttgtccctgctggtgggcacattgtgaccaccacggattgctaccgcaagacaaggatttacatggaaaatgagctccctaagaggggaatttcgatgactgtcattaggcctgctgacatggatgctctccaaaatgccttggacaacaataatgtatctcttttcttcacggagactcctacaaatccatttctcagatgcattgatattgaacatgtatcaaatatgtgccatagcaagggagcgttgctttgtattgacagtactttcgcgtcacctatcaatcagaaggcattaactttaggtgctgacctagttattcattctgcaacgaagtacattgctggacacaatgatgttattggaggatgcgtcagtggcagagatgagttagtttccaaagttcgtatttaccaccatgtagttggtggtgttctaaacccgaatgctgcgtaccttatccttcgaggtatgaagacactgcatctccgtgtgcaatgtcagaacgacactgctcttcggatggcccagtttttagaggagcatccaaagattgctcgtgtctactatcctggcttgccaagtcaccctgaacatcacattgccaagagtcaaatgactggctttggcggtgttgttagttttgaggttgctggagactttgatgctacgaggaaattcattgattctgttaaaataccctatcatgcgccttcttttggaggctgtgagagcataattgatcagcctgccatcatgtcctactgggattcaaaggagcagcgggacatctacgggatcaaggacaacctgatcaggttcagcattggtgtggaggatttcgaggatcttaagaacgatctcgtgcaggccctcgagaagatctaagcactctaatcagtttgtattgacaaaatcatgaggtgatggctgtcttggatcttgtcaagatctgtgacaatgatatgagctgatgactgcgaataagttctcttttgcttattttatccgtcaaattcaaaaaaaaaaaaaaaaaaaaaaaaaaaaaaaaaaaaaaaaaaaaaaaaaaaaaaaaaactcgag

SEQ ID NO: 126240 - protein, 509 aa, Zea mays; identical to SEQ ID NO: 13997

SEQ ID NO: 126241 - DNA, 1530 bp, Zea mays; identical to SEQ ID NO: 13998
  CDS (1)..(1530)

SEQ ID NO: 126242 - protein, 509 aa, Zea mays; identical to SEQ ID NO: 13999

SEQ ID NO: 126243 - DNA, 1940 bp, Fragaria vesca
  CDS (100)..(1737)
ttcaaacccccctaaccactttcctgaaaaattagaaactctcgctccagctaaaaccctgctctcgatccctcatcaatcttcctcactctcaccaccatgggcgtgtacacgtgtcctagggttttcacctcctcctcctcctcctccacctactgctgccgccaccaccccgacctcgccacccgcgccgccgtcaatccccgccccggcttcgccgcaggccgcgtcgactctccggcgccgtttcacggcctatcgtcactcatcctccgcttccctcccaacttcgtccgccagctcagcaccaaggcccgccgcaactgcagcaacatcggcgtcgcgcagatcgtcgcggcttcgtggtccaacaaagactccgacctttcggcggtgccggcggctagtgccgtcgatgccgccgccaccgccgccgatctggtcgtcccggcccagatcgggaccgaggatgacctggcggccgtggatgcggagtacgccgtgtttgggaacggtgtacagttaggaggcttgcctgatttgaaggacgcctcgtttttaagctccgatgggagcatcgcaattcatgccggtgaaagattgggtcgcggtatagtgactgatgcaattacaaccccggtggttaatacttctgcttactttttcaagaaaactgctgacctccttgatttcaaggagaagcgcgcgacgagttttgaatacgggcgctatggaaacccaactaccgtggttcttgaggaaaagattagtgctcttgaaggagcggaatctacactgttgctagcttccggaatgtgtgctagcacggtcttgttgatggctttggttccagctggtgggcatattgtgacaacaacagactgctacaggaagactcggatatttattgagaccatccttcccaaaatggggatcacggcaacaattattgaccctgctgatgttggagcactagaaactgcactgaatgagaataaagtttctcttttcttcacagaatctcctacaaaccctttcctaaggtgtgtggacattaatttggtttcagatctttgccatagcaaaggggcagtagtctgtataaatggcacttttgccacacctataaatcaaaaggcccttgctcttggggctgatcttgttgtgcactctgcaacaaaatatcttgctggccacaatgatgtccttgctggttgcattagcggttcaatgaaattggtttccgaaattcgtatattgcatcatattttgggtggtgctcttaacccgaatgctgcatacctgatcattcgaggcatgaagactttgcatattcgtatacagcaacagaattctactgcattgaggatggccaaaattttagaggcgcatcctaaggtggcgcacgtctattatcctggtttgccaagtcatcctgaacatgagcttgccaagaggcagatgactggtttcggtggtgttgtcagttttgagattgatggagacttgaagagaacaattaagttcattgatgccctgaaaataccatatattgccccctcctttggtggttgtgagagcatcgtggatcagccagccataatgtcttattgggatctcagccagtcagataggctcaagtacggaatcaaggataacctggtccgtttcagcttcggtatcgaagacttcaatgatcttaaggctgacattctgcaggccctggagaaaatatagaccaaaccggccacctaagatgcggattcctgtttaatttttttttacctgttcttttggtgtttcaattgatgtttgatcaccaaaaacggtcgttatcgattccattaggacccaaaacctgtcgaatttcttttgtaatctgctcttaacaattccatatcattatcactatgctgcttcgtttaaaaaaaaaaaaaaaa

SEQ ID NO: 126244 - protein, 545 aa, Fragaria vesca; identical to SEQ ID NO: 14001

SEQ ID NO: 126245 - DNA, 1500 bp, Xanthomonas maltophilia
  CDS (127)..(1302): transl_table=11
  misc_feature (231)..(231): y is t or c
  misc_feature (513)..(513): y is t or c
  misc_feature (573)..(573): y is t or c
  misc_feature (666)..(666): y is t or c
taagccgctgatcgaagacgttcgctgctgaatcccggtttatccgcgtcaaaggtcgttaaggccgtgctggtagacttccgcaccttcgatggcgccgtgcgtcggcgcccctcaggaaacaacatgtccaacgctacttcccaggatcgcgccctggccctggctactctggccatccacggtggccagtcgccggaccccagcactggcgcggtaatgccgccgatytacgccacctcgacctatgcgcagtccagcccgggcgagcatcagggcttcgagtactcgcgtacccacaacccgacccgcttcgcctatgagcgttgcgtggcatcgctggaaggtggcacccgcggcttcgctttcgcctcgggcatggcggcgagctcgaccgtgatcgaactgctggacgccggcagtcacgtggtggcaatggacgatatttacggcggcagcttccgcctgttcgagcgggtgcgtcgccgcaccgccgggctggacttcagcttygtcgacctgaccgatctggccgcgttcgaagccgccatcacgtcgaagacgaagatggtytggattgagaccccgaccaacccgatgctgaagattgttgacatcgccgcggtcaccgccatcgccaagcgccatggcctgattgtggtggtygacagcaccttcgcctcgccgatgctgcagcgtccgctggagctgggtgcggacctggtcctgcattcggccaccaagtacctcaacggtcactcggacatggtcggcggcatggtcgtggtcggcgacaacgccgaactggccgagcagatggccttcctgcagaactcggtgggtggcgtgcagggcccgttcgacagcttcttggccctgcgtggcctgaagaccctgccgctgcgcatgaaggcgcactgcgccaacgcgctggcgctggcccagtggctggaaaagcacccggcggtggagaaggtgatctacccgggtctggcctcgcatccgcagcatgaactggccggcaagcagatggccggttacggcggcatcgtctcgatcgtgctcaagggcggtttcgaagcggccaagcgcttctgcgagaagaccgaactgttcaccctggccgagtcgctgggcggcgtggaaagcctggtcaaccacccggcggtgatgacgcacgcctcgatttcggtcgcgcggcgggaacagctgggtatcagcgatgcgctggtaaggctgagcgtgggcgtggaggagctgggggatctgcaggtggatctggagcgggcgctgggcggctgaccgcactcctgtcctccatgacgtctccagactcctctccggttgctgcatcggtacgcatgtttgcgtggctgcgcagccaggcgtggctgcgcggtgcctaccatctgttgccgaccggcctgcgcgaaggtgcgctgcgattgttttcgcggcgacttcaggcgcggacgcgcttcgtgcgcaccgcggcctggg

SEQ ID NO: 126246 - protein, 391 aa, Xanthomonas maltophilia; identical to SEQ ID NO: 14003

SEQ ID NO: 126247 - DNA, 2055 bp, Mesembryanthemum crystallinum
  CDS (235)..(1881)
aaaaatataaacttcacctttcaacaaaccaaagttcccaaccatagttaaagtccctaatccccctcaccagcttttatttgaaaaatttgactcctcagagaaaattaaggccgtcacattttccggaagctagaaaaaaccgagaggcaagcctagcctgtggcacagaaagagagagaaggagagagagaaggagagacagaaaaataacccaccaaccaaaccacaaaaatggccgccatcacgagcagctgctgtgctagggttttgcccccatttgaatgccgccctgagccagcagacttctccactgccgccgccaagcaagagaagaacatccccaaatccttcttcggcggcgccaatggccgcctcttctcctcctcttcttcctctcttatccttcgctttcctcccaactttgtccgtcagctcagcaccaaggctcgccgcaactgcagcaacattggtgtcgcacaggtcgtcgctgcctcctggtccaacaactccgatgccggcgccacctcttgcggtggcgttccggctgctactgccgtcgacgctgccgctatcgccgccgtcgatcatgtggagatcgatggtggtgctgtagttgaggattctaatgatggtggtgtaaaggagttgtcttctaataatagtaatactttggggttgggtgatttcaggcccccatttttaagctccgatgggagcgttgcaattcatgccggtgagagattaggtcgtggcatagtcactgatgcaataactaccccggtagtaaatacttctgcatacttcttcaagaaaactgctgacctcattgattttaaggaggggcgccaaactagctttgagtatggtcgatatggaaatcctacctcagtggttttggaagataagattagtgcgcttgaaggagctgaatcaacaatattgttggcatccggaatgtgtgcaagtattgttctcatgttggctttggttccagctggtggtcatattgtgactactactgactgttatcggaagaccagaatatttattgagactttccttcccaaaatggggatcacggctacagtcattgaccctgctgatgtcgaaggccttaagtctgctcttgatgaaaataatgttactctattcttcactgagtctccgaccaatccatttcttaggtgtgttgacatcaagctggtctcagaactttgccacaagaaaggagcattggtctgcattgatggaacatttgccacacctctgaaccagaaggcccttgctctaggcgctgactttgttgtgcattctatgacaaaattcattggtggacacaatgatgttcttggtggttgcatcagtggttcgaaaaatttgatttcaactattcgaacttttcatcatgtccttggcgggactcttaacccgaatgctgcatatttaatgattcgaggcatgaagaccctccatcttcgtgtacagcaacagaacactacagcactgaggatggccgaaattttagaggcacatcccaaggtgaagcacgtttattatccaggtcttccaagtcatcctgagcacaagctggcaaagcggcaaatgactggctttggcggagtggttagttttgaggttgatggagatttattgaccaccgcgaagtttgttgattcattgaagattgcttatattgctccatcatttggaggctgtgaaagcattgtggatcagcctgcgatcatgtcttactgggatcttagtccatctgacaggctgaaatatggtatcaaggataacttggttcggttcagttttggagttgaggactttgaagatttgaaggctgatgttcttcaggctctggaggccatatgaggcgtgtcattttcattccattcccggcatttggtctttatgatgttttttcattccctgaatatcctgctttgtggtggttggcggatcacttgaacgatgatcctctgttttagtgtaatattggtttactgtgcttttccagagcgataagaaatcaatataattttctgc

SEQ ID NO: 126248 - protein, 548 aa, Mesembryanthemum crystallinum; identical to SEQ ID NO: 14005

SEQ ID NO: 126249 - DNA, 1182 bp, Drosophila melanogaster; identical to SEQ ID NO: 14006
  CDS (1)..(1182)

SEQ ID NO: 126250 - protein, 393 aa, Drosophila melanogaster; identical to SEQ ID NO: 14007

SEQ ID NO: 126251 - DNA, 1401 bp, Ostreococcus tauri; identical to SEQ ID NO: 14008
  CDS (1)..(1401)

SEQ ID NO: 126252 - protein, 466 aa, Ostreococcus tauri; identical to SEQ ID NO: 14009

SEQ ID NO: 126253 - DNA, 1984 bp, Medicago sativa
  CDS (71)..(1681)
  misc_feature (397)..(397): n is a, g, c or t
agagaggaagtaggtgtaggaaacaaaagagaaccaagaaaaacctaaccacaccaaaacgacacaaaaaatggccgtttcaagtttccaccgcgttttcaccttcgaatgccgttccgatcccgatttcacatcccttccatccactgacaaccaccaccacaaccgccgtcgtcatttcccaacaacctccctttcctccgccgccgccatctcctccccaatcctccgttttcctcccaatttccaacgtcaactcagcaccaaagcgcgtcgtaactgcagcaacatcggtgttgcacaaatcgtcgctgcttcgtggtctaatgaaggaactgggaaccccagcggaatcgctggttcggactccggtgccggctgttgcatctgctgttgntgcaacgacttcgccggtgccgttagacctcgacgccgatgtcgccgatgggatgtcgtcgaaaatggggctgtacagactaaccgtagttcttattcttcgtttttgaaatccgatgcaagcaaaacgattcatgccgctgagagacttggtagggctattgtgactgatggaattaccactcctgtggtgaacacttctgcctacttttttaagaaaactgctgatcttattgattttaaggagaaacgtcaaactagttatgaatatgggcgctatggcaacccaaccagtactgttttggaggagaagataagtgaactggaaggggctgagtcaactatcttgatggcatctgggatgtgtgctagcgtagtcttgttcatggcgctggttccagccggtggacatcttgtgactactactgattgttacaggaagactaggatatttatagagacttttcttccaaagatggggatcacgacaaccgtgattgatcctgctgatgttggagccttggaatctgctttggagcagcacaacgtgtctctattcttcactgagtctcctaccaatccattcctgagatgtgttgacattaagctggtttcagaactttgccacaagaaagggactttgctctgcattgatggtacatttgctacgcctttgaaccagaaggcccttgcccttggggctgatttaattttgcactctttgacgaagtacatgggtggacatcatgatgtacttggtggttgcatcagtggctctatcaaggtggtctcacaaattcgaactttgcatcatgttttgggcggtactcttaacccgaatgctgcatacctattcatcagaggcatgaaaacgctgcatcttcgtgtacagcaacagaattcaaccggaatgaggatggccaaacttttagaggcacatcccaaggtgaagcgtgtctactatccaggcttgccaagtcatcctgaacatgagcttgccatgaggcagatgactggttttgggggtgtggtcagttttgagattgatggagatataacaaccacaattaaatttattgattcactaaaaatcccatacattgctgcctcatttggtggctgtgagagcattgtggatcaaccagccattttgtcttactgggaccttcctgcatcagaaagggccaagtggaagatttatgacaatttggttcgattcagctttggaattgaagattttgaggatttgaaggctgatgtcttgcaggcactggaagccatataggcactattcattatttaccgcaaacatttatctttttctcgaaataaatgtattttttgctctgagtatgaacccagtatttgctgcgtgtatctgcggatattaattccttgaactgatttgggtgttctatgttctctcttgttattttgtctggtgaatcgattgaattatgattgcgtaatgatgtattgggcttgtttaagaaaaatggtctctgatttgaattctgtaaacctatgattgtaatgttgaagtgatgatgatgaagtcatttgattcaaaaaaaaaaaaaaaaaaaaa

SEQ ID NO: 126254 - protein, 536 aa, Medicago sativa; identical to SEQ ID NO: 14013
  misc_feature (109)..(109): The Xaa at location 109 stands for Stop, Cys, or Trp.

SEQ ID NO: 126255 - DNA, 1326 bp, Phaeosphaeria nodorum
  CDS (1)..(1326)
atggccggtgaaagctccaagggcaaggcgcctgctgcgctcgatctcgacggccacgacttgccgccctcacctgcaccgagcacaccccgcaatggccggaaatatgcgctggcaacggagctggtgtacctcgagagcaacgaccagtacaatgccagctccgtgccgatttaccagtcggctactttcaagcaggaatctgcaggaggcagcggagaatatgattacacacgctctggcaacccaacgcgaacacacctcgaacggcacttggccaagatcatggctgcgaaccgcgcccttgtcgtctcgtctggcatgggtgccctcgacgtcatcacccgcctgctgcggcccggcgacgaagtcgtgacgggcgacgacttgtacggcggatccaacaggctgctcaaatacctctcaacccacggtggcatcatcgtacaccacgtcgacacgacggaccctgaaaaggtgcgcgaggtggcgaacagcaagacggccatggtgctgctcgagacaccaaccaacccgttgatcaaaatctgcgacattccctccattgccaaaattgcccacgatgcaaaccccgcggctatcgtcgccgtcgacaacaccatgatgtcgcccatgctgctcaacccgctcgatctcggcgccgacgtcgtctacgagtcgggaacaaagtacctgtctggccaccacgacctcatggccggagtcattgccatcaacaactccgctctaggcgaccgcctctacttcacaatcaacgcatcgggatgcggcctctcgccctttgattcgtggctgctgctccgcggcatcaagacgcttggcgtgcgcatggagaaacaacaggacaacgccatgcgcatcgccgagtttctggagtcacacggcttcaaggtgcgctacccggggctcaagtcccacccgcagtacgccttgcactggagcatggcgcgcggcgcgggcgccgtcttgtcgtttgaaaccggcgacgtcctggtcagcgagcgcatcgtcgagagcgcgaagctctgggcgatcagcgtcagcttcggctgcgtgaacagcttgatcagcatgccgtgccgcatgagccacgccagtatcgacgagaaaacgcgcaaggagcgcaacatgcctgaagacattgtcaggctgtgcgtgggcatcgaagacccggaggatttgattgacgatctgagccgtgctgtaagttctcataaaggcgttgccggattgttcaaaactaacatgtgcagcttgtacaagccggtgcggtcagcatctctcctgatggcttccgtgctgtag

SEQ ID NO: 126256 - protein, 441 aa, Phaeosphaeria nodorum
MAGESSKGKAPAALDLDGHDLPPSPAPSTPRNGRKYALATELVYLESNDQYNASSVPIYQSATFKQESAGGSGEYDYTRSGNPTRTHLERHLAKIMAANRALVVSSGMGALDVITRLLRPGDEVVTGDDLYGGSNRLLKYLSTHGGIIVHHVDTTDPEKVREVANSKTAMVLLETPTNPLIKICDIPSIAKIAHDANPAAIVAVDNTMMSPMLLNPLDLGADVVYESGTKYLSGHHDLMAGVIAINNSALGDRLYFTINASGCGLSPFDSWLLLRGIKTLGVRMEKQQDNAMRIAEFLESHGFKVRYPGLKSHPQYALHWSMARGAGAVLSFETGDVLVSERIVESAKLWAISVSFGCVNSLISMPCRMSHASIDEKTRKERNMPEDIVRLCVGIEDPEDLIDDLSRAVSSHKGVAGLFKTNMCSLYKPVRSASLLMASVL

SEQ ID NO: 126257 - DNA, 1161 bp, Klebsiella pneumoniae; identical to SEQ ID NO: 14014
  CDS (1)..(1161): transl_table=11

SEQ ID NO: 126258 - protein, 386 aa, Klebsiella pneumoniae; identical to SEQ ID NO: 14015

SEQ ID NO: 126259 - DNA, 1509 bp, Oryza sativa subsp; identical to SEQ ID NO: 14142
  CDS (1)..(1509)

SEQ ID NO: 126260 - protein, 502 aa, Oryza sativa subsp; identical to SEQ ID NO: 14143

SEQ ID NO: 126261 - DNA, 1212 bp, Aedes aegypti
  CDS (1)..(1212)
atgttcagcgaaaagatcaccaacggagtcgaaagagccgaggacggtttccgtgcgcagccgaagggttttgctaccaaggcgatacacgtgggccaagatgcggaacagtggaagagccgagccgttgtgccaccgatcagtatgagcacaacgttcaaacaatttggaccggctcaacatgcgggatacgaatacggtcgcagtggtaatccaacgcgtgatgtgctggagagatgccttgcttccctcgataatggcaaatatgggctgacgttctcttcgggtttgggagtaacgactaccgtgatcacgatgctcagcgctggagatcacatcgtagccggagacgatctgtacggtggcaccaatcgacttctgcggaaggtggccatgaaaatgaacatcgaagttgatttcgttgactgcacggatctggccaaggttgaggccgcggtgaagccaaacacgaagcttttctggatagaaaccccaaccaatcccctgctgaaagtgatcgatatcgaagcggtcagcgaagtggcgcataaattcccaggagttgtggttgtggtagataacacattcttgtctgcatatctgcagaggccactggatttgggtgccgatattgttatgtactctttgaccaagtacatgaacggtcattccgatgtcattatgggagctgctatcatgaatgatgaagccctatatgagcagctcaaatttcttcagaatgctgccggtatcgtcccatccccattcgattgctatctggtaaaccgaagcctgaagacgctagcccttcgcatggaacggcacaagtctaactccctggccattgcaaagttcctggaaaagcacccgaaagtggaacgcgtcttgcaccccggtttgccgtctcaccctcagcacgaactggccaagaaacaaacctacggccacagtggcattatgtctttctacatcaaggggggcatggaggaatctacgaagttcctgcagtcattggaggtgttcacgttggcggaaagtctcggcggatacgagagtctcgccgaagtgccgtcagtcatgacacatgcctccgtgccgccagagcaccgggcacttttgggcatcacagacaatttaattagaatttcagtcgggctggaagacgcagacgatttaatcgtggatctgaaacaagctcttgaaaaggcataa

SEQ ID NO: 126262 - protein, 403 aa, Aedes aegypti
MFSEKITNGVERAEDGFRAQPKGFATKAIHVGQDAEQWKSRAVVPPISMSTTFKQFGPAQHAGYEYGRSGNPTRDVLERCLASLDNGKYGLTFSSGLGVTTTVITMLSAGDHIVAGDDLYGGTNRLLRKVAMKMNIEVDFVDCTDLAKVEAAVKPNTKLFWIETPTNPLLKVIDIEAVSEVAHKFPGVVVVVDNTFLSAYLQRPLDLGADIVMYSLTKYMNGHSDVIMGAAIMNDEALYEQLKFLQNAAGIVPSPFDCYLVNRSLKTLALRMERHKSNSLAIAKFLEKHPKVERVLHPGLPSHPQHELAKKQTYGHSGIMSFYIKGGMEESTKFLQSLEVFTLAESLGGYESLAEVPSVMTHASVPPEHRALLGITDNLIRISVGLEDADDLIVDLKQALEKA

SEQ ID NO: 126263 - DNA, 1608 bp, Medicago truncatula; identical to SEQ ID NO: 14022
  CDS (1)..(1608)

SEQ ID NO: 126264 - protein, 535 aa, Medicago truncatula; identical to SEQ ID NO: 14023

SEQ ID NO: 126265 - DNA, 1434 bp, Medicago truncatula; identical to SEQ ID NO: 14024
  CDS (1)..(1434)

SEQ ID NO: 126266 - protein, 477 aa, Medicago truncatula; identical to SEQ ID NO: 14025

SEQ ID NO: 126267 - DNA, 1215 bp, Aspergillus oryzae; identical to SEQ ID NO: 14026
  CDS (1)..(1215)

SEQ ID NO: 126268 - protein, 404 aa, Aspergillus oryzae; identical to SEQ ID NO: 14027

SEQ ID NO: 126269 - DNA, 1326 bp, Aspergillus oryzae; identical to SEQ ID NO: 14028
  CDS (1)..(1326)

SEQ ID NO: 126270 - protein, 441 aa, Aspergillus oryzae; identical to SEQ ID NO: 14029

SEQ ID NO: 126271 - DNA, 1194 bp, Aspergillus oryzae; identical to SEQ ID NO: 14030
  CDS (1)..(1194)

SEQ ID NO: 126272 - protein, 397 aa, Aspergillus oryzae; identical to SEQ ID NO: 14031

SEQ ID NO: 126273 - DNA, 1308 bp, Aspergillus oryzae; identical to SEQ ID NO: 14032
  CDS (1)..(1308)

SEQ ID NO: 126274 - protein, 435 aa, Aspergillus oryzae; identical to SEQ ID NO: 14033

SEQ ID NO: 126275 - DNA, 1188 bp, Aspergillus oryzae; identical to SEQ ID NO: 14034
  CDS (1)..(1188)

SEQ ID NO: 126276 - protein, 395 aa, Aspergillus oryzae; identical to SEQ ID NO: 14035

SEQ ID NO: 126277 - DNA, 1191 bp, Aspergillus oryzae; identical to SEQ ID NO: 14036
  CDS (1)..(1191)

SEQ ID NO: 126278 - protein, 396 aa, Aspergillus oryzae; identical to SEQ ID NO: 14037

SEQ ID NO: 126279 - DNA, 1197 bp, Pseudomonas putida; identical to SEQ ID NO: 14038
  CDS (1)..(1197): transl_table=11

SEQ ID NO: 126280 - protein, 398 aa, Pseudomonas putida; identical to SEQ ID NO: 14039

SEQ ID NO: 126281 - DNA, 1278 bp, Brevibacterium linens; identical to SEQ ID NO: 14042
  CDS (1)..(1278): transl_table=11

SEQ ID NO: 126282 - protein, 425 aa, Brevibacterium linens; identical to SEQ ID NO: 14043

SEQ ID NO: 126283 - DNA, 1278 bp, Oryza sativa subsp; identical to SEQ ID NO: 14044
  CDS (1)..(1278)

SEQ ID NO: 126284 - protein, 425 aa, Oryza sativa subsp; identical to SEQ ID NO: 14045

SEQ ID NO: 126285 - DNA, 1623 bp, Solanum lycopersicum; identical to SEQ ID NO: 14046
  CDS (1)..(1623)

SEQ ID NO: 126286 - protein, 540 aa, Solanum lycopersicum; identical to SEQ ID NO: 14047

SEQ ID NO: 126287 - DNA, 1197 bp, Citrobacter freundii; identical to SEQ ID NO: 14052
  CDS (1)..(1197): transl_table=11

SEQ ID NO: 126288 - protein, 398 aa, Citrobacter freundii; identical to SEQ ID NO: 14053

SEQ ID NO: 126289 - DNA, 1095 bp, Streptococcus anginosus; identical to SEQ ID NO: 14054
  CDS (1)..(1095): transl_table=11

SEQ ID NO: 126290 - protein, 364 aa, Streptococcus anginosus; identical to SEQ ID NO: 14055

SEQ ID NO: 126291 - DNA, 1146 bp, Micromonospora echinospora; identical to SEQ ID NO: 14058
  CDS (1)..(1146): transl_table=11

SEQ ID NO: 126292 - protein, 381 aa, Micromonospora echinospora; identical to SEQ ID NO: 14059

SEQ ID NO: 126293 - DNA, 1188 bp, Fusobacterium nucleatum; identical to SEQ ID NO: 14060
  CDS (1)..(1188): transl_table=11

SEQ ID NO: 126294 - protein, 395 aa, Fusobacterium nucleatum; identical to SEQ ID NO: 14061

SEQ ID NO: 126295 - DNA, 1173 bp, Rhodococcus erythropolis; identical to SEQ ID NO: 14062
  CDS (1)..(1173): transl_table=11

SEQ ID NO: 126296 - protein, 390 aa, Rhodococcus erythropolis; identical to SEQ ID NO: 14063

SEQ ID NO: 126297 - DNA, 1341 bp, Oryza sativa; identical to SEQ ID NO: 14064
  CDS (1)..(1341)

SEQ ID NO: 126298 - protein, 446 aa, Oryza sativa; identical to SEQ ID NO: 14065

SEQ ID NO: 126299 - DNA, 1194 bp, Rhizobium leguminosarum bv; identical to SEQ ID NO: 14066
  CDS (1)..(1194): transl_table=11
  misc_feature (788)..(788): n is a, g, c or t

SEQ ID NO: 126300 - protein, 397 aa, Rhizobium leguminosarum bv; identical to SEQ ID NO: 14067
  misc_feature (263)..(263): The Xaa at location 263 stands for Arg, Gln, Leu, or Pro.

SEQ ID NO: 126301 - DNA, 1185 bp, Thermoplasma volcanium; identical to SEQ ID NO: 14072
  CDS (1)..(1185): transl_table=11

SEQ ID NO: 126302 - protein, 394 aa, Thermoplasma volcanium; identical to SEQ ID NO: 14073

SEQ ID NO: 126303 - DNA, 1769 bp, Pichia pastoris
  CDS (381)..(1712)
cagatttaacgggtctcagataaacgaaaaatcgtaacaataccatctatcgagagggggcggcccactgccacgatttccgaaaagataccccccggcttcagattgtaattgtctgttttatagtactgcagtgaagcgccacagctccaaaacttaatttgacttctttatcaattaccgtaatattagtcggccttgccgcatcacgtgacccgatttcactataaaactctccgttcccataaagttttaccacatcacgtgagttgtcaacattgaaacccctcgatgtaatgcttcacaggttggttatttaaatcatccaatcgccgaaccaaatgaaatgatttctaacgtttccttattcacatacaaagatgccttctcacttcgacactttgcagctgcacgccggtcagactgaagctccacacaatgccagagctgttcctatctacgctacctcgtcttacgttttcagagactctgagcacggtgccaagctgttcggtttggaggagccaggttacatctactctcgtttgatgaaccctactcagaacgtctttgaagagagaattgccgctttggagggtggtgccgctgctttggctgttggatccggtcaagctgctcaattcctggctattgctggtttggctcacaccggtgacaacgtcatctccacctctttcttgtacggaggaacttacaaccagttcaaggtcgccctcaagagactgggaattgaatccagatttgtccatggtgatgacccagctgaattcgagagactgatcgatgataagaccaaggccatctacgttgagtccattggtaacccaaagtacaatattccagattttgaggctctcgcaggacttgcccacaagcacggtatcccattagttgttgacaacacctttggtgccggtggttactacgttagaccaatcgagcttggtgctgacactgtcacccactccaccactaagtgcatcaatggtcacggtaacaccatcggtggtgttgtcgttgactctggtaagttcccatggaaagactacccagagaagtaccctcaattctccaagccatctgagggttaccacggtttgatcttgaatgacgcctttggaccagctgccttcattggtcacttgagaactgaactgctaagagatttgggtcctgcttcaagtccattcggtaacttcttgaacataatcggtttggagaccttatctctgagagctgagagacacgctgagaatgctttgaagctggccaaatacttggaaacctctccatacgtcagctgggtctcttaccctggtttggagtctcacgactaccacgaggccgctaagaagtacttgaagaacggtttcggtggtgtattgtcttttggagtcaaggatcatggcaagccagccctcactcccttcgaagaggctggtcctaaggttgtagactccctgaaggttttctccaacttggctaacgttggtgactccaagtctttgatcattgctccttactactctactcaccaacagttgtctcacgaggagaagctggcttccggtgtcaccaaggactctatccgtgtttctgtcggaacagagttcatcgatgatcttattcgagaccttgaacaggcctttgccttcgtttacgaggagcgaaacacaaagttcgtgagttagtttaacagttgtaattgatcaataatgtatgtgtagagtttagaatacgataatgtg

SEQ ID NO: 126304 - protein, 443 aa, Pichia pastoris; identical to SEQ ID NO: 14075

SEQ ID NO: 126305 - DNA, 1152 bp, Oryza sativa subsp; identical to SEQ ID NO: 14080
  CDS (1)..(1152)

SEQ ID NO: 126306 - protein, 383 aa, Oryza sativa subsp; identical to SEQ ID NO: 14081

SEQ ID NO: 126307 - DNA, 1877 bp, Solanum tuberosum
  CDS (66)..(1688)
gaattcgcggccgccttaaaaggtgccgccgccggtgaaatcgcgttttcgacactctcgactcaatggccgttccaagcagtgctagggcatttccgtccttccaatgccgttccgatcccgacttctccggcggcgttccacgtcatgacctccctaacgccggcgttcgtttttcagttaaggtcaagtcgttgagtcgtggatcttcggttcacggtatgtcttctctgatccttcgcttcccgcccaacttcgtaaggcagctcagcgttaaagctcgtaggaactgcagtaacatcggtttagcacaagttgttgcggcttcctggtctaataaccacgcttctcctgactttactccggcggctaaggccgtagatgccgcctccattgctccttttgatattaccacaggtgatgaggagggggcggtggtggaagattcgcctcgtgctgatcgaaatgtacagattgaggatttgacagatgtcaaatattcttcatttttgagttctgatgggagcatcgcaattcatgccggtgaaaggttaggacgtggtattgttactgatgcaataactaccccagtggttaacacatctgcttatttcttcaagaagacttctgaccttattgacttcaaggagaaaaaacgtgcgagttttgaatatgggcgctatgggaaccccactagtattgttgcagaggaaaagataagtgcactggagggtgctgatgcaaccttgttaatggcatctggaatgtgtgctagtactgtattgttgttggcattggttcctgctggtgggcatattgtaacaacaacagactgctataggaagacccggatatttattgagacaatactgcctaaaatgggaatcacggcgacagtcattgacccagctgatattggagctctagagtctgtgctaaatcagaagaaagtgactcttttctttaccgagtctccaacaaatccattcctgagatgtgttgacattgagcttgtttcgaagctttgccatgaaaaaggagcattagtttgcatagatgggacgtttgcaactccccttaaccaaaaggtccttgctctaggggctgacctcgttgtgcactctgcaacaaaatatcttggtggccacaatgatgttcttggaggttgcatcagtggtcctgataagttagtttcagcagttcgtaccttgcatcatatcctgggtggtgctatcaatcctaatgctgcgtatttaatcatcagaggcatgaagacgttgcatctccgtgtacagcaacagaactcaactgcacaaaggatagccgaaattttagaggctcatccaaaggtgaggtgtgtctattatccaggcttgccaagtcatccagaataccatcttgcaaagagacaaatgactggttttggtggggtggtcagttttgaggttgatggggatctgctaactactgcaaaatttgttgatgctctaaaaattccttatattgctccatcgtttggaggttgtgagagcattgtggaccaaccagcaattatgtcttactgggatcttaaggagtcagagagagctaagtatgggatcatggacaacttggttcgattcagctttggagtagaagactttgaagacttgaaagctgatattcttcaggcgctggagtccatgtagggtgtcttacctgcaacctgatttcgttttcccttggatcgttttctttccactagctttgaacttctttttcatctctaattagtggagtagtcacttcccccagttgtcagaatgtattgaatggatcattgagcagctgatgcaatccaatgtcagagtgggatgttaaaaagcggccgcgaattc

SEQ ID NO: 126308 - protein, 540 aa, Solanum tuberosum; identical to SEQ ID NO: 14083

SEQ ID NO: 126309 - DNA, 1840 bp, Solanum tuberosum
  CDS (86)..(1705)
gaattcgcggccggaaaagggcaacgcttctagccgtgggagtaattacatttttgaccttctaaactccgaaatcaacaactcaatggccgtctctagttacgctagggcatttccgtcattcgaatgtcgttcggaacctgatttctccggcagccttccacatcctaaagccggcgttcgattctccggcaagtataactccgggagtaaccgatctcaggtttatggtctgtcttctctgattttcaggtttcctcctaatttcgtgaggcagctaagcattaaggctaggaggaattgcagcaatatcggcgtggctcaagttgtggcggcttcctggtctaacaaccaagccggtcctgagttcactccggcggctaatgctgtcgattcttccgcttccgctgctgttacttcgattggtatcaccgcaggtgacgaggaggtggcggttgtggaaaatgcggattgtaatgatcaaaatgtacaaattacgggtacaggtgttaaatatgcttcatttttgaattcagatggaagcgttgctattcatgccggtgaaaggttgggacgcggtattgttactgatgccataactaccccagtggttaacacatctgcttacttcttcaacaaaacttctgaccttattgattttaaggagaaaagacgtgcaagttttgaatatggccgctatgggaaccccactactgttgttttggaggagaaaattagtgcacttgagggtgctgaatcaaccttgatagtggcatctggaatgtgtgccagtactgtaatgttcctggccttggttcctgctggtgggcatattgttactaccacagactgctacaggaagacacgtgtttttattgagacaatactgcctaaaatgggaattacggccacagtcattgatccagcagatatgggagctttggagttaacattaaatcagaagaaagtggatcttttctttaccgagtctccaacaaatccattcctgagatgtgttgacattgagctggtttcaaagctttgccgtgaaaaaggagccttggtttgcatagatgggacgtttgcaactcctcttaaccagaaggcccttgctctaggggctgaccttgttgtgcactccgctacaaaattccttggtgggcacaatgatgttcttgcaggttgcattagtggtcctgaaaaattagtttcagtaatccgaaacttgcatcatatccttggtggtgctctcaatcctaatgctgcatatcttatcatccgaggcatgaagacgctgcatcttcgtgtacagcaacaaaattcaactgcattgaggatggccgaaattttagaggctcatcccaaggtgaaacacgtctattatccaggcttgccgagtcatccggaatatcatcttgcaaagaaacaaatgactggctttggtggtgtggtcagttttgaggttgatggagacctcctaactactgcaaaatttgtggatgctctgaggattccctatattgctccatcgtttggaggttgtgagagcattgtggaccaaccagcaataatgtcttattgggatcttagccaatctgatagagcaaagtatggtatcttggataacttggttcggtttagctttggagtggaagactttgaagatgtgaaagctgatgttcttcaggctttggattccatataggctgtttcacctgcaacaattttttttcacgtggttccatcctgatttggttgttcgtacctgtgttattaccgacttccatcacgtagccaattgtttgaatgtaatgaaaggatcatcagcggcccggaattc

SEQ ID NO: 126310 - protein, 539 aa, Solanum tuberosum; identical to SEQ ID NO: 14085

SEQ ID NO: 126311 - DNA, 1626 bp, Solanum tuberosum
  CDS (7)..(1422)
tttgaaatggcatgttctctgtctctcaagcagcccttcagctctttgcctaccaacacaaccacccagggtaaattgcctgtaaactttccagtgacatttgggtgcatgaatgggaagggaactctaatagaacagaaattccaactgaattgctcaagagacaaagagatggatctcactgcatcagctttgattgatagtgctgctgccgaatgcatggatgagatggggactatggaactacctcctcaagttgaggctagggaagcaaaagagccaagtgtttcaacaatgttgatgaacttcagtaatgattttgatccttatggtgccttaagtacccccttgtatcaaacatctacttttaagcagccttcagcaaccgaaaatgggcaatatgattatacacggagtggaaatccaacaagggatgcattggaaaagcttcttgcagagcttgagaaagcagatcgagcattttgctttaccagtggaatggccgccttggcagctgtaactcgtctcgttaaagctggtgaggagattgttgccggggatgacatatatggtggttctgaccggctgctctcacaagttgttccaaaagccgggatcgtggtcaagcgagtggataccactaacttagatgaggttgcttctgtgattaaaccatggacaaagcttatttggctggaaagcccaaccaaccctcgtcaacaaatttgtgatattcgtaaaatagccaagatcgctcatgcacatggggctcttgtgctggtagataacagcattatgtccccagtactgtcccatcctttggagctcggagcagatattgtgatgcattcagctactaagttcatatccggtcatagtgatctcatggctggtgtacttgccgtcagaggagaaagcttggcgaaagaggtgtacttcctacaaaatgctgaaggtgcagggttagcgccattcgattgttggctttgtttaagaggaatcaaaacaatggcacttcgtgttgaaaaacaacaggagaatgcacaaaaaattgctgaatttttatcttcccatccacgagtgaaaaaggtcaactatccaggtcttcttgaccatccagggaggtctttgcacttctctcaggctacgggtgcaggatcggtgctgagtttcctgacaggttctttggcactctctaagcatgttgctgaggctaccaagtatttcagcattaccgtcagttttggaagtgtcaagtcactcataagcttgccttgcttcatgtcccatgcgagcatacctgttgaagtacgagaggctagaggtcttactgaggacctggttcgaatttctgttgggattgaagatgtcaacgacttgatagatgatttagactatgcactcaagactgggcctgcctagaagattaagcaagtttgtggaactgatgccgcttgtcgcgtcatttcattcatctcagggagtttatttgatatttacaagttggttcaaaatgaagttgattttgagtgatctgctaatcatatcatgtaataaattttgctctctttggagttcttactttgatttttaggcaaaattgaagagttgaaaaggtgatcaatt

SEQ ID NO: 126312 - protein, 471 aa, Solanum tuberosum; identical to SEQ ID NO: 14087

SEQ ID NO: 126313 - DNA, 1272 bp, Cephalosporium acremonium; identical to SEQ ID NO: 14088
  CDS (1)..(1272)
  misc_feature (147)..(147): y is t or c

SEQ ID NO: 126314 - protein, 423 aa, Cephalosporium acremonium; identical to SEQ ID NO: 14089

SEQ ID NO: 126315 - DNA, 2026 bp, Solanum tuberosum
  CDS (139)..(1890)
ggccacgcgtcgactagtacgggggggggggggaaatctccctttcatttttttgttttttcacaagggaaagggtaaggccttctagccggggagtaattacatttttgaccttctaaactccgaatcatcaactcaatggccgtctctagttacgctagggcatttccgtcatttgaatgtcgttcggaacctgatttctccggcagccttccacatcctaaagccggcgttcggctctccggcaagtataactccaggagtaaccgatctcaggtttatgggctgtcttctctgattttcaggtttcctcctaatttcgtgaggcagctaagcattaaggctaggaggaattgcagcaatattggcgtggctcaagttgtggcggcttcctggtctaacaaccaagccggtcctgaattcactccggcggctaatgctgtcgattcatccgcttctgctgctgttacttcgattggtatcaccgcaggtgacgaggaggtggcggttgtggaaaatgcggattgtaatgatcaaaatgaacaaattacgggtacaggtgttaaatatgcttcatttttgaattcagatggaagcgttgctattcatgccggtgaaaggttgggacgcggtattgttactgatgccataactaccccagtggttaacacatctgcttacttcttcacaaaacttcctgaccttattgattttaaggagaaaaagacgtgcaaagttttgaatatggcccgctatgggaaccccactactgttgttttggaggagaaaattagtgcacttgagggtgctgaatcaaccttgatagtggcatctggaatgtgtgccagtactgtaatgttcctggccttggatgctgctggtgggcatattgttactaccacagactgctacaggaagacacgtgtttttattgagacaatactgcctaaaatgggaattacggccacagtcattgatccagcagatatgggagctttggagttaacattaaatcagaagaaagtggatcttttctttaccgagtctccaacaaatccattcctgagatgtgttgacattgagctggtttcaaagctttgccgtgaaaaaggagccttggtttgcatagatgggacgtttgcaactcctcttaaccagaaggcccttgctctaggggctgaccttgttgtgcactccgctacaaaattccttggtgggcacaatgatgttcttgcaggttgcattagtggtcctgaaaaattagtttcagtaatccgaaacttgcatcatatccttggtggtgctctcaatcctaatgctgcatatctagccatccgaggcaggggactcaaccatcttcgtgacagcaccaaaattcaactgcatttgaggatggccgaaattttagaggctcatcccaaggtgaaacacgtctattatccaggcttgccgagtcatccggaatatcatcttgcaaagaaacaaatgactggctttggtggtgtggtcagttttgaggttgatggagacctcctaactactgcaaaatttgtggatgctctgaggattcccaaaattgctccctcgtttgaaggttgtaaatcaattgtggaccaaccagcaataatgtcttattgggatcttagccaatctgatagagcaaagtatggaatcctggataacttggttcggtttagctttggagtggaagactttgaagatgtgaaagctgatgttcttcaggctttggattccattaggctgtttcacctgcaacaattttttttcacgtggttccatcccgatttggttgttcgtacctgtgttattaccgacttccatcacgtagccaattgtttgaatgtaatgaaaggatcatcaagtagatgattcaatcccttaaattatttggatattctcatgtcgttttccttaaccttttaatttcttcaaggatgaatttctcatgtcgtttaaagaatgcattttaaagaaaaatggcaaggggagaaaaaaaaaaaaaaaa

SEQ ID NO: 126316 - protein, 583 aa, Solanum tuberosum; identical to SEQ ID NO: 14091

SEQ ID NO: 126317 - DNA, 1323 bp, Candida albicans; identical to SEQ ID NO: 14092
  CDS (1)..(1323): transl_table=12

SEQ ID NO: 126318 - protein, 440 aa, Candida albicans; identical to SEQ ID NO: 14093

SEQ ID NO: 126319 - DNA, 1380 bp, Botrytis cinerea
  CDS (1)..(1380)
atgtcttcaccatcaggctcctcacaagcatcgggagctggcaaagctaatggtgccctcaacaaggcattcccgcacattgaccttgatggtcacaaccttcctccctcgcctgcaccttccagtcctcacaatggcagaagatatgccttggccaccgaattagtctataccgagactaaggatcaatatggagcttcaagtatgccaatatatcaatctgccacattcaaacagaatttggctggtggtggatcagaatacgattatacacgttccggaaatcctacaagaacacatctggaacgacatctcgcgaagattatgaacgccaatcgcgccctcgtcgtcggttctggcatgggagcattagatgttattacaagagttttacgacctggagatgaagttattacaggagacgatttgtacggaggtaccaatcgattgttgacatacctggctgcgaatactggcataattgtacaccatgttgatacgactactcccgataaagtcaaagcagttctgggtcctaaaacagccatggttttgctcgagacaccaaccaatcctttgataaagattgtcgatattgcgacaattgcaaggacagcacacgagttgaatgagaaagccttagttgtcgtcgacaatactatgctttctcctatgctatgcaaccccttggatctcggcgcagatatagtctatgagtcaggcacaaaatatctctctgggcatcacgatatcatggctggtgttctagctttcaatgaccccgccattggagataaaatgtacttcacaattaattctactggttgcgggctctcgccaaacgattcattcttacttatgaggggaataaagactttggcaatccgcatggaacgacaacagacaaacgcacaagcaattgctgaattccttgaaacacatggtttccgtgtaaggtaccctggtttgaaatcccatcctcaatatgatcttcactggtctatggctcgtggagctggagctgtattgtcttttgaaacaggcgatgttgctctctctgagagaattgttgaagcagcaaagttatggggcattagtgtcagttttggctgtgtcaacagtctgatcagtatgccatgccaaatgagtcatgccagtattgatgcaaagacgagaaaggaaagacagatgcctgaggatatcattagattgtgtgtcgggattgaggacgtgaatgatttaattgacgatttgagccgtgctctcgttcaagcaggtgctgtgaaggtaactcttgatggattccatgctatagacgcagctcaagctattgctgaggtgccaatagctgaatcggatgcagcagcagctccattgtaa

SEQ ID NO: 126320 - protein, 459 aa, Botrytis cinerea
MSSPSGSSQASGAGKANGALNKAFPHIDLDGHNLPPSPAPSSPHNGRRYALATELVYTETKDQYGASSMPIYQSATFKQNLAGGGSEYDYTRSGNPTRTHLERHLAKIMNANRALVVGSGMGALDVITRVLRPGDEVITGDDLYGGTNRLLTYLAANTGIIVHHVDTTTPDKVKAVLGPKTAMVLLETPTNPLIKIVDIATIARTAHELNEKALVVVDNTMLSPMLCNPLDLGADIVYESGTKYLSGHHDIMAGVLAFNDPAIGDKMYFTINSTGCGLSPNDSFLLMRGIKTLAIRMERQQTNAQAIAEFLETHGFRVRYPGLKSHPQYDLHWSMARGAGAVLSFETGDVALSERIVEAAKLWGISVSFGCVNSLISMPCQMSHASIDAKTRKERQMPEDIIRLCVGIEDVNDLIDDLSRALVQAGAVKVTLDGFHAIDAAQAIAEVPIAESDAAAAPL

SEQ ID NO: 126321 - DNA, 1887 bp, Glycine max
  CDS (88)..(1698)
caggtaagagagggagtaagtgggtaaaggaaagaaaactaaagaaacaaacctaacacaacacaaatccttgaaacgacgacggaaatggccgtttcgagctcgcacatgcgtttcacctttgagtgccgctccgatcccgatttctcgccccccccgccgtccttcgacaacctccgccgccgaaacttccgctcctccgcagattccggcgcggcgtttcacggcatctcctccctcatcctccgcttccctcccaacttccagcgccagctaagcaccaaggcgcgccgcaactgcagcaacatcggcgtcgcgcaaatcgtcgccgcttcgtggtcgaacaacagcgacaactctccggccgccggggctccggcgccgcccgcggccaccgccacggacgccgctacggtgcctctccccgtcgtcgtcgccgccaacgaggacgtcgttgtctccgccgcggcagacgagaacggggctgtacagttaaacagtagttcttattcttcatttttgaaatccgatgcaagcaaaacgattcatgccgctgaaagactgggtaggggtattgagactgatggaattaccacccctgtggttaacacttctgcctacttttttaagaaaaccgctgatctcattgatttcaaggagaatcgtcaagtgagttatgaatacgggcgctatggaaacccaacgacggtggttctggaggagaagataagtgcattggagggggccgaatcaactgtgataatggcgtctgggatgtgtgctagcgtagtcctgtttatggcactggttccagctggtggacatcttgtgaccactacggattgttataggaagactagaatattcattgagacttttcttcctaagatggggatcacgaccactgtaattgatccagcagatgttggagccttggaatctgcattggagcagcacaatgtgtctctattcttcactgagtctcctaccaatccattcctgagatgtgttgatattaagctggtttcagagctttgccacaagaaggggactttgctctgtattgatggtacatttgcaactccattgaaccagaaggcccttgcccttggcgctgatctgattctgcactccttaacaaaatacatgggtggacatcatgatgtccttggtggttgcataagtggttcaattaaggtggtttcgcaaattcggactttgcaccatgttttgggtggtacacttaacccgaatgctgcatacctattcatcagaggcatgaaaacgctgcatctccgtgtacagcagcagaattcaacaggaatgaggatggccaaacttttagaggcacatcccaaggtgaagcgggtctactatccaggcttgccgagtcaccctgaacatgagcttgccaagaggcagatgactggtttcggtggtgttgtcagttttgagattgatggagatctacataccacaataaaatttattgattcattgaaaatcccatatattgcggcctcgtttggtggctgtgagagcattgtggatcaacctgctattttgtcttactgggatcttcctcagtcagaaagggccaagtacaagatttatgacaacctggttcgcttcagctttggagttgaagattttgaggatttgaaggctgatgtcctgcaagctctggaagctatatagacagttttcctgattcacccaagtttttttcttttataattgtgctatttgtttgttatcacatctggcgattcaattgaattttgatcgtctaatgttctgttggaattgtgttaagatgaatggtctctaatttggatgttatgaaacttgtgatgaattgttgaaaaaaaaaaaaaaaaaaaaaaa

SEQ ID NO: 126322 - protein, 536 aa, Glycine max; identical to SEQ ID NO: 14097

SEQ ID NO: 126323 - DNA, 1517 bp, Nicotiana tabacum
  CDS (9)..(1346)
ggatccatatggctaaggccgtcgatgccgccgccgccgccgccgccgctattgctcctgttgataccacggtagttaacgaggacgtggcgttggtggaaaatgagacttgtaatgatcaaaatgtacagtttgacagtttgccaagtatgaaatacgcttcgtttttgaattctgatgggagtgtcgctattcatgccggtgaaagattgggacgtggcatcgttacggatgcaattactaccccagtagttaacacatctgcttatttcttcaacaagacttctgagctcattgattttaaggagaaaagacgcgcaagttttgaatatgggcgctatgggaacccaactactgttgttttagaggagaagataagcgcactggagggtgctgaatcaaccttgttaatggcatctggaatgtgcgccagtactgtaatgctgttggctttggttcctgctggaggccatattgttacaaccacagactgctataggaagacccggatctttattgaaactatacttcctaaaatggggattacggccacggtcattgacccagccgatgttggagctctggagttggctctaaatcagaagaaagtgaatcttttctttaccgagtctccaacaaatccattcctcagatgtgtagacattgagctggtttcaaagctttgtcatgaaaaaggagccttggtttgcatagatgggacttttgcaactcctcttaatcaaaaggcccttgcccttggggctgacctcgttctgcactctgcaacaaaattccttggtggacataatgatgttctcgcaggttgcattagtggtcctttaaagttagtttcagaaatacgtaacctgcatcacatcctgggtggtgctctcaatccgaatgccgcatatctgattatccgaggcatgaagacgttgcatcttcgtgtacagcaacaaaactcaactgcattgaggatggccgagattttagaggctcatcccaaggtgagacatgtctattatccaggcctgcaaagtcatccagaacatcacattgcaaagaaacaaatgacaggttttggtggtgcggtcagttttgaggttgacggagacctgcttacaaccgcaaaatttgtggatgctctgaaaattccgtatattgctccatcatttggaggttgtgagagcattgtggaccaaccagcaataatgtcttactgggatcttagccagtcagatagagccaagtatggcatcatggacaatttggttaggttcagctttggtgtggaagattttgatgacttgaaagctgatattcttcaggctttggactcaatataggctgtctctcctgcaacgcagtttgcttttcttttgctttctttctactctagcttttattctttgaacttccgtgtcatctctaattgttgagttattcggacaatcatgaaagtgtaatgaaaggatcatcaaacaggtgatcaatcaatttgatgtgttcaaaaaaaa

SEQ ID NO: 126324 - protein, 445 aa, Nicotiana tabacum; identical to SEQ ID NO: 14101

SEQ ID NO: 126325 - DNA, 1185 bp, Saccharomyces cerevisiae; identical to SEQ ID NO: 13376
  CDS (1)..(1185)

SEQ ID NO: 126326 - protein, 394 aa, Saccharomyces cerevisiae; identical to SEQ ID NO: 13377

SEQ ID NO: 126327 - DNA, 1179 bp, Streptomyces coelicolor; identical to SEQ ID NO: 14102
  CDS (1)..(1179): transl_table=11

SEQ ID NO: 126328 - protein, 392 aa, Streptomyces coelicolor; identical to SEQ ID NO: 14103

SEQ ID NO: 126329 - DNA, 1290 bp, Schizosaccharomyces pombe; identical to SEQ ID NO: 14106
  CDS (1)..(1290)

SEQ ID NO: 126330 - protein, 429 aa, Schizosaccharomyces pombe; identical to SEQ ID NO: 14107

SEQ ID NO: 126331 - DNA, 1197 bp, Pseudomonas putida; identical to SEQ ID NO: 14108
  CDS (1)..(1197): transl_table=11

SEQ ID NO: 126332 - protein, 398 aa, Pseudomonas putida; identical to SEQ ID NO: 14109

SEQ ID NO: 126333 - DNA, 1335 bp, Kluyveromyces lactis; identical to SEQ ID NO: 14110
  CDS (1)..(1335)

SEQ ID NO: 126334 - protein, 444 aa, Kluyveromyces lactis; identical to SEQ ID NO: 14111

SEQ ID NO: 126335 - DNA, 1335 bp, Saccharomyces cerevisiae; identical to SEQ ID NO: 14112
  CDS (1)..(1335)

SEQ ID NO: 126336 - protein, 444 aa, Saccharomyces cerevisiae; identical to SEQ ID NO: 14113

SEQ ID NO: 126337 - DNA, 1692 bp, Arabidopsis thaliana
  CDS (1)..(1692)
atggccgtctcatcattccagtgccctaccatcttctcctcctcctcaatctccggctttcaatgccgttctgatccagatctcgtcggttctcccgtcggtggatcatctcgccgtcgtgtccatgcctccgccgggatttcttcctcattcaccggggacgctggattatcctccaggatcttaagatttcctcctaatttcgtccgtcagctgagcattaaagcccgtagaaactgtagcaacatcggtgttgcacagatcgtggcggctaagtggtccaacaacccatcctccgcgttaccttcggcggcggcggctgctgctacctcgtctgcatctgcggtttcttccgccgcatctgcagccgcagcctcgtccgccgccgccgcccctgtggctgccgcgcctcccgtcgtgctgaaaagcgtcgatgaggaggttgtggtggccgaggaggggatcagggagaagataggtagtgtacagctgacggattccaaacattctttcttgagctccgatgggagcctcactgttcatgccggtgaaagattaggccgtggtatagtgacggatgctatcactactcctgtagtcaacacatctgcctacttcttcaagaaaactgctgagcttattgacttcaaggagaaaaggagtgtgagtttcgagtatggtcgttatggtaaccctacgactgtggtacttgaagataagataagtgcacttgaaggggctgaatcaactttggttatggcatctgggatgtgtgcaagcactgttatgcttttggcattggttcctgctggtggacacattgtcactactactgattgctacaggaagactaggatcttcatggagaattttcttcccaagttggggatcactgtcactgtgattgatcctgctgatatcgcagggcttgaagctgcagtgaatgagttcaaggtatctctgttcttcactgagtccccgacaaacccattccttagatgtgtcgacattgagctagtttcaaaaatatgccacaagaggggaactctggtttgcattgatggcacctttgcaacacctctgaatcagaaagcccttgctcttggtgctgatcttgtcgtgcactctgctacaaagtacattggaggacacaatgatgttcttgctggatgcatctgtggttcactgaagttggtttcagaaattcgcaatctgcatcatgtgttgggaggaacacttaacccaaacgctgcgtacctaatcatccgaggcatgaagacattgcatcttcgtgtacagcaacagaattcgaccgcttttagaatggccgaaattttagaggcacatcctaaggtgagtcatgtgtactatccaggccttccaagtcatcccgaacatgaactcgccaagcgacaaatgactggttttggaggtgtggtcagtttcgagattgatggagacattgaaacgacaatcaagtttgtggattctctaaagattccttacattgcaccatccttcggtggctgcgaaagcattgttgaccaacctgctatcatgtcctactgggatctgccgcaagaggagagactaaagtatggaatcaaagataacttggttcgtttcagctttggagttgaagactttgaagatgtcaaagctgacattcttcaagctctcgaagccatctga

SEQ ID NO: 126338 - protein, 563 aa, Arabidopsis thaliana
MAVSSFQCPTIFSSSSISGFQCRSDPDLVGSPVGGSSRRRVHASAGISSSFTGDAGLSSRILRFPPNFVRQLSIKARRNCSNIGVAQIVAAKWSNNPSSALPSAAAAAATSSASAVSSAASAAAASSAAAAPVAAAPPVVLKSVDEEVVVAEEGIREKIGSVQLTDSKHSFLSSDGSLTVHAGERLGRGIVTDAITTPVVNTSAYFFKKTAELIDFKEKRSVSFEYGRYGNPTTVVLEDKISALEGAESTLVMASGMCASTVMLLALVPAGGHIVTTTDCYRKTRIFMENFLPKLGITVTVIDPADIAGLEAAVNEFKVSLFFTESPTNPFLRCVDIELVSKICHKRGTLVCIDGTFATPLNQKALALGADLVVHSATKYIGGHNDVLAGCICGSLKLVSEIRNLHHVLGGTLNPNAAYLIIRGMKTLHLRVQQQNSTAFRMAEILEAHPKVSHVYYPGLPSHPEHELAKRQMTGFGGVVSFEIDGDIETTIKFVDSLKIPYIAPSFGGCESIVDQPAIMSYWDLPQEERLKYGIKDNLVRFSFGVEDFEDVKADILQALEAI

SEQ ID NO: 126339 - DNA, 1143 bp, Helicobacter pylori; identical to SEQ ID NO: 14118
  CDS (1)..(1143): transl_table=11

SEQ ID NO: 126340 - protein, 380 aa, Helicobacter pylori; identical to SEQ ID NO: 14119

SEQ ID NO: 126341 - DNA, 1167 bp, Mycobacterium bovis; identical to SEQ ID NO: 14120
  CDS (1)..(1167): transl_table=11

SEQ ID NO: 126342 - protein, 388 aa, Mycobacterium bovis; identical to SEQ ID NO: 14121

SEQ ID NO: 126343 - DNA, 1167 bp, Mycobacterium leprae; identical to SEQ ID NO: 14122
  CDS (1)..(1167): transl_table=11

SEQ ID NO: 126344 - protein, 388 aa, Mycobacterium leprae; identical to SEQ ID NO: 14123

SEQ ID NO: 126345 - DNA, 1395 bp, Arabidopsis thaliana; identical to SEQ ID NO: 14124
  CDS (1)..(1395)

SEQ ID NO: 126346 - protein, 464 aa, Arabidopsis thaliana; identical to SEQ ID NO: 14125

SEQ ID NO: 126347 - DNA, 1188 bp, Escherichia coli; identical to SEQ ID NO: 14126
  CDS (1)..(1188): transl_table=11

SEQ ID NO: 126348 - protein, 395 aa, Escherichia coli; identical to SEQ ID NO: 14127

SEQ ID NO: 126349 - DNA, 1143 bp, Lactococcus lactis subsp; identical to SEQ ID NO: 14130
  CDS (1)..(1143): transl_table=11

SEQ ID NO: 126350 - protein, 380 aa, Lactococcus lactis subsp; identical to SEQ ID NO: 14131

SEQ ID NO: 126351 - DNA, 1188 bp, Salmonella typhimurium; identical to SEQ ID NO: 14132
  CDS (1)..(1188): transl_table=11

SEQ ID NO: 126352 - protein, 395 aa, Salmonella typhimurium; identical to SEQ ID NO: 14133

SEQ ID NO: 126353 - DNA, 2236 bp, Saccharomyces cerevisiae
  CDS (531)..(1928)
ccttcatgcactatacacgaaagaacaaaagtgtcttgattattacatctacatttccaggcatagagcttgcagattagccgcccataaatttgccacactgttttccgtggcgccacagtccgcgtttggttatccggctgactcattctgactcttttttggaaagtgtggcatgtgcttcacacaatataattcccgtgagcacagcatgcttcgggccgaagtctgttggaggcatatgctcctaccttggaagactcatcgcatctcaaaagtgtgtaaaggggccttctggccatatatcctctgagacctggttgaaatgtggccagaagcaaagctgataaaaacaactggcgcatacgtagctatattttaaataaataaataaataaatatatatatatatatatatatatatatacatatatatacagtcattgccacacatcccatagctctgtgtgcttacagttcattaaaaacaaaaaatatcaagcaaacaacaaaagcatagaagcaaaaagatgccgatcaagagattagatacagttgtggtaaataccggctctcaaaatgaccaacattcagcctccgtgccaccggtgtatttgtcgactaccttcaaagtggacttgaataatgaagatgcacagaactacgattattccagatcgggaaacccgaccagaagtgtccttcaacaccagattggtaagctttatcgtgtcccacaggaaaacgtattagctgtgagcagtggtatgacggcgctagacgtcatcctgcgtgggctcgtcttacttaacggcactgacaaccatacgccaacaataatagccggcgatgatctttatggaggcacccaaaggctgctgaattttttcaagcaacagagtcatgcagtctctgttcatgtggacacttccgattttgaaaagttcaaaaccgttttccagtctttagataaagttgattgtgttcttctagagtctccgaccaatccgctttgcaaggttgtagatatccctagaatattacgttttgtgaaatgcatatctcccgacactacagttgtcgttgataatactatgatgagtggactcaattgtaatcctcttcaactgaatccaggctgcgatgtcgtatacgaatctgctaccaagtacttgaatggtcatcacgatttgatggggggtgttattatcagcaaaacaccagaaatagcctcgaagctttactttgtcattaattctacaggagctggattatccccaatggattcttggctacttgtgaggggcctaaaaactctaggagttagattatatcaacagcagagaaatgctatgatattggctcattggctagaaaattcatgcggattcaaacctaccagaacaaacaaggctacgaaaactagatttgttggattacgctccaacccggatttcaagctgcataaatcgttcaataatggcccaggtgccgtgttatccttcgaaacggggtccttcgaacattcaaagagactggtcagttccaaaaaactgagtatatgggctgtgacggtatctttcgggtgtgtaaattcgcttctatctatgccttgcaaaatgtcccatgcttccattgatcccgaattaaggaaagagagagattttcctgaagatttggttcgtctttgctgcggtatcgaaaatatagtagatttgaagaaagatttattagcggcgatggttgacgctgatattatagaagtaagagaaaatggcaaatatcttttcaacaaattgaataagaacctagctgtgaacactaccatcgatgacctgcataagcctttaagtatttacgaagaattttacaatcaagatctcatcagaaaggactcagaattgaatattaagagttcgaaattgtaagggaaaatatgcatgtaccttttttttttttttttataaggttcaaatccaaagatagtaactttaaatagtcaagtatatagacagaatttcaagaacagtaagtatattaaacttttacagcctttcgggctgttccgtaagctcttactactacccttgggaaacgcacgcgcgaaggaggaaagtttgcctcaatgaacgtgtgtaatggcggtcgtaaaaggaatatagaaatagctgtgcttttataacttcactcgacaatgggttgacagcagatttagaaggaaaagagcatacaaaaa

SEQ ID NO: 126354 - protein, 465 aa, Saccharomyces cerevisiae; identical to SEQ ID NO: 14137

SEQ ID NO: 126355 - DNA, 1197 bp, Schizosaccharomyces pombe; identical to SEQ ID NO: 14138
  CDS (1)..(1197)

SEQ ID NO: 126356 - protein, 398 aa, Schizosaccharomyces pombe; identical to SEQ ID NO: 14139

SEQ ID NO: 126357 - DNA, 1137 bp, Saccharomyces cerevisiae; identical to SEQ ID NO: 14140
  CDS (1)..(1137)

SEQ ID NO: 126358 - protein, 378 aa, Saccharomyces cerevisiae; identical to SEQ ID NO: 14141

SEQ ID NO: 126359 - DNA, 1170 bp, Oryza sativa; identical to SEQ ID NO: 14146
  CDS (1)..(1170)

SEQ ID NO: 126360 - protein, 389 aa, Oryza sativa; identical to SEQ ID NO: 14147

SEQ ID NO: 126361 - DNA, 1329 bp, Glycine max; identical to SEQ ID NO: 14156
  CDS (1)..(1329)

SEQ ID NO: 126362 - protein, 442 aa, Glycine max; identical to SEQ ID NO: 14157

SEQ ID NO: 126363 - DNA, 1326 bp, Brassica napus; identical to SEQ ID NO: 14158
  CDS (1)..(1326)

SEQ ID NO: 126364 - protein, 441 aa, Brassica napus; identical to SEQ ID NO: 14159

SEQ ID NO: 126365 - DNA, 1611 bp, Glycine max; identical to SEQ ID NO: 14160
  CDS (1)..(1611)

SEQ ID NO: 126366 - protein, 536 aa, Glycine max; identical to SEQ ID NO: 14161

SEQ ID NO: 126367 - DNA, 1611 bp, Glycine max; identical to SEQ ID NO: 14162
  CDS (1)..(1611)

SEQ ID NO: 126368 - protein, 536 aa, Glycine max; identical to SEQ ID NO: 14163

SEQ ID NO: 126369 - DNA, 1407 bp, Glycine max
  CDS (1)..(1407)
atgttttcttctgcaatttctccgaagcccttccttcggtccctcgtcattgatcgttacgctcagagcacaactactgcaaccaggtgggagtgcttggggtttaacaagtcagaaaatttcagtaccaagagagagttgtgtgctgaggggttcaagctgaattgcttggttgaaaatagagagatggatgtggagtcatcatcatcatcatctttggtggatgatgcttccttgagcttaagtgaagaggatttaggggagcctagtatttcaacattggtgatgaatttcgagagtaagttcgatccttttggagcaattagtacccctctttaccaaacggctacttttaagcagccttctgcaatagaaaacggcccctatgactataccagaagtggaaatcctacacgagatgctttagaaagtttactagcaaagcttgataaagcagatagagccctgtgcttcaccagtggaatggctgctttgagtgctgttgttcgtcttgttggaactggcgaggaaattgtcgccggagatgatgtatatggtggctcagataggttgctgtctcaagtggttccaaggactggaattgtggtgagacgggcaaatacatgtgatctaaatgaggttgcagcagccattggacccaagactaagcttgtgtggcttgagagtccaaccaatcctcggctacaaatttctgatattcaaaaaatatcagagatagctcattcacatggtgctcttgtgttagtggacaatagtataatgtcacctgtgttgtctcggccattggaacttggagcagatattgtcatgcactctgctacaaaatttattgctggacatagtgacattatggctggtgtgcttgctgtgaagggtgaaaagttgggaaaggaattgtatttcttgcaaaatgcagagggttcaggcttagcaccatttgactgttggctttgtttgcgaggaatcaagacaatggccccgcgaattgaaaaacaacaggataatgcacagaagattgctgagttccttgcctcccatcctcgagtgaagaaagtgaattatgctggcttgcctggtcatcctggtcgtgatttacactattctcaggcaaagggtgcaggatctgtgcttagcttcttgactggttcattggaactttcaaagcatattgttgaaactaccaaatacttcagtataaccgtcagctttgggagtgtgaagtcccttattagcatgccatgctttatgtcacatgcaagcatacctgctgcagttcgtgaggccagaggtttaactgaagatcttgtacgtatatctgtgggaattgaggatgtgagtgctcgcattgctgatcttgacaatgcacttagaacagggcctctttaa

SEQ ID NO: 126370 - protein, 468 aa, Glycine max; identical to SEQ ID NO: 13379

SEQ ID NO: 126371 - DNA, 1413 bp, Zea mays; identical to SEQ ID NO: 14164
  CDS (1)..(1413)

SEQ ID NO: 126372 - protein, 470 aa, Zea mays; identical to SEQ ID NO: 14165

SEQ ID NO: 126373 - DNA, 21 bp, Artificial sequence
  primer
atgacgcgtaaacaggccacc

SEQ ID NO: 126374 - DNA, 22 bp, Artificial sequence
  primer
ttaccccttgtttgcagcccgg

SEQ ID NO: 126375 - protein, 559 aa, Artificial sequence
  consensus sequence
  Variant (2)..(9): Xaa in position 2 to 9 is any amino acid
  Variant (10)..(53): Xaa in position 10 to 53 is any or no amino acid
  Variant (55)..(65): Xaa in position 55 to 65 is any amino acid
  Variant (66)..(106): Xaa in position 66 to 106 is any or no amino acid
  Variant (108)..(108): Xaa in position 108 is any amino acid
  Variant (110)..(111): Xaa in position 110 to 111 is any amino acid
  Variant (112)..(113): Xaa in position 112 to 113 is any or no amino acid
  Variant (117)..(126): Xaa in position 117 to 126 is any amino acid
  Variant (129)..(136): Xaa in position 129 to 136 is any amino acid
  Variant (137)..(141): Xaa in position 137 to 141 is any or no amino acid
  Variant (144)..(145): Xaa in position 144 to 145 is any amino acid
  Variant (147)..(151): Xaa in position 147 to 151 is any amino acid
  Variant (152)..(173): Xaa in position 152 to 173 is any or no amino acid
  Variant (176)..(196): Xaa in position 176 to 196 is any amino acid
  Variant (197)..(227): Xaa in position 197 to 227 is any or no amino acid
  Variant (229)..(229): Xaa in position 229 is any amino acid
  Variant (231)..(231): Xaa in position 231 is any amino acid
  Variant (234)..(238): Xaa in position 234 to 238 is any amino acid
  Variant (240)..(254): Xaa in position 240 to 254 is any amino acid
  Variant (255)..(264): Xaa in position 255 to 264 is any or no amino acid
  Variant (268)..(269): Xaa in position 268 to 269 is any amino acid
  Variant (270)..(271): Xaa in position 270 to 271 is any or no amino acid
  Variant (273)..(276): Xaa in position 273 to 276 is any amino acid
  Variant (278)..(280): Xaa in position 278 to 280 is any amino acid
  Variant (281)..(282): Xaa in position 281 to 282 is any or no amino acid
  Variant (286)..(286): Xaa in position 286 is any amino acid
  Variant (288)..(289): Xaa in position 288 to 289 is any amino acid
  Variant (291)..(291): Xaa in position 291 is any amino acid
  Variant (294)..(296): Xaa in position 294 to 296 is any amino acid
  Variant (298)..(299): Xaa in position 298 to 299 is any amino acid
  Variant (301)..(301): Xaa in position 301 is any amino acid
  Variant (303)..(305): Xaa in position 303 to 305 is any amino acid
  Variant (307)..(316): Xaa in position 307 to 316 is any amino acid
  Variant (317)..(378): Xaa in position 317 to 378 is any or no amino acid
  Variant (381)..(382): Xaa in position 381 to 382 is any amino acid
  Variant (385)..(386): Xaa in position 385 to 386 is any amino acid
  Variant (388)..(392): Xaa in position 388 to 392 is any amino acid
  Variant (393)..(398): Xaa in position 393 to 398 is any or no amino acid
  Variant (400)..(401): Xaa in position 400 to 401 is any amino acid
  Variant (403)..(408): Xaa in position 403 to 408 is any amino acid
  Variant (409)..(430): Xaa in position 409 to 430 is any or no amino acid
  Variant (432)..(433): Xaa in position 432 to 433 is any amino acid
  Variant (435)..(435): Xaa in position 435 is any amino acid
  Variant (437)..(437): Xaa in position 437 is any amino acid
  Variant (438)..(467): Xaa in position 438 to 467 is any or no amino acid
  Variant (469)..(493): Xaa in position 469 to 493 is any amino acid
  Variant (494)..(506): Xaa in position 494 to 506 is any or no amino acid
  Variant (508)..(508): Xaa in position 508 is any amino acid
  Variant (510)..(512): Xaa in position 510 to 512 is any amino acid
  Variant (514)..(517): Xaa in position 514 to 517 is any amino acid
  Variant (519)..(528): Xaa in position 519 to 528 is any amino acid
  Variant (529)..(541): Xaa in position 529 to 541 is any or no amino acid
  Variant (543)..(543): Xaa in position 543 is any amino acid
  Variant (545)..(545): Xaa in position 545 is any amino acid
  Variant (547)..(547): Xaa in position 547 is any amino acid
  Variant (549)..(549): Xaa in position 549 is any amino acid
  Variant (551)..(553): Xaa in position 551 to 553 is any amino acid
  Variant (554)..(554): Xaa in position 554 is any or no amino acid
  Variant (556)..(558): Xaa in position 556 to 558 is any amino acid
TXXXXXXXXXXXXXXXXXXXXXXXXXXXXXXXXXXXXXXXXXXXXXXXXXXXXPXXXXXXXXXXXXXXXXXXXXXXXXXXXXXXXXXXXXXXXXXXXXXXXXXXXXYXRXXXXNPTXXXXXXXXXXLEXXXXXXXXXXXXXSGXXAXXXXXXXXXXXXXXXXXXXXXXXXXXXYGXXXXXXXXXXXXXXXXXXXXXXXXXXXXXXXXXXXXXXXXXXXXXXXXXXXXEXPXNPXXXXXDXXXXXXXXXXXXXXXXXXXXXXXXXDNTXXXXPXXXXPXXXXXGADXVXXSXTKXXXGXXHXDXXXGXXXXXXXXXXXXXXXXXXXXXXXXXXXXXXXXXXXXXXXXXXXXXXXXXXXXXXXXXXXXXXXXXXXXXXXXRGXXTLXXRXXXXXXXXXXXAXXLXXXXXXXXXXXXXXXXXXXXXXXXXXXXVXXPXLXXXXXXXXXXXXXXXXXXXXXXXXXXXXXXXGXXXXXXXXXXXXXXXXXXXXXXXXXXXXXXXXXXXXXXSXGXXXSXXXXPXXXXXXXXXXXXXXXXXXXXXXXLXRXSXGXEXXXXDXXXD

SEQ ID NO: 126376 - protein, 22 aa, Artificial sequence
  protein pattern
  Variant (2)..(7): Xaa in position 2 to 7 is any amino acid
  Variant (9)..(9): Xaa in position 9 is any amino acid
  Variant (12)..(12): Xaa in position 12 is Phe, Trp or Tyr
  Variant (13)..(13): Xaa in position 13 is Phe, Ile, Leu, Met or Val
  Variant (14)..(14): Xaa in position 14 is Ala, Cys, Gly, Asn or Ser
  Variant (17)..(17): Xaa in position 17 is any amino acid
  Variant (18)..(18): Xaa in position 18 is Asp, Asn or Thr
  Variant (19)..(21): Xaa in position 19 to 21 is any amino acid
GXXXXXXSXTKXXXGHXXXXXG

SEQ ID NO: 126377 - DNA, 618 bp, Escherichia coli
  CDS (1)..(618): transl_table=11
atgaaagcttcactggcgctgctcagcctgctaacggcatttaccagccactccttaaaatctcccgccgttccaccaaccgtggtacaaatccaggccaataccaaccttgccatcgcagacggtgccagacagcaaattggcagcacgctattttacgatccggcgtatgtgcagcttacttatcctggcggtgatgttccgcaagaacgcggtgtatgttccgatgtggtgatccgcgcattgcgcagccagaaggtcgatttgcagaaactggttcacgaagatatggcgaagaattttgctgagtacccgcaaaaatggaagttaaagcgcccggacagcaacatcgatcaccgtcgggtgcctaatctggaaacctggtttagccgccatgataaaacacgccccaccagcaagaaccccagtgactatcaagcgggcgatattgtctcctggcgactggataacgggctggcacatattggggtggtttcagatggcttcgcccgcgacggtacgccgctggtgatacataacattggcgcaggcgcgcaggaagaagatgtgctgtttaactggcggatggtggggcattatcgttattttgttaaataa

SEQ ID NO: 126378 - protein, 205 aa, Escherichia coli
MKASLALLSLLTAFTSHSLKSPAVPPTVVQIQANTNLAIADGARQQIGSTLFYDPAYVQLTYPGGDVPQERGVCSDVVIRALRSQKVDLQKLVHEDMAKNFAEYPQKWKLKRPDSNIDHRRVPNLETWFSRHDKTRPTSKNPSDYQAGDIVSWRLDNGLAHIGVVSDGFARDGTPLVIHNIGAGAQEEDVLFNWRMVGHYRYFVK

SEQ ID NO: 126379 - DNA, 567 bp, Pasteurella multocida subsp. multocida str. Pm70
  CDS (1)..(567): transl_table=11
atgaaaaagtggatcgttagtgttatttttctggttttttcgttagggacgttagcagcgactaatgcaatgcagttagtgaatgatgccaaaaagcaaattaatgtgacaattggttatgatccggcttaccggaaaatggctttccccatgggggatgtgccgttacaaaccggggtgtgtacggatgtcgtgattcgggcgtatcgtcatcagcagattgatttgcaaaaattggtcaatcaagacatgaaaaaggcgtggtcaagttatccaaaactttggggattaaaaagcacggataccaatattgaccatcgtcgtgttccaaatttagaaactttttttcaacgccatgcgaaatcattatcccttacggatatcacaagttttaaggcaggagacattgtgacttggcgtttaccgcgtaatttaccgcatattggcattatttcggataagaaaacttcggcagggattcctctggttattcataatattggtgcgggtacgcaggaagaagatattttatttaaatataaaatgattgggcattatcgttattag

SEQ ID NO: 126380 - protein, 188 aa, Pasteurella multocida subsp. multocida str. Pm70
MKKWIVSVIFLVFSLGTLAATNAMQLVNDAKKQINVTIGYDPAYRKMAFPMGDVPLQTGVCTDVVIRAYRHQQIDLQKLVNQDMKKAWSSYPKLWGLKSTDTNIDHRRVPNLETFFQRHAKSLSLTDITSFKAGDIVTWRLPRNLPHIGIISDKKTSAGIPLVIHNIGAGTQEEDILFKYKMIGHYRY

SEQ ID NO: 126381 - DNA, 597 bp, Pseudomonas aeruginosa PAO1
  CDS (1)..(597): transl_table=11
atggacaaggacgtatccggcgcgctgcgccgcctgttgctgctcgccatgctcggactgccgctggtggcggccgctgcggtcgaaccgcagcgactggtggatgcggcgcgtgcccaggtgggcgtgaccctgggctacgacccggcctaccggcaactggactatccgggcggcgacgtgccgctgcagaccggggtctgcaccgacgtagtggtccgtgcgctgcgcggacaggggctggatctacagaaggcggtgcacgaggacatgcgtcgccacttcgcggcctacccgcagcaatggggaatgaaaggtaccgaccgcaacatcgatcaccgccgcgtaccgaacctgatgacctggttcagccgccagggcctggccctggcgcctagccgcgacgcttccgcctaccgggccggagacatagtcgcctggcgcctggacaacggcctgctgcatatcggcgtgctttccgatcgcaggctggagggcaggccgctggtgttgcacaacatcggtgccggcgtgcgggaagaggacctgctgttccgctaccaggtcatcggccactaccgcttcccgcagggctga

SEQ ID NO: 126382 - protein, 198 aa, Pseudomonas aeruginosa PAO1
MDKDVSGALRRLLLLAMLGLPLVAAAAVEPQRLVDAARAQVGVTLGYDPAYRQLDYPGGDVPLQTGVCTDVVVRALRGQGLDLQKAVHEDMRRHFAAYPQQWGMKGTDRNIDHRRVPNLMTWFSRQGLALAPSRDASAYRAGDIVAWRLDNGLLHIGVLSDRRLEGRPLVLHNIGAGVREEDLLFRYQVIGHYRFPQG

SEQ ID NO: 126383 - DNA, 618 bp, Escherichia coli O157:H7 EDL933
  CDS (1)..(618): transl_table=11
  misc_feature (98)..(98): m is a or c
atgaaagcttcactggcgctggtcagcctgctaacggcatttaccagctactccttaaaatctcccgccattccaccaaccgtggtacaaatccaggmcaataccaaccttgccatcgcagacggtgccagacagcaaatcggcagcacgctattttacgatccggcgtatgtgcagcttacctatcctggcggtgatgtcccgcaagaacgcggggtatgttccgatgtggtgatccgtgcattgcgcagccagaaggtcgatttgcagaaactggtgcacgaagatatggcgaagaattttgccgagtacccgcaaaaatggcagttaaagcgcccggacagcaacatcgatcaccgtcgggtgcctaatctggaaacctggtttacccgccacgataaaacacgccccatcagcaagaaccccagtgactatcaagcgggcgatattgtctcctggcgattagataacgggctggcacatattggggtggtttcagatggcttcgcccgcgacggtacgccgctggtgatacataacattggcgcaggtgcgcaggaagaagatgtgctgtttagctggcgcatggtggggcattatcgttattttgttaaataa

SEQ ID NO: 126384 - protein, 205 aa, Escherichia coli O157:H7 EDL933
  misc_feature (33)..(33): The Xaa at location 33 stands for Ala, or Asp.
MKASLALVSLLTAFTSYSLKSPAIPPTVVQIQXNTNLAIADGARQQIGSTLFYDPAYVQLTYPGGDVPQERGVCSDVVIRALRSQKVDLQKLVHEDMAKNFAEYPQKWQLKRPDSNIDHRRVPNLETWFTRHDKTRPISKNPSDYQAGDIVSWRLDNGLAHIGVVSDGFARDGTPLVIHNIGAGAQEEDVLFSWRMVGHYRYFVK

SEQ ID NO: 126385 - DNA, 633 bp, Caulobacter crescentus CB15
  CDS (1)..(633): transl_table=11
atgctcacgctcaaccgacggacagccttagggttctgcgccgccgcgccgctcctggcgcgggcggatcttagtcacgccctgatcccggacgccggacgaaagctggccgccgccgcacgggcccagatcggcgtcaccgtcacctacgacgccagctaccgttcgatcggctatccgaatggcgatgtgttacggaccagcggcgtctgctcggatgtgctgatccgcgccgcgcgtgacgcgtgggacatcgatctgcaacaacgcgtgcatgaagacatgaaggcggcgttcgacgcctacccgtcgcgtcgagaatgggggctcacgtcacccgacgccaatatcgaccatcggcgggtgctgaacctcgaggcgttcctcgcacgccagaaggccagacttcccctccccgcaccccgcctattgggcggcgacgcgttcgacgcggttgcgccaggggacatcctcacctggcgcctggcgggcggccggccgcatctggggatcgcggtcagcgggcccgagcaagtgcgcgtggcgcacaatgtcggcgatggcgtcagggaagagccgctgtggcgcttcaagctgcacaaacccgccggccactaccgctggcgggtctga

SEQ ID NO: 126386 - protein, 210 aa, Caulobacter crescentus CB15
MLTLNRRTALGFCAAAPLLARADLSHALIPDAGRKLAAAARAQIGVTVTYDASYRSIGYPNGDVLRTSGVCSDVLIRAARDAWDIDLQQRVHEDMKAAFDAYPSRREWGLTSPDANIDHRRVLNLEAFLARQKARLPLPAPRLLGGDAFDAVAPGDILTWRLAGGRPHLGIAVSGPEQVRVAHNVGDGVREEPLWRFKLHKPAGHYRWRV

SEQ ID NO: 126387 - DNA, 624 bp, Salmonella typhimurium LT2
  CDS (1)..(624): transl_table=11
atgaaattcgcacaggcgcttatcggtattcttgctgctttttttattagccatatctctcatcattcgccacgctctgataccagaccaataaccgttcaggcgcaaactaatgctgcaatcgcccaaagtgccgggacgcaaataggtaagacgctattttatgatgctgcctatgttcgtctggattatccgaatggcgatcttccgctggagcgtggcgtatgtgcagatgtcgtcatccgcgcgctgcgcagtcagcaggttgatttacagaaacgggtacatgaagacatgcaggcgcatttctctgcctacccgaataactggaagctgaaacgcccggacagcaatatcgaccatcgccgcgttccgaatctggaaacctggttccagcgtcaaaacaaagctttgccggtgacagataaatatagcgattatcaaccgggagatattgtctcctggcgactggataacggccttgcgcatattggcgtggtatccctgaacgtcacgcctgaaggggtgccgctggttgtgcataacataggcgcgggagcacaggaggaagatgtattatttaactggaaagtcacggggcattttcgttatttttcgcattaa

SEQ ID NO: 126388 - protein, 207 aa, Salmonella typhimurium LT2
MKFAQALIGILAAFFISHISHHSPRSDTRPITVQAQTNAAIAQSAGTQIGKTLFYDAAYVRLDYPNGDLPLERGVCADVVIRALRSQQVDLQKRVHEDMQAHFSAYPNNWKLKRPDSNIDHRRVPNLETWFQRQNKALPVTDKYSDYQPGDIVSWRLDNGLAHIGVVSLNVTPEGVPLVVHNIGAGAQEEDVLFNWKVTGHFRYFSH

SEQ ID NO: 126389 - DNA, 618 bp, Escherichia coli CFT073
  CDS (1)..(618): transl_table=11
atgaaagcttcactggcgttattcagtcttctgacgttatttaccagttactccttaaaatatcccgccgttccaccaaccgtggtacaaatccaggctaacaccaatcttgccatcgcagacggcgccagactgcaaatcggcagcacgctattttacgatccggcgtatgtgcagcttacctatcctggcggtgatgtcccgcaagaacgcggcgtatgttccgatgtggtgatccgtgcattgcgcagccagaaggtcgatttgcagaaactggtgcacgaagatatggcgaagaattttgctgcgtacccgcaaaaatggcagttaaagcgcccggacagcaacatcgatcaccgtcgggtgcctaatctggaaacctggtttacccgccacgataaaacacgccccaccagcaagaaccccagtgactatcaagcgggcgatattgtctcctggcgattagataacgggctggcacatattggggtggtgtcagatggcttcgcccgcgacggtacgccgctggtgatacataacattggcgcaggcgcgcaggaagaagatgtactgtttagctggcggatggtggggcactatcggtattttgctaaataa

SEQ ID NO: 126390 - protein, 205 aa, Escherichia coli CFT073
MKASLALFSLLTLFTSYSLKYPAVPPTVVQIQANTNLAIADGARLQIGSTLFYDPAYVQLTYPGGDVPQERGVCSDVVIRALRSQKVDLQKLVHEDMAKNFAAYPQKWQLKRPDSNIDHRRVPNLETWFTRHDKTRPTSKNPSDYQAGDIVSWRLDNGLAHIGVVSDGFARDGTPLVIHNIGAGAQEEDVLFSWRMVGHYRYFAK

SEQ ID NO: 126391 - DNA, 693 bp, Carboxydothermus hydrogenoformans Z-2901
  CDS (1)..(693): transl_table=11
atgtccaaaaaacttttgcttattatcttaattttcctggctttaagtgtttcaattttctaccgggacggttttgtcctaaagtattcttactatacgttaaaggaagcttttggcccgaaggtcaaagtcgaaaaagtagttatccgccacgaccaggatggcgacggcctttatgatttagatgatattgtccagggagcgcggctggaagtcgccaggaaaccccgctataaaagtgcatattaccgggggggctatcctccggataatgaaggagtatgcaccgatgttatttggcgggcttttaaaaacgccgggtatgatttaaaagagatggtcgatcaagacataaaagaacatcccgaagcttacccccgggtaggaggcaaacccgatcccaacatcgactttcgtcgggtaccaaatttagacgttttcttccgtcgtcacgcccaaagcctcaccttaaaacttatccccggcgacccgaaaaacttaaaagaatggcaggggggcgatatcgtagtttttaaaaacccccagcatatagctatcatctcggataaacgacggccggacggtgtaccctttatcatccacaacgccggcccttatccccgcgaggcggatgaacttttatggtggctgccgggaattgtcgggcattaccggtttcccctgaaaaattag

SEQ ID NO: 126392 - protein, 230 aa, Carboxydothermus hydrogenoformans Z-2901
MSKKLLLIILIFLALSVSIFYRDGFVLKYSYYTLKEAFGPKVKVEKVVIRHDQDGDGLYDLDDIVQGARLEVARKPRYKSAYYRGGYPPDNEGVCTDVIWRAFKNAGYDLKEMVDQDIKEHPEAYPRVGGKPDPNIDFRRVPNLDVFFRRHAQSLTLKLIPGDPKNLKEWQGGDIVVFKNPQHIAIISDKRRPDGVPFIIHNAGPYPREADELLWWLPGIVGHYRFPLKN

SEQ ID NO: 126393 - DNA, 540 bp, Desulfitobacterium hafniense Y51
  CDS (1)..(540): transl_table=11
ttggaggatatcgtggccgggggtaaagaagaagtgcggaagaggccacgttatcgggatgcctactatgcaggagggtatcctccggagaatgaaggcgtatgtacagatgtcatttggagagcacttcaccatgcgggatatgatcttaaagccatgatcgatgaagatatccgccagaatacggctctgtatccaagggttgacgaggggcgggacgccaatatagattttcgccgcgtacaaaatctaaaggtctttttccaacgacacggtcaggagttgaccacagaagtcattgccaatgatgtggataacttatctcagtggcagcctggagatattgtcacctttgctctgccccatgaacacatagccattatctctgatcgccgccggcctgatggcgttccctttatccttcataatgggggtcctgtggcttctgaagaggatcgtttgctctcctggcccagcccgattacgggccactatcggtttcctaagttcgacggagctcttatggagacagccggatga

SEQ ID NO: 126394 - protein, 179 aa, Desulfitobacterium hafniense Y51
MEDIVAGGKEEVRKRPRYRDAYYAGGYPPENEGVCTDVIWRALHHAGYDLKAMIDEDIRQNTALYPRVDEGRDANIDFRRVQNLKVFFQRHGQELTTEVIANDVDNLSQWQPGDIVTFALPHEHIAIISDRRRPDGVPFILHNGGPVASEEDRLLSWPSPITGHYRFPKFDGALMETAG

SEQ ID NO: 126395 - DNA, 633 bp, Saccharophagus degradans 2-40
  CDS (1)..(633): transl_table=11
atgggttttactaatccaattaagcggtttataaacgcaataggcttaacggttgctgtgggtggagcgattggaatatcgctgcaagctattgccctaacaggccaagatattgccagtgccgccaataaacgtactgagcattttgtggtttacactgggcggtatgtatctattccctaccctatgggtgatgtgcctaaaaatacaggcgtgtgtacggatgtggtaattcgcacatacagggctgtaggtatagatttacagcaattggtacacgaagatattaaagcgaattttgatgcatacccctctaaacgcatttggggcttaacccggccagatacaaatatagaccaccgacgtgtacccaatttacaagcgtttttcgaacgcaatggtacaagtttacccataacaaccgatccagaagattatttaccaggggatatagtatcgtggatgctgccaggtaatttgccgcatattggcgttgtaagcgatgttaaacacgcctcatcgggtgtacccttagttgtacataatattggctttggccccaagcgaaatgacgcactttttgcctataccattacagggcattaccgctacctaccggccaaaacagaataa

SEQ ID NO: 126396 - protein, 210 aa, Saccharophagus degradans 2-40
MGFTNPIKRFINAIGLTVAVGGAIGISLQAIALTGQDIASAANKRTEHFVVYTGRYVSIPYPMGDVPKNTGVCTDVVIRTYRAVGIDLQQLVHEDIKANFDAYPSKRIWGLTRPDTNIDHRRVPNLQAFFERNGTSLPITTDPEDYLPGDIVSWMLPGNLPHIGVVSDVKHASSGVPLVVHNIGFGPKRNDALFAYTITGHYRYLPAKTE

SEQ ID NO: 126397 - DNA, 600 bp, Acidobacteria bacterium Ellin345
  CDS (1)..(600): transl_table=11
ttgaggcgttggactgcattgctcgtggtcgcggtctcgatgctcgcttgcgcgcaggcgccggttgatcgggatctgctcacgaagaagcttgttgcggcggcctcggcgcgtgcgcaagtgcacgtgcgctacaccggcgagtacgtgaagattgactatcccaacggagatgttccggccgataccggcgcttgtaccgacgagatcattcgcatctatcgcgcagtcggaattgatctacaaaaacaggtgcacgaggacatggcgaagcacctcgccgactacccgatgcacggcagacggaccgacacgaacatcgatcaccgccgcgtgccaaacctgatggtgttctactcgaagttcggcgaacgtctgagtaccgcgcgcacagcggaatatctgccgggcgacattgtggcgtggaacctcgatggcaagcacacgcacattgggatggtcgttgatcagaagagcttgttcgggcgctacaaagtcctgcacaacatcggtgaagggccgcagatcgaggatgtgctctttgactggaagatcattgggcactaccggtattggggaacgtcgcagacaacccagtga

SEQ ID NO: 126398 - protein, 199 aa, Acidobacteria bacterium Ellin345
MRRWTALLVVAVSMLACAQAPVDRDLLTKKLVAAASARAQVHVRYTGEYVKIDYPNGDVPADTGACTDEIIRIYRAVGIDLQKQVHEDMAKHLADYPMHGRRTDTNIDHRRVPNLMVFYSKFGERLSTARTAEYLPGDIVAWNLDGKHTHIGMVVDQKSLFGRYKVLHNIGEGPQIEDVLFDWKIIGHYRYWGTSQTTQ

SEQ ID NO: 126399 - DNA, 609 bp, Hyphomonas neptunium ATCC 15444
  CDS (1)..(609): transl_table=11
atgatcacgcgccgcgcccttctggccacgggccttgccctgcccctgctgccttcagcgggctttgcagatacagcgccagactggacgggaaaactgctacgcgcggcgcgggcacaaatcggtgtgaccacggggtatgacccggcatatgtgacgctcgattatcccggcggcgacattccccgccaaaccggtgtgtgtacggatgtgatcatccgcgcctatcgcgacgcctttgacatggaccttcaggaacttgtccacatggacatgaaggcgaatttcccaagctatccccgaacctggggcctgacgcgcgccgaccggaacatcgaccatcgccgggtgcctaacctggagcgctactttgaacggcagggcctgaagcgcgaggcaccaggacggcgcgaggactggcaggcgggcgatctggtgaccatgcgccttggtgggcgcctgcctcatattgcgatcttctcagggcatgatctgcttacggagcgtgcgctttacatccataatatcggcgggggcacgcgggaggaagaaatccgcaccgattatgatagccccatgcggtttcgctttccgccaccggaggcgtga

SEQ ID NO: 126400 - protein, 202 aa, Hyphomonas neptunium ATCC 15444
MITRRALLATGLALPLLPSAGFADTAPDWTGKLLRAARAQIGVTTGYDPAYVTLDYPGGDIPRQTGVCTDVIIRAYRDAFDMDLQELVHMDMKANFPSYPRTWGLTRADRNIDHRRVPNLERYFERQGLKREAPGRREDWQAGDLVTMRLGGRLPHIAIFSGHDLLTERALYIHNIGGGTREEEIRTDYDSPMRFRFPPPEA

SEQ ID NO: 126401 - DNA, 597 bp, Pseudomonas aeruginosa UCBPP-PA14
  CDS (1)..(597): transl_table=11
atggacaaggacgtatccggcgcgctgcgccgcctgttgctgctcgccatgctcggactgccactggcggcggccgctgcggtcgaaccgcagcgactggtggatgcggcgcgtgcccaggtgggcgtgaccctgggctacgacccggcctaccggcaactggactatccgggcggcgacgtgccgctgcagaccggggtctgcaccgacgtggtggtccgtgcgctgcgtggacaggggctggacctgcagaaggcggtgcacgaggacatgcgtcgccacttcgcggcctacccgcagcaatgggggatgaaaggcaccgaccgcaacatcgatcaccgccgcgtaccgaacctgatgacctggttcagccgccagggcctggcactgacgccgagccgcgacgcctccgcctaccgggccggagacatagtcgcctggcgcctggacaacggcctgctgcatatcggcgtgctttccgatcgcaggctggagggcaggccgctggtgttgcacaacatcggtgccggcgtgcgggaagaggacctgctgttccgctaccaggtcatcggccactaccgcttcccgcagggctga

SEQ ID NO: 126402 - protein, 198 aa, Pseudomonas aeruginosa UCBPP-PA14
MDKDVSGALRRLLLLAMLGLPLAAAAAVEPQRLVDAARAQVGVTLGYDPAYRQLDYPGGDVPLQTGVCTDVVVRALRGQGLDLQKAVHEDMRRHFAAYPQQWGMKGTDRNIDHRRVPNLMTWFSRQGLALTPSRDASAYRAGDIVAWRLDNGLLHIGVLSDRRLEGRPLVLHNIGAGVREEDLLFRYQVIGHYRFPQG

SEQ ID NO: 126403 - DNA, 585 bp, Flavobacteria bacterium BBFL7
  CDS (1)..(585): transl_table=11
atgcgttttaaaacattactgttaaccgcgtttcttttaattccatttgccggaatttgtcaaactacttttgggtggcaacttgcccatgctgcagatgaacttactaaagatgatgtggtgtataatggcgcatatttctcaatagattatcctggcggcgatgtgccatctggttatggagtttgtacagatgttatcataagagcatatagagcagtagacattgatcttcaaaaagaagtacatgaggacatgaagaaacacttcagtgcttatccacaaaactggggtttaactcatacagatagtaatatagaccacaggcgcgtgcctaatttgagacgcttttttgaacgacatgatagttcgttagacattactttagaagagtcagattatttaccaggagatatagtaagttgggtactatctaatggtttaactcatataggcatcgtgagtagcaataaaataaaaggaactaatagatattatataattcacaatataggagcaggacaggtatatgaagactgtctgtttcaatttaaaataacaggacattacaggtatgagccatag

SEQ ID NO: 126404 - protein, 194 aa, Flavobacteria bacterium BBFL7
MRFKTLLLTAFLLIPFAGICQTTFGWQLAHAADELTKDDVVYNGAYFSIDYPGGDVPSGYGVCTDVIIRAYRAVDIDLQKEVHEDMKKHFSAYPQNWGLTHTDSNIDHRRVPNLRRFFERHDSSLDITLEESDYLPGDIVSWVLSNGLTHIGIVSSNKIKGTNRYYIIHNIGAGQVYEDCLFQFKITGHYRYEP

SEQ ID NO: 126405 - DNA, 741 bp, Desulfitobacterium hafniense DCB-2
  CDS (1)..(741): transl_table=11
atgtatcaatgcttaaggggaggtaaacttcccaagaagtccggttatcggagcgccttaattgtcggtgcactgttgctcttatgcacaggctgcagcaaggactccgccccggaaataaagcgtcttgaacccatactttatttgcaggtacctaccattgagtgccctgtggacaaagatcaggatggcatcagtgatttggaggatatcgtggccgggggtaaagaagaggtgcggaagaggccccgttatcgggatgcctattatgcaggcgggtatcctccggagaatgaaggcgtatgtacagatgtcatttggagagcacttcaccatgcgggatatgatcttaaagccatgatcgatgaagatatccgtcagaatacctccctgtatccgagggttgacgaggggcgggacgccaatatagattttcgccgggtgcaaaatctaaaggtctttttccaacgccacggtcaggagttgaccacagaagtcattgccaatgatgtggataacttatctcagtggcagcctggagatattgtcacctttgctctgccccatgaacacatagccattatctcagatcgccgccggcctgatggcattccctttatccttcataatgggggtcccgtggcttctgaagaggatcgtttgctctcctggcccagccctattacgggccactatcggtttcctaagttcgacggagctcttatggagacagccggatga

SEQ ID NO: 126406 - protein, 246 aa, Desulfitobacterium hafniense DCB-2
MYQCLRGGKLPKKSGYRSALIVGALLLLCTGCSKDSAPEIKRLEPILYLQVPTIECPVDKDQDGISDLEDIVAGGKEEVRKRPRYRDAYYAGGYPPENEGVCTDVIWRALHHAGYDLKAMIDEDIRQNTSLYPRVDEGRDANIDFRRVQNLKVFFQRHGQELTTEVIANDVDNLSQWQPGDIVTFALPHEHIAIISDRRRPDGIPFILHNGGPVASEEDRLLSWPSPITGHYRFPKFDGALMETAG

SEQ ID NO: 126407 - DNA, 600 bp, Alteromonadales bacterium TW-7
  CDS (1)..(600): transl_table=11
atgtttaaatacggtttatatttatttacgtttttacctttttgttcgtttgctaactctttcaatcagcaaatatccgcagcactgattgaaagaacaacacacaatattacttatgacggcagttattattcaatgacctatcccggtggtgatgtaccaagtaatattggtgtgtgtaccgatgttattattcgtgcttaccgccaattgggtgtggatttacaacaaagagtacatgaagatattcgagcaaattttgcgaggtatccgtctgagcgaatttggagtttaaaaaaaccagataaaaatattgatcacaggcgtgtacctaaccttcaagtattttttaagcgtcatggcacagagttagctatttcaagtaactcacgtgattataaagttggtgatatagttacttggatgttacccggtaacttaccccatataggcatggttgttacggaagcttcaagcagcgccgagaatgttcaaattgtacataatatagggcgaggaccagaaataagcgaaatgctatttgattataaaatcactggtcattatcgttttactaataaacattataatgcccagtaa

SEQ ID NO: 126408 - protein, 199 aa, Alteromonadales bacterium TW-7
MFKYGLYLFTFLPFCSFANSFNQQISAALIERTTHNITYDGSYYSMTYPGGDVPSNIGVCTDVIIRAYRQLGVDLQQRVHEDIRANFARYPSERIWSLKKPDKNIDHRRVPNLQVFFKRHGTELAISSNSRDYKVGDIVTWMLPGNLPHIGMVVTEASSSAENVQIVHNIGRGPEISEMLFDYKITGHYRFTNKHYNAQ

SEQ ID NO: 126409 - DNA, 22 bp, Artificial sequence
  primer
atgaaagcttcactggcgctgc

SEQ ID NO: 126410 - DNA, 27 bp, Artificial sequence
  primer
ttatttaacaaaataacgataatgccc

SEQ ID NO: 126411 - protein, 162 aa, Artificial sequence
  consensus sequence
  Variant (2)..(4): Xaa in position 2 to 4 is any amino acid
  Variant (6)..(9): Xaa in position 6 to 9 is any amino acid
  Variant (12)..(12): Xaa in position 12 is any amino acid
  Variant (15)..(15): Xaa in position 15 is any amino acid
  Variant (17)..(19): Xaa in position 17 to 19 is any amino acid
  Variant (23)..(23): Xaa in position 23 is any amino acid
  Variant (26)..(27): Xaa in position 26 to 27 is any amino acid
  Variant (30)..(30): Xaa in position 30 is any amino acid
  Variant (32)..(35): Xaa in position 32 to 35 is any amino acid
  Variant (36)..(36): Xaa in position 36 is any or no amino acid
  Variant (40)..(41): Xaa in position 40 to 41 is any amino acid
  Variant (43)..(43): Xaa in position 43 is any amino acid
  Variant (46)..(52): Xaa in position 46 to 52 is any amino acid
  Variant (55)..(60): Xaa in position 55 to 60 is any amino acid
  Variant (61)..(64): Xaa in position 61 to 64 is any or no amino acid
  Variant (66)..(66): Xaa in position 66 is any amino acid
  Variant (77)..(79): Xaa in position 77 to 79 is any amino acid
  Variant (81)..(81): Xaa in position 81 is any amino acid
  Variant (83)..(97): Xaa in position 83 to 97 is any amino acid
  Variant (98)..(105): Xaa in position 98 to 105 is any or no amino acid
  Variant (110)..(112): Xaa in position 110 to 112 is any amino acid
  Variant (114)..(115): Xaa in position 114 to 115 is any amino acid
  Variant (116)..(118): Xaa in position 116 to 118 is any or no amino acid
  Variant (121)..(123): Xaa in position 121 to 123 is any amino acid
  Variant (125)..(133): Xaa in position 125 to 133 is any amino acid
  Variant (134)..(137): Xaa in position 134 to 137 is any or no amino acid
  Variant (140)..(140): Xaa in position 140 is any amino acid
  Variant (142)..(142): Xaa in position 142 is any amino acid
  Variant (144)..(146): Xaa in position 144 to 146 is any amino acid
  Variant (149)..(149): Xaa in position 149 is any amino acid
  Variant (151)..(156): Xaa in position 151 to 156 is any amino acid
  Variant (157)..(158): Xaa in position 157 to 158 is any or no amino acid
YXXXYXXXXYPXGDXPXXXGVCXDVXXRAXRXXXXXDLQXXVXEDXXXXXXXYPXXXXXXXXXXDXNIDHRRVPNLXXXFXRXXXXXXXXXXXXXXXXXXXXXXXGDIVXXXLXXXXXHIXXXSXXXXXXXXXXXXXHNXGXGXXXEDXLXXXXXXXXGHYR

SEQ ID NO: 126412 - protein, 28 aa, Artificial sequence
  protein pattern
  Variant (3)..(3): Xaa in position 3 is any amino acid
  Variant (4)..(12): Xaa in position 4 to 12 is any or no amino acid
  Variant (16)..(16): Xaa in position 16 is Phe or His
  Variant (20)..(20): Xaa in position 20 is Pro or Gln
  Variant (23)..(24): Xaa in position 23 to 24 is any amino acid
  Variant (25)..(25): Xaa in position 25 is Phe, Trp or Tyr
  Variant (26)..(26): Xaa in position 26 is Phe or Tyr
  Variant (27)..(27): Xaa in position 27 is any amino acid
  Variant (28)..(28): Xaa in position 28 is Lys or Arg
YPXXXXXXXXXXNIDXRRVXNLXXXXXX

SEQ ID NO: 126413 - protein, 28 aa, Artificial sequence
  protein pattern
  Variant (2)..(3): Xaa in position 2 to 3 is any amino acid
  Variant (4)..(4): Xaa in position 4 is Ile, Leu or Met
  Variant (5)..(5): Xaa in position 5 is Ala, Asp, Gly, Pro or Thr
  Variant (6)..(6): Xaa in position 6 is Phe or Tyr
  Variant (8)..(8): Xaa in position 8 is any or no amino acid
  Variant (10)..(10): Xaa in position 10 is any or no amino acid
  Variant (12)..(12): Xaa in position 12 is Ile, Leu or Val
  Variant (13)..(13): Xaa in position 13 is Leu or Pro
  Variant (14)..(14): Xaa in position 14 is any amino acid
  Variant (15)..(15): Xaa in position 15 is Asp, Glu, Gly, Asn, Gln or Thr
  Variant (16)..(16): Xaa in position 16 is any amino acid
  Variant (18)..(18): Xaa in position 18 is Ala or Val
  Variant (20)..(20): Xaa in position 20 is Ala, Ser or Thr
  Variant (22)..(22): Xaa in position 22 is any amino acid
  Variant (23)..(23): Xaa in position 23 is Ile, Leu or Val
  Variant (24)..(24): Xaa in position 24 is Ile or Val
  Variant (26)..(27): Xaa in position 26 to 27 is any amino acid
YXXXXXPXGXDXXXXXGXCXDXXXRXXR

SEQ ID NO: 126414 - protein, 16 aa, Artificial sequence
  protein pattern
  Variant (5)..(5): Xaa in position 5 is Ala, Ser or Thr
  Variant (6)..(6): Xaa in position 6 is Phe or Trp
  Variant (7)..(7): Xaa in position 7 is any amino acid
  Variant (9)..(11): Xaa in position 9 to 11 is any amino acid
  Variant (12)..(13): Xaa in position 12 to 13 is any or no amino acid
  Variant (16)..(16): Xaa in position 16 is Ala or Gly
GDIVXXXLXXXXXHIX

SEQ ID NO: 126415 - DNA, 2187 bp, Escherichia coli
  CDS (1)..(2187): transl_table=11
atgattactcgtattcctcgtagttctttctctgcaaatattaataatacagcccagacaaatgaacaccaaaccctgagtgaattgttttataaagaactcgaggataaattttctggcaaggagctggcgacgcctctattaaaaagcttctcagagaactgtagacaaaatggtcgtcatatctttagcaacaaggattttgtcattaaattttccacgtccgtcttacaagctgataagaaagaaattacgataattaataaaaacgaaaacacgacacttactcaaaccattgccccaatatttgaaaaatacctaatggaaattttacctcaacgctcagacactcttgataaacaagaattaaacctaaaatcagatagaaaagaaaaagaattcccaagaattaaacttaatggtcaatgttattttccggggcgaccccaaaaccgtatagtatgccgacacattgctgcacaatatattaatgatatttatcagaatgttgattacaaaccccatcaagatgattactcttcagctgaaaaatttctcacgcacttcaacaaaaaatgcaaaaaccagactttggcgttggtttccagccgtcctgaggggcgttgcgttgctgcctgcggtgatttcgggctagttatgaaagcatattttgacaagatggaatcaaatggcatcagtgttatggcagccatattactggtggataaccatgctttgacggtccggctaagaataaagaacacaactgaaggatgtacccattacgtggtttcggtttatgatcctaatgtaactaacgataaaataagaattatgagcgaaagcaaagagaatattaaacactattctctgatggattttatgaatgtagattatagcctcctgaaatggtcaaatgatcatgttattaatcaatctgttgcaataattccagcacttccgaaagaacagctattgatgttaaaaggatctgtggatgaaataacccctccattatcacctgcaacgatgaatttgctaatggcaattggtcagaatcaccaacttacgcaactgatgattcaactccagaaaatgccagaactacatagaacagaaatgttgactgcctataatagtattaacctgccaggtttatatttggctataaattatggtaatgcggatatcgttgagactattttcaattcattgtcagaaacaggatatgaaggattactctcgaaaaaaaatctcatgcatattctggaggcaaaagataaaaatggtttttctggattatttttagcgatatcacgtaaggataaaaatgttgtaacctcgattctgaacgccttacctaaactggccgcaacacatcatttagataacgaacaagtgtataaattcctgagtgccaaaaatagaacgtccagccatgttttataccatgttatggcgaatggtgatgccgacatgctgaaaattgttttgaacgcgttacctttgttaattcgcacatgtcatttgactaaagaacaggtactcgatctcctgaaggcaaaggatttttatggttgcccaggactatatctggcgatgcaaaatggacatagcgatatcgtgaaagttattcttgaagcattgcccagcctagcccaggaaattaacatttcagcttccgatattgtagatcttctgaccgctaaaagtcttgcgcgcgacacgggtttgtttatggccatgcagcgcggacacatgaacgttattaatactatttttaacgcattacccactctgtttaatacgtttaaattcgataaaaaaaatatgaagcccctcctcctggcaaataattctaatgaatatcccggtttgttttcagcgatacagcataaacaacaaaatgttgtagagacggtttatcttgctttatctgaccatgcacgcctgtttggatttaccgctgaagatattatggatttttggcaacacaaagccccacaaaaatactctgcctttgagttggcttttgaatttggtcaccgggttattgctgaattaatccttaatacattaaataagatggctgaaagctttggctttacggataaccctcgatacattgcggagaaaaattatatggaagctttactcaaaaaagcatctccccataccgtacgctaa

SEQ ID NO: 126416 - protein, 728 aa, Escherichia coli
MITRIPRSSFSANINNTAQTNEHQTLSELFYKELEDKFSGKELATPLLKSFSENCRQNGRHIFSNKDFVIKFSTSVLQADKKEITIINKNENTTLTQTIAPIFEKYLMEILPQRSDTLDKQELNLKSDRKEKEFPRIKLNGQCYFPGRPQNRIVCRHIAAQYINDIYQNVDYKPHQDDYSSAEKFLTHFNKKCKNQTLALVSSRPEGRCVAACGDFGLVMKAYFDKMESNGISVMAAILLVDNHALTVRLRIKNTTEGCTHYVVSVYDPNVTNDKIRIMSESKENIKHYSLMDFMNVDYSLLKWSNDHVINQSVAIIPALPKEQLLMLKGSVDEITPPLSPATMNLLMAIGQNHQLTQLMIQLQKMPELHRTEMLTAYNSINLPGLYLAINYGNADIVETIFNSLSETGYEGLLSKKNLMHILEAKDKNGFSGLFLAISRKDKNVVTSILNALPKLAATHHLDNEQVYKFLSAKNRTSSHVLYHVMANGDADMLKIVLNALPLLIRTCHLTKEQVLDLLKAKDFYGCPGLYLAMQNGHSDIVKVILEALPSLAQEINISASDIVDLLTAKSLARDTGLFMAMQRGHMNVINTIFNALPTLFNTFKFDKKNMKPLLLANNSNEYPGLFSAIQHKQQNVVETVYLALSDHARLFGFTAEDIMDFWQHKAPQKYSAFELAFEFGHRVIAELILNTLNKMAESFGFTDNPRYIAEKNYMEALLKKASPHTVR

SEQ ID NO: 126417 - DNA, 1899 bp, Escherichia coli O157:H7 EDL933
  CDS (1)..(1899): transl_table=11
  misc_feature (1486)..(1486): k is g or t
atgagtcaaaacgacattattatcagaactcattataagtctcctcatagaatgcacatcgatagcgacataccaacgccttcatcagagcctattaatcaatttgcgccccaactcatcaccctacttgatacctctgacttaagttcgatgctgtcatactgtgttactcaggaatttaccgcaaactgtcgaaaaatatcacaaaattgttattccactgccctttttaccattaactttgccacttcacccatccatgcagaaaatatattcattacattacactataaaaaagaaatcatttccttattactggaaaccacgcctattaaagctaaccatttgcgaagcatactggattatattgaacaggaacagttaactgccgaaaatcgtaaccattgtatgaaactgtctaaaaaaatccatagagaaaaaactatacaaccaacagtaaatctcaatggtagtgcatttttttcgcaatctccttctgacgctattttttgtcgccatctgtcattgcaatacgcacttgattcattgagaaatggaaaaggcaaggtcaacctgattaaacattactcctccgttgaatccatacagcagcatgtccccttagtccgggacgcggagttcagagcattacttcgccatcctcctgcagggagtcgcgttatcgcgagtaaggattttggcttcgctttagatattttcttctgtcgaatgatggcaaacaatgtcagtcatatgtctgcgattttatatatagacaatcatactttgtcagtaaggctacgaataaagcagtcggcgtatgggcaattaaattatgttgtgtccgtttacgacccgaacgataccaacgttgccgtcagaggcacccacaggacagcacggggctttctctcgcttgataagttcatcagttcaggtcccgatgctcagacctgggctgataggtatgttcgcaactgtgcaattgctattctgcccctattacctgagggagttccaggggctattttcacgggtatcgcgacacgaatgccatttgcccctatacatccatcggcaatgttgttaataatggccacaggccagactcaacagcttattacattattcagacagttgcccatactccctgaaaaagaaatcattgaaataataactgcgcagaatagcattggtacacctgctttatttttggctatgatgaacggacatactgacaacgtgaaaatatttatgcaagaaattcagtcactggtagataatcacatcattcatgaagataatctggttaaattgttgcaaactaaaagtgctaacgaaacacctggactttatatctccatgttgtatggattcgatgagataatcgatatctttctgaatgcattaaccactcctatagcacaagagcttttaaacaaaaaactggtgatgagtattttagccatgaaaatacatgatggtkagccaggattatacgccgcaatggaaaataatcaccctttgtgtgtcacacggttcctctctaaaattaatggcatcgcctttaaatacaagttgagcaaagctaacatcatggatttattaaaaggcgctacagcacagggaacccctgcattatacatcgctatgagcaagggtaatgaagacgtcgtgttatcttatatatcgacgctgggtgcttttgcaaaaaaacattcttttagtcaacatcagttatttacactgttggctgctaaaaatcatgacaacatgtcagctgttcatatagccattcatcataatcattataaaactgtagaaacatattatgctgctataaatgtaatcagccaaagcatgagttttagtgctgatgaattaaagacgtatttataa

SEQ ID NO: 126418 - protein, 632 aa, Escherichia coli O157:H7 EDL933
  misc_feature (496)..(496): The Xaa at location 496 stands for Stop, or Glu.
MSQNDIIIRTHYKSPHRMHIDSDIPTPSSEPINQFAPQLITLLDTSDLSSMLSYCVTQEFTANCRKISQNCYSTALFTINFATSPIHAENIFITLHYKKEIISLLLETTPIKANHLRSILDYIEQEQLTAENRNHCMKLSKKIHREKTIQPTVNLNGSAFFSQSPSDAIFCRHLSLQYALDSLRNGKGKVNLIKHYSSVESIQQHVPLVRDAEFRALLRHPPAGSRVIASKDFGFALDIFFCRMMANNVSHMSAILYIDNHTLSVRLRIKQSAYGQLNYVVSVYDPNDTNVAVRGTHRTARGFLSLDKFISSGPDAQTWADRYVRNCAIAILPLLPEGVPGAIFTGIATRMPFAPIHPSAMLLIMATGQTQQLITLFRQLPILPEKEIIEIITAQNSIGTPALFLAMMNGHTDNVKIFMQEIQSLVDNHIIHEDNLVKLLQTKSANETPGLYISMLYGFDEIIDIFLNALTTPIAQELLNKKLVMSILAMKIHDGXPGLYAAMENNHPLCVTRFLSKINGIAFKYKLSKANIMDLLKGATAQGTPALYIAMSKGNEDVVLSYISTLGAFAKKHSFSQHQLFTLLAAKNHDNMSAVHIAIHHNHYKTVETYYAAINVISQSMSFSADELKTYL

SEQ ID NO: 126419 - DNA, 25 bp, Artificial sequence
  primer
atgattactcgtattcctcgtagtt

SEQ ID NO: 126420 - DNA, 23 bp, Artificial sequence
  primer
ttagcgtacggtatggggagatg

SEQ ID NO: 126421 - DNA, 1959 bp, Escherichia coli
  CDS (1)..(1959): transl_table=11
atgagccaaattcacaaacacaccattcctgccaacatcgcagaccgttgcctgataaaccctcagcagtacgaggcgatgtatcaacaatctattaacgtacctgataccttctggggcgaacagggaaaaattcttgactggatcaaaccttaccagaaggtgaaaaacacctcctttgcccccggtaatgtgtccattaaatggtacgaggacggcacgctgaatctggcggcaaactgccttgaccgccatctgcaagaaaacggcgatcgtaccgccatcatctgggaaggcgacgacgccagccagagcaaacatatcagctataaagagctgcaccgcgacgtctgccgcttcgccaataccctgctcgagctgggcattaaaaaaggtgatgtggtggcgatttatatgccgatggtgccggaagccgcggttgcgatgctggcctgcgcccgcattggcgcggtgcattcggtgattttcggcggcttctcgccggaagccgttgccgggcgcattattgattccaactcacgactggtgatcacttccgacgaaggtgtgcgtgccgggcgcagtattccgctgaagaaaaacgttgatgacgcgctgaaaaacccgaacgtcaccagcgtagagcatgtggtggtactgaagcgtactggcgggaaaattgactggcaggaagggcgcgacctgtggtggcacgacctggttgagcaagcgagcgatcagcaccaggcggaagagatgaacgccgaagatccgctgtttattctctacacctccggttctaccggtaagccaaaaggtgtgctgcatactaccggcggttatctggtgtacgcggcgctgacctttaaatatgtctttgattatcatccgggtgatatctactggtgcaccgccgatgtgggctgggtgaccggacacagttacttgctgtacggcccgctggcctgcggtgcgaccacgctgatgtttgaaggcgtacccaactggccgacgcctgcccgtatggcgcaggtggtggacaagcatcaggtcaatattctctataccgcacccacggcgatccgcgcgctgatggcggaaggcgataaagcgatcgaaggcaccgaccgttcgtcgctgcgcattctcggttccgtgggcgagccaattaacccggaagcgtgggagtggtactggaaaaaaatcggcaacgagaaatgtccggtggtcgatacctggtggcagaccgaaaccggcggtttcatgatcaccccgctgcctggcgctaccgagctgaaagccggttcggcaacacgtccgttcttcggcgtgcaaccggcgctggtcgataacgaaggtaacccgctggagggggccaccgaaggtagcctggtaatcaccgactcctggccgggtcaggcgcgtacgctgtttggcgatcacgaacgttttgaacagacctacttctccaccttcaaaaatatgtatttcagcggcgacggcgcgcgtcgcgatgaagatggctattactggataaccgggcgtgtggacgacgtgctgaacgtctccggtcaccgtctggggacggcagagattgagtcggcgctggtggcgcatccgaagattgccgaagccgccgtagtaggtattccgcacaatattaaaggtcaggcgatctacgcctacgtcacgcttaatcacggggaggaaccgtcaccagaactgtacgcagaagtccgcaactgggtgcgtaaagagattggcccgctggcgacgccagacgtgctgcactggaccgactccctgcctaaaacccgctccggcaaaattatgcgccgtattctgcgcaaaattgcggcgggcgataccagcaacctgggcgatacctcgacgcttgccgatcctggcgtagtcgagaagctgcttgaagagaagcaggctatcgcgatgccatcgtaa

SEQ ID NO: 126422 - protein, 652 aa, Escherichia coli; identical to SEQ ID NO: 122177

SEQ ID NO: 126423 - DNA, 2778 bp, Zea mays
  CDS (395)..(2515)
tctgtacattttagaaaatacaagtaaatcgacaaatcgtaccctgtgtgactctgtcaataaggcatgtaaaccctttgtaaaaaagaatgaagagaagaagaaagatgatcctgtacgctcgtcgaaaccaaagaaatacagtgcgtactacccttcaaagctcttgccttattattttcaatcatctcgtgacggaaaaacaaagtcaacacgaaggactcggccggtagcactggcgctagcagcagcagagatcgaccggccatcgccgttttataaaaagagagtccagcggtagccgtcgctgacggacgcccccctcccagacctccgcccggatctcgccgcctctcccgcccctgctcgcgagccgccgtcgacagccaccgccatgggcacggccaacggccagcagccggcagagggcgctccctctgacaagctccgccacgtcgagtccatgtcggagctgccctccggcgccggcaagatctcggggatcaacgccgtcgtgctcggggagtcgctcgccgccgaggagaacgacctcatcgtccccagccccgagttctctgccagcgccctcgtctcttctccgaaacagtatcgcgagatgtatgagaggtccattaaggacccggccgggttctggtcggagattgccgagaccttttactggaaggagaagtggaaccccgccgaggtctgctcggagaacctcgatgtcaccaagggacccgtccagatcaactggttcaagggagggaaaaccaacatatgttacaacgctgttgaccgcaacatcgagtctggcaatggcgacaaggttgcaatgtactgggagggtaatgagcccggtcaggatgggaagcttacctattccgagctcctggagaaggtttgccagcttgcaaattacttgaagagccttggtgtcggcaagggtgatgctgttattatatacctaccaatgttgctggagcttcccattgccatgcttgcctgtgcccgcattggtgccgttcactcggttgtgtttgctggcttctcagcagattcgctagctcaaaggattgtcgattgcaagcctaagcttgtcatcacgtgcaatgctgtgaagcggggagtcaagcccatctttctcaaagatatagtggatgcagctttggttgaaagtgagaagaatggagtctctgtaggtctctgtttgacgtatgaaaaccagtcagccatgaagagggaaaacacaaaatggcaagcagaaagggatgtttggtggcaggacgttgtcacaaaatttccaaccaaatgtgatgtggagtgggtggatgcagaggatccattgttccttttgtacacaagtggcagcacagggaagccaaagggtgtactgcatacttctgggggctacatggtgtacactgcaacaacatttaagtacgcatttgactacaagccaactgacatatactggtgcactgcagactgtggctggattactggacatagttatgtaacatatggtcctctcctgaatggtgctacggttctcgtttttgaagggacgccgaactaccctgattcgggccgatgctgggatattgtggacaagtacaatgtgacaatattttatactgccccaactcttgttcgttcactcatgcgtgatggcactgagtatgttacacgttactctcgaaagtctctccgagtcctgggaagtgttggtgagccaatcaatcctagtgcatggagatggttctacaatactgttggggattcccggtgccctatatcagacacctggtggcaaactgaaactggcggtttcatgatcacccctttgcctggcgcctggcctcaaaaaccaggttctgcaacctttcctttctttggtgttcagccggtcattgttgacgagaaagggcaagagattgaaggggaatgtagtggatatctttgcataaagaaatcatggcctggggctttccggactctgtatggagatcatgagagatacgagaccacgtacttcaaaccatttgctgggtactatttcactggtgatggttgcagcagagacaaagatggttaccactggctgactggaagagtagatgatgtcatcaatgtcagtggacaccgaatcggcacagcagaggttgagtcagctttagtgtcacatccacagtgtgcagaggctgctgttgttggtgttgagcatgaggtcaaaggtcaaggaatttatgcttttgtaactttggtggatggtgttccgtatagtgaggaactacgaaaaagcctcataatgacagtgcgcaaccagattggggcatttgcagctcctgacaagatccactgggcaccgggacttcctaaaacccggagtggcaagatcatgcgaaggattttgcgcaagattgctgcacggcaactggatgaacttggggacataagcaccctcgctgaacctgctgtagttgaccagcttatttcgctcagcaattgttaggttgcaacgtaattggatggtggatacatccttgagcgcatgttgcgtttgtctgtaatatgagtagaaggtgcatttcaatatcgagaactcaagtgggacgtggtgacatgttgtcgatgtttccttttaaacttttgtatcagatatcaagataggtccatcagaatgtattattgattgacacagacaaatatatcaataaaattgttaatttttcactaaaaaaaaaaaaaaaaaaaaaaaaaaaaaaaaaaaaaaaa

SEQ ID NO: 126424 - protein, 706 aa, Zea mays; identical to SEQ ID NO: 122213

SEQ ID NO: 126425 - DNA, 1959 bp, Salmonella typhi
  CDS (1)..(1959): transl_table=11
  misc_feature (1645)..(1645): n is a, g, c or t
atgagccaaacacataaacacgccattcccgccaacattgcggatcgttgcctgataaatccagagcagtatgagactaaatataaacagtctattaacgaccccgatacgttttggggcgaacagggaaaaattctcgattggatcacgccgtaccaaaaagtgaaaaacacctcctttgcgccaggcaatgtgtcgattaaatggtacgaggacggcacgctgaatctggcggcgaactgtcttgaccgccatttgcaggaaaatggcgatcgcaccgccattatctgggaaggcgatgacgcgtcgcagagtaaacatatctcttatcgcgaactgcatcgcgatgtctgccgtttcgcgaatacactgctggatctgggcattaaaaaaggcgatgtggtagcgatttatatgccgatggtgccggaagcggcggtggcaatgttggcctgcgcccgcatcggtgcggtgcattcggtgatcttcgggggcttctcgccggaagccatcgccggacgcattatcgactccagctcgcggctggtgatcaccgctgacgaaggtgtacgtgccggacgcagtatcccgctgaaaaagaatgtcgatgacgcgctgaaaaacccgaatgtcactagcgttgagcatgtgatcgtcctgaagcgcaccggcaacgacattgactggcaagaaggccgcgacctgtggtggcgcgatttgattgaaaaagccagccctgagcaccagcctgaagcgatgaatgccgaagatccgctgtttatcctttatacctccggctccaccggcaagccgaaaggcgtgctgcacaccaccggcggctatctggtctacgccgcgaccacctttaagtatgtctttgattatcaccctggcgatatttactggtgtaccgccgatgtgggttgggtgacggggcacagctatctgttgtatggcccgctggcctgcggcgcgaccaccttaatgtttgaaggcgtgccgaattggccaacgcccgctcgcatgtgccaggtggtcgacaaacaccaggtcaacattctctataccgccccgacggccatccgcgcgctgatggcggaaggcgataaagccattgaaggcaccgaccgttcttcactacgcattctgggttccgtcggcgagccgatcaatcccgaagcgtgggaatggtactggaagaagatcggcaaggaaaaatgtccggtcgtcgacacctggtggcagactgaaacaggcggttttatgatcacgccgctaccaggcgctatcgaactgaaagccggttccgccacccgtcctttctttggcgtacagcctgcgctggtggataacgaaggccatccgcaagaaggcgcgacggaaggcaatctggtcatcaccgattcctggccgggccaggcgcgcactctgttcggcgatcatgaacgttttgagcagacctatttctctacctttaagaatatgtatttcagcggcgacggcgcgcgtcgcgatgaggacggctattactggatcaccggtcgcgtggatgacgtgttaaacgtctccggccaccgtctgggtacggcggaaatcgagtcagcgctggtggcgcatccgaagatcgccgaagcggcggtggtgngtattccacacgctatcaaaggccaggcgatttacgcttatgtgacgctcaaccacggcgaggagccgtcgccagaactgtacgcggaggtgcgcaactgggtacgtaaagagattggcccactggcgacgccggacgtgctgcactggaccgactcactgccaaaaacccgttccggcaaaattatgcgccgcattttgcgcaaaatcgcggcgggcgataccagcaatctgggcgatacctcgactctcgccgatcctggcgtggtggagaaactgctcgaagagaagcaggccatcgcgatgccgtcataa

SEQ ID NO: 126426 - protein, 652 aa, Salmonella typhi
  misc_feature (549)..(549): The Xaa at location 549 stands for Arg, Cys, Gly, or Ser.
MSQTHKHAIPANIADRCLINPEQYETKYKQSINDPDTFWGEQGKILDWITPYQKVKNTSFAPGNVSIKWYEDGTLNLAANCLDRHLQENGDRTAIIWEGDDASQSKHISYRELHRDVCRFANTLLDLGIKKGDVVAIYMPMVPEAAVAMLACARIGAVHSVIFGGFSPEAIAGRIIDSSSRLVITADEGVRAGRSIPLKKNVDDALKNPNVTSVEHVIVLKRTGNDIDWQEGRDLWWRDLIEKASPEHQPEAMNAEDPLFILYTSGSTGKPKGVLHTTGGYLVYAATTFKYVFDYHPGDIYWCTADVGWVTGHSYLLYGPLACGATTLMFEGVPNWPTPARMCQVVDKHQVNILYTAPTAIRALMAEGDKAIEGTDRSSLRILGSVGEPINPEAWEWYWKKIGKEKCPVVDTWWQTETGGFMITPLPGAIELKAGSATRPFFGVQPALVDNEGHPQEGATEGNLVITDSWPGQARTLFGDHERFEQTYFSTFKNMYFSGDGARRDEDGYYWITGRVDDVLNVSGHRLGTAEIESALVAHPKIAEAAVVXIPHAIKGQAIYAYVTLNHGEEPSPELYAEVRNWVRKEIGPLATPDVLHWTDSLPKTRSGKIMRRILRKIAAGDTSNLGDTSTLADPGVVEKLLEEKQAIAMPS

SEQ ID NO: 126427 - DNA, 2007 bp, Zea mays; identical to SEQ ID NO: 121916
  CDS (79)..(1977)

SEQ ID NO: 126428 - protein, 632 aa, Zea mays; identical to SEQ ID NO: 121917

SEQ ID NO: 126429 - DNA, 2005 bp, Zea mays; identical to SEQ ID NO: 121918
  CDS (77)..(1975)

SEQ ID NO: 126430 - protein, 632 aa, Zea mays; identical to SEQ ID NO: 121919

SEQ ID NO: 126431 - DNA, 1959 bp, Yersinia pestis
  CDS (1)..(1959): transl_table=11
atgagccaaatacataaacatcctattccagctgcaattgcagagcatgctctaattaccccagaaaaataccaacattattaccaacaatccgtgcagaaccctgatgaattctggggcgaacaaggcaaaatcattgattggattaaaccctataaaacggtaaaaaatacctcctttgaccccggtcatgtgagtatccgctggtttgaggacggtacattgaacctcgcggcgaattgccttgatcgccatttggcagagcgtggtgatcaaacagccatcatttgggaaggtgatgaccctaatcaatcaaaaaccgtcacttataagcaactgcaccatgatgtgtgccagtttgctaatgtcctaaaaagtttaggcgtcaaaaaaggcgatgtggttgccatctatatgccaatggtgcctgaagctgccgtggcgatgttggcttgcgcgcgcatcggcgctgttcattccgttatctttggtggattttctccagatgccgttgccgggcgtatcatcgattctcactctaaactggtgattactgccgatgaaggtatccgtgcaggccgtgctattccactgaaaaaaaatgtcgatgaagcactgaaaaaccccgctatcaccagtattaaaaatgttgtggtcttccaacgtactggtaacgccagctattgggaagatgggcgcgatgtatggtggcatgacctgataaaagaggcatccgctgactgcccgccagaagagatgaatgcagaagacccgctgttcatcctttatacctctggctctaccggtaaacctaaaggggttgtacatacgacgggcggttatctggtttatgctgcactgacattcaaatatgtctttgattatcaccctggcgatatctactggtgtactgcagacgttggctgggtaaccggacacagctatctgttatatggaccactggcttgtggggccatcactctaatgtttgaaggcgtgcctaactaccctggcgtcaatcgcttaagccaagttgttgataaacataaagtcaatattctatacaccgcgcctacagcgattcgggccttaatggccgaaggtgacaaagccatcgaaggaaccaaacgcgactcactgcgtattatgggatcggtcggcgagccgattaatccagaagcctgggaatggtattacaacaagatcggtaacagtaaatgcccgattgtcgatacttggtggcagactgaaaccggtggtttcatgataacccctctgccgggtgccaccgagttgaaagccggttccgcaacgcgtccattctttggggtacaacctgcgttggtagataacctgggcaatcctcaggaaggggtggcagaaggtaatctggtcataaccgactcatggccggggcaagccagaacattatttggcgatcatgaacgtttcgaacaaacctacttctcaacctttaaaggcatgtatttcagtggcgacggcgcacgtcgtgacgaagacggttactactggataaccggtcgagttgatgacgtactaaacgtttcaggccatcgcttaggaacggctgaaattgaatctgcattggttgcacacccgaaaattgccgaagcggctgttgtcggtgttccacataatattaaaggacaggctatttatgcctatatcacgctaaatcacggtgaagaaccaacgccagagttatataccgaagtacgcaactgggtacgtaaagagattggcccactcgcaacacccgatattttgcattggacggactcattacccaaaacccgttcaggcaagatcatgcgccgtattttacgcaaaattgcgacaggagataccagcaacttgggcgatacctcaacacttgccgatccaagcgtggtagaaaaattactagaagaaaaacaatcaatgcagacaccgtcgtaa

SEQ ID NO: 126432 - protein, 652 aa, Yersinia pestis
MSQIHKHPIPAAIAEHALITPEKYQHYYQQSVQNPDEFWGEQGKIIDWIKPYKTVKNTSFDPGHVSIRWFEDGTLNLAANCLDRHLAERGDQTAIIWEGDDPNQSKTVTYKQLHHDVCQFANVLKSLGVKKGDVVAIYMPMVPEAAVAMLACARIGAVHSVIFGGFSPDAVAGRIIDSHSKLVITADEGIRAGRAIPLKKNVDEALKNPAITSIKNVVVFQRTGNASYWEDGRDVWWHDLIKEASADCPPEEMNAEDPLFILYTSGSTGKPKGVVHTTGGYLVYAALTFKYVFDYHPGDIYWCTADVGWVTGHSYLLYGPLACGAITLMFEGVPNYPGVNRLSQVVDKHKVNILYTAPTAIRALMAEGDKAIEGTKRDSLRIMGSVGEPINPEAWEWYYNKIGNSKCPIVDTWWQTETGGFMITPLPGATELKAGSATRPFFGVQPALVDNLGNPQEGVAEGNLVITDSWPGQARTLFGDHERFEQTYFSTFKGMYFSGDGARRDEDGYYWITGRVDDVLNVSGHRLGTAEIESALVAHPKIAEAAVVGVPHNIKGQAIYAYITLNHGEEPTPELYTEVRNWVRKEIGPLATPDILHWTDSLPKTRSGKIMRRILRKIATGDTSNLGDTSTLADPSVVEKLLEEKQSMQTPS

SEQ ID NO: 126433 - DNA, 1953 bp, Bradyrhizobium sp. ORS278
  CDS (1)..(1953): transl_table=11
atgtccgagaagatctacgacgtcccggccgagtgggcgaaacgcgccttcgtcgacgacgcgaagtaccaggaaatgtacgcgagctcgatcagggatcccaacggcttctgggccgagcaggccaagcgggtcgactggatccatgcgccgaccaagatcgagaacgtctcctacgcgcccggcaacatctcgatcaaatggttcgaggacggcgtcctcaacgctgcctacaattgcatcgaccgccacctcgccacccgcgccgaccagaccgcgatcatctgggaaggcgacgatcccgcggactccaagcacatcacctatcgtcagctccacgacgaagtgtgcaagatggccaacatcctgcgcaaccgcaacgtcaagaagggcgaccgcgtcacgatctatctgccgatgatcccggaggcggcctacgcgatgctcgcctgcgcccgcatcggcgccatccactcggtggtgttcgccggcttctcgccggactcgctcgcccagcgcatcaaggattgcgactccaaggtcgtgatcaccgccgacgaaggcctgcgcggcggccgcaaggtgccgctgaaggccaatgtcgacgcggcgctgaacaaggtcgacaatgtcgactgggtcgtcgtggtcaagcgcaccggcggcaagatcgagatgaacccgacacgcgacctctggtaccacgaggctgcggaaatggtgacgacggaatgcccggtcgagcacatgaacgcggaggatgcgctgttcatcctctacacctcgggctcgaccggccagcccaagggcgtgctgcacaccaccggcggctatctcgtctatgcgtcgatgacgcatcaatacgtgttcgactatcacgagggtgacgtctactggtgcaccgccgacgtcggctgggtcaccggccacagctacatcctctatgggccgctggccaacggtgccgtgacgctgatgttcgaaggcgtgccgaactatccggacaattcgcggttctggaacgtcatcgacaagcacaaggtcaacatcttctacaccgcgccgaccgcgatccgcgccctgatgcagggcggcgacgggccggtgacgaaaacctcgcgcgaatcgctgcgcctgctcggctcggtcggcgagccgatcaatcccgaggcctgggagtggtatcaccgcgtcgtcggcgacaaccgctgcccgatcgtcgacacctggtggcagaccgagaccggcggcatcctgatcacgccgctgccgggcgcgaccaggctcaagccgggctcggcgacgcggccgttcttcggagtcgtgcccgagatcgtcgatgccgacggcaatacgctggaaggcgcgaccgagggcaatctgtgcctgacgcgatcgtggccgggccagatgcgcaccgtctatggcgatcacgcccgcttcgagatgacctacttctcgacctacaagggcaagtacttcaccggcgatggctgccgccgcgacgccgacggctattattggatcaccggccgcgtcgacgacgtcatcaacgtctccggccaccgcatgggcaccgccgaggtcgagagcgcgctggtcgcgcatccgaaggtctcggaggccgccgtggtcggctatccccacgacatcaagggccagggcatctacgcctatgtcaccctgatggcgggggagacgccgagcgaggagttgcgcaaggagctcgtcggctgggtgcgcaaggagatcggcccgatcgcctcgcccgaccagatccagttctcgcaagggctgcccaagacccgctccggcaagatcatgcgccgcatcctgcgcaagatcgccgaggacgagccgggcgcactcggcgacacatcgaccttggccgatcccgcggtggtcgacgacctcgtgcagcaccggcagaaccgcaaggagaaacaggcctga

SEQ ID NO: 126434 - protein, 650 aa, Bradyrhizobium sp. ORS278
MSEKIYDVPAEWAKRAFVDDAKYQEMYASSIRDPNGFWAEQAKRVDWIHAPTKIENVSYAPGNISIKWFEDGVLNAAYNCIDRHLATRADQTAIIWEGDDPADSKHITYRQLHDEVCKMANILRNRNVKKGDRVTIYLPMIPEAAYAMLACARIGAIHSVVFAGFSPDSLAQRIKDCDSKVVITADEGLRGGRKVPLKANVDAALNKVDNVDWVVVVKRTGGKIEMNPTRDLWYHEAAEMVTTECPVEHMNAEDALFILYTSGSTGQPKGVLHTTGGYLVYASMTHQYVFDYHEGDVYWCTADVGWVTGHSYILYGPLANGAVTLMFEGVPNYPDNSRFWNVIDKHKVNIFYTAPTAIRALMQGGDGPVTKTSRESLRLLGSVGEPINPEAWEWYHRVVGDNRCPIVDTWWQTETGGILITPLPGATRLKPGSATRPFFGVVPEIVDADGNTLEGATEGNLCLTRSWPGQMRTVYGDHARFEMTYFSTYKGKYFTGDGCRRDADGYYWITGRVDDVINVSGHRMGTAEVESALVAHPKVSEAAVVGYPHDIKGQGIYAYVTLMAGETPSEELRKELVGWVRKEIGPIASPDQIQFSQGLPKTRSGKIMRRILRKIAEDEPGALGDTSTLADPAVVDDLVQHRQNRKEKQA

SEQ ID NO: 126435 - DNA, 2232 bp, Arabidopsis thaliana
  CDS (1)..(2232)
atgaaaataggatctccttcttccccgattctcagcgttgtctccagctcaggctcattggatccgaaaattagtggatcacttggatctcgaatccttccggctactcaaagatcatccccatcggagaatcttctcctccataggaaaatgtcgtctaattccctgaggcatgtcgagtccatgtcccagctaccctcaggtgccggaaagatctctcaattaaacgccgtcgtgttaggagaatcccttgcatcggaggagaatgatctcgtctttcccagcaaggaattctccggccaggctcttgtttcctcccctcaacagtacatggaaatgcataagaggtcgatggatgaccctgctgctttttggtctgatattgcgtctgagttttactggaagcagaaatggggtgaccaagtgttttccgagaatctcgatgtcaggaagggtcctattagcatcgagtggtttaaagggggaatcaccaatatttgctacaactgtttggacaaaaacgttgaagctggtttgggtgataaaacagccatacactgggaaggaaatgaacttggggtagatgcttccttaacttattctgagttgctccaacgagtttgccagcttgctaattacttgaaagataatggagtgaagaagggtgatgctgttgtaatttatttacctatgttgatggaacttcccatcgctatgcttgcatgtgcaaggatcggagctgttcattcggtcgtttttgctggattttctgcggactctcttgcccaaagaatcgttgattgcaagccaaatgtaatactgacttgcaatgctgttaaaagaggccctaagaccataaaccttaaagctattgttgatgctgcacttgaccaatcttctaaagatggagtctctgtaggcatatgcttgacctatgacaactcattagcgacaacaagggaaaacactaaatggcagaatggaagagatgtgtggtggcaggatgttatttctcaatatccaacatcgtgtgaggtggaatgggttgatgcagaagatcccctgtttttgctctacaccagtggaagtactgggaagccaaagggtgtcctacacacaactggagggtatatgatctacactgctacaacgttcaaatatgcatttgactacaaatcaacagatgtatactggtgtacagcagattgtggttggataactggccatagctatgttacttatggaccaatgcttaatggagccactgttgttgtctttgagggggctccaaactaccctgaccctggacgctgttgggatattgttgacaaatacaaggtttcaatattttatactgccccaacattggtgaggtctctcatgcgcgatgacgataagtttgtaacacgtcactcgcgcaaatcgctgcgggtccttggaagtgttggtgagcccatcaatcctagtgcctggagatggttcttcaatgtagtcggtgattcaaggtgtcccatttcagatacgtggtggcaaactgaaactggtggcttcatgataaccccattgccaggtgcttggccccagaaacctggttcagccactttccctttctttggtgttcagcctgtcatagttgatgaaaagggcaatgaaatcgaaggcgagtgtagtggttatctttgtgtcaaaggttcatggcccggggcgtttcgaactctgtttggggatcatgaaagatacgaaaccacatactttaaaccttttgccggatattatttcagtggtgatggttgcagcagagacaaggatggttactactggcttacagggagggttgatgatgttatcaacgtcagtggccatcgaatcggaactgctgaagtagaatctgctctggttttacaccctcaatgtgcagaagcagctgttgtaggcatagaacatgaggtaaaaggtcagggaatttatgcgtttgtcactcttctggaaggtgttccttacagcgaggagcttcgtaaaagcctagtactaatggtccgaaatcagattggggcttttgcagcaccggacagaatacattgggcaccagggttgccaaagacgagaagcggaaagataatgaggagaatcttgagaaagattgcttcgaggcaattagaagaactcggagatactagcacactcgcggatcctagtgtagttgatcagcttattgcacttgccgatgtgtga

SEQ ID NO: 126436 - protein, 743 aa, Arabidopsis thaliana
MKIGSPSSPILSVVSSSGSLDPKISGSLGSRILPATQRSSPSENLLLHRKMSSNSLRHVESMSQLPSGAGKISQLNAVVLGESLASEENDLVFPSKEFSGQALVSSPQQYMEMHKRSMDDPAAFWSDIASEFYWKQKWGDQVFSENLDVRKGPISIEWFKGGITNICYNCLDKNVEAGLGDKTAIHWEGNELGVDASLTYSELLQRVCQLANYLKDNGVKKGDAVVIYLPMLMELPIAMLACARIGAVHSVVFAGFSADSLAQRIVDCKPNVILTCNAVKRGPKTINLKAIVDAALDQSSKDGVSVGICLTYDNSLATTRENTKWQNGRDVWWQDVISQYPTSCEVEWVDAEDPLFLLYTSGSTGKPKGVLHTTGGYMIYTATTFKYAFDYKSTDVYWCTADCGWITGHSYVTYGPMLNGATVVVFEGAPNYPDPGRCWDIVDKYKVSIFYTAPTLVRSLMRDDDKFVTRHSRKSLRVLGSVGEPINPSAWRWFFNVVGDSRCPISDTWWQTETGGFMITPLPGAWPQKPGSATFPFFGVQPVIVDEKGNEIEGECSGYLCVKGSWPGAFRTLFGDHERYETTYFKPFAGYYFSGDGCSRDKDGYYWLTGRVDDVINVSGHRIGTAEVESALVLHPQCAEAAVVGIEHEVKGQGIYAFVTLLEGVPYSEELRKSLVLMVRNQIGAFAAPDRIHWAPGLPKTRSGKIMRRILRKIASRQLEELGDTSTLADPSVVDQLIALADV

SEQ ID NO: 126437 - DNA, 2118 bp, Oryza sativa (japonica cultivar-group); identical to SEQ ID NO: 121922
  CDS (1)..(2118)

SEQ ID NO: 126438 - protein, 705 aa, Oryza sativa (japonica cultivar-group); identical to SEQ ID NO: 121923

SEQ ID NO: 126439 - DNA, 2433 bp, Oryza sativa (japonica cultivar-group)
  CDS (1)..(2433)
atggcccagctgcatatatacgccagctgcggctgcgcacgcgcccgcgctgcgatcccgcttcccgcgcaggctcaggcatccgctgcggctctaccttgggtgatgtccgtgacttcgccgccgctgctccggcgaggagggtgggcgatgggcgcgagcgatcacgccgcggtggcggcggcggcgagcggtaacggcaagccgcgggcgaggaggccctccgccgccgcggcggccgtgctgggcgagccggtggcggcgtccgacgaccacggcctcgtccaccccagcacggacttcgcctcccaggccctcgtctcctccacgcagcaggtgatcgccgatacacgcctctctgcttttcttactgctttgccgatttcctctcggttgctgtcaattcgctctccccctcgaactggcggcgcatcgcgcgttcaaaggccgtaccttcaatttgaggcgcgcagcgatccatccatcgctggccgcagaggcgcagataaggcaagagtggcagacagcgacggcgcagtcgtagtaaaccctgggttgccagggttaaattccccattttcttgcaacaatttggtcactgtgaatttatcgattactcgatttgtgttccgggtgtttttgcacatggccggcgatcagtaccaagaaatgtaccgacgttcgatcgacgatccggccgggttctggtcggagatcgcggagacgttctactggaagcacaagtggaaccctgacgaggtctgcaccgagaatctggatgtcaccaaggggccgatcaagatcgaatggttcaaagggggcaagaccaatatatgctacaatgcggtggaccgcaacgtggaggctggcgacggcgagaagatagcgatgtactgggaagggaacgagcccggccaggacgcgaagctcacctactccgagctcctgaacaaggtttgccagctggcaaattacctgaagagcgtcggcgtcgggaagggtgatgccgtggtgatctacctgccgatgctgatggagctgcccattgcgatgctcgcgtgtgctcggattggcgctgttcattcggttgtgtttgctggcttctctgctgacgcactagcacaaagaatcattgactgcaagcctaaggttgtgattacgtgcaacgcggtgaaaaggggaaagaaactcatagctctcaaagatatagtagatgtgtcgctggctgacagtgcgaagaatggagtcgatgtaggcatttctttgacatacgaaaatcagtcggcaatgaagagagaagacacaaaatggacgtcaggcagagacgtttggtggcaggatgttgtgcccaattttccaacaaaatgtgatgtggaatgggtagatgcagaggatccattgtttcttctatatacaagtggtagcacaggaaagccaaaggctccaaactatcctgatcctagtcgttgttgggacgttgttgacaaatacggggtgacgatattttatactgcaccaacacttattcgtgcactcatgcgtgatggtaccgagtatgttactcggtattctcgtaaatctcttcgagttctaggaagcgtaggcgagccaatcaatcccactgcttggagatggttctatgatattattggtgatgcaagatgcccaatatcagacacttggtggcagactgaaactggtggttttatgatcactcctttacctggcgcttggcctctgaaacccggatctgcgacatttcctttcttcggtgtacagccagtaatagtagatgagaaagggaaggaaatggaaggagaatgcagcggatacctttgcataaagaagtcatggcctggggctttccggacactttatggagacaaggacagatatgaaaccacatacttcaagccatttgctggctattacttctccggtgatggttgcagcagaattaccggatgtttacacactggcaaatgtaatttgaatgccagggacaaagatggataccattttctgactggacgggttgacgatgttatcaatgtcagcggccaccggattgggacagcagaggttgagtctgctctggtttcacatccaaaatgcgccgaggccgctgttgttggaattgaccatgaggttaaaggccagggaatttacgctttcgtgacattggtggacggtgttccttacagcgatgagctacggaaaagcctcgttatgactgttcgcagccagattggggcgttcgcggcgccggacaagatccactgggcgccggggctcccgaagacgcggagcggcaagatcatgcggaggatcctgcggaagatcgcgtccaggcagctggacgagctcggcgacaccagcacgctcgccgaaccaggcgtcgtcgaccagctcatcgcgctcgccgatagctag

SEQ ID NO: 126440 - protein, 810 aa, Oryza sativa (japonica cultivar-group)
MAQLHIYASCGCARARAAIPLPAQAQASAAALPWVMSVTSPPLLRRGGWAMGASDHAAVAAAASGNGKPRARRPSAAAAAVLGEPVAASDDHGLVHPSTDFASQALVSSTQQVIADTRLSAFLTALPISSRLLSIRSPPRTGGASRVQRPYLQFEARSDPSIAGRRGADKARVADSDGAVVVNPGLPGLNSPFSCNNLVTVNLSITRFVFRVFLHMAGDQYQEMYRRSIDDPAGFWSEIAETFYWKHKWNPDEVCTENLDVTKGPIKIEWFKGGKTNICYNAVDRNVEAGDGEKIAMYWEGNEPGQDAKLTYSELLNKVCQLANYLKSVGVGKGDAVVIYLPMLMELPIAMLACARIGAVHSVVFAGFSADALAQRIIDCKPKVVITCNAVKRGKKLIALKDIVDVSLADSAKNGVDVGISLTYENQSAMKREDTKWTSGRDVWWQDVVPNFPTKCDVEWVDAEDPLFLLYTSGSTGKPKAPNYPDPSRCWDVVDKYGVTIFYTAPTLIRALMRDGTEYVTRYSRKSLRVLGSVGEPINPTAWRWFYDIIGDARCPISDTWWQTETGGFMITPLPGAWPLKPGSATFPFFGVQPVIVDEKGKEMEGECSGYLCIKKSWPGAFRTLYGDKDRYETTYFKPFAGYYFSGDGCSRITGCLHTGKCNLNARDKDGYHFLTGRVDDVINVSGHRIGTAEVESALVSHPKCAEAAVVGIDHEVKGQGIYAFVTLVDGVPYSDELRKSLVMTVRSQIGAFAAPDKIHWAPGLPKTRSGKIMRRILRKIASRQLDELGDTSTLAEPGVVDQLIALADS

SEQ ID NO: 126441 - DNA, 2142 bp, Saccharomyces cerevisiae; identical to SEQ ID NO: 121908
  CDS (1)..(2142)

SEQ ID NO: 126442 - protein, 713 aa, Saccharomyces cerevisiae; identical to SEQ ID NO: 121909

SEQ ID NO: 126443 - DNA, 2046 bp, Archaeoglobus fulgidus DSM 4304
  CDS (1)..(2046): transl_table=11
atggcagacccgatggaagctatgaaaaaagagtttgagaaccgcatcattccaccaagctggaaggacagggtttgggaaatagaagattacaggaagttccacgaggacaccatcaaggacaaggaatcgatagagaagtggtgggagaagtgggcaaacgagattttctggttcaggaagtgggacagggctcttgacgatagcaacccgcccttctacaggtggtttgttggcggagagacgaatctcgcttacctctgtaccgactggcagattgagcagggaaggaagaacaaggtggcgattatctgggaaggagagccggttaaggaaaatggagagccggttgaagtgagaaagctaacttactacgacctttacagggaatcgaacaggattgccgcgatgctgaaggacaagcttggagttaagaaggacgagatcctgaccttctacctgccaatgattcctgaactgccgcttttcatgcttggagtgcagagaataggggcgaagcacagcatagtgttcagcggattcagtgctcaggctctggcggttagaataatggatgctggtgcgaggtatgttgtcactgcagatggcgtttacaggagagggaaggtgctgaacctcaaagcgattgtagatgacgccgttaagatttgcgagcaggagggtcacaaggttgagaaggttatcgtggtcaagagagcaggaaatgaaatcccgtggaacgatagcagagatgtttggtttgaggacctgatggcagacattggaaagaacgtgaaggttgagtgcgagaaaatgggttctgaggacttcagcttcatcctatatacctcgggaaccacaggaaggccgaaaggagcgcagcactccgtcggaggctatgcggttcacctctacactacaatgaagctcattttcgatatcaaggatgacgacatattctggtgcactgccgacatcggctggattacgggacacagctacattgtttacggtccactgatgtgcggtgcgacgaccatgatgtatgaaggcgccccagacttccctgacgtgagcagatgggcagcgatgattgagcgctacggagtgacgatattctacaccgccccgacggcaataagaatgctcatgcgcttccctgaggagaactacaccaagtacgacatgtcaacgctgagaataatccacagcgttggagagccgattaaccccgaagcttggagatggtactacagggttttcggtagagaagatgttgtctgctcaagcacatggtggatgacggaaactgggggtatgctgacggaccacttcccaggattggggaagataattccacttaagccgggcacaaatggctatccaattcctggagttaggatggaggttcttgatgatgagggcaattctgtgaaaccgggagaaagaggctacctcgttatctccacaccatggcccggaatgctcatgacgctgttcaaagacccaaacaggttcattgacgtttacttcggcaagtacaagagcaagggttggtattactacacaggcgactttgccatgttcgatgaggacggctacgtctgggttcttggaagggctgatgatatactgaaggttgctgggcacagaattggaactgctgaaattgaatcggcaatggtctctcatccggatgttgctgaagcagcctgcgttggcaaatccgacccggtaaagggagagattccgataatctacgtggtgctgagagaaggtgttgaaccctcaccggatatggtgaacgagctcaagaagcacctcagagccactctcggccctgttgttgccagcgatgctgtgataaccttcgttaacactctacccaaaacaagaagcggtaaaatcatgaggaggctgcttagggctgttgcagagggcaaagagctcggtgacgtcacaacccttgagagcgaggttgcggttgaggaggcgaagaaggcctacgagatggttaaggcggcccttgaggggtccaaatcctaa

SEQ ID NO: 126444 - protein, 681 aa, Archaeoglobus fulgidus DSM 4304
MADPMEAMKKEFENRIIPPSWKDRVWEIEDYRKFHEDTIKDKESIEKWWEKWANEIFWFRKWDRALDDSNPPFYRWFVGGETNLAYLCTDWQIEQGRKNKVAIIWEGEPVKENGEPVEVRKLTYYDLYRESNRIAAMLKDKLGVKKDEILTFYLPMIPELPLFMLGVQRIGAKHSIVFSGFSAQALAVRIMDAGARYVVTADGVYRRGKVLNLKAIVDDAVKICEQEGHKVEKVIVVKRAGNEIPWNDSRDVWFEDLMADIGKNVKVECEKMGSEDFSFILYTSGTTGRPKGAQHSVGGYAVHLYTTMKLIFDIKDDDIFWCTADIGWITGHSYIVYGPLMCGATTMMYEGAPDFPDVSRWAAMIERYGVTIFYTAPTAIRMLMRFPEENYTKYDMSTLRIIHSVGEPINPEAWRWYYRVFGREDVVCSSTWWMTETGGMLTDHFPGLGKIIPLKPGTNGYPIPGVRMEVLDDEGNSVKPGERGYLVISTPWPGMLMTLFKDPNRFIDVYFGKYKSKGWYYYTGDFAMFDEDGYVWVLGRADDILKVAGHRIGTAEIESAMVSHPDVAEAACVGKSDPVKGEIPIIYVVLREGVEPSPDMVNELKKHLRATLGPVVASDAVITFVNTLPKTRSGKIMRRLLRAVAEGKELGDVTTLESEVAVEEAKKAYEMVKAALEGSKS

SEQ ID NO: 126445 - DNA, 1929 bp, Mesorhizobium loti MAFF303099
  CDS (1)..(1929): transl_table=11
atggttcctgggaggttgccgatggcttcacgctatcacgaggtctatgacggctggaaacgcgacccggaaaaattctgggcggacgccgccggcgccatcgactggtattcgccctgggacaaggtgttcgacgctgacgccggcgtctatggccgctggtttaccggcgcgacatgcaacacctgttacaacgccatcgaccggcatgtcgcccgcgggcgcgccgaccagatcgcactgatccatgacagcgccatcaccggaacggtgaaaaaattcacctatgccgaactcaagcgcgaggtggtggcgctgacctcggtgctgaagaaccggggcatcggcaagggcgaccgcgtcatcatctacatgccgatggtggcggaggcggccatcgccatgcttgcctgcgcccgcatcggcgccgtgcattcggtcgtcttcggcggctttgcctcgcatgaactggccacccgtatcgacgacgccaagccgaagctgatcatctcggcctcctgcggcctggagccgggccggatcgttgcctacaagccgctgctcgacaaggcgatcgagatgtccggccacaagccggacgcctgcctgatcctgcagcgcgaccagctgcgctgcgagctgaaggagcatttcgacatcgactatgccgacgccgtcgcgcgcgaacgggcggccggcgccaatgtcgactgcgtgccggtgctggccaccgacccgctctacatcatctacacgtcaggcacgaccggccagccgaagggcatcgtgcgtgacaatggcggccacatggtcgcgctgaaatggacgatggaaaacgagttcggcgtcaagccgggcgaagtgttctgggcagcgtccgatgtcggctgggtcgtcggccattcctacatcgtctacggaccgctgctgcatggcagcaccagcgtcctgttcgaaggcaagccgatcggcacgcccgacgccggcacctactggcgggtcatctcggaccatggcgtggtcgcgctgttcaccgcgccgacggcgttccgggcgatcaagggccaggaccccaagggcgagttcgttcccagatacgatctgtcgaaattccgcacgctgttcctcgccggcgagcgcgccgatcccgagaccatcaaatgggcggagcagaagcttaacgtgccggtgatcgaccactggtggcagaccgagaccggttcgccgatgaccatcaatcccgcgggacttggcctgctgccggtgaaatacggttcgcccggcgtaccgatgccgggctacgacatccgcgtgctggacgatgccggccacgaagtgccgcgcggcacactcggcaatgtcgtggtcaagctgccactgccggccggctgcctgccgacgctgtggaacgccgacgcccgcttccgccaagcctatctcgacgagtttcccggcttctacaagacggcggacgccggcatgatcgacgaggacggctatctctacgtgatggcccgcaccgacgacatcatcaatgtcgccggccaccggctgtcgaccggcgccatggaagaggtgctggccgctcatcccgatgtcgccgaatgcgccgtcgtcggcatcgccgatgctatgaaggggcaaattccgctcggcttcgtggtgctgaacgccggtgtcgcgcgcggcggcgacgtcatcgagaaggaggtcgtggcactggtgcgcgagcgcatcgggccggtcgccgctttcaaaacggtggtgacgatcaaacgcctgcccaagacgcggtcgggaaagattctgcgcggcaccatgcagaagatcgccgacaaggaggcgtggacgatgccggcgacgatagacgacccggccatcctcgacgagatcaccgcagcgatgaaggcgcgcgggatcgggatttga

SEQ ID NO: 126446 - protein, 642 aa, Mesorhizobium loti MAFF303099
MVPGRLPMASRYHEVYDGWKRDPEKFWADAAGAIDWYSPWDKVFDADAGVYGRWFTGATCNTCYNAIDRHVARGRADQIALIHDSAITGTVKKFTYAELKREVVALTSVLKNRGIGKGDRVIIYMPMVAEAAIAMLACARIGAVHSVVFGGFASHELATRIDDAKPKLIISASCGLEPGRIVAYKPLLDKAIEMSGHKPDACLILQRDQLRCELKEHFDIDYADAVARERAAGANVDCVPVLATDPLYIIYTSGTTGQPKGIVRDNGGHMVALKWTMENEFGVKPGEVFWAASDVGWVVGHSYIVYGPLLHGSTSVLFEGKPIGTPDAGTYWRVISDHGVVALFTAPTAFRAIKGQDPKGEFVPRYDLSKFRTLFLAGERADPETIKWAEQKLNVPVIDHWWQTETGSPMTINPAGLGLLPVKYGSPGVPMPGYDIRVLDDAGHEVPRGTLGNVVVKLPLPAGCLPTLWNADARFRQAYLDEFPGFYKTADAGMIDEDGYLYVMARTDDIINVAGHRLSTGAMEEVLAAHPDVAECAVVGIADAMKGQIPLGFVVLNAGVARGGDVIEKEVVALVRERIGPVAAFKTVVTIKRLPKTRSGKILRGTMQKIADKEAWTMPATIDDPAILDEITAAMKARGIGI

SEQ ID NO: 126447 - DNA, 1953 bp, Thermoplasma volcanium GSS1
  CDS (1)..(1953): transl_table=11
atggacatagaaggagaaaagtccgttcttccgacagaagaggtgtatcaccctgatatgaatttgtacaagagggcttacgatgattcgttcaaaaatatggaggctttttggtcgtttaatgctgaaatactaacttggtacaaaaaatgggatagggtgctagatgatacaaaaaagccattctataggtggtttgtaggcggtaaattaaacatgtcttacaactgcgttgacagacacatagagcaacacagaaggaataaggcggcatatatatgggttggtgagaaaggagatgaaaagatagtcacttacgatggattgtttcgcaggataaacaacttagctaaagctttaataaacttaggcataaaaaagggtgacaggattgtcctgtacatgccaatgataatcgaggcaccagttgctatgcttgccgcggctaggattggtgccgttttttctttcgtattcgccggttttggagctggtgctctggcagagaggataaatgattcaaaagctgtgctactcataaccgcagatggaagtttcagaaatggaaaggtggttgaactaaagaaaatagccgatgaagctctggaaatgacatctacgattagaaatgtcatagttgtaaagcacgcaggcaacaatgttgatatgaacgaagacagagacatatggtatcacgaggtagtaggggattcttacacatacgtagagccggtccaaatggatgccaacgatccgttgtttatactctacacgtcaggcacaacagggaagccaaaaggagctgtgcatagcacgggagggtatggtgtttgggttgcgaatactttgaagtgggcctttaatccagatgaagacgatagatggtggtgtgctgcggacatcggttggattacaggccacagttatatcgtatttgcacccttgatattaggtcttaccagcataatgtatgaaggatcaataacttatccggaacccgatagagtatgggaaattatagaaaaatacagaataaacatactctacacatcccctacagctataaggatgctcatgaagtttggcgataaatacccgaagaggcatgacttatcaacgctaaaggttctcggtaccgttggcgaacctataaacccttcagcatggagatggtattacgaaacgatagggaactctaagtgccccataatagatacgtactggcaaacagagactggaggctttatgattgctccacaaagggcgctagggcttcctcctttaaaacctggatcagcaacattcccgcttccaggcgtagatccagcgatactcaacgataggggtgaagaagttaaggataatgagaaagggtacatagtgtttagaaggccttggccaggaatgctgatgacagtaaacaatgacgatgagagatacgtgaagacgtatttttccaagttctatggctattacttttgcggagattacgccataaaggattccgacggttattactggctcctaggaagggctgatgaagtcctaaacgtagcaggacatcgcctcggtacaatagaagttgaagacgcattagtttcaacagggcttgccgttgaagcagcagcttttggtaaacctgatcctataaagggggaagttatagtggccttcattgtacccaaacaaattcaggctgaccgaagggaattaatttctgaaattagaaagcgaattagatctgatttagggccaatttacgtaccagacgagatacatattgtaaaactgcttccaaaaactagaagcggcaagataatgaggagagttgtaaaggctgttgcactggatcagataccaggagatctaaccactcttgaggactcaagctctgtcgatgagattagatcagcaatagaggcctttaggaaggaggcaaagggaggggagtga

SEQ ID NO: 126448 - protein, 650 aa, Thermoplasma volcanium GSS1
MDIEGEKSVLPTEEVYHPDMNLYKRAYDDSFKNMEAFWSFNAEILTWYKKWDRVLDDTKKPFYRWFVGGKLNMSYNCVDRHIEQHRRNKAAYIWVGEKGDEKIVTYDGLFRRINNLAKALINLGIKKGDRIVLYMPMIIEAPVAMLAAARIGAVFSFVFAGFGAGALAERINDSKAVLLITADGSFRNGKVVELKKIADEALEMTSTIRNVIVVKHAGNNVDMNEDRDIWYHEVVGDSYTYVEPVQMDANDPLFILYTSGTTGKPKGAVHSTGGYGVWVANTLKWAFNPDEDDRWWCAADIGWITGHSYIVFAPLILGLTSIMYEGSITYPEPDRVWEIIEKYRINILYTSPTAIRMLMKFGDKYPKRHDLSTLKVLGTVGEPINPSAWRWYYETIGNSKCPIIDTYWQTETGGFMIAPQRALGLPPLKPGSATFPLPGVDPAILNDRGEEVKDNEKGYIVFRRPWPGMLMTVNNDDERYVKTYFSKFYGYYFCGDYAIKDSDGYYWLLGRADEVLNVAGHRLGTIEVEDALVSTGLAVEAAAFGKPDPIKGEVIVAFIVPKQIQADRRELISEIRKRIRSDLGPIYVPDEIHIVKLLPKTRSGKIMRRVVKAVALDQIPGDLTTLEDSSSVDEIRSAIEAFRKEAKGGE

SEQ ID NO: 126449 - DNA, 1971 bp, Aeropyrum pernix K1
  CDS (1)..(1971): transl_table=11
ttggaaaagaagatatggtatccgccccgcgatatagtggaccagagtaatgtaaagcttttcatggataagcacggtttcaagagctatgaggagcttgtcaggaggagcagtgaggacctcaaatggttctggggtaacctgcctgaatggctcggggtagagtggttcagagagcctaaagccgtggtggacctgagcagaggtgtggagtgggcccagtggtaccggggaggcctcctcaacgcggcgtacaacgtcgtagaccgtatagtcaagatggggtacgggcatagggaggccttcacttgggtaggcgaggatggggaggttaggaggtacacgtacctacagctgaaggacgaggttgacaggatggccaagctcctctcccaggactatgggctgggagtcggcgatgtggttgcgatctacgcccccatgatgcctgagagcatagcggccatgcttgcggccatgaaggttggggctgtggcttcaccgatattctccggcttcgccccgccagccgttgctgagaggctcaagctgggggaggcgagggtgctcgttaccgtagacgggtatctgaggagggggaggaggatagccctaaaggagcaggccgaccaggccgtgaagcttgcgggcggggcggtcgagcacgtcattgtggtcaggaggctcgggatagacgtcccatgggttgagggcagggatgagtggtatgacagggccatagcgggtaaggctggctctgcggagcccgaggagctagacccggagcatccagccctcctcctcttcacaagcggcacaaccgggaggcccaagggcgctgtgataagccatgcaggcgccatactccagcccgggaaggagcactacttcaacctcgacatacacccagcctggaggggcggggaggacaggctatggtggataactgatataggctggatgatggggccatggcaggtcctcggctcccagctcctgggcgccagccaccttatggcggagggggccatagactatccttataagtcgagggtttggaggctaatacaggagcacagggtaacccacttcggctttgcggcaacagtggccaggatgctcagggcagtggcgagcgacacggtggaggattacgacctatcaagcattagggccttcggaaacacgggggagcctatagaccatgccacctggatgtgggtcatggagaagttgggaggctggaggaggcccctgataaatctcagcggcgggacagaggtgttcggctgcatactcctcccgagccccgttgtccccctcaagccgacgaccctctgggggcccgctctgggtgttgatgctgacgttttcgacgatgagggtaggcctgtgaggggcgagccgggatacttggttgttaagaagcccttccccagcatgaccagggggctgtggaaagaccctgagaggtatataaagacgtactggtcccgcttcccgggtgtatggtaccacggcgactacgccctagtcgacgaggacgggttctggtacatactggggagggcggacgacgtgataaaagtggcggggaagaggattggcagcgccgagcttgagagcgtgctcacacagctacccgaagtggcggaggcggcatgcataggggtgccccacccgataaagggcgaggtcatagcctgcttcctggtgcccaagggcggttatgacgcggaggagctggcctcgaaggccaggaaggccgtggtggataggttcggcaagcccttcgccccggagcacgtggttatagtgagcgagctcccaaagacgaggagcggcaagataactaggagggtgctcagggatctagcccgcggtgtggagccgaaggagctgagtgttctggagaatcctgaggccgtcgaaaagcttagggacattataaagaggataggagggggctag

SEQ ID NO: 126450 - protein, 656 aa, Aeropyrum pernix K1
MEKKIWYPPRDIVDQSNVKLFMDKHGFKSYEELVRRSSEDLKWFWGNLPEWLGVEWFREPKAVVDLSRGVEWAQWYRGGLLNAAYNVVDRIVKMGYGHREAFTWVGEDGEVRRYTYLQLKDEVDRMAKLLSQDYGLGVGDVVAIYAPMMPESIAAMLAAMKVGAVASPIFSGFAPPAVAERLKLGEARVLVTVDGYLRRGRRIALKEQADQAVKLAGGAVEHVIVVRRLGIDVPWVEGRDEWYDRAIAGKAGSAEPEELDPEHPALLLFTSGTTGRPKGAVISHAGAILQPGKEHYFNLDIHPAWRGGEDRLWWITDIGWMMGPWQVLGSQLLGASHLMAEGAIDYPYKSRVWRLIQEHRVTHFGFAATVARMLRAVASDTVEDYDLSSIRAFGNTGEPIDHATWMWVMEKLGGWRRPLINLSGGTEVFGCILLPSPVVPLKPTTLWGPALGVDADVFDDEGRPVRGEPGYLVVKKPFPSMTRGLWKDPERYIKTYWSRFPGVWYHGDYALVDEDGFWYILGRADDVIKVAGKRIGSAELESVLTQLPEVAEAACIGVPHPIKGEVIACFLVPKGGYDAEELASKARKAVVDRFGKPFAPEHVVIVSELPKTRSGKITRRVLRDLARGVEPKELSVLENPEAVEKLRDIIKRIGGG

SEQ ID NO: 126451 - DNA, 2082 bp, Arabidopsis thaliana; identical to SEQ ID NO: 121920
  CDS (1)..(2082)

SEQ ID NO: 126452 - protein, 693 aa, Arabidopsis thaliana; identical to SEQ ID NO: 121921

SEQ ID NO: 126453 - DNA, 1947 bp, Bacillus halodurans C-125
  CDS (1)..(1947): transl_table=11
gtgacagcgcctgtctggtttccatcggatgcttacaaagagcaaacgagattgtatcaatggatgaaaatgctcggctattcgtcctatgacgatttttatcaacgttcgatcgacgacattgcttggttttggcgggaagtggagcgggagctagacattccatggatgaagccttatgatcatgtccttgcaatggagaaagggcctgcctggcctgaatggtttatcggtggcaaattaaatgtgacggaagcagccgtggaaaaatgggcgaatgatccaaagaccgcaaataaaacggcgatcgtctgggaaggggaagaaggaaagacttccttgctatcgtttgcagcccttgatgaggcggtgaaacgtgcagcccatggcttaaaacagcatggagtcaaaaaaggagatgtgttcgccttatacatgccgatgattcctgagacggtgattgccatgctggctgttgccaagctcggagcaatcttcacgccgattttttctggttatggtgcagaggcgatcgctacgagactacgcgcttctggagcgaaatggctcataacagtagatggctgttaccggcgaggcaagctgattgatatgaggcaagaggcggagaaagcacttgctgacgcgccgaatgtccaatcaattgtcgttgtggagcgggtcggcacgttaacatcttatggtgccaacgatatacgctggactgagcttatgacctatgctccgctccaagaaacggcagcgatgaattcggcagatcccttaatgcttatttatacttccgggacaactggacggccaaaaggagcggttcatacgcatagtggcttcccaattaaagcggcgttcgatgcaggaattggcatggatttacgaaaagaggacacgcttttttggctgacagatatgggatggatgatgggcccgtttcttgtgtttgctggtttgatcaatggggcaaccatcgtcctttacgacggtgctcctgactatccgaatcatgaccgactttggcagcttgtcgaacaaaagcaagtaagtcatttaggtatttctccgacattaattcgcgccatgatgaagtacgggacggaacgaatggctgagcatgatttgtcttgcttaaaggtgattggctctacgggggagccgtggaaccctgagccatggcattggctgtttgaacacgtcggaaataaacaggtacctatctttaattactccggagggacggaaatatcaggtgggattttagggaatgtactcgttcgaccgattggtccgataacgtttaactcagcgattccagggatggcagctgctgtttataatgaaagtggtgaaaaagtaaccgcggaagtgggggagcttgtcctaacaaagccttgggtcgggatgactaacggcttttggcaggagcctgaacggtttctcgaaacgtactggtcacgttggagcaatacgtgggttcatggagattgggtcactcttgacgcggatggattttggacgataaccggtcgatcagatgatattttaaatgtagctggcaaacgacttggaccggcagaagttgagtctgtcctagtcggtcatcaggccgtcattgaggctggaaccattggggtaccagatgatgtgaagggtgaagtgccaatctgttttgttgtcattgccccaagtttttctgagagcgactcattaagacacgaattgatccagcttgtcgggacaaagcttggaaaagcattgaagccaaaggcagtgtattttgtttccgatttaccgaagacacgaaatgcaaaggtgatgcgccgtgcgatacgggcggcctttttgcaaaaggaggcaggagatttatcctcacttgaaaaccctcatgtattaaaagaaatcgaaaggttaggaacaaagcaatcctcatag

SEQ ID NO: 126454 - protein, 648 aa, Bacillus halodurans C-125
MTAPVWFPSDAYKEQTRLYQWMKMLGYSSYDDFYQRSIDDIAWFWREVERELDIPWMKPYDHVLAMEKGPAWPEWFIGGKLNVTEAAVEKWANDPKTANKTAIVWEGEEGKTSLLSFAALDEAVKRAAHGLKQHGVKKGDVFALYMPMIPETVIAMLAVAKLGAIFTPIFSGYGAEAIATRLRASGAKWLITVDGCYRRGKLIDMRQEAEKALADAPNVQSIVVVERVGTLTSYGANDIRWTELMTYAPLQETAAMNSADPLMLIYTSGTTGRPKGAVHTHSGFPIKAAFDAGIGMDLRKEDTLFWLTDMGWMMGPFLVFAGLINGATIVLYDGAPDYPNHDRLWQLVEQKQVSHLGISPTLIRAMMKYGTERMAEHDLSCLKVIGSTGEPWNPEPWHWLFEHVGNKQVPIFNYSGGTEISGGILGNVLVRPIGPITFNSAIPGMAAAVYNESGEKVTAEVGELVLTKPWVGMTNGFWQEPERFLETYWSRWSNTWVHGDWVTLDADGFWTITGRSDDILNVAGKRLGPAEVESVLVGHQAVIEAGTIGVPDDVKGEVPICFVVIAPSFSESDSLRHELIQLVGTKLGKALKPKAVYFVSDLPKTRNAKVMRRAIRAAFLQKEAGDLSSLENPHVLKEIERLGTKQSS

SEQ ID NO: 126455 - DNA, 1887 bp, Escherichia coli O157:H7 EDL933
  CDS (1)..(1887): transl_table=11
atgtcttttagcgaattttatcagcgttcgattaacgaaccggagcagttctgggccgagcaggcccggcgtattgactggcagacgccctttacgcaaacgctcgatcacagcaatccgccgtttgcccgttggttttgtgaaggccgaaccaacttgtgccacaacgctatcgaccgctggctggagaaacaaccagaggcgctggcgctgattgccgtctcttcggaaacagaagaagagcgcacctttacctttcgccagcttcatgacgaagtaaacgcggtggcgtcaatgctgcgctcgctgggcgtgcagcgtggcgatcgggtgctggtgtatatgccgatgattgccgaagcgcatattactctgctggcctgcgcgcgcattggcgctattcactcggtggtgtttgggggatttgcctcgcacagcgtggcggcgcgaattgatgatgctaaaccggtgctgattgtctcggctgatgccggagcgcgcggtggcaaaatcattccctataaaaaattgctcgacgatgcgataagtcaggcgcagcaccagccacgccatgttttgctggtggatcgcgggctggcgaaaatggcacgcgtcagcgggcgggatgtcgatttcgcgtcgttgcgccatcaacacatcggcgcgcgggtaccggtggcgtggctggaatccaacgaaacctcctgcattctctacacctccggcacgaccggcaaacctaaaggcgtgcagcgtgacgttggcggatatgcggtggcgctggcgacctcgatggacaccatttttggcggcaaagcgggcggtgtgttcttttgtgcttcggatatcggctgggtggtggggcattcgtatatcgtctacgcgccgctgctggcggggatggcgactatcgtttacgaaggattaccgacctggccggactgcggcgtgtggtggaaaatcgtcgagaaatatcaggttagccggatgttctcagcgccgaccgccattcgcgtgctgaaaaaattccctaccgctgaaattcgcaaacacgatctctcgtcgctggaagtgctctatctggctggagaaccgctggacgagccgaccgccagttgggtgagcaatacgctggatgtgccggtcatcgacaactactggcagaccgaatccggctggccgattatggcgattgctcgcggtctggacgacaggccgacgcgtctgggaagccccggcgtgccgatgtatggctataacgtgcagttgcttaatgaagtcaccggcgaaccgtgtggcgtcaacgagaaagggatgctggtggtggaagggccgctgccgccggggtgtattcagaccatctggggcgacgacgaccgctttgtgaagacgtactggtcgctgttttcccgcccggtgtacgccacctttgactggggcatccgtgacgctgacggttatcactttattctcgggcgcactgacgatgtgattaacgttgccgggcatcggctggggacgcgcgagattgaagagagtatctccagtcatccgggcgttgccgaagtggcggtggttggggtgaaagatgcgctgaaagggcaggtggcggtggcgtttgtcattccgaaagagagcgacagtctggaagatcgtgatgtggcgcattcgcaagagaaggcgattatggcgctggtggacagccagattggcaactttggccgcccggcgcacgtctggtttgtctcgcaattgccaaaaacgcgatccggaaaaatgctgcgccgcacgatccaggcgatttgcgaaggacgcgatcctggggatctgacgaccattgatgatcctgcgtcgttgaatcagatccgccaggcgatggaagagtaa

SEQ ID NO: 126456 - protein, 628 aa, Escherichia coli O157:H7 EDL933
MSFSEFYQRSINEPEQFWAEQARRIDWQTPFTQTLDHSNPPFARWFCEGRTNLCHNAIDRWLEKQPEALALIAVSSETEEERTFTFRQLHDEVNAVASMLRSLGVQRGDRVLVYMPMIAEAHITLLACARIGAIHSVVFGGFASHSVAARIDDAKPVLIVSADAGARGGKIIPYKKLLDDAISQAQHQPRHVLLVDRGLAKMARVSGRDVDFASLRHQHIGARVPVAWLESNETSCILYTSGTTGKPKGVQRDVGGYAVALATSMDTIFGGKAGGVFFCASDIGWVVGHSYIVYAPLLAGMATIVYEGLPTWPDCGVWWKIVEKYQVSRMFSAPTAIRVLKKFPTAEIRKHDLSSLEVLYLAGEPLDEPTASWVSNTLDVPVIDNYWQTESGWPIMAIARGLDDRPTRLGSPGVPMYGYNVQLLNEVTGEPCGVNEKGMLVVEGPLPPGCIQTIWGDDDRFVKTYWSLFSRPVYATFDWGIRDADGYHFILGRTDDVINVAGHRLGTREIEESISSHPGVAEVAVVGVKDALKGQVAVAFVIPKESDSLEDRDVAHSQEKAIMALVDSQIGNFGRPAHVWFVSQLPKTRSGKMLRRTIQAICEGRDPGDLTTIDDPASLNQIRQAMEE

SEQ ID NO: 126457 - DNA, 1929 bp, Deinococcus radiodurans R1
  CDS (1)..(1929): transl_table=11
atggaccccgcactcttgacgactcccctcgtttcacccaccgacgccctgaaaaagaccgcccccgtcacgcccgagcgggcgcagcagctccgcgacatgcccgcgggcgactactggctgagcgtcgccagcgaactcacctgggacgtgccgccgaccaccgccctcgaaggcaccttcggggacttccagtatttccccggcgcgaagggcaacgtcagcgtcaactgcctcgaccgtcaccccaaaaaccgcgtcgcgctgtactacgagcgcgaagatggcctcaaggaaacgtggagctacggcgacctgaccgacgccaccgcccggttcgcggcggcattgcaagacctcggcgtggacaagggcgaccgggtggcgatttatctgtccaacgtgcccgaagcgtttatcgccattcatgcctgctaccgcatcggggcgatctactcggtcatcttcgcgggcttttcggcgtcggcggtgcgcgaccggctcaccgacgcgcagcccaaagtcgtggtttgcaccgacggcacgctgcggcgcgggcgcaacattccgctcaaggcgacgctcgacgaggcgcttgaagggttggagaagcccaccgtcatcgtcgcccgtcgcctggaccccttcctgccgctgggcgagaacgaactcgatttcgccgagctgctggagaaaacgacccgccgcgccgcgcccgtttcgctcgacgccaacgaccccggcttcatcatctacacctcgggcaccacgagcaaacccaaggggctggttcacagcggcatcggctttctgacggggacgtatgccaacgtgaagtgggcgctcaacctgcaacccgacgacgtgtactggtgcaccgccgacgtgggctggctgaccttcccgatttttgcgctggtgggcgggctggcgcacggggcgacgcacgtgatttacgagggcagcatcgacacgccgacgcccgagcggccctaccagatcatcgagaggtaccgcgccgacaaggtgtttaccgcgcccaccgccctgcggatgctgcggcgctcgggcgacgaagcgctggcacggtacgacctgagcccgctgcaactcgtcgcgctggtgggcgagccgcttgaccccgaaacctggcactggacgcacgacgtgctcggcggcggcaggctcttcgtcaacaacacctacggtcagaccgaaaccggcaccgcgtgggcgagcagcatggtgggcctcaccgaaggccgccccggctcgtgcgggcacccgctgcccggctaccgcgccgccgtggtgcacgaggacggcacgccctgcggccccaacgaactcggctcgctgacgctgaccgagcctttcccctgcctggcccgcaccgtgtggggcgaccatgaccgctacgtggagacctacctgtccgaatttcccggcaagtacgccgccgccgacgccgccctgctcgacagcgacgggcaactgtgggtcacgggccgcctggacgacgtgatgaacgtggccgggcaccgcctcggcacgatggagatggaagccgcgctgctcacccaccccgccgtcagcgaagccgccgtggtggcgatgcccgacgacatcaagggcgcggtgccggtggccttcgtggtgccgcgcgcgggcattcgcctcgacaccgacctcacctggctagaaaacgaacttgccgacgcggtggtgtccggtgtgggcgccatcgcccgtccgggccgcgtcgtcgtgacccccaccgtcccgcgcacccgcagcggcaaaatcatgcgccggctcctgcgcgacctgctgctgaccggcgaagtgaagggcgacctgacgagcctggaaaaccccgacgccctcgaaacggtgcgcgagcggctgggcggggcggcagcgggctga

SEQ ID NO: 126458 - protein, 642 aa, Deinococcus radiodurans R1
MDPALLTTPLVSPTDALKKTAPVTPERAQQLRDMPAGDYWLSVASELTWDVPPTTALEGTFGDFQYFPGAKGNVSVNCLDRHPKNRVALYYEREDGLKETWSYGDLTDATARFAAALQDLGVDKGDRVAIYLSNVPEAFIAIHACYRIGAIYSVIFAGFSASAVRDRLTDAQPKVVVCTDGTLRRGRNIPLKATLDEALEGLEKPTVIVARRLDPFLPLGENELDFAELLEKTTRRAAPVSLDANDPGFIIYTSGTTSKPKGLVHSGIGFLTGTYANVKWALNLQPDDVYWCTADVGWLTFPIFALVGGLAHGATHVIYEGSIDTPTPERPYQIIERYRADKVFTAPTALRMLRRSGDEALARYDLSPLQLVALVGEPLDPETWHWTHDVLGGGRLFVNNTYGQTETGTAWASSMVGLTEGRPGSCGHPLPGYRAAVVHEDGTPCGPNELGSLTLTEPFPCLARTVWGDHDRYVETYLSEFPGKYAAADAALLDSDGQLWVTGRLDDVMNVAGHRLGTMEMEAALLTHPAVSEAAVVAMPDDIKGAVPVAFVVPRAGIRLDTDLTWLENELADAVVSGVGAIARPGRVVVTPTVPRTRSGKIMRRLLRDLLLTGEVKGDLTSLENPDALETVRERLGGAAAG

SEQ ID NO: 126459 - DNA, 2001 bp, Sulfolobus solfataricus P2
  CDS (1)..(2001): transl_table=11
atgtcagtaacgtgggctctaccttttgatcaaaagataaacccaaaactgaatttaaataggctagtaagtataactacgtataaagagattcacagccaaacggtaaaagattacaaacaattttgggcatctgtagcctcggaaattgactggttcaaaccatgggagaaaacactagacgatagtaatcctccattctataagtggttcgtaggtggagagcttaacgcctcttatctaactgtagataggcacgttaagagctggaggaagaataaggttgccataatatgggaaggagaaccagtggacgagaagggaaacccaaaggaggttaggaagttaacatattacgatctatatagggaagttaatagagtagcctatctcttgaaggagaaatacgggttaaagaaaggtgatgcaatagcgatttaccttccaatgataccggaattaccaatattcatgttagctgctgctaggatcggagtagtctttacggtggtgttctcaggatttagcgctgacgcattggcaagtaggattaatgacgccgaagccaagttactaattaccgcagatggtggatggagaaggggtaaagttgttgacttaaagggaattgtagataaggctttggagaagaccccaacaataaaggatgtaatagtagttagaaggataggtaataaggtcaacatggttgaaggtagggataagtactttgatgaagtaatcaaggacattccacaaaatgtttacgttgaaccagaaaggatgaaatctgaagacccgttatatatactctacacctctggaaccactggaaaacctaagggtatagtccacgatattggagggtatatgacattattacacgctacaatgaagtgggtattcgatataagggatgacgacatttactggtgtaccgcagatataggatgggttactggacactcttacattgtgtttggaccattaatggaaggagcaactgaaataatgtatgaaggagccttggattatccacaaccggataggtgggtatcgataattgaaaggtatgggatcacaatcctttatacctcacccactgcaattagaagcttcatgaaatatggtgataattgggttaaggctcacattacctccactgttaggctaatgcattctgtaggtgaaccaataaatccggaagcttgggagtggctatggaaattagtcggtagagaggaggtaccatttggaagcacttggtggatgactgagactggaggtattctaatatctcatttaccaggattgtatcttgtgccaatgaaacctgggacaaatggcccaccaatattgggaattgagccagatgtagttaatgaagatgggaaacaagttaaccttgaggaaagaggatatcttgttataaagaatccgtggcctggaatgccattaacaatttacaaggatcctgaaagatacgtgaaggtgtattggagtagattccctggaatgttctatgttggtgattacgctgttaaggacaaggatggatacttctggatattagggagggctgatgaagttatcaaggtagctgggcataggctaggtacatatgagttagaatcagctttaattgagcatcctgcagttgcggaagcagcggtaattggagtcccagacccagttaagggagaggtgccttatgcgtttgtaattttgaggcaaggttatacacctaatacgcagctttcacaagagatactgaagacggtaagagataaggtgggacctatagctactatagataagatattcttcgtgggtaagttgcctaaaacgagaagtggaaagataatgagaagagttgtaagggctgttgcaactagggcagaagtgggagatataactacattagaggatgaggcttctgtagaggagattaaaaaagctttagaggagtttaaggcagagtttgaaaagatcaacaaataa

SEQ ID NO: 126460 - protein, 666 aa, Sulfolobus solfataricus P2
MSVTWALPFDQKINPKLNLNRLVSITTYKEIHSQTVKDYKQFWASVASEIDWFKPWEKTLDDSNPPFYKWFVGGELNASYLTVDRHVKSWRKNKVAIIWEGEPVDEKGNPKEVRKLTYYDLYREVNRVAYLLKEKYGLKKGDAIAIYLPMIPELPIFMLAAARIGVVFTVVFSGFSADALASRINDAEAKLLITADGGWRRGKVVDLKGIVDKALEKTPTIKDVIVVRRIGNKVNMVEGRDKYFDEVIKDIPQNVYVEPERMKSEDPLYILYTSGTTGKPKGIVHDIGGYMTLLHATMKWVFDIRDDDIYWCTADIGWVTGHSYIVFGPLMEGATEIMYEGALDYPQPDRWVSIIERYGITILYTSPTAIRSFMKYGDNWVKAHITSTVRLMHSVGEPINPEAWEWLWKLVGREEVPFGSTWWMTETGGILISHLPGLYLVPMKPGTNGPPILGIEPDVVNEDGKQVNLEERGYLVIKNPWPGMPLTIYKDPERYVKVYWSRFPGMFYVGDYAVKDKDGYFWILGRADEVIKVAGHRLGTYELESALIEHPAVAEAAVIGVPDPVKGEVPYAFVILRQGYTPNTQLSQEILKTVRDKVGPIATIDKIFFVGKLPKTRSGKIMRRVVRAVATRAEVGDITTLEDEASVEEIKKALEEFKAEFEKINK

SEQ ID NO: 126461 - DNA, 1974 bp, Agrobacterium tumefaciens str. C58; identical to SEQ ID NO: 121926
  CDS (1)..(1974): transl_table=11

SEQ ID NO: 126462 - protein, 657 aa, Agrobacterium tumefaciens str. C58; identical to SEQ ID NO: 121927

SEQ ID NO: 126463 - DNA, 1986 bp, Sulfolobus tokodaii str. 7
  CDS (1)..(1986): transl_table=11
atgtcagtaaactggtctcttccatttgaagagaaaataataccaagtaagtatcagagcaaagtaatttcaccatcaatatataaagagttacacaagatagctactgaaaattacaaggagttttgggcatcaattgcctctcaattagagtggtttaagccttgggaaaaggtacttgatgattctaatccaccattttacaagtggtttgttagtggtgaaataaatgcttcatatttagctgtggatagacatgctaagagttggagaaaaaataaagtagcaataatttgggaaggagaaccggcagaaggtgataagccaaaggaggtaagatatattacatatggtgaattatatagagaagtaaatagagtggcttatattcttaaggaagtttatgggttaaagaagggtgatgctatatcattatatttaccaatgatacccgaattacctatatttatgttagccgctgctagattggggataatatttagtgtagtgttttctggatttagtgcccaagcattagcagatagaattaatgatgctagagctaaattattagtaacggctgatggaggttggagaagaggtaaaatagttccactaaaagatatagcagataaggcattagaaaatacatctactgtagagaaagtcttggttgtaaaaagaacgaataataatataactatgaaagaaggtagagatgaatttttcgataatgtatataagcaagttcctttgaatgcatatgtagagccagagagaacaaagagcgaagatcctctattcattctctatacctctggaaccactggcaagccaaagggaatagttcatgatactggcggatatttaactattcttcacgctacaatgaactgggtattcgatattaaagatagtgatataatgtggactactgctgatattggttggattactggtcattcatatatagtatttggtcctctattagaaggagtaacaacagtaatgtatgaaggagctctagattatccaaacccagataggtgggcatctataattgagagatatggtgttacgatactttatacttcacctacagcaataaggtctttcatgaaattaggagaggatgtatataaaggtagagatttctcttctgtgagattaatgcattctgtaggagagccaataaacccagaggcatttagatggttcttcagattggtaggaaaagaaagcataccatttggtagtacttggtggatgactgagactggtggtattatgattagtcacttacccggtctttatctaattccattgaaaccaggaactaatggaatgccgttaccgggaattgatgcagatgttgttaatgaaaatggtaatcctacaaaacctgaagaaagaggatatctagtgattagaaaaccatggcctggaatgccattaactatttggggagatccagatagatatgttaaagtatactggtctaaattcccgggtatattttatcccggcgatttcgctgttaaagattctgatggatacttctggatattaggtagggctgacgaggtaattaaagtagctgggcatagattaggaacatatgagttagagtctgctttaatacatcacccagccgttgctgaagcagcagttgtaggagtcccagatccattaaaaggtgaagtaccggtagcatttgtagtattaaaggtgggacaaaaagcaaatgaggagttgaaaaagagcttaaatgaatgggtaagagagcaagtaggacctatagcgtcattaagtagtatttactttgtatctaaacttccaaaaactaggagtggtaagattatgagaagagtagtaaaggctgttattactaatcagccagtaggcgatgtcacaacacttgaagatgaagcttcggtagaagaagttaaaaaggcatacgaagaattaaagaaggagatatcctaa

SEQ ID NO: 126464 - protein, 661 aa, Sulfolobus tokodaii str. 7
MSVNWSLPFEEKIIPSKYQSKVISPSIYKELHKIATENYKEFWASIASQLEWFKPWEKVLDDSNPPFYKWFVSGEINASYLAVDRHAKSWRKNKVAIIWEGEPAEGDKPKEVRYITYGELYREVNRVAYILKEVYGLKKGDAISLYLPMIPELPIFMLAAARLGIIFSVVFSGFSAQALADRINDARAKLLVTADGGWRRGKIVPLKDIADKALENTSTVEKVLVVKRTNNNITMKEGRDEFFDNVYKQVPLNAYVEPERTKSEDPLFILYTSGTTGKPKGIVHDTGGYLTILHATMNWVFDIKDSDIMWTTADIGWITGHSYIVFGPLLEGVTTVMYEGALDYPNPDRWASIIERYGVTILYTSPTAIRSFMKLGEDVYKGRDFSSVRLMHSVGEPINPEAFRWFFRLVGKESIPFGSTWWMTETGGIMISHLPGLYLIPLKPGTNGMPLPGIDADVVNENGNPTKPEERGYLVIRKPWPGMPLTIWGDPDRYVKVYWSKFPGIFYPGDFAVKDSDGYFWILGRADEVIKVAGHRLGTYELESALIHHPAVAEAAVVGVPDPLKGEVPVAFVVLKVGQKANEELKKSLNEWVREQVGPIASLSSIYFVSKLPKTRSGKIMRRVVKAVITNQPVGDVTTLEDEASVEEVKKAYEELKKEIS

SEQ ID NO: 126465 - DNA, 1908 bp, Sinorhizobium meliloti 1021
  CDS (1)..(1908): transl_table=11
atggcgagccgctattccgaagtgtatgccgcgtggaaaaccgatccgcacggcttctgggcagatgccgcatcggcgatcgactggttcaagcggccggagcgcattttcgagcctgccggcggcacctatggtcactggtttccggacggcgtcaccaacacctgccacaactgcctggaccggcatgtcgaggccggccgtggcgagcagctggcctttatatacgacagtcccgtcaccggacggatcgagaggatctcctatgcggacctgctcgccgatgtgaaggctatggctgcgatctaccgcaagctgggcgtcgacaagggcgatcgcatcatcatctacatgccgatgatcccgcaggcggcgatcgccatgctcgcggcagcgcggatcggcgcggtgcattccgtcgtcttcggcggctttgccgccaacgaactcgccatgcgcatcgatgattgccaggcgaagatcgtcgtctcggcgagctgcgggctggagcccgggcgaaccgtcgcctacaagcctctgctcgatcaggcgatcgaaacggccagccacaagccggcccgttgcctcatctatcagcgcgacatgctcgccgccgaaatggttagcggccgcgacatcgatttcgccgaagcgcttgcggcggccagagacgccggtgaggaagcctcttgcacgccggtcgcctccaccgatccgctctatgtcctctatacgtccggcacgaccggccagccgaaaggcgtcgtgcgggacaatggcggccacatggtcgcgctcagatggtcgatggagcacttcttcggagtcaatgccggcgacgtgttctgggcggcttccgacatcggctgggtggtcggtcattcctacatcgtctatgggccgctcctcaacggctgcacctcggtcctcttcgaaggaaagccggtcgggacgcccgaccccggaacctattggcgcgtcatttccgaacgcggcgtggccgtcatgttcaccgcgccgacggcgctgcgagcgatccgcaaggaggacccggaagcggcccatgcgggccgttacgacctgtcgcggttccgggcgctttatctcgcgggcgagcgggccgacccggacacgatccgctgggcggaacgggcgctgaaggtcccggtcatcgatcactggtggcagaccgaaacaggatggcccgttgccggcaatccattgggtctcggcctcctgccggtaaaatacggttccccggcggttcccctccccggctatgacgtgcaggtcgtcgacgacgcgggccacccggtggaaaccggcacgctcggcaatgtcgtgatcaagctgccgttgccgcccggctgcctgccgactctgtggaatgccgatcaccgcttccatgcggcctatctcgaggaatatcccggcttctacaagacggcggatgccggctatgtcgacgaggacggctatatcttcatcatggcccggaccgacgacatcatcaacgtcgcgggacaccggctgtcgacgggggccatggaagaggtttgcgccagccatccggacgtcgccgaatgcgccgtgatcggcatcgccgatcccctcaaggggcaggtgccggcgggcttcctggtcatcaacgccaatgtttcccgtgaaacggaagaaatcgagaaggaggttgtcggtctcgtgcgcgagcgcatcgggccggtcgccgccttcaggacggcggtctgcgtcaagcggctgccaaagacgcgatccggcaagattctgcgctcgacgatccagaagatcatcgaccgacagccatggacgatgccggcaacgatcgacgatccggcgatcctggacgagattaccgaactgctgcggtcaaaggggatcggcgtttag

SEQ ID NO: 126466 - protein, 635 aa, Sinorhizobium meliloti 1021
MASRYSEVYAAWKTDPHGFWADAASAIDWFKRPERIFEPAGGTYGHWFPDGVTNTCHNCLDRHVEAGRGEQLAFIYDSPVTGRIERISYADLLADVKAMAAIYRKLGVDKGDRIIIYMPMIPQAAIAMLAAARIGAVHSVVFGGFAANELAMRIDDCQAKIVVSASCGLEPGRTVAYKPLLDQAIETASHKPARCLIYQRDMLAAEMVSGRDIDFAEALAAARDAGEEASCTPVASTDPLYVLYTSGTTGQPKGVVRDNGGHMVALRWSMEHFFGVNAGDVFWAASDIGWVVGHSYIVYGPLLNGCTSVLFEGKPVGTPDPGTYWRVISERGVAVMFTAPTALRAIRKEDPEAAHAGRYDLSRFRALYLAGERADPDTIRWAERALKVPVIDHWWQTETGWPVAGNPLGLGLLPVKYGSPAVPLPGYDVQVVDDAGHPVETGTLGNVVIKLPLPPGCLPTLWNADHRFHAAYLEEYPGFYKTADAGYVDEDGYIFIMARTDDIINVAGHRLSTGAMEEVCASHPDVAECAVIGIADPLKGQVPAGFLVINANVSRETEEIEKEVVGLVRERIGPVAAFRTAVCVKRLPKTRSGKILRSTIQKIIDRQPWTMPATIDDPAILDEITELLRSKGIGV

SEQ ID NO: 126467 - DNA, 1944 bp, Thermoplasma acidophilum DSM 1728
  CDS (1)..(1944): transl_table=11
atggaaagcgaaaagggaacattacccatgaacgaggtctacaaccccggcatgaacgtgtacagcgagatatacaggaaatccctggaagatcctgagaatttctgggcaaaacaggccgagatactgacatggtattccaaatggaacaagatcctcgacgattcaaagaagccgttttacagatggtttgtgggcggaaagctcaacgtgtcgtacaacgcagttgacaggcacctggagcagcacaggaggaataaggccgcatacatatgggttggcgaaaatggtgaagaaaagatagtgacgtacgatggactttacaggaggataaacaacctggccaaagccctcctgaacctcggaataaagaagggagacaggatagtactgtacctgcccatgataatcgaagcgcccgttgccatgctggccgcggccaggataggtgcagtattctctttcgtcttcgcaggcttcggtgcaggtgcactggcagagaggataaacgattcaaaggccgtactgctgataactgcagatggaggtttcagaaacggcaaggtggtggagctaaagaagatagcggatgaggcccttgagatgacctccacggtcagaaacgtgatcgtcataaagcatgccaggaatgacgtgaacatggttgaggatcgggatatctggtatcatgagatcgttggtgattcgcatacgtacgttgagccggaacatatggacgcgaacgatccgctcttcatcctttacacctctggaaccactggaaaacccaaaggagctgtgcacagcaccgggggctattccgtatgggttgccagcacgctgaagtgggctttcaatcctgatgaggatgacagatggtggtgcgctgcagacataggctggataaccgggcacagctacatagtattcgctcccttgatccttggcctgacgagcatcatgtacgagggatcgataacctatcccgaacctgacaggctatgggagatcatagaaaaataccgcgtgaacatcctttacacctcccccacggctataaggacgctgatgaagttcggagagaagtacccgcagaggcatgatctgagcaccctgaaagttctcggaacggttggagaacccataaatccggctgcctggaaatggtactacgagatcatcggcaactccaggtgcccgataatcgatacgtactggcagacggagaccggaggtttcatgatcgcaccgcagaggggactcggcctgccaccattgaagcctggttctgcgacttttccgcttcctggcgtagatcctgcaatacttgatgacgcgggaaaggaggtgcgtaccggcgagaagggttacatagtcttcaggagaccgtggccaggtatgctgatgaccgtcaacaacgacgacgagagatacgtaaaaacatacttctccaagttccccggctactattactgcggcgactatgcggtgaaggacgaagatggctactactggctcctgggcagatccgacgaggtcatgaacgtatcagggcacaggcttggtacgatcgagatcgaggatgccatagtagccacaggccttgccgttgaagctgccgtcttcggaaagcccgatccggtaaagggcgaggcaatatcggcattcgttgtacccaaggacgcaaacgccgacaggcacgaactcatctcggagatacgcaagaggataagggctgatcttggcccgatatacgttccggacgagatcaggatcgtgaaactgttgccgaagacgaggagcggcaagataatgaggagggtcgtgaaagctgtggcgctgaaccagatacctggcgatctaacgactctggaggattccacctctgtggacgagatcaagagcgcaattgaagccttcaagggagaggccggaggtgagtga

SEQ ID NO: 126468 - protein, 647 aa, Thermoplasma acidophilum DSM 1728
MESEKGTLPMNEVYNPGMNVYSEIYRKSLEDPENFWAKQAEILTWYSKWNKILDDSKKPFYRWFVGGKLNVSYNAVDRHLEQHRRNKAAYIWVGENGEEKIVTYDGLYRRINNLAKALLNLGIKKGDRIVLYLPMIIEAPVAMLAAARIGAVFSFVFAGFGAGALAERINDSKAVLLITADGGFRNGKVVELKKIADEALEMTSTVRNVIVIKHARNDVNMVEDRDIWYHEIVGDSHTYVEPEHMDANDPLFILYTSGTTGKPKGAVHSTGGYSVWVASTLKWAFNPDEDDRWWCAADIGWITGHSYIVFAPLILGLTSIMYEGSITYPEPDRLWEIIEKYRVNILYTSPTAIRTLMKFGEKYPQRHDLSTLKVLGTVGEPINPAAWKWYYEIIGNSRCPIIDTYWQTETGGFMIAPQRGLGLPPLKPGSATFPLPGVDPAILDDAGKEVRTGEKGYIVFRRPWPGMLMTVNNDDERYVKTYFSKFPGYYYCGDYAVKDEDGYYWLLGRSDEVMNVSGHRLGTIEIEDAIVATGLAVEAAVFGKPDPVKGEAISAFVVPKDANADRHELISEIRKRIRADLGPIYVPDEIRIVKLLPKTRSGKIMRRVVKAVALNQIPGDLTTLEDSTSVDEIKSAIEAFKGEAGGE

SEQ ID NO: 126469 - DNA, 2013 bp, Brucella melitensis 16M; identical to SEQ ID NO: 121928
  CDS (1)..(2013): transl_table=11

SEQ ID NO: 126470 - protein, 670 aa, Brucella melitensis 16M; identical to SEQ ID NO: 121929

SEQ ID NO: 126471 - DNA, 1848 bp, Pyrobaculum aerophilum str. IM2
  CDS (1)..(1848): transl_table=11
atggattatattgagttctggaggaagtctatcagttatcctgagattttctgggaatctgtagctaaagagctcttctggaagaaaaaatgggaaaagccattagacggctcaaatccgcctttttaccggtggtttgtaggaggcgttacaaatattacgtataatatcctagaacgtcattcaaaagataaaccagctattatatggttcaactccgaattaaagccgcacataattacatatggtgaattatctcaagaggttaataagtgggcgtgtctattgaaaaaagctggcgtacaacaaggcgatagagtaactatatacatgcccatgattccacaggcggcatatgccatgttagctgttgcaaaaataggcgcagtacataacgtcgttttttcaggcttcagcgttagagcattgcatgaaagaatattggactcaggctctaagattatcctaacagtagacgcaatgaggaggaggggaaaggttataaagctagctgaaatcgcattaaaggcggcggatagcgcgagagtagttgtatttaattacctgggcgaaaaaatagacggcgatttcgtacaggcagaaaacctcttagaaaaatgcgaaattgaatacacctgggtcaaatctgacgatccgctttttattctttacacatctggaacaaccggaaagcccaagggaatttatcacgggcacgggagctatatggtgtgggcttatgcgcacactaagtggttttttgggtttgaaaaaggagatattctattctccactgctgatataggttggataaatggacatacttatgggctctatgggccgttattaaacggctccaccgttgtgtggtatgaagatgcgcccgattacccgcacccgggcgtgtggtgggaaattgttgacagaagtaaggcgacgtttatatggctttcccccacggccgtgaggctattaatgagatatggcgaggagtggcccgctaagtattctcttgagagtttaaaaatggtggtgagcgcaggcgaaattttaggaaaagaggcttggaagtggctaaaaagccatgtgtgtaaaaaccggcaggggtgccacgtggtggagacgtggggacagaccgaaaactctggctttattgcagcacctggaggttatggagtcggggggattagatacaaagaagggagtgtaggtcttccatatccaggaattgatgtaagaatatatgacgataatggtcaagagcttccgcctggcgcaaaaggccatgttgttatattaccgcctacaccgccggcgttcgcattgggcatatggggaaatccagcgaggtggattgaggcgtattggtcaaaatttccgggagtgtactatactggcgacgttggcataaaagatgaagagggatacatctatatactcgggcgggcggatgatgtcatcaaaatagctggccatcgattaagccctgctgaggttgaaaatatagttgcaacattccccggcgttgttgaagcggctacggtaggagttcccgatgaaattaagggaactaccttggctatttttgtagtgcctaaagagggggtgagaataaactctcaagaagtagtagaatttcttaagagggagttcggcccagttgccgtagtatctaaagtttatgtagtaaataaactacctaagactaggacaggcaagattatgcgaagagttttgagggctttaattagcggcggtgaaataggtgatatctcgactttagaggacgaggcgtcaatagatgaagtgaaaagggcattagaagaagttaaaattatatcctcttga

SEQ ID NO: 126472 - protein, 615 aa, Pyrobaculum aerophilum str. IM2
MDYIEFWRKSISYPEIFWESVAKELFWKKKWEKPLDGSNPPFYRWFVGGVTNITYNILERHSKDKPAIIWFNSELKPHIITYGELSQEVNKWACLLKKAGVQQGDRVTIYMPMIPQAAYAMLAVAKIGAVHNVVFSGFSVRALHERILDSGSKIILTVDAMRRRGKVIKLAEIALKAADSARVVVFNYLGEKIDGDFVQAENLLEKCEIEYTWVKSDDPLFILYTSGTTGKPKGIYHGHGSYMVWAYAHTKWFFGFEKGDILFSTADIGWINGHTYGLYGPLLNGSTVVWYEDAPDYPHPGVWWEIVDRSKATFIWLSPTAVRLLMRYGEEWPAKYSLESLKMVVSAGEILGKEAWKWLKSHVCKNRQGCHVVETWGQTENSGFIAAPGGYGVGGIRYKEGSVGLPYPGIDVRIYDDNGQELPPGAKGHVVILPPTPPAFALGIWGNPARWIEAYWSKFPGVYYTGDVGIKDEEGYIYILGRADDVIKIAGHRLSPAEVENIVATFPGVVEAATVGVPDEIKGTTLAIFVVPKEGVRINSQEVVEFLKREFGPVAVVSKVYVVNKLPKTRTGKIMRRVLRALISGGEIGDISTLEDEASIDEVKRALEEVKIISS

SEQ ID NO: 126473 - DNA, 1881 bp, Pyrobaculum aerophilum str. IM2
  CDS (1)..(1881): transl_table=11
atggaattatggcggccagaaaaacaccaccttgaggagtctaatgtggcaaagtacataacctcccacggcatcaaggggcttgacgacttcctctcgctcacttttgacaagcctgaggaattctggcgctccttcgagaaagaggtgttgaagcttggttggtacgaggagtacataaaggtgctggatctatccaagggagtccaatggcctaggtggttcgtcggcggcaagatcaacatagcggatcagctggaggattcctcccgtccccttgtcaaatgggagggggaagacgggtcgaccgccgtctggagctattctgaggtgctctacaaagccaaggcggtcgccagctggctgaagagaaacgggctcgagaagggggatcgcgtggctatcttcatgccgatggtgcccgagataatcccggtcatgctgggggccatcagagctggcggcgtcatagtcccgcttttcagcggcttcggcaaggaggccataagggttaggctcgaggacagcgaggctaagttcgtcttcgcctccgatatctcctacaggagaggcaaggagatcgatatgctctcggagctgagagccggcttgacgccctcagtgaagcgcgtggtggtgcaggaacgctccggacgtagcagcggctatacgccgctctccgaggtcttcaagaccggcggcgaccacgtagagagggcagacgcagaggatcccatcatgattatatatacctcgggcaccacggggaagcctaaaggcaccgtccatacgcacgacggcttccccgtgaaggccgccgccgacgtctacttccacttcgacgtgagcgagggcgagaccttgagctgggtgacagacatggggtggatgatggggccttggatggtcttcgccgcgtatctgctcagaggctccatggccttcttcgagggagctccagactaccccaaggacagactctggcgttttgtggagcgcttcaaggtgaacgccttgggcctggcggcgacgttaacgagatatctccgctccataggcgcagcggcggagcccggccagctggattcgctcaaagccttcggcaacacgggggagcccatagacgtcgagagctggctgtggctataccgcatgggaagggggcgcataccgattataaactactccggcgggaccgagatatcaggggggatattgggttgctacgtggtgaggcccataaagcccagctctttcaacgggcctagcataggcactaaagccgcggtgtttactgaggatgggaggccggccccgcctggcgttgagggagagctcgtggtactctcggtgtggcccggcatgacgagaggcttctggagggatccccaacgctatttagagacttactggaacaagtggcctggagtgtgggcccacggcgacgctgccgtagtggatgaagagggcttcttttacatactggggagggcagacgacaccataaaggtggccggaaagcggctgggacccgccgagattgagactgtcctcaacgcccatcctgccgtggccgagtccgcctgtataggcgtcccccatgagattaagggcgaggtgcccgtatgtttcgtggtgttgaagccgggctatgagcccagtgaggccttaaggcgcgagttgatcaagctgacggaggaggccttaggcaaagccttcggcgcggtggaggatataaggttcgtcaagatgttgccgaagacccgcaacgccaagatcatgaggagggtgataagggcggtgtacttaggccgcaaccccggcgacctatcggcgctcgaaaatccggaggccatagaggagataaaaagagctctgtga

SEQ ID NO: 126474 - protein, 626 aa, Pyrobaculum aerophilum str. IM2
MELWRPEKHHLEESNVAKYITSHGIKGLDDFLSLTFDKPEEFWRSFEKEVLKLGWYEEYIKVLDLSKGVQWPRWFVGGKINIADQLEDSSRPLVKWEGEDGSTAVWSYSEVLYKAKAVASWLKRNGLEKGDRVAIFMPMVPEIIPVMLGAIRAGGVIVPLFSGFGKEAIRVRLEDSEAKFVFASDISYRRGKEIDMLSELRAGLTPSVKRVVVQERSGRSSGYTPLSEVFKTGGDHVERADAEDPIMIIYTSGTTGKPKGTVHTHDGFPVKAAADVYFHFDVSEGETLSWVTDMGWMMGPWMVFAAYLLRGSMAFFEGAPDYPKDRLWRFVERFKVNALGLAATLTRYLRSIGAAAEPGQLDSLKAFGNTGEPIDVESWLWLYRMGRGRIPIINYSGGTEISGGILGCYVVRPIKPSSFNGPSIGTKAAVFTEDGRPAPPGVEGELVVLSVWPGMTRGFWRDPQRYLETYWNKWPGVWAHGDAAVVDEEGFFYILGRADDTIKVAGKRLGPAEIETVLNAHPAVAESACIGVPHEIKGEVPVCFVVLKPGYEPSEALRRELIKLTEEALGKAFGAVEDIRFVKMLPKTRNAKIMRRVIRAVYLGRNPGDLSALENPEAIEEIKRAL

SEQ ID NO: 126475 - DNA, 1956 bp, Pyrobaculum aerophilum str. IM2
  CDS (1)..(1956): transl_table=11
atggaaaaactatataataaatatgaagtttacaatagatggctacaagattctgacggctattggcaggagtttatagaaaaaaccgcggggtatatatactgggctaagaaacctgagaaaatctttgagtggaatccgccaaatccgtttaaatggtttgttggaggctataccaacgccgggtatagcgccgttgattacaaattggggaggtttggcgacaaaactgcctatatttatataaacccagaggcaagtgttgagaggcgtattacctacggggagttgtaccaactggtttgtagaataagcgcagccctaagggcattcggcgtcaaaaagggcgatacaattctggtgtatatgcccaatagtattgaggcggttgcagttctcttagccgccgccagaataggcgcagtttccagtacagttttcgccgggttttcgccaaaggctgtggccgatagaatagaactcgtcgagcccaagataatattcactcaagactactcactgcggagggggaggcgaattgcgctgaaagagaatatagacgaggctttgaagctgtcgacttggaggccgcaggcagtggtggtgaaaagggcgttgggggaggagaaagagcctccaatggaaaggggccgcgacatgtggcttgaggagtttttagaaatgggcaaacacggcaactgcaccccggagtttgtggagtcaaatgagccccttttcgtactgccaacctctggcactacagcaaagcccaaaccagtagtacacgtccacggcggctatcaagtctggatagtccacggggctctcctcgtctatggattatctagcgacgacgtgattttcaacactagcgacattggctggatagtcggccagagttatatagtctttgcgcctacgataatggggacgacttcaatattatttgacggcgctattgattatcccaagcccgatcttttctgggaaattattgagaaatacaaaccgacattaatatggacatcccccacggcggctaggatgttaatgagactcggcgttagtcatgccagaagacacgatttgtctagcgtcaaaagagtagtcacagcgggggaggtgttaaacccagaggtgtggaggtggctgtatgaagaggcctttcaaaagaacgtgcccgtgatagaccactggtggcagacagagctaggcggacctgccataggctattactacgcccttgttaaagacatgcccgtgggccttgagtttatggaaataaagccgggctctgcgggagtgccgttgccaggcgtagaagtggaggtggtagacgagaggggcaacgccgtttcggccgggcagaaggggactttagtgttgaagaggcccttccccggcatgacgccgactttatggaaagatcacaagcggtacatggctgagtattgggagcgctacgaggggaagcttgtgtactacaccggcgacgccgcttatatagacgacgaaggctacgtgtggtttggcggcagagctgacgaagtgataaaaatagcgggccatagaataggcactatagaagtggagtcggcgttgttaactcaccccgcggtggcggaggccgcggtagtgggagtccccgatccgataagaggagaggccattgcggcttttgttgtgttaaaacccagttggagacccacggaggagttgagaaaagagttgatagaacatgtgagaaagacctttggccccatagctgtattcgccggcttggagtttgtcaacatgttgcccaagactagatctgggaaaatcatgaggagagtgctcaagcgcctgtggactggagagcctattggcgatatctctactatagaagacgaggcctctgtggaggagatcagagaggcaatatcgcgtttaaaagtggtcaaggtctctgagtaa

SEQ ID NO: 126476 - protein, 651 aa, Pyrobaculum aerophilum str. IM2
MEKLYNKYEVYNRWLQDSDGYWQEFIEKTAGYIYWAKKPEKIFEWNPPNPFKWFVGGYTNAGYSAVDYKLGRFGDKTAYIYINPEASVERRITYGELYQLVCRISAALRAFGVKKGDTILVYMPNSIEAVAVLLAAARIGAVSSTVFAGFSPKAVADRIELVEPKIIFTQDYSLRRGRRIALKENIDEALKLSTWRPQAVVVKRALGEEKEPPMERGRDMWLEEFLEMGKHGNCTPEFVESNEPLFVLPTSGTTAKPKPVVHVHGGYQVWIVHGALLVYGLSSDDVIFNTSDIGWIVGQSYIVFAPTIMGTTSILFDGAIDYPKPDLFWEIIEKYKPTLIWTSPTAARMLMRLGVSHARRHDLSSVKRVVTAGEVLNPEVWRWLYEEAFQKNVPVIDHWWQTELGGPAIGYYYALVKDMPVGLEFMEIKPGSAGVPLPGVEVEVVDERGNAVSAGQKGTLVLKRPFPGMTPTLWKDHKRYMAEYWERYEGKLVYYTGDAAYIDDEGYVWFGGRADEVIKIAGHRIGTIEVESALLTHPAVAEAAVVGVPDPIRGEAIAAFVVLKPSWRPTEELRKELIEHVRKTFGPIAVFAGLEFVNMLPKTRSGKIMRRVLKRLWTGEPIGDISTIEDEASVEEIREAISRLKVVKVSE

SEQ ID NO: 126477 - DNA, 1899 bp, Encephalitozoon cuniculi GB-M1; identical to SEQ ID NO: 28120
  CDS (1)..(1899)

SEQ ID NO: 126478 - protein, 632 aa, Encephalitozoon cuniculi GB-M1; identical to SEQ ID NO: 28121

SEQ ID NO: 126479 - DNA, 2025 bp, Drosophila melanogaster; identical to SEQ ID NO: 121932
  CDS (1)..(2025)

SEQ ID NO: 126480 - protein, 674 aa, Drosophila melanogaster; identical to SEQ ID NO: 121933

SEQ ID NO: 126481 - DNA, 1866 bp, Chlorobium tepidum TLS
  CDS (1)..(1866): transl_table=11
atggagcagtacgaaaaactctatgccgatgcagccgcggatcccgacaagtactggggcgatctggcggaacagttccactggttcaagaaatgggactcggttcttgaatggaatgctccatatgccaaatggttcaatggcggcaccaccaacatcgcctacaactgccttgacgtgcacgtaggcagctggcgcaagaacaaggcggctatcatatgggaaggtgaagagggcaacgagcgcatcctcacctatggcgagctgcaccgccaggtcagcaaattcgccaacgtcctgaaaatcgccggcatcaaaccgggtgacaaggtggcgatctacatggggatggtgcctgagctggtcatcgccgtgctcgcctgcgcaagggtcggtgcggtgcacaacgtgatcttcgccggttttgccgcccacgccatcaccgaaagggtcaacgactcacgcgccaaaatagtcatctgcgccgacggcacccgccgccgtggtagcaccatcaacctcaaaaatatcgtcgacgaagcgatcatcaacactccttcggtcaaaaacgtcatcgtcctcaaagtgaccggcgaagagatccacatgcacgacggcatggatcactggtggcacgacctgatggggctagccgtggacgaatgcgaaccggcgcaggtcgattccgagcacccgctctttttgctctacaccagcggctcgaccggcaaaccgaaaggcattctgcacaccaccgccgggtacatggtgcacgccgccagctcgttcaaatatgtgttcgacatcaaggacgaggacatctacttctgcaccgccgacatcggctggatcaccggccacacctacataatctacggcccgctgctcaacggcgcaaccgtcttcatgtacgaaggcgctccgaactacccgcagtgggatcgtttctgggacatcatcaatcgccacaagatcacaatcctctacaccgctccgacggctatccgcgccttcatccgcgccggtaacgagtgggtcaccaagcacgacctcagctcgctcaggctgctcggcacggtcggcgaaccgatcaaccccgaggcctggatgtggtaccacaagtatgtcggtcaggaaaaatgcccgatcgtggacacctggtggcagaccgaaaccggcggcatcatgatttcgccgatgccgggcgcgaccccgaccaaaccgggcacagccacccgcccgctgccgggcattatggtcgatgtcgtccgcaaggatggcaccccgtgcaacgccaacgaaggtggctacctggtcgtcaaacgcccatggccctcgatgctccgcaccatctatggtgacaacgagcgttacgaaaagacctactggtctgaattccccggcatgtacttcaccggcgacggtgcaagaaaagatgatgacggctacatctggatcatgggccgcgtcgatgacgtggtcaacgtctcgggtcaccgcctcggcaccagcgaggtcgaaagcgcgctcgtttcacacgaggctgtcgccgaagccgccgtcgtcagccgtccggacgaaatcaagggcaacgccctcgtcgcattcgtgacgctgaaagacggctacgaaggcgacgccaaactgcgcgactcgctcggcaagcacgtcgccaaggagatcggcgctattgctaagcctgacgaaatccgctgggccaaaggtctgccgaaaacccgcagcggcaaaatcatgcgccgcctgcttcgcgaacttgccacttccaacgagatcaaaggcgacgtcaccaccctcgaagacctcggcgtcatcgagaacctccgcgaacaggaagacgaaggctga

SEQ ID NO: 126482 - protein, 621 aa, Chlorobium tepidum TLS
MEQYEKLYADAAADPDKYWGDLAEQFHWFKKWDSVLEWNAPYAKWFNGGTTNIAYNCLDVHVGSWRKNKAAIIWEGEEGNERILTYGELHRQVSKFANVLKIAGIKPGDKVAIYMGMVPELVIAVLACARVGAVHNVIFAGFAAHAITERVNDSRAKIVICADGTRRRGSTINLKNIVDEAIINTPSVKNVIVLKVTGEEIHMHDGMDHWWHDLMGLAVDECEPAQVDSEHPLFLLYTSGSTGKPKGILHTTAGYMVHAASSFKYVFDIKDEDIYFCTADIGWITGHTYIIYGPLLNGATVFMYEGAPNYPQWDRFWDIINRHKITILYTAPTAIRAFIRAGNEWVTKHDLSSLRLLGTVGEPINPEAWMWYHKYVGQEKCPIVDTWWQTETGGIMISPMPGATPTKPGTATRPLPGIMVDVVRKDGTPCNANEGGYLVVKRPWPSMLRTIYGDNERYEKTYWSEFPGMYFTGDGARKDDDGYIWIMGRVDDVVNVSGHRLGTSEVESALVSHEAVAEAAVVSRPDEIKGNALVAFVTLKDGYEGDAKLRDSLGKHVAKEIGAIAKPDEIRWAKGLPKTRSGKIMRRLLRELATSNEIKGDVTTLEDLGVIENLREQEDEG

SEQ ID NO: 126483 - DNA, 1965 bp, Yersinia pestis KIM
  CDS (1)..(1965): transl_table=11
atgacgatgagccaaatacataaacatcctattccagctgcaattgcagagcatgctctaattaccccagaaaaataccaacattattaccaacaatccgtgcagaaccctgatgaattctggggcgaacaaggcaaaatcattgattggattaaaccctataaaacggtaaaaaatacctcctttgaccccggtcatgtgagtatccgctggtttgaggacggtacattgaacctcgcggcgaattgccttgatcgccatttggcagagcgtggtgatcaaacagccatcatttgggaaggtgatgaccctaatcaatcaaaaaccgtcacttataagcaactgcaccatgatgtgtgccagtttgctaatgtcctaaaaagtttaagcgtcaaaaaaggcgatgtggttgccatctatatgccaatggtgcctgaagctgccgtggcgatgttggcttgcgcgcgcatcggcgctgttcattccgttatctttggtggattttctccagatgccgttgccgggcgtatcatcgattctcactctaaactggtgattactgccgatgaaggtatccgtgcaggccgtgctattccactgaaaaaaaatgtcgatgaagcactgaaaaaccccgctatcaccagtattaaaaatgttgtggtcttccaacgtactggtaacgccagctattgggaagatgggcgcgatgtatggtggcatgacctgataaaagaggcatccgctgactgcccgccagaagagatgaatgcagaagacccgctgttcatcctttatacctctggctctaccggtaaacctaaaggggttgtacatacgacgggcggttatctggtttatgctgcactgacattcaaatatgtctttgattatcaccctggcgatatctactggtgtactgcagacgttggctgggtaaccggacacagctatctgttatatggaccactggcttgtggggccatcactctaatgtttgaaggcgtgcctaactaccctggcgtcaatcgcttaagccaagttgttgataaacataaagtcaatattctatacaccgcgcctacagcgattcgggccttaatggccgaaggtgacaaagccatcgaaggaaccaaacgcgactcactgcgtattatgggatcggtcggcgagccgattaatccagaagcctgggaatggtattacaacaagatcggtaacagtaaatgcccgattgtcgatacttggtggcagactgaaaccggtggtttcatgataacccctctgccgggtgccaccgagttgaaagccggttccgcaacgcgtccattctttggggtacaacctgcgttggtagataacctgggcaatcctcaggaaggggtggcagaaggtaatctggtcataaccgactcatggccggggcaagccagaacattatttggcgatcatgaacgtttcgaacaaacctacttctcaacctttaaaggcatgtatttcagtggcgacggcgcacgtcgtgacgaagacggttactactggataaccggtcgagttgatgacgtactaaacgtttcaggccatcgcttaggaacggctgaaattgaatctgcattggttgcacacccgaaaattgccgaagcggctgttgtcggtgttccacataatattaaaggacaggctatttatgcctatatcacgctaaatcacggtgaagaaccaacgccagagttatataccgaagtacgcaactgggtacgtaaagagattggcccactcgcaacacccgatattttgcattggacggactcattacccaaaacccgttcaggcaagatcatgcgccgtattttacgcaaaattgcgacaggagataccagcaacttgggcgatacctcaacacttgccgatccaagcgtggtagaaaaattactagaagaaaaacaatcaatgcagacaccgtcgtaa

SEQ ID NO: 126484 - protein, 654 aa, Yersinia pestis KIM
MTMSQIHKHPIPAAIAEHALITPEKYQHYYQQSVQNPDEFWGEQGKIIDWIKPYKTVKNTSFDPGHVSIRWFEDGTLNLAANCLDRHLAERGDQTAIIWEGDDPNQSKTVTYKQLHHDVCQFANVLKSLSVKKGDVVAIYMPMVPEAAVAMLACARIGAVHSVIFGGFSPDAVAGRIIDSHSKLVITADEGIRAGRAIPLKKNVDEALKNPAITSIKNVVVFQRTGNASYWEDGRDVWWHDLIKEASADCPPEEMNAEDPLFILYTSGSTGKPKGVVHTTGGYLVYAALTFKYVFDYHPGDIYWCTADVGWVTGHSYLLYGPLACGAITLMFEGVPNYPGVNRLSQVVDKHKVNILYTAPTAIRALMAEGDKAIEGTKRDSLRIMGSVGEPINPEAWEWYYNKIGNSKCPIVDTWWQTETGGFMITPLPGATELKAGSATRPFFGVQPALVDNLGNPQEGVAEGNLVITDSWPGQARTLFGDHERFEQTYFSTFKGMYFSGDGARRDEDGYYWITGRVDDVLNVSGHRLGTAEIESALVAHPKIAEAAVVGVPHNIKGQAIYAYITLNHGEEPTPELYTEVRNWVRKEIGPLATPDILHWTDSLPKTRSGKIMRRILRKIATGDTSNLGDTSTLADPSVVEKLLEEKQSMQTPS

SEQ ID NO: 126485 - DNA, 1716 bp, Oceanobacillus iheyensis HTE831
  CDS (1)..(1716): transl_table=11
atggatatgcaagtagtacctgcacgtgaaggtaatcataatttaaaggattatgaagcattaagaaaggacttttcatgggaggaagtcaagaaaaatttctcttggtatgaatcagggaaggtgaatatggcatatgaagcagtagataaacatgcagctgatccaactaaaaaagatcaagcagcattattatactcagctcctgaccgtgaagagaaagtaacatttgaacaacttcgattaaagagtaatcaatttgctaatgtattgaaaaaatacgagattgaaaaaggagaccgtgtctttttatttatgccgagaagccctgaattctatgaggcattctttggtattttaaaaatcggcgctattgctggtccattatttgaagcatttatggaacaggcagtaggagatcgtttggacgacagtgaggctcgagtattaattacaacgccagaactactatatcgtgtgccacaagataaactcccgcatttagaaaaaattgtacttgtgggcgatcattcagaacaagatgataaatttattgattatgaagaagaaatgaaaggtgcatccgaagattttgacattgtttgggttgatttagaggatggaatgctattgcattacacatctggttcaacaggaaaaccaaaaggtattcttcatgtgcataatgccatgattcagcattatgctacagctgaatgggtgctagatctaaaagaagatgatgtttactggtgtacagcagatcctggttgggtaactggtacaagttatgggattttcgctccatggctccatggtgtgacgaatgttattcgtggaggccgatttacgccagatgattggtatcaaacattacaagactataaagtaacggtctggtatacagcgccaactgctttgcgtatgcttgtaagtcatggagaagacactgtgaaaaaatatgatctttcttctgtacgacacatccttagtgtcggagaaccattgaatccggaagtaattacatggggactaaaagcttttgatcttcgcattcacgatacatggtggatgactgaaacgggagcacaattgattgtaaacattccatcgcttgagattcgaccaggatccatggggaaaccaattcctggggtagaagcttcaatcgttgataatgagggaaatgagattccgccaaatcaaatggggaaccttgctattaaggaaggttggccatcgatgatgcgggaagtctggaagaataaaagtaaatttgaaagctattttgtaaatggctggtatgtatctggagatagtgcataccgcgatgaagatggatatttctggttccaaggtcgtctggatgatgttatcaatacatctggtgaaagagtgggtccatttgaagtagagagtaaattaattgagcatccagctgtttcagaagcgggtgttattggaaaaccgcatccggaacgcggagaaattataaaagcatttattaccttaaatgcaggctatgaagatagtgaagaattattagaggatattcgtcaatttgtaaaaacagggttaagtgcacatgcagctccacgagaaattgaagtgaaagatagtatcccaaaaacaagaagtggaaaaattatgcgtagacttctaaaatcttgggaacttggcttgccgacaggagatacatctactttagaagattaa

SEQ ID NO: 126486 - protein, 571 aa, Oceanobacillus iheyensis HTE831
MDMQVVPAREGNHNLKDYEALRKDFSWEEVKKNFSWYESGKVNMAYEAVDKHAADPTKKDQAALLYSAPDREEKVTFEQLRLKSNQFANVLKKYEIEKGDRVFLFMPRSPEFYEAFFGILKIGAIAGPLFEAFMEQAVGDRLDDSEARVLITTPELLYRVPQDKLPHLEKIVLVGDHSEQDDKFIDYEEEMKGASEDFDIVWVDLEDGMLLHYTSGSTGKPKGILHVHNAMIQHYATAEWVLDLKEDDVYWCTADPGWVTGTSYGIFAPWLHGVTNVIRGGRFTPDDWYQTLQDYKVTVWYTAPTALRMLVSHGEDTVKKYDLSSVRHILSVGEPLNPEVITWGLKAFDLRIHDTWWMTETGAQLIVNIPSLEIRPGSMGKPIPGVEASIVDNEGNEIPPNQMGNLAIKEGWPSMMREVWKNKSKFESYFVNGWYVSGDSAYRDEDGYFWFQGRLDDVINTSGERVGPFEVESKLIEHPAVSEAGVIGKPHPERGEIIKAFITLNAGYEDSEELLEDIRQFVKTGLSAHAAPREIEVKDSIPKTRSGKIMRRLLKSWELGLPTGDTSTLED

SEQ ID NO: 126487 - DNA, 2013 bp, Drosophila melanogaster; identical to SEQ ID NO: 121934
  CDS (1)..(2013)

SEQ ID NO: 126488 - protein, 670 aa, Drosophila melanogaster; identical to SEQ ID NO: 121935

SEQ ID NO: 126489 - DNA, 1890 bp, Pseudomonas putida KT2440
  CDS (1)..(1890): transl_table=11
atgagctaccagcacagctacgcccattccatttccgaccctgccgctttctgggcggaacaggccgcacacctggcctggcaccgcaagcctgccctgaccctgcaagataacgccgacggtacccaccgctggttcgcggatggccgcctgaacagctgttacctggccctcgaccaccagatcgagcagggccgcggcgagcagttggcgctgatctacgattcgccagtgaccggcgtgcagcagacctacacctacaaccaattgcgcgacgaggtggcacgcctggccggtttgctgcgccagctgggggtgaacaagggcgatggcgtgatcatctacatgcccatggtgccgcaagcggccatggcgatgctggcctgcgcgcggatcggcgcggtgcattcggtcgtgttcggtggctttgccgccaacgagttggccctgcgcatcgatgacgcccggcccaccttgttgctgacggcatcgtgcgggctggagttcgaccgggtcattgcatacaaaccgctggttgaccgtgccctgcaactggcccggcaccagccgcgcaatgtgctggtgctgcagcggccacaggcacacgctgaactgctgcctggccgcgacctggactggcaggcggccttggccgacgccgagccggtggcccccgtcgagctggatgccggcgacccgctgtacatcatgtatacctcaggcaccaccggtaagcccaagggtatcgtccgggaaaacggcggcaatgccgtggcgctgtgttacgccatgcgccatatctatggcatgcaggccggtgatgtgtggtggggcatttccgacgtcggttgggtggtcggccactcactgatcgtctacgggccgttgatgagcggctgtaccacggtgttctacgaaggcaagccaatccgcaccccggatgcttcggcctattggcgggtggtggagcagtaccgggtcaacgcgctgttctgtgcacctacggccatgcgcgccatccgcaaggaggacccggagggcgacctgattcgcaaacatgacctcagctcgctgcggcaactgttcctggcgggggaaaagctggattccagcacccatgaatggctggaacgggtgagtggcaagccggtgcacgaccactggtggcagaccgagaccggctggccggtcaccgcgccttgcgtcgggctggagggcagtgcggcgaagccaggatcgagcaaccgggcggtgccgggttacaacgttcgcgtactggatgacgaaggccacttgctcggggccaaccatcagggttcgatcgtgattgccctgccattgccacccggttgcagtcagacgctgtggggggatcacgagcgctacctgcaggcctacctgcgcacgtatccggggtactaccacacgggcgatggcggctatctggacgatgatggtttcgtctacatcatggggcgcaccgatgatgtgatcaacgtttccggtcatcgtttgtccaccggtgaaatggaagacctggtcgcccgccacccggcggtagcggagtgtgctgtgatcggtgtgcatgacgagatcaagggccaggtaccgttggcgctggtggtactcaaggatggcgagggcattgccgaggcgcagttgctggtggagctggtgggcagcgtgcgcgaggaaattggcccgctggcctgtttcaaccgggtacggctggtgaagcgcctgcccaagacccgttccggcaagattctgcgggcggtgctgcgcaagattgccgatgggcaggattatgtgccgccgtcgaccctggatgacccggcagtgctgggggagatcgaagcggtgctggcagatttgcccagggcgggttga

SEQ ID NO: 126490 - protein, 629 aa, Pseudomonas putida KT2440
MSYQHSYAHSISDPAAFWAEQAAHLAWHRKPALTLQDNADGTHRWFADGRLNSCYLALDHQIEQGRGEQLALIYDSPVTGVQQTYTYNQLRDEVARLAGLLRQLGVNKGDGVIIYMPMVPQAAMAMLACARIGAVHSVVFGGFAANELALRIDDARPTLLLTASCGLEFDRVIAYKPLVDRALQLARHQPRNVLVLQRPQAHAELLPGRDLDWQAALADAEPVAPVELDAGDPLYIMYTSGTTGKPKGIVRENGGNAVALCYAMRHIYGMQAGDVWWGISDVGWVVGHSLIVYGPLMSGCTTVFYEGKPIRTPDASAYWRVVEQYRVNALFCAPTAMRAIRKEDPEGDLIRKHDLSSLRQLFLAGEKLDSSTHEWLERVSGKPVHDHWWQTETGWPVTAPCVGLEGSAAKPGSSNRAVPGYNVRVLDDEGHLLGANHQGSIVIALPLPPGCSQTLWGDHERYLQAYLRTYPGYYHTGDGGYLDDDGFVYIMGRTDDVINVSGHRLSTGEMEDLVARHPAVAECAVIGVHDEIKGQVPLALVVLKDGEGIAEAQLLVELVGSVREEIGPLACFNRVRLVKRLPKTRSGKILRAVLRKIADGQDYVPPSTLDDPAVLGEIEAVLADLPRAG

SEQ ID NO: 126491 - DNA, 1905 bp, Vibrio parahaemolyticus RIMD 2210633
  CDS (1)..(1905): transl_table=11
atgtcaggacatactggaggaagcaatatgtcttcatacgaaaaagaatatttatgggcgaaaaacgaaccggagagtttttggcgcgctcaagcggagaatatcgactggtttgaatctcctaaaaccatcttgaaatctgatgagaacggcatcgaacgttggttcccagatggggtgatgaatacgtcttggttggcactggattaccattgcgaacaaggacgtggtgataatactgcgctaatttatgactcaccagtaacgggaaataaaaagacttacacttaccgagagctacgcgatcaagttgcgaaaattgccggtatgctttctgcgcaaggcgttgaaaaaggcgaccgagttgttgtttacatgccgatgatcccagaagcggcaatggcaatgcttgcttgtgcacgtttgggtgcgattcactcagttgtgtttggtggttttgcgcctaatgagctggcggtacgtattgaagatgcagagccaaaagtcattatgacggcatcgtgtggcatcgaaatcagtaaaatcattccgtataaaccattagtagacaaagccatcatggacagccgttggaaacctgagaaagtgtttgttttccagcgtccagaatgtgaagccgagttaaatcaggaaagagatttggactggcaacaggaatacaaaaaagcgctgcctcatgcttgtgttcctgtattagcaacagacccactgtatatcctttatacctcaggcacgacgggcaaaccgaaaggggtggtacgtgataacggtggccatgcggtagcactgaagtactcaatgagcgcaatctacaacatcccgcaaggtggtgtgttctgggcggcatccgacgtgggctgggtagttggtcactcgtatattgtttacgcgccattaattcacggctgcaccacaatactgtttgaaggtaagccagtcagaactccgaatccgggggcattctggcgtgtgtgtgatgaatataaagtggatgctttgttctcggcgccaacggctttccgtgcgattaagaaagaagacccggaaggcgagttcttaaagcagtatgatctgtcaaacctgaaaaccatctttatggctggtgagcgtttagatcctcctacgctggaatgggtacaaagtaaaactgacaaaccggttatcgatcactggtggcaaacagagacaggttgggcgattgcggggaacccaacgggcattgaaatgatgccagtaaaagcgggttcttcaactaagcctattccgggttatcaagtagaaatcctcgatgaactgggtgaaccagtaaaacctaatcaacaaggtttcgttgcgctaaaacgtccgttaccgccaagctgcttaccaaccgtgtggcgaaaccatgatcgttttgaaacgggctacctaagccaattcccaggctactatgtgtcgggtgacggtggttatctcgacgaagacggttacctattcatcatggggcgtattgacgatgtgattaacgtggctggccaccgtctgtctactggtgaaatggaagaaattgttggtggtcacccagccattgcagaatgtgcagtagttggcattcacgatgatctgaaagggcagctaccacttggtttcgttgtgctgaaagatggcgtcaaggttgatgagttagcgctagaaggcgaacttgtgggtaaggtgagaaatgagattggcgcggttgcatgcttcaaacacgcactggttgtagatcgcttaccgaaaacacgttcgggtaaaattctgcgtcgaaccatccgccaaattgctgatggtgaacaatacaccgtgccatcgacgattgatgatccaacgagcctgaatgaaatagagcgagtattacgacgctaa

SEQ ID NO: 126492 - protein, 634 aa, Vibrio parahaemolyticus RIMD 2210633
MSGHTGGSNMSSYEKEYLWAKNEPESFWRAQAENIDWFESPKTILKSDENGIERWFPDGVMNTSWLALDYHCEQGRGDNTALIYDSPVTGNKKTYTYRELRDQVAKIAGMLSAQGVEKGDRVVVYMPMIPEAAMAMLACARLGAIHSVVFGGFAPNELAVRIEDAEPKVIMTASCGIEISKIIPYKPLVDKAIMDSRWKPEKVFVFQRPECEAELNQERDLDWQQEYKKALPHACVPVLATDPLYILYTSGTTGKPKGVVRDNGGHAVALKYSMSAIYNIPQGGVFWAASDVGWVVGHSYIVYAPLIHGCTTILFEGKPVRTPNPGAFWRVCDEYKVDALFSAPTAFRAIKKEDPEGEFLKQYDLSNLKTIFMAGERLDPPTLEWVQSKTDKPVIDHWWQTETGWAIAGNPTGIEMMPVKAGSSTKPIPGYQVEILDELGEPVKPNQQGFVALKRPLPPSCLPTVWRNHDRFETGYLSQFPGYYVSGDGGYLDEDGYLFIMGRIDDVINVAGHRLSTGEMEEIVGGHPAIAECAVVGIHDDLKGQLPLGFVVLKDGVKVDELALEGELVGKVRNEIGAVACFKHALVVDRLPKTRSGKILRRTIRQIADGEQYTVPSTIDDPTSLNEIERVLRR

SEQ ID NO: 126493 - DNA, 1656 bp, Bacteroides thetaiotaomicron VPI-5482
  CDS (1)..(1656): transl_table=11
atggtagaaagatttttagcacagactagctttgcctcacaagaggatttcatcaagaacctgaaaataaacgtaccggagaatttcaacttcggctacgacgtagtagatgcctgggctgccgaacaacccgacaagaacgctctgctctggaccaatgaccaaggcgaaagccgtcagttctccttcgccgacatgaaacgctatacggacatgacggcctcttacttccagagcctcggcatcggtcgcggagacatggtgatgctgattctgaagcgccgctatgagttctggtacagcaccatcgccctgcataagctgggagcaacggtgatccccgccactcacctgctgacaaagaaagatatcatctatcgctgcaacgctgccgacatcaaaatgattgtggctgccggcgaaggaatcatactgcaacacatcaaagatgctcttcccgagtgtccgagcgtggaaaagctggtcagtgtaggtccggaagttccggaaggattcgaagatttccatcagggaatcgataacgctgcccctttcatccgcccgagacatgccaatacgaatgacgacatctcactgatgtacttcacttccggcactaccggcgaacctaaaatggtagcacatgactttacgtatccgttaggccatatcgttacgggtagtttctggcacaatctggatgagaacagcctccacctcaccatcgccgataccggctggggaaaagccgtatggggaaaactctacggacaatggatcgccggagccaacattttcgtctatgaccacgaaaagttcacgcccgcagctattctggaaaagatacaggagtatcaggtgacttccctttgcgcacctccaaccatcttccgctttctgattcatgaagacctgactaaatatgacttgtcttcactgcggtattgcaccattgccggagaagcactgaaccctgccgtattcgaaaccttcaagaaactgacaggcatcaagctgatggaaggtttcggacagacggaaacgacactgacagttgccaccatgccttggatggaaccgaaaccgggaagcatgggactgcccaatccgcagtatgacgtagacctgatcgacagtgaaggtcgctccgtggaagccggagagcaaggacaaattgtgatccgtaccagcaaaggcaaacctctcggacttttcaaagagtactatcgggatgcggaacgtacacacgaggcttggcacgacggcatttactacacaggtgatgtagcgtggaaagacgaagacggatacctttggtttgtaggacgtgcagacgacgtaatcaagagttccggttaccgtatcggcccgttcgaagtggaaagcgctttgatgacgcaccctgccgtcatagaatgtgccatcaccggagtacccgatgagattcgcggacaggtagttaaagctactatcgtattgtccaaagactataaagcacgtgccggagaagaactgatcaaggaattgcagaaccacgtcaagaaggtgactgctccttataaatatccgcgtgtgattgagttcgttgacgaactgcccaagactatcagcggcaagattcgtcgcgtggaaattcgcgagaacgatgagaaataa

SEQ ID NO: 126494 - protein, 551 aa, Bacteroides thetaiotaomicron VPI-5482
MVERFLAQTSFASQEDFIKNLKINVPENFNFGYDVVDAWAAEQPDKNALLWTNDQGESRQFSFADMKRYTDMTASYFQSLGIGRGDMVMLILKRRYEFWYSTIALHKLGATVIPATHLLTKKDIIYRCNAADIKMIVAAGEGIILQHIKDALPECPSVEKLVSVGPEVPEGFEDFHQGIDNAAPFIRPRHANTNDDISLMYFTSGTTGEPKMVAHDFTYPLGHIVTGSFWHNLDENSLHLTIADTGWGKAVWGKLYGQWIAGANIFVYDHEKFTPAAILEKIQEYQVTSLCAPPTIFRFLIHEDLTKYDLSSLRYCTIAGEALNPAVFETFKKLTGIKLMEGFGQTETTLTVATMPWMEPKPGSMGLPNPQYDVDLIDSEGRSVEAGEQGQIVIRTSKGKPLGLFKEYYRDAERTHEAWHDGIYYTGDVAWKDEDGYLWFVGRADDVIKSSGYRIGPFEVESALMTHPAVIECAITGVPDEIRGQVVKATIVLSKDYKARAGEELIKELQNHVKKVTAPYKYPRVIEFVDELPKTISGKIRRVEIRENDEK

SEQ ID NO: 126495 - DNA, 1902 bp, Helicobacter hepaticus ATCC 51449
  CDS (1)..(1902): transl_table=11
atgcccacatatcaagaaatttatcaacaatccattgagaatccagaaattttttgggcagaagctgctaaaaaagtgcattggtatcacgaatgggataaggtgcttgatgttgtcaatgaccattatcgttggtttgttggaggttgtatgaatacttgctacaatgctcttgacttgcacatagaaaatggcagaggagagcaagtagcactctattatgattcgcctgtaactgatacaaaaaaatcttatacttataaagaattgcgcaaacgcgtagccaaaactgctggaatacttgtgaataaaggtgtagttaagggcgatagagtgcttatttatatgcctatgattccagaggctgttattgctatgcttgcgtgtgcaaggattggtgctattcatagtgttgtatttggcggatttgcttcacacgagcttgcttcgcgtattgaagatgctaaaccacgagtgattataagcgcttcgtgtggcatagaaattagccgagtagtcaaatataaacctattcttgatgaggctattaaatcttcaaatcataaacccaccacttgtcttatttggcaacgcccacaagagagagcaaatatgctcccttggcgtgatgtagattgggagagtgaagaagagaaaactgaaggcgtagaatgtgttccgcttgatgcaactgaccctttatatgtgctttatacttcaggcacaacaggtaagccaaaaggtgttattcgtggcaatggaggacattctgtggctatgaaatggtcaatggataatatttataatgccaaaccaggcgatgtattttgggctgcaagtgatgtaggctgggtagttggacatagctatattgtatatgcaccgctaatgaatggttgcacaacaatcctttatgaaggaaaacctgtcaaaacccctaatcctggtgcattttggcgtgttgtccaagaatataaggttaatattctattctctgcacctactgcatttagggctattaaaaaagaagatcccaaaggcgaatggcttaaaaaatatgatctctcttcgcttaaagcagtgtttgttgctggagaacgttgcgatacagatacgctcaaatggattgaaaaaattaccaaaaaacctgtgattgaccattggtggcagacagaaaccggctgggcaatagcagctaatcctttaggtttagaaccacttcctatcaaagcaggttctcctactaagcctatgcccggattcaatcttaaggtgcttgatgaagagggtaaggaatgtaagaggggaaaattagggaatcttgttatcaagcttccattacctcctgcgtgtctttgcggtatttggggtgatgatgcacgatataaacgttcttacctcaatcactatccgggctattatcttacaggtgatagcgggtatattgacaaagacggctatgtgtttgtaatgggacgaatggacggagtaatcaatgttgcagggcatcgtctctccacgggtggtatggaagaagccatttcaaaacatccagatattgctgaatgtgcagttataggtgttaataatgaactcaaaggggagattccattagcctttgttgtgcttaaagacggacttgaacgtgatacacaaagtttatgcgagggtgttgttcaactcgtgcgagaggaaattggtgcagtagcgtcattgcatattgtagctgttgtggcaagacttcctaaaacacgaagtggtaaaatcttgcgtggcacaatgcgtgatattgctgatggcaatgaatggaagatgccctcaactattgaagattcaagcgttatgccagagatagaaaaaacacttgccacgcttggctatccaatcaaaacaaaggagtaa

SEQ ID NO: 126496 - protein, 633 aa, Helicobacter hepaticus ATCC 51449
MPTYQEIYQQSIENPEIFWAEAAKKVHWYHEWDKVLDVVNDHYRWFVGGCMNTCYNALDLHIENGRGEQVALYYDSPVTDTKKSYTYKELRKRVAKTAGILVNKGVVKGDRVLIYMPMIPEAVIAMLACARIGAIHSVVFGGFASHELASRIEDAKPRVIISASCGIEISRVVKYKPILDEAIKSSNHKPTTCLIWQRPQERANMLPWRDVDWESEEEKTEGVECVPLDATDPLYVLYTSGTTGKPKGVIRGNGGHSVAMKWSMDNIYNAKPGDVFWAASDVGWVVGHSYIVYAPLMNGCTTILYEGKPVKTPNPGAFWRVVQEYKVNILFSAPTAFRAIKKEDPKGEWLKKYDLSSLKAVFVAGERCDTDTLKWIEKITKKPVIDHWWQTETGWAIAANPLGLEPLPIKAGSPTKPMPGFNLKVLDEEGKECKRGKLGNLVIKLPLPPACLCGIWGDDARYKRSYLNHYPGYYLTGDSGYIDKDGYVFVMGRMDGVINVAGHRLSTGGMEEAISKHPDIAECAVIGVNNELKGEIPLAFVVLKDGLERDTQSLCEGVVQLVREEIGAVASLHIVAVVARLPKTRSGKILRGTMRDIADGNEWKMPSTIEDSSVMPEIEKTLATLGYPIKTKE

SEQ ID NO: 126497 - DNA, 1980 bp, Bordetella pertussis Tohama I; identical to SEQ ID NO: 121940
  CDS (1)..(1980): transl_table=11

SEQ ID NO: 126498 - protein, 659 aa, Bordetella pertussis Tohama I; identical to SEQ ID NO: 121941

SEQ ID NO: 126499 - DNA, 2046 bp, Bordetella parapertussis 12822; identical to SEQ ID NO: 121942
  CDS (1)..(2046): transl_table=11

SEQ ID NO: 126500 - protein, 681 aa, Bordetella parapertussis 12822; identical to SEQ ID NO: 121943

SEQ ID NO: 126501 - DNA, 2046 bp, Bordetella bronchiseptica RB50; identical to SEQ ID NO: 121944
  CDS (1)..(2046): transl_table=11

SEQ ID NO: 126502 - protein, 681 aa, Bordetella bronchiseptica RB50; identical to SEQ ID NO: 121945

SEQ ID NO: 126503 - DNA, 2070 bp, Synechococcus sp. WH 8102; identical to SEQ ID NO: 121950
  CDS (1)..(2070): transl_table=11

SEQ ID NO: 126504 - protein, 689 aa, Synechococcus sp. WH 8102; identical to SEQ ID NO: 121951

SEQ ID NO: 126505 - DNA, 1965 bp, Chromobacterium violaceum ATCC 12472; identical to SEQ ID NO: 121952
  CDS (1)..(1965): transl_table=11

SEQ ID NO: 126506 - protein, 654 aa, Chromobacterium violaceum ATCC 12472; identical to SEQ ID NO: 121953

SEQ ID NO: 126507 - DNA, 1965 bp, Wolinella succinogenes DSM 1740; identical to SEQ ID NO: 121954
  CDS (1)..(1965): transl_table=11

SEQ ID NO: 126508 - protein, 654 aa, Wolinella succinogenes DSM 1740; identical to SEQ ID NO: 121955

SEQ ID NO: 126509 - DNA, 1944 bp, Gloeobacter violaceus PCC 7421
  CDS (1)..(1944): transl_table=11
atgtcttccttcgaaatcgagtcgctcctgcacgaaaaccgccgcttcgccccgcccgcgggctttggcgagggcgcctggattaagagtctcgagcactaccgcgagctgtgcgcgcgggctgaggccgatccggagggtttctgggcggatcttgcccgcagtgagctgcactggttcaccccctggcaacaggtactcgattggcaggagcccacggcccgctggtttgtgggcggcaagctcaatcttgcttataactgcctcgaccggcatctccagacgcgcggcgacaaggttgccgtgctctgggagggcgaaccgggcgaggtgcgtgcgcttacctaccgcgaactgcacgccgaggtctgccgcttcgccaatgccctgaaggcgctgggggtcggcaagggcgacgtggtggcgatttatatgccgctggtgccggaggcggccgtcgcgatgctcggctgcgcgcgcatcggggcaccccacacggtagtcttcggaggcttctcgggcgacgcgctgcgcgaccggctcatcgatgcccaggccagggtggtggtcaccgccgacggcggctggcgcaaaggggcgattgttcccctcaaaccgcgggtggacgaggcggtggcccaggctcccggcgtggctcatgtgatctgcctgaagcgggtaggccaggaggtggccatggagccggggcgcgatcactggtggcacgaactggtggcctcccggagcgccgagtgtccggctgaagcgatggactccgaagatttgctgtttattctttacaccagcggcaccaccggcaagcccaagggcgtcgtgcacacgactggtggttacaacctctatacccacatcaccagcaagtggatcttcgatctgcacgacgaggacgtctactggtgcaccgccgacgtaggctggatcacgggccattcgtacgtggtgtacgggcccctgtcgaacggggcgacgacctttatgttcgagggtgcccccaaccaacccgaccccggccgcttctggcagctcatcgaaaagcaccgcatcggcattttctataccgccccgaccgccattcgcaccttcatcaagtggggcgacgattggcctgcccgctacgatctttcttcgctgcggcttctaggcacggtgggcgaaccgatcaaccccgaagcgtggatgtggtaccaccgggtgatcggccaggagcgctgcccgatcgtcgatacctggtggcagaccgagacgggcgggatcatgatcaccccgcttccgggggcgaccatcaccaaacccggctcggcgacgatgccttttccgggcatcgtcgccgatgtggtcgaccgcgagggcaacagctgcccccccaaccagggcggctatctggtgattcgcaggccctggccctcgatgctgcgcacggtctaccgcgacccggagcgctaccgtcagaactactggagccaggttccccacgcctactttgcaggcgacggtgcccgccgcgacgaagagggctacttctgggtgatgggccgcgtcgacgatgtgatcaacgtctccggccaccgcctgggcacgatggagatcgaatcggccctggtctcccacccggcagtggccgaggccgccgtggtcggccgacccgatgagatcaaaggcgaagcgatcgtcgcttttgtgacggtcgaatcggaggtcgagacgacgcctcagttgctcgaggagttgcgtgcccacgtcgtcaaagaaatcggcgcccttgcccgcccggaggaaatccgctatgcggaggcgctacccaagacccgctcgggcaagatcatgcggcggctgttgcgctcgctcgcctcgggaagcgacctgactggcgacacctcgaccctcgaagatcgctcggtgctcgagaagctgcgcgagggctaa

SEQ ID NO: 126510 - protein, 647 aa, Gloeobacter violaceus PCC 7421
MSSFEIESLLHENRRFAPPAGFGEGAWIKSLEHYRELCARAEADPEGFWADLARSELHWFTPWQQVLDWQEPTARWFVGGKLNLAYNCLDRHLQTRGDKVAVLWEGEPGEVRALTYRELHAEVCRFANALKALGVGKGDVVAIYMPLVPEAAVAMLGCARIGAPHTVVFGGFSGDALRDRLIDAQARVVVTADGGWRKGAIVPLKPRVDEAVAQAPGVAHVICLKRVGQEVAMEPGRDHWWHELVASRSAECPAEAMDSEDLLFILYTSGTTGKPKGVVHTTGGYNLYTHITSKWIFDLHDEDVYWCTADVGWITGHSYVVYGPLSNGATTFMFEGAPNQPDPGRFWQLIEKHRIGIFYTAPTAIRTFIKWGDDWPARYDLSSLRLLGTVGEPINPEAWMWYHRVIGQERCPIVDTWWQTETGGIMITPLPGATITKPGSATMPFPGIVADVVDREGNSCPPNQGGYLVIRRPWPSMLRTVYRDPERYRQNYWSQVPHAYFAGDGARRDEEGYFWVMGRVDDVINVSGHRLGTMEIESALVSHPAVAEAAVVGRPDEIKGEAIVAFVTVESEVETTPQLLEELRAHVVKEIGALARPEEIRYAEALPKTRSGKIMRRLLRSLASGSDLTGDTSTLEDRSVLEKLREG

SEQ ID NO: 126511 - DNA, 1956 bp, Photorhabdus luminescens subsp. laumondii TTO1; identical to SEQ ID NO: 121956
  CDS (1)..(1956): transl_table=11

SEQ ID NO: 126512 - protein, 651 aa, Photorhabdus luminescens subsp. laumondii TTO1; identical to SEQ ID NO: 121957

SEQ ID NO: 126513 - DNA, 2013 bp, Vibrio vulnificus YJ016; identical to SEQ ID NO: 121958
  CDS (1)..(2013): transl_table=11

SEQ ID NO: 126514 - protein, 670 aa, Vibrio vulnificus YJ016; identical to SEQ ID NO: 121959

SEQ ID NO: 126515 - DNA, 1740 bp, Klebsiella pneumoniae
  CDS (1)..(1740): transl_table=11
atgacgctctgtggcaggcggagatcatcgcgcgccgcgccgggcatatcgccgcgcaggaggccgtcgatgcgaacagtgcagagtgagcacgatccctttctgcgcgacttctggcgggaagagtccgcgcggctttactgggaaacggattttaccgaggtggtggaaagccttgacggcagcccgcgctgccgctggtttacgggcgggcgcaccaatctcagcttcaacgccctggaccgccatttagcagagaaaggggagaagtgcgccattattcatcgcgactatctcgggcaaacgcaccggcttagctatcgcgagctttggcagcaggtgaataccctctgcagcatgatgcaaagctggggcgtgaagccgggggaccgggtactcatcgccctgccgatgacgccgctggtggccgtcgctatgctggcgtgcgcgcgcattggcgcggtgcatgtcgtgctctattcctccatcacccatgaggccctgatgcagcgcatcgccgtcagccagccggtgctgctgttgcatagccgcgagcagcgaggccgcaaggaactgcccgttatcgccgagcggatggccggactgcgggtagtagatacgtacagccgggcatttgaagagctgttggcacgacatcgtggcaacgtcgtgccctgtacctggcttgcggcctccgcgccttcgcatctgctgtttacgtcggggactacaggaacgccgaaagggatcgtccgcgacacgggcggttacgccgtggcgctgctggccagccttgtgcatctctttcggctgcgggacgacgagattttctttacaaccgccgacgccggctgggtgaccgggcacagctacgggatctatgggccgctgctggcggggctgacgacggtgctctgcgaggttaactcgccgggagaatactggtggcagatggtggaaaccctcggcatcacccggatgctgaccattgccggggcgattcgcatggcccggcggcagggtaagccgcgcgccgatctgacctcgctgcgcacgctctatctcgccggcgagccgctggataacgccaccgatgagtgggtggccgcacagctgggggtgccctgcgagaaccattactggcagaccgaatccggctggccgctgctggccggctccggtagagcgctctcgccggtattcacgcgcgcggctgaggtggttcatcccgccagcgggaaaacctgcgcgccgggcgagacgggcatgcttgtgattaacaatacgcttggccccggcgggatgtcgacgttgtggcagaatgatatccagcacgaccagtactactggtcgtatcggcagcgacagtggcgctatgccacccacgattgcgcgataagggttggtgagcggattattatccaggggcggatggatgacgtgatgaatatcggcggtaagcgcatcgccaccgcagagatagaaaatgccctgatggggcttgagggggttgtcgaggtggttgccgccgggacggcacactacctgctgggggaaatggtggcgctgtttgtggtcaccgatatcgccgaccctgcgcagcaggccgcgctcaaaaaaaacatttgcgcccggctggtggcgagatgcggtcgcttcgccgtaccgcggcgcatccacatcacctcggccctgcctaaaaccttctccgggaaggtgatgcgccgcatactggcttag

SEQ ID NO: 126516 - protein, 579 aa, Klebsiella pneumoniae
MTLCGRRRSSRAAPGISPRRRPSMRTVQSEHDPFLRDFWREESARLYWETDFTEVVESLDGSPRCRWFTGGRTNLSFNALDRHLAEKGEKCAIIHRDYLGQTHRLSYRELWQQVNTLCSMMQSWGVKPGDRVLIALPMTPLVAVAMLACARIGAVHVVLYSSITHEALMQRIAVSQPVLLLHSREQRGRKELPVIAERMAGLRVVDTYSRAFEELLARHRGNVVPCTWLAASAPSHLLFTSGTTGTPKGIVRDTGGYAVALLASLVHLFRLRDDEIFFTTADAGWVTGHSYGIYGPLLAGLTTVLCEVNSPGEYWWQMVETLGITRMLTIAGAIRMARRQGKPRADLTSLRTLYLAGEPLDNATDEWVAAQLGVPCENHYWQTESGWPLLAGSGRALSPVFTRAAEVVHPASGKTCAPGETGMLVINNTLGPGGMSTLWQNDIQHDQYYWSYRQRQWRYATHDCAIRVGERIIIQGRMDDVMNIGGKRIATAEIENALMGLEGVVEVVAAGTAHYLLGEMVALFVVTDIADPAQQAALKKNICARLVARCGRFAVPRRIHITSALPKTFSGKVMRRILA

SEQ ID NO: 126517 - DNA, 1953 bp, Rhodopseudomonas palustris CGA009; identical to SEQ ID NO: 121960
  CDS (1)..(1953): transl_table=11

SEQ ID NO: 126518 - protein, 650 aa, Rhodopseudomonas palustris CGA009; identical to SEQ ID NO: 121961

SEQ ID NO: 126519 - DNA, 1953 bp, Mycobacterium avium subsp. paratuberculosis K-10
  CDS (1)..(1953): transl_table=11
gtgaccgccagcaacaccgcaagccccgcgtcgtatccgccgccgccgcagttcgtcgagcaggccaatgcggatgagcagttgtaccgcgaggccgagcgggaccggctgacgttctgggccgagcaggccaaccggttgtcctgggccacaccgttcaccgaggtgctggactggtcccgggcgccgttcgccgagtggttcgccgacggcacgctcaacgtcgcctacaactgcgtggaccgccacgtgcaggccggccacggcgaccgggtcgccatccactgggagggcgaatctcccggcgatcagcgcagtctgacctattccgagctgtacacgcaggtgtgcaaggccgccaacgcgctgaccgatctcggtctggtcgccggcgaccgcgtcgccatctatctgccgctgatccccgaggcggtgatcgcgatgctggcctgcgcgcggctgggcgtcatgcacagcgtggtgttcgccggcttcaccgccaaggcgctgcaggcccgcatcgccgacgcggcagccaagctgctgatcaccagcgacgggcagttccgccgcggcaagcccgcgccgctcaaggacgccgccgacgaggcggtcgccgaccccgacagcccggtcgagcacgttgtggtggtgcggcgcaccggaattgacgtgtcctggaccggcggccgcgacctgtggtggcacgacgtcgtcgacgccgccgcgcccgaacacacccccgagccgttccccgccgagcagccgctgtttctgctgtacacctcgggcaccaccggcaagcccaagggcatcgtgcacaccagcggcagctatttgacccaggccgcctacacgcactattacgtcttcgacatcaaggccgacaccgacgtgttctggtgcaccgccgacatcggctgggtcaccggacacacctacggcgtctacggcccgctggccaacggggtcaccgaggtgctctacgagggaaccccggacacaccgacccagcaccggcatttcgagatcatcgaaaagtacggcgtgacaatctattacaccgcgcccacgctgatccgcacgttcatgaagtggggccgggaaatccccgacgcgcacgacctgtccagcctgcggctgctgggttcggtcggcgaaccgatcaatcccgaggcgtggcgctggtatcgcagcgtgatcggcgccgaccggctgccgatcgtcgacacctggtggcagaccgagaccggcgccacgatgatctccccgctgcccggagtcgctgcggccaaaccgggttcggcgatgcggccgctgccgggcatctcagccaggatcgtcgacgaccacggcgaccagctggtgccgggcatccaccacggcgagcacgtcaccggctacctggtgctggaccaaccgtggccgtcgatgctgcgcggcatctggggcgaccccgaccgctacgtcgagacctactggtcgcggttcgccgagcagggctggtatttcgccggggacagcgcctattacgaccgcgacggcgccatctgggtggtcggccgcatcgacgacgtgatgaacgtgtcggggcatcggctgtccaccgccgaggtggagtcggcgctggtcggacaccacggcgtcgccgaggcggcggtggtcggcgccaccgacgccacgaccggccaggccatctgcgcgttcgtcgtgctgtgcgccgattaccaggtgcacgacgggatcgtcgacgagctgcgcgccgaggtggcccgggagatctcgccgatcgccaagccgcgggaggtgcacgtggtgcccgagctgccgaagacccgcagcggcaagatcatgcgccggctgctgcgcgacatcgccgagaaccgcgaattgggcgacacctcaacgctgctcgaccccggggtgttcgacgcgatccgggcggcgaagtag

SEQ ID NO: 126520 - protein, 650 aa, Mycobacterium avium subsp. paratuberculosis K-10
MTASNTASPASYPPPPQFVEQANADEQLYREAERDRLTFWAEQANRLSWATPFTEVLDWSRAPFAEWFADGTLNVAYNCVDRHVQAGHGDRVAIHWEGESPGDQRSLTYSELYTQVCKAANALTDLGLVAGDRVAIYLPLIPEAVIAMLACARLGVMHSVVFAGFTAKALQARIADAAAKLLITSDGQFRRGKPAPLKDAADEAVADPDSPVEHVVVVRRTGIDVSWTGGRDLWWHDVVDAAAPEHTPEPFPAEQPLFLLYTSGTTGKPKGIVHTSGSYLTQAAYTHYYVFDIKADTDVFWCTADIGWVTGHTYGVYGPLANGVTEVLYEGTPDTPTQHRHFEIIEKYGVTIYYTAPTLIRTFMKWGREIPDAHDLSSLRLLGSVGEPINPEAWRWYRSVIGADRLPIVDTWWQTETGATMISPLPGVAAAKPGSAMRPLPGISARIVDDHGDQLVPGIHHGEHVTGYLVLDQPWPSMLRGIWGDPDRYVETYWSRFAEQGWYFAGDSAYYDRDGAIWVVGRIDDVMNVSGHRLSTAEVESALVGHHGVAEAAVVGATDATTGQAICAFVVLCADYQVHDGIVDELRAEVAREISPIAKPREVHVVPELPKTRSGKIMRRLLRDIAENRELGDTSTLLDPGVFDAIRAAK

SEQ ID NO: 126521 - DNA, 1938 bp, Bdellovibrio bacteriovorus HD100; identical to SEQ ID NO: 121962
  CDS (1)..(1938): transl_table=11

SEQ ID NO: 126522 - protein, 645 aa, Bdellovibrio bacteriovorus HD100; identical to SEQ ID NO: 121963

SEQ ID NO: 126523 - DNA, 1941 bp, Bacillus cereus ATCC 10987
  CDS (1)..(1941): transl_table=11
ttgaaacaagcagtttggtttccaacagaagagtataaagaaaaaacgcgtttatatggttggatgaaatcattgggctatgaagattatgaaacgttttataataagtcaatcgaagaaacagcttggttttggggagaagctgagaaagcagttggctatcaatggatgaaaccttatacagaagtgctagatttagaaaatggtacgccatttgcacagtggtataatggcggaacatgtaatgttgtagaatcggttttatcacgctggcttgcagatgatgaaacgaggacacaaccagcacttcagtatgaaggggaaaatggaacttcaaaatcatttacatatgaggagcttgatagctgggtaagtcgcgttgcaaacggtttgaaacatgcgggtattgaaaaaggtgatcgtgtcacaatttatatgccgatgattccagaaaccgttgttgcgatgctagcggttatgaagatcggagcaattatttcaccaatattctcaggatttgcatctgatgcagtcatgacacgtgtacaagcggcagggtctaaaatgattattactgcagatggtttttcacgccgaggtaaaattgtttcattaaaagatgaagtagataaagcttgtgagcattgtccaactgttgaaaaagttgttatcgtgcgtcatgcaggaaatgattttacaccgcataattatgatttctcatggagtacgttagaaaaagaaaaaccatttgtacatgctgaagaaatgcatagtgatgatccattaatgctcatttatacatcaggtactactggaaaaccgaaagggacagtacacactcatgctggatttcctttaaaagcagcttttgatgcgggatttggaatgaatatcaaacaaggtgaccgcgtattatgggtaactgatatgggatggatgatgggaccatttttattatttggctctctcattaatggagcaacgatggttatgtatgaaggtgttccggactttccagaagcagatcgtttatgggagacagttgataaatatgaaattacacatctcggtatatcaccaacattaattcgtgcgttaatggcaaaaggtgataagtatgtaaataaacattcactcaagagcttagaagtatttgcttcaacaggtgagccttggaatccagatccttggatgtggctatttgaaacagttggaaaaagtaatgtaccaatttgtaactattcaggcgggactgaaatttctggtgggattttcgggaacgtccttattaaaccaattgcaccgattagctttaacgcttctttaccaggaatggcagcggttgtgctcgatgatcaaggcaatccgattcgtgatgaagttggagaattatgtttagagaaaccttgggttggtatgacgaaaagtttctgggaagacgatgagcgttatgtgaacacatattggtcacgttttgaaaataaatgggttcatggtgactgggttgtttacgatggtgagcaatatattattacaggacgctcggatgatacgttaaacattgctgggaaacgtattggacctgctgaatatgaatcaattcttgtaaagcataatgatgtcatagaagctgccgcgattggtgtaccagatgatgtaaaaggtgaagtttgtcattgttttgtagtattaagagataatgtaacatttactgaagaattaaagaaagaattaatgagtttagtaaactctcatattggaaaagcattatgtccaaaagatattcacgttgtagaagatttaccgaaaacacgtaattctaaagtaatgcgacgcgtcattaaagccgcttatttaggaaaagaattaggcgatttatcatcacttgtaaatcctgaggtagttccgtttattcagggattgcagtctagtaaattataa

SEQ ID NO: 126524 - protein, 646 aa, Bacillus cereus ATCC 10987
MKQAVWFPTEEYKEKTRLYGWMKSLGYEDYETFYNKSIEETAWFWGEAEKAVGYQWMKPYTEVLDLENGTPFAQWYNGGTCNVVESVLSRWLADDETRTQPALQYEGENGTSKSFTYEELDSWVSRVANGLKHAGIEKGDRVTIYMPMIPETVVAMLAVMKIGAIISPIFSGFASDAVMTRVQAAGSKMIITADGFSRRGKIVSLKDEVDKACEHCPTVEKVVIVRHAGNDFTPHNYDFSWSTLEKEKPFVHAEEMHSDDPLMLIYTSGTTGKPKGTVHTHAGFPLKAAFDAGFGMNIKQGDRVLWVTDMGWMMGPFLLFGSLINGATMVMYEGVPDFPEADRLWETVDKYEITHLGISPTLIRALMAKGDKYVNKHSLKSLEVFASTGEPWNPDPWMWLFETVGKSNVPICNYSGGTEISGGIFGNVLIKPIAPISFNASLPGMAAVVLDDQGNPIRDEVGELCLEKPWVGMTKSFWEDDERYVNTYWSRFENKWVHGDWVVYDGEQYIITGRSDDTLNIAGKRIGPAEYESILVKHNDVIEAAAIGVPDDVKGEVCHCFVVLRDNVTFTEELKKELMSLVNSHIGKALCPKDIHVVEDLPKTRNSKVMRRVIKAAYLGKELGDLSSLVNPEVVPFIQGLQSSKL

SEQ ID NO: 126525 - DNA, 1911 bp, Methanococcus maripaludis S2
  CDS (1)..(1911): transl_table=11
atgaaaactggagacaaatacataatgcttgaaaaatattcagaattacagcaaaaagctttggatgaccctgaaaaattctggggagagcaggccaaatgtttagaatgggataaaacttgggataaagcactggactggaatcctccttatgcaaaatggtttaaaggcggcagtttgaatgcaagctacaactgtgttgataggcacataaaaggaaacaggagaaataaagctgcgataatttgcgaaaaagaggatgggagctgcggaattttaacttattacgagttatatcgggaagtaaataaatttgcaaacgttcttgagaatctgggcgttgaaaaaggcgatgttgtcacaatctacatgccgatgatgacagaggcaattattgcaatgctcgcatgttcaagaattggggcaattcacaacgttgtattttctggattttcttcagatgcacttgctgatcggataaacgattcgaaatcaaaaatattggtgactaccaatctcttatacaggcgtggaaaagagattgatcttaaaaaaatattggataaagcattattgaattgtaactcaataaaacacgtagtttatgcaaaaagaggcattgaagaatttaacttagtttctggaaaagagtacttctgggatgaattaatgggcggtgctaaaagctacgtagaaccggttcccgtggagtctgaacacccgctatttattctctacactagcggtacaactggaagtccaaaaggtgtagttcattcaacaggcggatatttaacttatgccacaaaaaccatggattggacatggggattaaatgaaatggatgtattttggtgtactgcagacattggatggattactgggcacacttacgtagtatatggtccgctttcacttggtgcaacgatagtactctacgagggtgcaatagactaccctgaacccgacagattgtggggtattgtagaaaatcatggggttacaattctttatactgcaccaaccgcgataagaatgcttatgatgtacggtgaaaaatgggtaaatactcacgatttatctacattgaggcttttgggaagtgtaggggaacccataaatccaagagcttggaaatggtattacaaagtaattggaaaagaaaaatgtccaatttgcgactgctactggcaaactgaaactggtgggcatattatatatcctccaattggaatccagtcagttccattaaaaccgggttcagcaacattccctggaatcggaattgatgttgatgttgtagacaacgaaggaaaccctgttgatgcaaatgtaaaaggaaatctaattataaaacgaccctggccaggaatgcttgcaggactctggaacaacgatgaaagataccgtgcggcatattgggataggttcaaaaacaaattttcaacatctgactatgcaataaaagatcaggatggatacatttgggtactaggacgatctgacgaagtattgaatgtttcaggacacaggattggaaccgcagaactcgaacacgaacttgtatcaaataaaatggttgcagagtctgcagtagtcggaaaaccagacgatgtgaaaggagaagttcctgttgcatttgttatattaaacgaaaaataccgtgaacttccatcaaatgaagtaaaggctgaacttatcaaacatattcgagatactgtaggcccaattggaactcctgcaatgatattctttgtaaacaaacttccaaaaacaagaagtggaaaaataatgagaagaatattgaaaaaactcataatgggcgaagagataggcgatgttaccacattggaagacaatacaagtttagaagaagttaaaaaagagcttgaagatttcaagtatgattaa
